United States Patent Application Publication US 2022/0090207 A1 - sequence listing, part 10

SEQ ID NO: 124962 - DNA, 300 bp, Homo sapiens
  chr14:76819084-76819384
  hyper
aacttttctatgtcctcggccccggttgctctgagctagctgattggaaagccctaaccctcgaactccgggctttctgggaacgcgggctctctcccctctttccctccgcccccacgcgcacacaggcgagcaccgtccgcccttcctagttcccaccgcgcgcccctcgctgagcgctccgcacactctgagatccagcgcgccctctggtggcacacggccccgaatcgccgcgctcctgcgggccgcgcgcagggtcgccgggtaggcacaggcacgtcccgtggccacggacct

SEQ ID NO: 124963 - DNA, 381 bp, Homo sapiens
  chr14:76842492-76842873
  hyper
cccagcctcctccacggcttcgcatcccctctgcccgctctctccggagcgtgcggatgagtggagagctgggctgtgcgcgcacggctctctgcctccctctcccccgccgcggccgcctcctcccactctgcgttctcgcgctcactgtgccctgcccgggctcgcaccttgcccgtgcccttcactcgctcttccgcgtgatttccccgccgtctttctctaccaactgggaatgctaaaacgggactgatggacgtgtccgaactctgcatcccggaccccctcggctaccacaaccagtaggtgccctgcttctcggtctgtctgtccttctgcccgtctggcagtctctgtcctggggatcgcagttccttttct

SEQ ID NO: 124964 - DNA, 158 bp, Homo sapiens; identical to SEQ ID NO: 51514
  chr14:76843227-76843385
  hyper

SEQ ID NO: 124965 - DNA, 263 bp, Homo sapiens
  chr14:76843732-76843995
  hyper
cgctccacctgctcgggtacctgcccgggtctccccttgggcgctgcgcaccccacggcgcccccggcgggtgtcccggaggcaggttgtgtgcgcgtgcaaagtggtccctcggaaggcttaataataataatacataaaactctaggttcttacggacagctttcctgcttaactttgtgctcgtcttcctcttttttttctgacgcaaactaaattctccaagtcagcgtttctccagttccaccgtgctttcatttgtg

SEQ ID NO: 124966 - DNA, 345 bp, Homo sapiens
  chr14:77227530-77227875
  hyper
gctcagggcccctgcgaagaatctttttcaagaaattcccgaccgcaggaattccttctgcgctaggaatctccatggagtttgcgctccctctggcacgttgaaaacgtcctccgcagcttcgcaccggcttcgcggcgccctgacagctgggtgaggagggagcgaatgcccaccggcgtccttggggtaacttgggacagaggcaccgccgcggggggcggaggactgggcgcgaaggcgctggccctttaagggggggacggagcgcatgcgcggcgcgggccgtagtcgagcctggtgggcggctggctggcaggggacgtggtcggcggcagcggggcc

SEQ ID NO: 124967 - DNA, 212 bp, Homo sapiens; identical to SEQ ID NO: 51517
  chr14:77228493-77228705
  hyper

SEQ ID NO: 124968 - DNA, 30 bp, Homo sapiens
  chr14:77279393-77279423
  hyper
gaattaaaattgagcgcctcactggaggcc

SEQ ID NO: 124969 - DNA, 30 bp, Homo sapiens
  chr14:77413713-77413743
  hyper
ctcgcagcgcctcccggggccggccttttc

SEQ ID NO: 124970 - DNA, 482 bp, Homo sapiens
  chr14:77422359-77422841
  hyper
atgtcctcctggtgtcgtttttaatagctcatcctttcacaatcaagagtggctcatgccggagatgagttacccgcaatgaggggctggatttattctaagggcagagggaagccatcacaggaaatgatgtgattgatgttttgaaaagaactcgctggctgttccgtgaagaataaattagaggggcaggagggaagaagtctgcctggggcggctgcagcaacccaggcgtgctgcgaggtgccctttgactagattccagtgggggctttcgggcgagcagaagaaccccagggatcagctctagccacgctcagctccctgggccggccctgggcatttctgagacggccctcgcgctcagggacctctcctcgcagttccattgtctgttcttgcggagtcctgccacactgggagggccaccccctcctcttgctcccctcccctccccgggtccagcccctcccctgcctggc

SEQ ID NO: 124971 - DNA, 362 bp, Homo sapiens
  chr14:77428118-77428480
  hyper
gtttctactatttggcggaaccttgaatgcaggggggcgggacagagaaaaaactagaaagctcgacttctgcctgcggggccggaagccccgctgcggccccagcccgcggttagcccctgtttgtcattttgcaaatctggtcaacccacctccggtgaaaactcccaacctcaccccagggggcaatgactaattacaaaacacattttctctcgttttcgtcaagctcgctgtcccgcccacacatcccccgcctatcccggcacccgtcggcttcctcaggagcctcactcaactgtgttgaatgaactcttggcctggtccctcccccagagacttcacaccgtggggttctttcc

SEQ ID NO: 124972 - DNA, 366 bp, Homo sapiens; identical to SEQ ID NO: 51519
  chr14:77493393-77493759
  hyper

SEQ ID NO: 124973 - DNA, 30 bp, Homo sapiens
  chr14:77495163-77495193
  hyper
aggcaaggcgcatgcgcggcaggacgccca

SEQ ID NO: 124974 - DNA, 283 bp, Homo sapiens
  chr14:77499643-77499926
  hyper
cctaaaggagtaatcccggtatttgaaaaaaaaaaaaaaaaagtattaacttaggccagggcgtagggttacgcaagagccactcgagcatgaaatcccaggaacaacgtgattcgctgagaagccccgggggaggaaagcctgcaccgcctgccaggacctgcccagcctggggcgcgcgggcagccgggctctccgtgcaaaatcgggtggaaggaaaaggagagcgggcgtagtgtttagtgcaggcacagtggccacagcgagcgatggatctctgact

SEQ ID NO: 124975 - DNA, 30 bp, Homo sapiens; identical to SEQ ID NO: 51521
  chr14:77506690-77506720
  hyper

SEQ ID NO: 124976 - DNA, 148 bp, Homo sapiens
  chr14:77519689-77519837
  hyper
taatacaccactcgtcgggacaggattgcaaagggggcctggggaggtgagcccactggaaaacaatgtgtgcgcgccccctgctggctgcgagcagaggtcccgcctgtccgctgggggtcttcaggtggttcgtgttagcaccacc

SEQ ID NO: 124977 - DNA, 202 bp, Homo sapiens
  chr14:77564277-77564479
  hyper
gctcctctgaaccccgcctggaaaccttgcccaagccgctcattgctcaaggcccccgtacaaaatggcggcgaggcctgaggaaccaaccatagagacgcccgccggccgcggacagagcgtaggcctctgagcgctggccccgccccgcgccggcctggtcttccggcgggggcggggaaagggcgcatttccaagggcc

SEQ ID NO: 124978 - DNA, 827 bp, Homo sapiens
  chr14:77591040-77591867
  hyper
gagctcaggaatggtcgctattgtgacaaatagaaaacccgccaggagacagagaggaggtgggtccctggaccgcggtggcacatgagggctaagaacctcccaggaggggctgggctcggagcgcgctctcggagacgcggtgatgcgcggggcccgggccgtggacaagactgcagtgtcctgcactacctgccgcccactcatcaggccgattctcctcaccttacgcttagatgagtttcgagtaagaccactgctggcatcaagagtctgggcccatgatctcgccctttcgggctaggcgaggcagacccaggttggctgcggcccgcggtccccgcgcagccaacactggcagccaagcgcggggcgcgcgcgccgggagagtggagcgcggaggcccgacggcgccccctcccggcgggcccgagccacggccgcgggctctggcgggtgccggggaggccacgcgcgacggcgtcgcagccggagcccagacagacgccccacgctgcgcggccttcatcccacggctggggcgatggaaaggtggtcccgacacgcgcaggggtctgaggaatcggcttcgggattctgtggtctttgtggtccgcagccggcaccactgcttcctgtaatttaattttctctcccgaaagcgttgctaattaaatcctttctccggcgagccgtcgccccccgcccctgctagtctgtttattaagtacccggcacctgcgagggaatttttgccctcggcggccggcgggtcaggtggaggggccgcgctgccccttagctgcgcctcctggcttccttcccca

SEQ ID NO: 124979 - DNA, 153 bp, Homo sapiens; identical to SEQ ID NO: 9865
  chr14:77600264-77600417
  hyper

SEQ ID NO: 124980 - DNA, 671 bp, Homo sapiens
  chr14:77605687-77606358
  hyper
agaggcagaacaggacgaagttgcgcatgttcctgctgccgatgcagttgccggtgaagaaacagtgatggtcgtgcctcagggtgactctggcgcacactcggcagaagtgggtgctaggtgaggggcatggagtcttcctggccgaggccccctggcaggcccccaggtcgtctggggagttctggatgacaaggacgtaattgcccagggcgttggccgagaggaataggaagagcgccccgtggagcagggcgggcgagaagagccgggcggccgcggggtcctcgcgcatgctgggcaggaagaggaagagctgcagcacgaaggtcaccagggagatgcacaagaagtaggcgggggccaccacgttgagcagccgcagggccagcatcctcgattacattcctgcggggcccggggtgagaagaggactgactgactacggcgtccagggggcgccctcgcccgctcctccgtgccgcgcgtctggggcactgcacgcgactccacgcccccaaccccctgtcccgcggatttcccctccccagttccctaaccccggatcaggcaggccagagacccgagcccgcagcggcctcgggtctaggccccacctgggggtgagtgttgcctggggttttgagcgagctcggcgccttggcgcggca

SEQ ID NO: 124981 - DNA, 276 bp, Homo sapiens
  chr14:77606579-77606855
  hyper
tttctccgtccctgcgtccccacccacacacacatcttgggcagcactcagggacctcaccaggttacccaaggctctttggaggtatgtgtgcgtgagggaccacgatgtgtgtgtgtgtgtccttgtctgtgactctgtacgtgtaatctgtgtgcgcttgagtatctgtatttgtgtatgtatatatctgcgtgtacagacacgcagcctctgctatctagctttaaaaaaatcaattgaaacaatcgatacactcacactcgctctcgggca

SEQ ID NO: 124982 - DNA, 1397 bp, Homo sapiens
  chr14:77606921-77608318
  hyper
cgctggctgcccgggctatttctttgcgaagagcgttttcatttgaggcgaaattaaaatccccccttcgcgcccgcctcccgccctcctgctgagagaaacccaaacaaccctcatggcgccgaaatcctttccatgccgacaagcccgccctgggcgcacgagtggatgcttggccagcctttcctgggatcgaccccgccgccgtgctcagccctcaccacgtccccatcccaccccacgcctcacagccggggttcctggccagcttcggaagccaccgagaaataggattccgtgcgcccgagagaacttttccaggggctaaggaatcggccagccggaggcgcgagaaaagttctgggaaggcggttgcacctaggatgggtggatgccacggggcctccgtccaggctgtcccgtccgcacgggtcgactggtcaccttggaatcccctttgcaggtcccagcgccccccgggaacccgcagcctccgcggagagcgtgggcctctccctaccgctggggcgcagcgcagtgcacgcctgagggtggtcgccgggggctgggcacgcccccagtcctgcgccgccgggggctgcggcggtgctgcccaccccagagagccctcggcctggggctccggcgaagcaagtgccttcccggcgccggtcgccaggggggcgcgggagcagccagatgcgccgcagcgctgggaaggcggcgaaggacaggggctaggggagtgaggggcgctcggcaggcagcctcagccctggccctgcgcgggagaagggacagcagagaccgcccgtggggccccggggtgtagggagctgtccgttcagccctggcgcccgcctcgcccgcggcagagggcggcacagccggagccttggaaagaccggcagcgccggcagccgcgggcttctcggccactgcctcccggacgcacgggaagccgccccccgcgccgccgccgccgcactgccgccgtcgcagaggggtgaggaaatcaactcaccgagctctggtcgccgacaagaggagccccggacgccggctctcgccctgcccgaggctgcaaagttgtggactcggcccggctggctcgcagcctgcgcttcgcttcgggaactgggcaagtagcggggatgtggggaggagggagcgggcagctgctggcttcccacttgggcgccagcgagtaagggccaggaagcggcggggatggcagctgggcaccccccagccccgccacccctccctccgctcctgggggcggtgctctggccgccagtctcagcatcgtggacttgccccctcctcccctctcgattccccttgagcgggctggggcgccctgcctggtttcagcgcccgttccagctgggaga

SEQ ID NO: 124983 - DNA, 566 bp, Homo sapiens
  chr14:77647940-77648506
  hyper
ggagcctgggtcttcgcgtaggatctgccagcctgggttccccggcaggtcagagaagctttggggcggggccaaggttggcccctgcttgggaggagccgggatgcctctctcacagtgatgcagagaggaatttgctgacagtcccttgccaggtggggctggcttcgcccagccggcgaggaggaggacccgctggcagtctcctcccaggtggggagcgtggagcctgtcactgcagcctggcggcctgagcgccgagcctggggctggggccgcggtgctgaggacgcaaatgtggtgagcacgcgatgcgggtgcggtgaccggggctggtcgggccgggaagaaggggcgccggatccaggtcccgcacggggagggggcggggaaggattgcttgtttctgtgctttctgagaccttgcattgggagggatgggggtaggggagactgcgccacagtcccttgccacgctggctgtctctagcttgtacccaggaaagggtggcctgagccgcccacccgggagggcgtggctttagtagaccggtcttcactgggtt

SEQ ID NO: 124984 - DNA, 31 bp, Homo sapiens; identical to SEQ ID NO: 9869
  chr14:77680058-77680089
  hyper

SEQ ID NO: 124985 - DNA, 138 bp, Homo sapiens; identical to SEQ ID NO: 51533
  chr14:77736728-77736866
  hyper

SEQ ID NO: 124986 - DNA, 285 bp, Homo sapiens; identical to SEQ ID NO: 51534
  chr14:77736883-77737168
  hyper

SEQ ID NO: 124987 - DNA, 441 bp, Homo sapiens
  chr14:77737210-77737651
  hyper
cgtgctccagcgggctgcggctcactgcccgccagctctgccggatcagctcgggctccgggcgctccatgctgtcccggggacgcggagcgcggggctgggaccctcagggctcgggtgccgtcaccgcacgtgccgcgccatctcctccgcgacgcggtcccctccgcccctcgtacgccccccgtgcctccgcccggcgggggccgcagccgctccttccctggcgcgggagagaaaaggcgcgcggccagtcgtaggtggagacaccccagctgtgcttccggggaccccgcttggccgctgcgccctgcgccccgcagccgccagagccgccccaccccgcgacgcctgggctgggcgctttaaagccgccacggcccccgccccctccaggccagcaaggcgcgcgctccctccgccagccgctatggtggcctg

SEQ ID NO: 124988 - DNA, 53 bp, Homo sapiens
  chr14:77787313-77787366
  hyper
gcagcccccaggtacggggcgtggcgggagagctgggcgagccagaggcgacc

SEQ ID NO: 124989 - DNA, 34 bp, Homo sapiens
  chr14:77787593-77787627
  hyper
gaagtgagctgcaccgcccgcccaggccgacaac

SEQ ID NO: 124990 - DNA, 30 bp, Homo sapiens
  chr14:77842982-77843012
  hyper
tgaagctgaagaggcgccaggggcagagcc

SEQ ID NO: 124991 - DNA, 185 bp, Homo sapiens
  chr14:77843605-77843790
  hyper
gtgcttgtgacagacgatttttaaagtcagggcttgaaagaacaaacaaaacctggggaagagtcaggaagacactgccggaaatcgtggtatccatagagacgctatcggaagttggggttgctaggaagccgcggcgcgtctgctaagctgcaaatggctgaagtcccggaggattatgattc

SEQ ID NO: 124992 - DNA, 30 bp, Homo sapiens
  chr14:77923686-77923716
  hyper
cagcgcccaagggtcgccctgactgaaaga

SEQ ID NO: 124993 - DNA, 30 bp, Homo sapiens
  chr14:77923953-77923983
  hyper
gcggagagaaaacacgaataacgagaccgc

SEQ ID NO: 124994 - DNA, 30 bp, Homo sapiens
  chr14:77924300-77924330
  hyper
atctctaaatcaggcggaacccacggtgcg

SEQ ID NO: 124995 - DNA, 30 bp, Homo sapiens
  chr14:77924580-77924610
  hyper
gcggacgccaccaacgtcaacaactggcac

SEQ ID NO: 124996 - DNA, 637 bp, Homo sapiens
  chr14:77964581-77965218
  hyper
tcagcggccctggcccgccactccgcaaagcgccagattcctcgcaccggcgggactcctctccgagctagcgcgcacctggaaagggggctgcaggcgaggtccgctcagggcgaggaagcccggccaccgtggagtgtcggccacctcactccgcacagaagtcaaacttgtcacccggctggtccgcggcagcccggctcgcggtcacgcgcgaggagtggaagccccgaagtccggcgcacctgggcaacgcccggtgtccgggagcttccggccggccccggcccctctctccatcggggggtcgctgcctgtgtgtgtcccggtcccgctccccgcacggctggagccggcgggctggggaggtgggaccgacagcgcgctccgcagcccggtgccgccgccactcacctctgcgagcctcgtgaggctcccaggccgtggtccgcggagccgcggcttcttcacggggagccctagcgccgcctccagcagcgccgccagcagcagcacgcagaggaggagcccggctcggtcgcggagcgcacgcatcgtctcggttccgaggctgctctgcctgcacctctgcacgcggccgcgaacccagtcgcgccccgcctcgcctcctccgggg

SEQ ID NO: 124997 - DNA, 408 bp, Homo sapiens
  chr14:77965244-77965652
  hyper
cgcggggcacggggccgcgcggggcgggggcgcgcagctcgcacagcctctctggccccggctcctcgcgtgggcgcccgcacagctctagggtccgcgcacctggacgtcccccaccctcctccgaggggcccctcggcgctccccgacccgtcttgaccctgtgggcggctctctttgatctggccgcctccccgccctcagtccccgccgctgtcgccgtcgcagcccccagcgaattcctgttcgcgggaagctgcggcccggcgcgctccggccctgcgctgcgactcctgcggggccctgagggtccgacgccacctctgccctccccgaccgcgctccaactgcgacctggaccggcggtgccgcgcgggcgagggaggcgcagcccgacgggagagtggc

SEQ ID NO: 124998 - DNA, 30 bp, Homo sapiens
  chr14:78083401-78083431
  hyper
aaaaggggctgagccgaagtctctagagcg

SEQ ID NO: 124999 - DNA, 30 bp, Homo sapiens
  chr14:78173995-78174025
  hyper
attgctaagtgtgacggttagtggggagtt

SEQ ID NO: 125000 - DNA, 30 bp, Homo sapiens; identical to SEQ ID NO: 51539
  chr14:78174727-78174757
  hyper

SEQ ID NO: 125001 - DNA, 30 bp, Homo sapiens
  chr14:78227012-78227042
  hyper
cacccagtggacagcgaaaggagagagacc

SEQ ID NO: 125002 - DNA, 30 bp, Homo sapiens
  chr14:78227331-78227361
  hyper
gtagtcttggcccacgtcattctgtgcccc

SEQ ID NO: 125003 - DNA, 56 bp, Homo sapiens; identical to SEQ ID NO: 51540
  chr14:78266693-78266749
  hyper

SEQ ID NO: 125004 - DNA, 255 bp, Homo sapiens; identical to SEQ ID NO: 9872
  chr14:78432196-78432451
  hyper

SEQ ID NO: 125005 - DNA, 30 bp, Homo sapiens; identical to SEQ ID NO: 9873
  chr14:78624566-78624596
  hyper

SEQ ID NO: 125006 - DNA, 30 bp, Homo sapiens; identical to SEQ ID NO: 51543
  chr14:79033021-79033051
  hyper

SEQ ID NO: 125007 - DNA, 642 bp, Homo sapiens
  chr14:79745138-79745780
  hyper
cagattcccatcattcgccctgcgggaggggccctgggcattttaaccccgggagacacacgcgcctggagagtggtcgcccaagccaccgccaggcagggaggagcgcgcgtgcggcaccaccgcgtgcagcagctccagcgctcgcgctgcctcaaggggtttatttttatttctatttggagctacttcggccttagccgccgcccttacttttcctccgaaattgtgagaaggtgccttcatggctggagtttggtttcacgcgcctgggagaagagcagggcacgggtgataaagaaggcgcagtgtcggtctgtcggtgtcacacacgcgcgcacacacggcggggcgggagccgcgcgagcgagaggagggcgggcggcgtgtgctggaggctcgcgcgggtgtatacgagcctgtgcttgaatgggaagggccgggattccgggtcgctctggcccctccttcctccggagccagccagtccctcggcagagcgctggggctgcactgatttgctctcgggagtgcgctatttgcatatgacttgcccatttgtgaatttggctccccaactcctcgcttcacttcacctgtgcctccctggtccgcgcacttcgcaggcgcccgcccgcctct

SEQ ID NO: 125008 - DNA, 30 bp, Homo sapiens
  chr14:79745998-79746028
  hyper
gcggctgctccgtggcgctagtccagcacg

SEQ ID NO: 125009 - DNA, 30 bp, Homo sapiens; identical to SEQ ID NO: 51546
  chr14:81407696-81407726
  hyper

SEQ ID NO: 125010 - DNA, 30 bp, Homo sapiens; identical to SEQ ID NO: 51547
  chr14:81407973-81408003
  hyper

SEQ ID NO: 125011 - DNA, 333 bp, Homo sapiens
  chr14:81421282-81421615
  hyper
cctgaattgcctcgcggagccgcgggctgcaacgtgaggcggccgctgccagtcgactcaaccaccggagtggcccctgcagttggatagcaacgagaatcctccaggggtgcagggcgacggcttcggccgcaccgcgggctagccagggctgcgtgcccgcctctgaccctcagcagaggtgtctctggccaggaggagctgaagttctgcaggacattggtccgcccgcggacagtccactccgcggggactttctctggataaggagtgcgtgcgagtggctcccaggcagacagggtgtctagaaggctacacgctagggaaggtggc

SEQ ID NO: 125012 - DNA, 31 bp, Homo sapiens; identical to SEQ ID NO: 9876
  chr14:81685635-81685666
  hyper

SEQ ID NO: 125013 - DNA, 30 bp, Homo sapiens
  chr14:81686118-81686148
  hyper
tttcaaggcgaaagcggggacacttggacc

SEQ ID NO: 125014 - DNA, 30 bp, Homo sapiens
  chr14:81686381-81686411
  hyper
atcacgatgggtctcgggggttcgcccgat

SEQ ID NO: 125015 - DNA, 30 bp, Homo sapiens; identical to SEQ ID NO: 9877
  chr14:81686842-81686872
  hyper

SEQ ID NO: 125016 - DNA, 30 bp, Homo sapiens
  chr14:81687109-81687139
  hyper
aggggtccggggggcgttgcccgctcccca

SEQ ID NO: 125017 - DNA, 42 bp, Homo sapiens
  chr14:81687739-81687781
  hyper
cgtggcgtggcttccggcctctggcgcgttcctattcgggaa

SEQ ID NO: 125018 - DNA, 1269 bp, Homo sapiens
  chr14:81901892-81903161
  hyper
agcgtcgggagaggcggggaggcaggcagagaccaggagctgcacaaaagcacagttaatgattcactcacagccctcaggcagctccttccagtaggggttgcaccagaacacacggacgcgcacacacacgcacgaatgcacacacacgcacacgcgcgcgcacacacgcactctcatcttcaactcttcatcccagcgagaggcgggtgtcaggcaaattgcttggcaacgcgcagagaaaactccatccaagccccacgtccaggccgcctctgggcgctgtccagcgggcagagcgcctgaggccaagctggggtcctgcctcccgacaccccgaaggcggggcgcggcgccaacccggggtttcaggcgaggggagtgtaggggaagcaccgtccccagggacacctgttgtcgcctccccactcgggccgatgaagacatcctgggcgtcccaatctcgaagacacccgtcggccagaagtgtctgtgtatggggccaggtgtcgcaggagtcctcctccacccctacctgccttaagcagagtcccctcgtcctcccccaccccgggacgcccgcggctggtggaaacgccgcgcctccgcgtggctcgaccaggcaggctcgggggcgccagggggcacagcggcgctaggacctcgcggccggcccgcccccgcccccgcccccgccccccgcccgctccacctgcggggcccctcttggggggcgcgctcgcctcctgctgcggggcgtgggtgcagttacctgcgccgcggtccgcagggtccccggcgtccgccgaaaggtcgccgcggcaaagccggcttctctggccgcgggatacccacccggccgcactgctctcgccacgatccctcccggccgcagcgccgacgccggctccagactcgagctcgctctgcgcccgccggctcccggcgccgctcccgccgctcctgattggccgcggcgcgctcccgagccgcgccatgattgggcagccggggagccggggcggggggactggccgggcgccgccgggatctgctggccaagcttcccgcgccgcagactcgctttcccgcggctcccggggccccaaccagaccccgaagctgggattcttcccctctgcgcctagtggggccggccgtccaggcacgaggcaacacggaaagcatcgattcgagcgacatggaaatggcgtggaatggggagcgcatgggagtcccacccgctccgcctgcgggctggtagttgag

SEQ ID NO: 125019 - DNA, 54 bp, Homo sapiens
  chr14:82000011-82000065
  hyper
tactgacccgaggacgccgaggccaagctcagcagcaccgcacacagcagcagc

SEQ ID NO: 125020 - DNA, 149 bp, Homo sapiens
  chr14:82000297-82000446
  hyper
ccattgctccgccccgggggtcattcattggccaatcattgtacgaagctcccacaccagctttctcggttggaccacgactcacggacatggccccagctaattggtagcccctgggttcaaccggaatcagcgcgtgagtccaagac

SEQ ID NO: 125021 - DNA, 716 bp, Homo sapiens; identical to SEQ ID NO: 51556
  chr14:85996079-85996795
  hyper

SEQ ID NO: 125022 - DNA, 41 bp, Homo sapiens
  chr14:85996891-85996932
  hyper
cgttgccaggtgaagtttccagtaaccggccgagctgctgc

SEQ ID NO: 125023 - DNA, 428 bp, Homo sapiens; identical to SEQ ID NO: 51557
  chr14:85997497-85997925
  hyper

SEQ ID NO: 125024 - DNA, 388 bp, Homo sapiens; identical to SEQ ID NO: 51558
  chr14:85998186-85998574
  hyper

SEQ ID NO: 125025 - DNA, 106 bp, Homo sapiens
  chr14:85999425-85999531
  hyper
actgggtagcagccgcgcctcccaagcattctttaaaccagaaaagtaggagggactccgggagagagggagggaatgagggagggagagaaagagggctccagga

SEQ ID NO: 125026 - DNA, 133 bp, Homo sapiens; identical to SEQ ID NO: 51560
  chr14:85999596-85999729
  hyper

SEQ ID NO: 125027 - DNA, 654 bp, Homo sapiens; identical to SEQ ID NO: 51561
  chr14:85999838-86000492
  hyper

SEQ ID NO: 125028 - DNA, 143 bp, Homo sapiens
  chr14:86000927-86001070
  hyper
ttgccacgactgtccgtatgtgtgtctgtgtgtgtgcgtgtgtttgggggagggggttagtggtgttgcagagaggcggaatttttctcggtggcctgatgcgcagtggtcctaaggtagtgagtggccgcgtgtgcgcattg

SEQ ID NO: 125029 - DNA, 170 bp, Homo sapiens
  chr14:88458956-88459126
  hyper
cgactgccatctccgcgatgaagacagcctgtgccccactgcctgggacgagggttccagccccggctacttcactacttagacctgtcactttactctctgcacctatactctctggacctccggatcctcatttgttcaaacctaactgcctgtctggttcgtgttaa

SEQ ID NO: 125030 - DNA, 539 bp, Homo sapiens
  chr14:88459170-88459709
  hyper
cgcctgctgactggcaccctaggggaatgcggcggagagtggagccggtggaaacgcagggcaacgccgcgggggcttgtggggctggccccacggggcgggctcttgccgccccccgcgtatccccgcagcttgccgctcaccccgccgccgctgaccgcgccgatgccgtcgaactcccggcccagcccgtcggagtcgtcgagcacgtacgcgccgccgggcgccagcagcgcacacagcagcaagggcaccgcggcgcggcccgccgaacccgcggccgcagtcatagctttcgctcggcgttgccaggaagccgagagtagccactcagccattgtgtgggtcacatgactccggcgcccagggaggcgggtcccgtcgccgccacgatagatacgggcaggaggccgctgatgctgacgccgccgccgccattttgagtgcgggtcaagggcctctgacgcagctggcggagtgttgagaaaagaagcagcgagctttttcttatcgctcgcgtgtctgtggtcagctactgg

SEQ ID NO: 125031 - DNA, 859 bp, Homo sapiens
  chr14:88789387-88790246
  hyper
aaaaagtaagatcggcgaggggtggatgaaaggatggagaggaaggcttggggagatggaagagccaagctgcttcccaaaagcggtgccggcaggttaggggctgcgcagcctgaaggctggggctacggagaagcccactgcagtgtcactccagcccccgaaggcgtgtgcgcacacactcccgcacacacacacccgcacacacactcccgggcgcgcgcttgggcgggcacgtcagcctcgctcggccgcgctgagcgcacacgccccaccccggccgcggctcctcgcccccggcgacgccccccacttcccgctccccgaaagccattggatgtaggggtggcgcggcgcccgggcagcgcgcggcgagggcgaccctccccgcggcgcgccccagacgccgcgccccggcaagagggagcagggcgagcagcggaccgaggctcccagctgggaaggcgcgctgagcccccggcacccggctcggggcagcgggaggcggtcgcggacttgcccgcggggcggcgggaggcggtgggcggtggcggggaagccgcggaggggcggggaacgagcggtgggcgcgccgctacttactggctcggccggccggcgggcgggcgtggaggcggcagcggcgcgcttgctggagttgcagccggagacacgcttggttgcctggaaggcgctgcaggaggcggaggaagggccgctgcggctccgccgcagacctcggcctccgggtcacctcttctcaccgctctcaccctgagctctccctccttctcttttctcacttcattttttttcctcccgcgtctggctctctcgcctgagtcccgaacccacgtcc

SEQ ID NO: 125032 - DNA, 208 bp, Homo sapiens
  chr14:88790298-88790506
  hyper
cgctccgcatctgctgcgctctccccgcccggggaagctcgctcccaaggcacagcttggtcccttccccagctacctgcagccggactggggccgctggtcgttggctggaaaggaggcttgagagaggcacgggggcccccggaggaaagcggagttgccaagacccggcagctcccggaagcggcggccccgggatcctgggacc

SEQ ID NO: 125033 - DNA, 484 bp, Homo sapiens; identical to SEQ ID NO: 51566
  chr14:88792791-88793275
  hyper

SEQ ID NO: 125034 - DNA, 155 bp, Homo sapiens
  chr14:88851823-88851978
  hyper
tcctgacaggaggtcgctctgcggaagactggcaggatcccagagcaacagactggggctcgatgccccttccccgccaggtctctccgtccgcaactgtcctcctagtaccgggtatcccgcaggcggggctgcggaacgcacgtcccctgcgc

SEQ ID NO: 125035 - DNA, 30 bp, Homo sapiens; identical to SEQ ID NO: 51567
  chr14:88852269-88852299
  hyper

SEQ ID NO: 125036 - DNA, 783 bp, Homo sapiens; identical to SEQ ID NO: 51568
  chr14:89020630-89021413
  hyper

SEQ ID NO: 125037 - DNA, 353 bp, Homo sapiens
  chr14:89029587-89029940
  hyper
tgggcccgggtggacgccgcggcctggcctccgctggacgctcctggcgggctgcggctcctcctcgtccaggccgcctcggccctggggacatttgcggcctcggagcgtggctgcggctgaagtagccgccgggaaatggaaggacaggcgcaggcccggctggagccaccaccgcggcgcacggcgccgctttggatccgctgcgggaggtgggcgccgcggggctggggctggagctggagtggggtgcggggtggggggcggtgcaggcgaggctcctcccagcccccgcccgggggatccgaggtgcgcgcaccagcaaagtggcctcagccgctgcagagtccggt

SEQ ID NO: 125038 - DNA, 377 bp, Homo sapiens
  chr14:89258193-89258570
  hyper
cctgggcgcgctccccgggagcagcccaccgcttgctgtgcttccatcagtcctttattaggtaaagggtttccccccaccccgggtgctttaagaatgcgtttaataagaaatttctcacaggatctaacggaataaagtgccaccaaaataaccttttcgcagttttcgtaattgtgatggagtgggaaaggggacaaagccgtcaaaccgggtgcccggtggatccgcggacctgatcttcctgcacggacccgagagagagtccctagacgaggaagaggggaaaggcatttgtagggtgttaactggtggactcgggaccagagagacagctgcggattcccctcggggtgatgctccgtgcaggagcggtc

SEQ ID NO: 125039 - DNA, 30 bp, Homo sapiens
  chr14:89259149-89259179
  hyper
cgagagcgagggcccgcctccagctcctca

SEQ ID NO: 125040 - DNA, 30 bp, Homo sapiens
  chr14:89259536-89259566
  hyper
cgggaagcacctgccggttccgcacggtcc

SEQ ID NO: 125041 - DNA, 726 bp, Homo sapiens; identical to SEQ ID NO: 51571
  chr14:89290489-89291215
  hyper

SEQ ID NO: 125042 - DNA, 30 bp, Homo sapiens; identical to SEQ ID NO: 51572
  chr14:89291496-89291526
  hyper

SEQ ID NO: 125043 - DNA, 935 bp, Homo sapiens
  chr14:89493263-89494198
  hyper
ggtctggagcgtgtccgtgctgggcccccggagatgatttctggaatcgcgacccggggacctgaggccactctgggacctgcgaggcagttgttgcccaaagacaaggcctgggtacaggagctcgggaagctctctgctgcccgtctccgttatccacgttcgtctgggcaccctcctcgggtgctgcccattattcctcccgcacctgccggatccaagagtagacgcagaacccggacctcggaatgggacgatgcgacgggcggggaaggcctggcccggccgaggtgccctcggccccgccctccaccgagggcagggaggcactgcctccgctccgtccactcgtaactggtgacgctggcagccccgccggggggcggggggagtgcaagaaaatcctgaggtgtgtcgggggacctggaccagatgccctcctgcaccgccctagctccggggaagtcgctctccggctccgcggcgcgggacccgccagcgggcagaggcgcggcgctttgatgtcgcgcggccacacggtggcgctgccgcaccgcccgctggcggagactgggggccaggggtgcccggggtggggtggagccgggacgcgcgcactccccagccacgcccggggctcatcctggaacccgggcgcccgcagggtcgcgaggccaagtgtaggtcattcccctccccgcgggacccgtgcctggtggacgcatcgccgacgcggaccctgaacgctcacatgagatccttagggaaactgaggccgaagaattgggaatctgcatttagtccactctcctgtccgtaagaagaaaggggcgcgactaaggggaagggaaggagccacagggattcattcccagccggtcccagtagccgccacaacacccggcaggtccgagttaatccgttctgcaagctag

SEQ ID NO: 125044 - DNA, 239 bp, Homo sapiens
  chr14:89506860-89507099
  hyper
ctagggggcgccagcgggcttgttttccaggatggccctaaaattctctccagcgaggagaggaccatgacggccaggccacgcttgctctgaaaagcgccgagcgtggaagggtgtcttggaatggggtctaaaagggagaacgacatccttatgacttgctttaggctgctttctggatgtattttcagagctggggatgaggagaggttgcgtaaaggtgccggcctgctgctggc

SEQ ID NO: 125045 - DNA, 281 bp, Homo sapiens
  chr14:89817834-89818115
  hyper
aaaatgcaaattttctaaaaccgttctgtggagagagggaggcttcctgtgaggcccacttcctgtgaagcgtttggtctatggacagcctatttttaaaaatgtaagtccttcctttgaggccccccggaactggcagcaggccgacgggcaatcgttcctctggccgcacactttcaagtgaccgaatgtacccaaactgtttgataaggtcatttgtaaatatttactgatttgcagagaaaagaagttaaattacataaacccgtgcccacctcctg

SEQ ID NO: 125046 - DNA, 30 bp, Homo sapiens
  chr14:89882577-89882607
  hyper
gcgttgccgggcaacgggggaaactgctct

SEQ ID NO: 125047 - DNA, 30 bp, Homo sapiens
  chr14:89882881-89882911
  hyper
ggtctccacttgatcggaaccccctccccg

SEQ ID NO: 125048 - DNA, 244 bp, Homo sapiens; identical to SEQ ID NO: 51576
  chr14:89884047-89884291
  hyper

SEQ ID NO: 125049 - DNA, 31 bp, Homo sapiens; identical to SEQ ID NO: 9898
  chr14:89952768-89952799
  hyper

SEQ ID NO: 125050 - DNA, 494 bp, Homo sapiens; identical to SEQ ID NO: 51578
  chr14:90084100-90084594
  hyper

SEQ ID NO: 125051 - DNA, 597 bp, Homo sapiens
  chr14:90085315-90085912
  hyper
gacaatgctaaacccgagcagattaggaggcaggaaatgagccccattttcgttaccttcgatcgcctgcccccccgctgcttctcgcggccgcattggggggctgcggcgacgctggactcgcgggtggccccgccgccgggtcgcgccgtctcccggccgagctgcagcagatcgcggccggaaccccggctcctgcgcccggcgcccgcccggggtcggcggcgcggctcccaccccggcctggagccctgctgggtcctagtgcgcgccgcgcgcccgcctcgcggcccggtctgcagcccgcaccgagggcaggcagctcccagcgccgcgagtctccgggcgaggccgccaccctctcggtcccttgcgaaagcggccgcggggtgtgcggatgaactggagcttaatgtcaaatcctggcacaagatgttcaaaagaaagacattggctccaactgaactcttagaaggcagatgctaggatctgcagcccgagggtaagcgtaggggcagtacctggcagacagaggtttgccgggtgcactggtgacattggccgttcacagacggtgagacgcggtacgggatcgat

SEQ ID NO: 125052 - DNA, 183 bp, Homo sapiens
  chr14:90167707-90167890
  hyper
tcccttggcctactccggccccgaagaccaactcagaccccaccagacaaactggaaagtctccaagctctcagtcgccccagtcggcgggggagtgagtggggccgaccggccttgcggccctgccacctttcggggcgactcggtttctccactgacacccccgggcgcgaggtctggtcc

SEQ ID NO: 125053 - DNA, 30 bp, Homo sapiens
  chr14:90168234-90168264
  hyper
tccaggtcgagttgacggccttttccccct

SEQ ID NO: 125054 - DNA, 360 bp, Homo sapiens; identical to SEQ ID NO: 51580
  chr14:90420658-90421018
  hyper

SEQ ID NO: 125055 - DNA, 200 bp, Homo sapiens; identical to SEQ ID NO: 9902
  chr14:90421129-90421329
  hyper

SEQ ID NO: 125056 - DNA, 728 bp, Homo sapiens
  chr14:90422067-90422795
  hyper
tctggttctcctctcgttttaagaagtctccaggaagtaagccaagagctaggagagaccaggtttccccagccccgtcctgggtaaacacccggcgggctttaggacccagcggtgggctctccggaaggggaaggggccgggcctcgaggcacaagccgctgccgccagggtttgaactgcgcgcatgcgcggcggccgccgaaggggcgggatccgaggcaagcgttggttctgtgcgcctcaggtacgtgttgggcggcagtgggcgcggactcggtgcggtctctcgcgggctgcggtcgggcccgggatcctgctcctggccgagtcgcggtgcgcgggctgctggggtccggcagggctggaggcggaccgcgaggaagcggcgcggccgggaagatggggcagggtcgcctcggccccggggcctcggtttcctccgatcacagcgcctcagggggcgcgcacgggcgctgcggagacctgtgtcctgccggggcgcggcgctaggggcccctgctcgggtttttattcccagacctaagcttacaggtgcgtggtcccagaaagtgagtaggaaagcgcccaccacgtgccaggcgcttaagctttctgtgctcggtttcccagtataggaggacggtcacggtacgtagtatagagttgtcctgagggtgaagcgagtttacacttggtgaggcgcttcgaatcgtgcctggccggcc

SEQ ID NO: 125057 - DNA, 2212 bp, Homo sapiens; identical to SEQ ID NO: 51583
  chr14:90526594-90528806
  hyper

SEQ ID NO: 125058 - DNA, 278 bp, Homo sapiens
  chr14:90528869-90529147
  hyper
cgtttccaccataggtaagtgtgctggccggactcgctgacaacctccgggcggcctccacttcctccggggggcaggaccgaccctctcatcctttcattcatccatctgggcgcccagccagactccactgacatgagctgtcgcctgatcaacaggtggtattgcctccccgctgctctaatgtggtccaggcaccggcagcttcagcgtcacctggcagcttgttagaaatgcagtctcagtcccctctgcagacctgccgagtcagaatctgc

SEQ ID NO: 125059 - DNA, 97 bp, Homo sapiens
  chr14:90529392-90529489
  hyper
caaaagtgccaatgacggttcaaaagatggaaaattttccaccaggaagaaccagggaagtgacctttgggctgaatcaattcgtgttaggcataac

SEQ ID NO: 125060 - DNA, 147 bp, Homo sapiens
  chr14:90722846-90722993
  hyper
atcagcttccgtagcgtccctaacgacttccgcctctggcgggccgcagtggtggaggaacttccggcagcggcagctcaagtggccaaggcaagatggtgagtgactaagggtttctttccgctggtcgtcgcggtgcgatggggt

SEQ ID NO: 125061 - DNA, 256 bp, Homo sapiens
  chr14:90723210-90723466
  hyper
agaacggatcaggccgctggctttgctgctccgccgaccagggctttgctgatcggcgctgggagtttcgggggcgcctcctcgagtcaccgggaaaaatgctttttgagtcgggcaggtgaagggtgctggagaagagggtgggattcattccacctgaggagttgagcgcggagtcgtggaaggcctttcggagctgggggcatttgaaggaggccttaaagacgttgttatgacaggcggagctaagacggaa

SEQ ID NO: 125062 - DNA, 242 bp, Homo sapiens
  chr14:90798341-90798583
  hyper
aaatgtggttttcgcggcgctctctggggcttgaccccgaagcgggaggggcggggcccagagaggagggtcgtcaagggactggggcgcggcggggcagggagaggcagggcaaagcagggtggggcggggccaaggggggcggagcgaggagtgacgggttcctagtggttgggaccctgtgagaaccggaactgcgaaaaccggagaagggaattgttgaccgcgaaagggactaagga

SEQ ID NO: 125063 - DNA, 59 bp, Homo sapiens; identical to SEQ ID NO: 9907
  chr14:90849380-90849439
  hyper

SEQ ID NO: 125064 - DNA, 381 bp, Homo sapiens; identical to SEQ ID NO: 9908
  chr14:90849476-90849857
  hyper

SEQ ID NO: 125065 - DNA, 660 bp, Homo sapiens; identical to SEQ ID NO: 51588
  chr14:90849897-90850557
  hyper

SEQ ID NO: 125066 - DNA, 30 bp, Homo sapiens
  chr14:90863387-90863417
  hyper
agtgtcgtggacgccgtgccgttactcgta

SEQ ID NO: 125067 - DNA, 30 bp, Homo sapiens
  chr14:90863786-90863816
  hyper
gagctggacttggtcgtaggccgtccacgg

SEQ ID NO: 125068 - DNA, 30 bp, Homo sapiens
  chr14:90864075-90864105
  hyper
cacattgttccggccgggtgttgaggggcg

SEQ ID NO: 125069 - DNA, 30 bp, Homo sapiens; identical to SEQ ID NO: 51589
  chr14:90864966-90864996
  hyper

SEQ ID NO: 125070 - DNA, 30 bp, Homo sapiens; identical to SEQ ID NO: 51590
  chr14:91129911-91129941
  hyper

SEQ ID NO: 125071 - DNA, 91 bp, Homo sapiens
  chr14:91224516-91224607
  hyper
actcgagttgaatcgcggaatcaacccaagtacaggggcttcaaatggtcagccggccttggggcaccactgtcccggtggccgcggcagg

SEQ ID NO: 125072 - DNA, 224 bp, Homo sapiens
  chr14:91224895-91225119
  hyper
gactgcgctagaacgcggctcccgcgacccctggcggcggctgccgaggggctgcgggacgaccttgggcggcagctagcagcgagtcctagctgatgtggccctgagtcagcttttagaggtcccaagactcgttcacaggccgctaaacgcaaactaaggcacctcccagcacaccaggatcgacgtgtcctccttcagtccggactcggcggaatctgcac

SEQ ID NO: 125073 - DNA, 30 bp, Homo sapiens; identical to SEQ ID NO: 51593
  chr14:91282266-91282296
  hyper

SEQ ID NO: 125074 - DNA, 4 bp, Homo sapiens
  chr14:91526680-91526684
  hyper
cgca

SEQ ID NO: 125075 - DNA, 77 bp, Homo sapiens
  chr14:91526952-91527029
  hyper
tcctcccccttcggcgggcaccgctagtaccgcgcaaccaaaccgccccctgctccaccgccgcctcctcaggccgc

SEQ ID NO: 125076 - DNA, 30 bp, Homo sapiens
  chr14:91527354-91527384
  hyper
tagtagtcaggaggcgctcggggtctctga

SEQ ID NO: 125077 - DNA, 30 bp, Homo sapiens
  chr14:91527666-91527696
  hyper
gatgaggaattttacgaaggagagacattt

SEQ ID NO: 125078 - DNA, 444 bp, Homo sapiens
  chr14:91580265-91580709
  hyper
cccctctgttgagccggggagagcaggttaactcttgcagggagaactgggcttgcagggtccagccagctgccagcagctctgcagctttaagaactggggcgggctagctgccgaggagaccacgctgctgcatgggccacgtgagctcaggctgtgggagcggatggagctgctacagtcagcgcttggggctggcctcagcttgtagacccgagccctgcagaacaaccccccgtggcgcaggagagcagaagaaagggggcctttatgcccttttgagggaagcacacattctgcaaggccgtggaaacaaagggaggaactgtttgtagccctcgtccagacgccccaaacaaacagtaagtcagaagggaacagagcacagcacagtccctccctccgccccaggcagtatccaccttgccccgccccacctaagga

SEQ ID NO: 125079 - DNA, 499 bp, Homo sapiens
  chr14:91581048-91581547
  hyper
ggggttctgggctgccgcaggcacacaggccagagcttcgtggatacctgcagggcccaaaggtccctccctgttttgaagagtgagtgatggctatgaggtagcggccaggctgatcacccctgcgttggctggaggcagaattctgtaaatcctcgccaagtctttctccaggccactggttagctcatctcagcctcctctgggagcatcaacaccaacatggcacaggggactgcagtggtgtgctttggacctgtgtacccacccaaggctaaaggcagagccaggtgactttgcgggggtctcttctctaggattatctgtacttcccctctgtcctcttttactacgggagatcgagctagctataacccaccttctttcatgagaaccacactaaattgcaaaaattatcccagtgctggaggagggcagcaggttgagattatgttggcaggaagaatgttggcattgattggcacgcaggggacgagag

SEQ ID NO: 125080 - DNA, 30 bp, Homo sapiens; identical to SEQ ID NO: 51596
  chr14:91730729-91730759
  hyper

SEQ ID NO: 125081 - DNA, 289 bp, Homo sapiens
  chr14:91755342-91755631
  hyper
cacccacccctggcacgttcctgcacacgtgtgcacagccaccggtgcgggacccttcaggacacccccttcctcacccgaccacggccaggacggccgcccctacctttccccacagacccgttgtgggcgtcgcgctcttctgcacagttggagcccagtgcgggggtgtcggggttctcggcctgtgatctgagcggctgagaggccgccggcgaggcggggtctgaggactccagctgccagggagggctgtccacggtggattttaagcgttccctcgaaccct

SEQ ID NO: 125082 - DNA, 30 bp, Homo sapiens; identical to SEQ ID NO: 51598
  chr14:91841053-91841083
  hyper

SEQ ID NO: 125083 - DNA, 117 bp, Homo sapiens
  chr14:91883379-91883496
  hyper
cgagacaggaggaaaaacttcctcgccacttttctcccgcgttccagagcggaagaaataaaaataaaaaggacttttcaataaatgtctcacgtctcaaatccattgtaaatcagt

SEQ ID NO: 125084 - DNA, 420 bp, Homo sapiens
  chr14:91883530-91883950
  hyper
cgccccccattccccacccgtcaccgccatccaccggctggtctcagggattcagaaaaactacatgagatatttggttgggaagaatggggtccttttcgggagtggctaaaccccagggacaggagtgaccactgggacccggtccgccccgaggcagccagcctagagccccagcgggaacaggtgtacccgcccggctcctggcccggccgaaagcgcggcggggtcccgcgccggacgcacaacgggggcgccggctccagagttacaaagctccggactccaggacgcggccccaaccccggccgggagccacttgctgcgtccctcgcgccccggagccacccggggccccggccgtgtcgggtctgcggcgtcccgtcgccgggctagagagaagccggtgcaccaacaaag

SEQ ID NO: 125085 - DNA, 10 bp, Homo sapiens
  chr14:91975838-91975848
  hyper
gcttcactta

SEQ ID NO: 125086 - DNA, 49 bp, Homo sapiens
  chr14:91975897-91975946
  hyper
cgtagccagacgacacatgcccggtgccccggtcgtcccactgccggtc

SEQ ID NO: 125087 - DNA, 480 bp, Homo sapiens
  chr14:91976435-91976915
  hyper
gccagtggctcccttccgctccccctgttttaaacgtcagaagccgacaggcgcctgatcctgctgcaactgctaccactgcccgggagactctgagggcccccggccgcccaagcgacccggactagtggaagtcggtttccctccgccgccgtctcttccgtcttcctcacacagccaaaaccgccgccatcttggttcgcccctcaaaagcggcgcgcggggccacccagggagcagctgcaggggcggctcgtagccccaccatttaaagagacagcagcgagaccgggagccttactgcggcggaggcttccgacggaggcgggaggcgggcgcggagttgccgaggtggcgggagcgcagggagcggaggaggcgggacgcagattgcgccggtgacagcccgaggctccctcccgcctccttgcacgcaccgtcgtgcgagcgctgggcggtgtgtgcgtccgtcgcgccctg

SEQ ID NO: 125088 - DNA, 537 bp, Homo sapiens; identical to SEQ ID NO: 9913
  chr14:92040359-92040896
  hyper

SEQ ID NO: 125089 - DNA, 566 bp, Homo sapiens
  chr14:92302194-92302760
  hyper
acctggacgcgccgtcggaagcccgagcacggagcagggagccgggcgcccggcgcgcggccgtccccgcctgggctggggtctccaccgtccccggtcacgggtccccctaggcagagccgcccacctggccagcggggacctagcctcgccccgtcgcccacccctggtgccctccagaccaccgcgcttccagctgtcgcggggcctaaagctctctcaggcccccgcgacacaggcgtcgctgaggagacgtgggaacagcccctgggccccaccacggccccattttaaagaaagttaaagacaaaagagacagaactgacactcacctccagcccgcaaggcggggccgccctcacaggcaccccccacagccctgagcgagctgccaggtgggagaagcgcacctgagccaagccacgccgcgcctttccccgcccgggtcccgccgccctcctccgggtctccacgtcccacgcccgcgctgggccggcgccgcgcggccgcggccggttacctgctggaggcagtgggcgctctgctgtcgccgcctgcgggaactg

SEQ ID NO: 125090 - DNA, 30 bp, Homo sapiens; identical to SEQ ID NO: 51604
  chr14:92303220-92303250
  hyper

SEQ ID NO: 125091 - DNA, 241 bp, Homo sapiens; identical to SEQ ID NO: 51605
  chr14:92413691-92413932
  hyper

SEQ ID NO: 125092 - DNA, 76 bp, Homo sapiens; identical to SEQ ID NO: 51606
  chr14:92414136-92414212
  hyper

SEQ ID NO: 125093 - DNA, 30 bp, Homo sapiens; identical to SEQ ID NO: 51607
  chr14:92506125-92506155
  hyper

SEQ ID NO: 125094 - DNA, 30 bp, Homo sapiens
  chr14:92506769-92506799
  hyper
tcaaataacttacacgcgtcactgtgtcga

SEQ ID NO: 125095 - DNA, 30 bp, Homo sapiens; identical to SEQ ID NO: 51608
  chr14:92572258-92572288
  hyper

SEQ ID NO: 125096 - DNA, 102 bp, Homo sapiens
  chr14:92573060-92573162
  hyper
gaagagcgagtgaacgccggggacacgtgaccttggtagcgcgtcctcctagcttctgttagcgggccttctgggggatgctacatcgccacctgctgtctg

SEQ ID NO: 125097 - DNA, 41 bp, Homo sapiens
  chr14:92588219-92588260
  hyper
acgaggcgtgcaggcgtgaccgccgtcgccttccgacagca

SEQ ID NO: 125098 - DNA, 16 bp, Homo sapiens
  chr14:92588311-92588327
  hyper
cgctagtctccagctc

SEQ ID NO: 125099 - DNA, 61 bp, Homo sapiens; identical to SEQ ID NO: 51610
  chr14:92789077-92789138
  hyper

SEQ ID NO: 125100 - DNA, 452 bp, Homo sapiens; identical to SEQ ID NO: 51611
  chr14:92789369-92789821
  hyper

SEQ ID NO: 125101 - DNA, 139 bp, Homo sapiens; identical to SEQ ID NO: 51612
  chr14:92789959-92790098
  hyper

SEQ ID NO: 125102 - DNA, 532 bp, Homo sapiens; identical to SEQ ID NO: 51613
  chr14:92790280-92790812
  hyper

SEQ ID NO: 125103 - DNA, 1280 bp, Homo sapiens
  chr14:92979676-92980956
  hyper
gaggttgcccttgaacgatttcgaggctccctcgggcaaggctgtggctccgagtgggacgaactccccgccagctctgggcctccccacctgccggcccgcggtcggcgccggcacaggcggagggcgtcttccttcccctgcggccccaagccaagtggaagacttttctctaagtttccctctccgaagccccgcgggcctcccgcgccccagccccagccacagcctgtggaggcggcaccccgaggttgggcgcccgtgcggcgccttggccccagcaccccccgccccgaggcccggccccgggggcgcggccgcccgggcctccgtgtgccccagggggctccgggccgcgagccgctgccgaatggcttttgacaaaaaaacccttgaccaccaaggccagcctcttcctgaaagccccgctcgctccgatacaggaagtagaagggagcgagagccccagagcgcggcggcagcggcggcctggcccttccagagggccagagccagggacatgcgggcgcccgggactccgcgttccgcgcggcccggcgcctgagcgcctccgttccccgtcccggagctgccggcggcatgatccgacacgccggggcgcccgcgcgcggggaccccacggggtaagtccgggcggccgccccctcctccctcgcgatccccacggcccgcgtcctggccgccccactccacttcttgtcccagagagtccttcgggcgcgtgacctcggggttgtcgggctgatacgggacccccaccgtggccgaggccagaacctggttctgcggggcagggggcggccctggtgactccgctggacccgatgttggctaaactttcaaggccaggcatttcactgggaacccagtgcacactttaggctgctggtggacggattacgagggagtgcgtcgctacctgtcagcgccggggctgcccgcgtggacgcggccccctccctggcgtctgccccgcctgaactttgcaaacaaaactcgcggtcccagccccgccagcctgctgcacccgctgctctgcgagtcgcagcgcgcgccctcgggtactagagccccgctgggcgtggggtcggagacccggacccccgcaactttgggtgcccgcggcccaacagctgaccggccctcctggaccgagggtccactgggcccttttcccgccgcccctctgccctggccgtagacggtgaccttcggaccggccctggtcgagcctagtgcttgggtagggtccagggcgc

SEQ ID NO: 125104 - DNA, 30 bp, Homo sapiens
  chr14:92996021-92996051
  hyper
aacaagtgtccttgtcgaggtcgattttgt

SEQ ID NO: 125105 - DNA, 30 bp, Homo sapiens; identical to SEQ ID NO: 51616
  chr14:93104056-93104086
  hyper

SEQ ID NO: 125106 - DNA, 358 bp, Homo sapiens; identical to SEQ ID NO: 51617
  chr14:93214735-93215093
  hyper

SEQ ID NO: 125107 - DNA, 30 bp, Homo sapiens
  chr14:93260898-93260928
  hyper
tttctttcgggtcgcgctcatcttcgccct

SEQ ID NO: 125108 - DNA, 30 bp, Homo sapiens
  chr14:93261163-93261193
  hyper
tccctctgtgctgacgcctggccttcgaag

SEQ ID NO: 125109 - DNA, 30 bp, Homo sapiens
  chr14:93380607-93380637
  hyper
cctgcgaaccttgagcgctgcattccgccc

SEQ ID NO: 125110 - DNA, 137 bp, Homo sapiens; identical to SEQ ID NO: 51618
  chr14:93389556-93389693
  hyper

SEQ ID NO: 125111 - DNA, 335 bp, Homo sapiens; identical to SEQ ID NO: 51619
  chr14:93389712-93390047
  hyper

SEQ ID NO: 125112 - DNA, 30 bp, Homo sapiens; identical to SEQ ID NO: 51620
  chr14:93552647-93552677
  hyper

SEQ ID NO: 125113 - DNA, 30 bp, Homo sapiens
  chr14:93582383-93582413
  hyper
gggcttcctgggggcggccgtggcccggcg

SEQ ID NO: 125114 - DNA, 148 bp, Homo sapiens; identical to SEQ ID NO: 51621
  chr14:93582646-93582794
  hyper

SEQ ID NO: 125115 - DNA, 30 bp, Homo sapiens
  chr14:93650649-93650679
  hyper
aaagtaatcctccgcggtaccccagagaaa

SEQ ID NO: 125116 - DNA, 30 bp, Homo sapiens
  chr14:93651149-93651179
  hyper
cccacctggagggacgtgccgccacccgcg

SEQ ID NO: 125117 - DNA, 30 bp, Homo sapiens
  chr14:93651622-93651652
  hyper
ggccgcgcgtgacccgccgcagtcacgccg

SEQ ID NO: 125118 - DNA, 30 bp, Homo sapiens
  chr14:93673286-93673316
  hyper
gccctggaaagggtcgccgtcacccggcgc

SEQ ID NO: 125119 - DNA, 30 bp, Homo sapiens
  chr14:93673684-93673714
  hyper
gtggtatcgttggtcgacgtccttgaggag

SEQ ID NO: 125120 - DNA, 30 bp, Homo sapiens
  chr14:93799094-93799124
  hyper
tcccggacgccccgcgccacaccggacaca

SEQ ID NO: 125121 - DNA, 33 bp, Homo sapiens
  chr14:93799559-93799592
  hyper
gcattatttttgctcgtcggctgggagccgggc

SEQ ID NO: 125122 - DNA, 191 bp, Homo sapiens; identical to SEQ ID NO: 51623
  chr14:93896833-93897024
  hyper

SEQ ID NO: 125123 - DNA, 553 bp, Homo sapiens
  chr14:93897078-93897631
  hyper
cggtctccccgcccacatcaacgcgggcagctccaggaggggacggacaggaagcctttggccgcctattaaatcccacccatttctccgggggcgatttcctaaccttccgggaccgaattctgcaatttgatgtgcgttttgtccgaatggtagcgacacgggcctaagggagggggaaagcgagggggtggggggtggggggtatgcactcttttcctcgcaacatcgctggcggagcgagggagctcacacgacacagattttggggcaaagcctttccaactggacagcaccatgtccaccaaagcggagcagtgtaagtagcagccggcccggcattccggcccggcctcggctgggagctattgcagctgcggcgtttgcggctgctgggagaccttggcattgtgctggtgcgggggtgggggctgaggttggggcgggtggggggtggcggagagagaaggtgggggagggtggacgttaatggcagcgcggcgctgtccccggtgctgaaaaataatacggtcttcctcgggctccagcgggg

SEQ ID NO: 125124 - DNA, 127 bp, Homo sapiens; identical to SEQ ID NO: 51625
  chr14:94226381-94226508
  hyper

SEQ ID NO: 125125 - DNA, 308 bp, Homo sapiens
  chr14:94254150-94254458
  hyper
cgcgcaccaatatacctcccagcccgggtcggacgggcacgccccgcacccaggggcaccctagtaaaccaagcctgcacttacactccagcttacaccttcactgactcttcgtcagtcccagaattcacactcttcttacgcacatccccagagccccgcgtgtacactttagctccgcgcacagctccagaatactgcgtgcataccttggccccatggacacctccagaaacagccaagcacacttactgcgccccattaacccccatacaactcactctcactgtgagcacacttcaaacccg

SEQ ID NO: 125126 - DNA, 785 bp, Homo sapiens
  chr14:94254498-94255283
  hyper
cgtgcacacacactgatccccgtgcacacccaccgactcctgcctgcaccctcgctgaccctgcatgcacggccccaagaaatctcacgctgcctgcacccacactgcccagccggcctcattgcgcacactgcaacataggcacctccgtgcgctgcccctttgcacgcctccgcccagccccgatctcccgctcccgggcgtgggttcccccacgcctccatctccgcccgcacccttccaacgcctcacgctaccttgcctggcggcggccccagccgaccctgggctcggggaaaagaggtccgcgttccccccgcggcagctctgtttcccagcagccggacagcccccatttaaagccagccgcctccccagtcccccgccctctaggcggggcctccgtcctcaccttggcggctgcgcgggcgcccgggggcttcacatgccggggaggagcgcccggcgctggagcaaaagtttgcgcgccggttgggcctcccgggccgctgagcagaggaccaggagcggcgtcctcgcacggggcgcagggcgcggtggctccggactgcgcctagccgcgcgcggggcgggaggggcggcaccccgctcccagggccagggctggccgccgaggcggaggcagagggcggggaaagtctcctccacgccgcctggagccggccgcgcgagccctccccgggcccgcgttggctccccgcctttcctggtggcgccgcgcggctgcccggggcactggggtgcccgagctctctactaccctc

SEQ ID NO: 125127 - DNA, 302 bp, Homo sapiens; identical to SEQ ID NO: 9925
  chr14:94255304-94255606
  hyper

SEQ ID NO: 125128 - DNA, 46 bp, Homo sapiens
  chr14:94255669-94255715
  hyper
cgccgcactccccgcaggctctcccgggcgccggggctgaaaggtg

SEQ ID NO: 125129 - DNA, 496 bp, Homo sapiens
  chr14:94405737-94406233
  hyper
aggggctgatgacgtcgcggttggggtcggcgccgtgttgcagcagcagctcggtggcgtacacgttgttgttgaccaccgcgaagtacagcgcggagctgcgccggtcttcgtagaggcgcgcgcgctcgggggccagcggcgtgttcacgtcgaagcgcgcgctcagcagcgcctccagcacctcgtcgtggttgcgctcggccgccaggtgcagcggactgacgccgctacggcgtatgcgcgtgcggctggtcaccggcagcagcatctgcacgatcctgccgggtcgaggggcgggcgcgggtgaggggagggtcggggtgtggacgggtagggccggccccgccagcaggagagctcgggcgccaggctcggctggtcgccctgaccgcgggctgcgacgcggatcccaccggcagggggcgccgcgggtcaaccattctcaccccactgggcagggtgggtcggctgccgtctccgctttacagataag

SEQ ID NO: 125130 - DNA, 261 bp, Homo sapiens; identical to SEQ ID NO: 51629
  chr14:94492879-94493140
  hyper

SEQ ID NO: 125131 - DNA, 30 bp, Homo sapiens; identical to SEQ ID NO: 51630
  chr14:94547286-94547316
  hyper

SEQ ID NO: 125132 - DNA, 261 bp, Homo sapiens
  chr14:94547567-94547828
  hyper
tccacgcacgtactcgtgcgcgctggggaggaagtcccgcccctatggcaaactcagctacctgattggctgcctcgcggaccgcagcagtgccggcgggagagctggcttggggcgctggcacctcctcttacagctttactcctgccagcttgggaaaaggccggagaaggtgaaattctgtgtgctccctccggcgagagactttgtcagctcccgcacagtaacgtaagttttcttgtattcttagtgtagtttcgt

SEQ ID NO: 125133 - DNA, 101 bp, Homo sapiens
  chr14:94595899-94596000
  hyper
atggtgaggccgtccgggtcccaacttggcccaggaaatgacagcgttcttggggtgttacttccccctccatccagtagggacgcgcctactctgcccta

SEQ ID NO: 125134 - DNA, 30 bp, Homo sapiens; identical to SEQ ID NO: 51634
  chr14:94640014-94640044
  hyper

SEQ ID NO: 125135 - DNA, 72 bp, Homo sapiens; identical to SEQ ID NO: 9929
  chr14:94640375-94640447
  hyper

SEQ ID NO: 125136 - DNA, 30 bp, Homo sapiens
  chr14:94640813-94640843
  hyper
gccgcccgccgccgcgatggatttcagtca

SEQ ID NO: 125137 - DNA, 14 bp, Homo sapiens
  chr14:94889856-94889870
  hyper
cagcagcctcactc

SEQ ID NO: 125138 - DNA, 123 bp, Homo sapiens; identical to SEQ ID NO: 51636
  chr14:94889915-94890038
  hyper

SEQ ID NO: 125139 - DNA, 30 bp, Homo sapiens
  chr14:95156050-95156080
  hyper
caggcttggggctgcgagaggggccgcgga

SEQ ID NO: 125140 - DNA, 597 bp, Homo sapiens
  chr14:95233527-95234124
  hyper
acaaatccctgcagccggccgttgccggaagccaagctggaaagctctctaagccttagctttaagtctataaaatggtaaaccgaagaaagttgaaagccattcctgctggcccttagtctccactttcatccccacgacggcctgggaaaccatacagagggcaggctcttgtcttcatccctggcccaggcgctcatgcgcaccgggggccttctccaatcgttcataaactgctcaccagcgctctgggcgcgttcccgggagctcccttctccgcccagctggtgcagaggaaagacagtctggggaagaagcaggaggtgtcggtactgccacctagaagtgaccccaccagcggtgcgctcttagacaagactggccttgagtgcatcacgtgcggccctggtcactccagatgcccagggagcagcacctggtcccggtcagccctagggcgcacagctcagaaatgccagagcagaaacgcttgccctgggggaagaggcaactcgcatgtggagctgggcagctggagcatctgtggaagttccaggaaagcgctgggggaggtggcatgcccgctgcctaattccc

SEQ ID NO: 125141 - DNA, 119 bp, Homo sapiens
  chr14:95234591-95234710
  hyper
ttaatttaactataaatactacggtgggggctagtcgcgggcggcctcgggctgctgggctgtgcgcgccctgaccccagacgccgaccctcccggctctgtacactatttacagctcc

SEQ ID NO: 125142 - DNA, 357 bp, Homo sapiens
  chr14:95235025-95235382
  hyper
cgcgcttcccccagtcccggggcacccggggagcttggtgtggcggcgggacaccccgcgcaggccaacaaaaggaggggagccgctcgctcccgcttccgcgttttcattcaacttcctgggcctaaagcgccctccagcagcctgcgggccgccatcgggatgtttttaaagtgcggggagagccaagcagggctgggcaaacccgactggggccccacctcgcggggaaggaccgctaggcgcccacggcaggccccggcgcctacctccactttctcctcgcggaggtgcactttccgggccagctgctcgcgcgtgcccacgtccgggtacttggtctcctggaagaggttc

SEQ ID NO: 125143 - DNA, 1381 bp, Homo sapiens
  chr14:95235513-95236894
  hyper
cggtaccggggacaccagcaccgaaccggggccctcgtagcctgcgacagagtggggcgcacggtcagccgcccgccctcgccaccgcacgcatgcacgcccgccagcccccgaccctcttccacttagaagtcgtctgcaaggggatgctgagaattgggggtgcacgggaatcaggggtgcagggaaaaggaggaggcgtgttagagcatccatccgcacacccgccaaagccagtaagagaattcaaaacaaaacaaaacaaaacaaaacccagtttccccgggcaggcactgaattccagttttcgcgaactctggccaaaagtttgcagcaagaagtttgcaaactcctgcgcccgatcggcaaaagcggaggggggagttgcaagaggagcaaagtttgaggaaggtgaattaaccaaccggctccatgggctaaggaccgcagtgggcggcagaggccggagcgagcgcgaccctacctgggggcgtcgggacgcaggagcactgctgggcgcccagcggcggcacggccccgcagcaggccgggcccacgggcgccgcctgcacgtgcagctgcccgtagaagtagttgttgtagccgaggcgggagccgctgaccgcggccgggaggcccgcgccgccgggggccacggggcgcgggtagaaggcgccatagtccgaggaggcgccgccgctggcgccgtagagcgagtccccgtgcagggccgggaagacgacgggagccgccgcgctgtgcgccaccggcaacaccgagtccttgcagcgcggccgggcggctaggatgttgtcgatgctgaacatgctggcgggcatccccgagccccgcgtcgggaccggggggcggcgggaacgcgccgaggacagagccttaaagtgggggggtccactctcctccagccgccgaccaaaccgaaagagagcgccggcgagcgcgcagccctgcgcccctccccgccccctgcgtccgctctccctcctcccgccctcccctagccgcagcgttcgctgaactcaacccgcgggtaggacggagctcagaccagctgaacctcttgttggttttatactgagtcgacgtcatcctggatttagttcctggtaatatgcagatgacaaacagaaccagatttggccctttcttttcctttgggtgggggaagagggttggggggagggggagaggtgccaaggggagggggttacaaggcctgaaaagagattgtggattgcgaattaatgaaattaacctaatcttttccattcggcagccgggccgcgggccggccgagctgggcgggcggcctaattgccttggttaatctcattaattcctttgtgccgccgcagttaacaac

SEQ ID NO: 125144 - DNA, 67 bp, Homo sapiens; identical to SEQ ID NO: 51641
  chr14:95237575-95237642
  hyper

SEQ ID NO: 125145 - DNA, 442 bp, Homo sapiens
  chr14:95237782-95238224
  hyper
cgacggtacgcgcggaacaaaagcagtcccccagatcctgtggaccgggtgcaagctcccggcttgcaactcaggccactccaggggaaggggcagtacccgacccaggcgatacccccgagagccggagagggagatggggttgcgggagacctcgggtttcctgaaggaagtccgcctttaactcacacctatttttcgcgatttctctcaggctaattaaccaagggaccccgcaaagttgtctgaagtcgccgccgtaaggctaagtaagtgggctgcccactccccggctcaggggcaaaggggaaagcccacttgtcaatttctgttcgggtttcaaagagccattgcacggaggtttagtcctgtccgagggcactactgtggcggcgcgcagaagcggcccagtggagccaggcggcgacgtttctcctcctag

SEQ ID NO: 125146 - DNA, 30 bp, Homo sapiens
  chr14:95238643-95238673
  hyper
tggaggctgggtgtgcgctgcggtgcgcgt

SEQ ID NO: 125147 - DNA, 20 bp, Homo sapiens
  chr14:95239328-95239348
  hyper
acacagctccagacactctg

SEQ ID NO: 125148 - DNA, 1323 bp, Homo sapiens
  chr14:95239421-95240744
  hyper
cgcggaggcaggccccgggaaaggcagtcggcgctcggtgctcgcactgcgcctcggcgggcggaaactcacaagtgtcctcaacgtgctaaacaaaccatcagggccccgcatcgcctggcgcaattggaataacaaatgcgacgcacgcaaattgtccacctcgtgttgctaagcgattgtttgtcggccccgcacgcacagctcagcatgggaggaccgcgagcgtccagaggcagccggcgagcgcttaggtcggaaatgcagtaaacatgccgctgattttccctattatcacccaaacacgatttcacacaaagcaatcaccacgcagaagtctatgaaaatgtgtttgttgaggagtcactcgccccagtaatagtcctcatttttaagatattaaagaatagctcagcggattccacatgcataaggtctatttgccgttcggcatctgtcacggcgcttttgcactgcggtcatcactaaattgattcatagagtgtagattaaattgcttctctgatttaaaacagtgtccaactttggagtatgcgtgtgagtatcttctcccgccccaaggtatttttgtcagggagaaaactgtcgccccactatccttacaccccattccgcataactgtaaaaaaataatgcatcttcgaccccaacttcttacggttcgtttcaggaactttcttaattctctccgtctcctgcccggccacagagcagagttcacaatcggatgcgtttaagtcggatttttcgtgtcatgtgcaaaaagccggtgtgtccttttcaaggtacggagccctcatcggagggcgcattagcggggtcagaggaattaggagcaatgcgcagagccccctgcagcccgcgtgctgcgccgagacctcagccgtcctcactgagcggaatggttgtgttgtttgtattgggacttttaaaaaatccagtctcaaagctaagtgctcaaaccccgttccatggctctgctgctttctggaggacatctccggtagccccaggggattgtccgtgtgaggttgggtgggtggagtagagccagaggcgcaaatgcctcctggctaaggggcagcgcgcattagagctgggtctcctgctttcggagcggagggcgtaagggagctttctagctgattttttgctagaagttttccaacgctccaaataaaagcacccgatcccctaaggacgaaataatcaaggtgttagggaagctcaacagaagagaagagacgagaagagaagagaagagaagaaggggctatcgaaaaatgacgtgttcccaaggcc

SEQ ID NO: 125149 - DNA, 254 bp, Homo sapiens
  chr14:95241782-95242036
  hyper
gggaactgcaaagtccgtgcagggcacagttcagagccctccctgggctgccagggtttttgaaacacatacatacctgcataaacccatttgttgctaatatatccgtctcccgtaaataagccaaggaatgtggattggactgcgggtcaccaatggggattcaaagcgtcccataaggttgccctcccaagtgcgagaccgggccacacgttgatttcctgcgtactctggtggggcgagcgctgctcctt

SEQ ID NO: 125150 - DNA, 300 bp, Homo sapiens
  chr14:95623684-95623984
  hyper
gctcgccgtcgcctcgtccccgctgtcaggttactccattcacctgggcctgcagcagcctgcgccgcgcctccgcctcgacccctcccgccggcgcctgcggagactgcgcagcgcccggctggccggcagccagcgcacggcccgcggcaacggcgcacagccgcttggagaatcccactggctcccgcaccgcccctccgcgcccccacgctccgctcgccccgtggcggcatgagagcgagcctgtgattggacagggcctggcggtgaaaggttaatcccggccccccagccact

SEQ ID NO: 125151 - DNA, 30 bp, Homo sapiens; identical to SEQ ID NO: 51646
  chr14:95624330-95624360
  hyper

SEQ ID NO: 125152 - DNA, 30 bp, Homo sapiens
  chr14:95786027-95786057
  hyper
gcgagcctgggctgcgttaccttgcaggtt

SEQ ID NO: 125153 - DNA, 37 bp, Homo sapiens; identical to SEQ ID NO: 9935
  chr14:95864477-95864514
  hyper

SEQ ID NO: 125154 - DNA, 275 bp, Homo sapiens
  chr14:95932314-95932589
  hyper
gggcatcttcgtccacgctggggtccccgatcctgttgaacagggaggctgcctcctccagcagccggtccaggagcaccgcctggttgtccacgttgtgcagcagcacctgggcgtggctcagctgccactgcttctccttcaggcccagctggagctcgatgtggggctccagtgtgaccatcatcttctggaaccagcggtagaactcatctcgggccagcaggtactcgctccagtgcagccacacccactcgatgcggctgtgggcacag

SEQ ID NO: 125155 - DNA, 31 bp, Homo sapiens; identical to SEQ ID NO: 9936
  chr14:95932616-95932647
  hyper

SEQ ID NO: 125156 - DNA, 30 bp, Homo sapiens
  chr14:95982855-95982885
  hyper
ctgaggaccccacccgcccggcccccggcc

SEQ ID NO: 125157 - DNA, 30 bp, Homo sapiens
  chr14:95983260-95983290
  hyper
gcctggaaagcagcccggagccctggcccc

SEQ ID NO: 125158 - DNA, 30 bp, Homo sapiens
  chr14:96000915-96000945
  hyper
aagcgcgcgcccaccgcattgccatggcaa

SEQ ID NO: 125159 - DNA, 117 bp, Homo sapiens
  chr14:96001253-96001370
  hyper
atgattggtggaatcgagtaattactgatcagtattgtccaatcacggagggcagtttagagccggcccaatgagggcctccagggggcgggtcggactgccgcgggccggggagcg

SEQ ID NO: 125160 - DNA, 296 bp, Homo sapiens; identical to SEQ ID NO: 51650
  chr14:96152750-96153046
  hyper

SEQ ID NO: 125161 - DNA, 100 bp, Homo sapiens
  chr14:96342209-96342309
  hyper
cgcctctttcacccgcgtccccaggtccccatgtacgccacgtgggtgggagcgtgtcccacacacccgcgcgcccaaagccacattcgccacgctcccg

SEQ ID NO: 125162 - DNA, 100 bp, Homo sapiens
  chr14:96342530-96342630
  hyper
cgcagccgccggccctccccgcactggagctccccctcccctccctccccgcccctcggctgccgcagcccggctcgcagcgcgcgtcagcgggggctcc

SEQ ID NO: 125163 - DNA, 363 bp, Homo sapiens; identical to SEQ ID NO: 9939
  chr14:96342879-96343242
  hyper

SEQ ID NO: 125164 - DNA, 115 bp, Homo sapiens; identical to SEQ ID NO: 9940
  chr14:96343319-96343434
  hyper

SEQ ID NO: 125165 - DNA, 6 bp, Homo sapiens
  chr14:96343667-96343673
  hyper
gcctgg

SEQ ID NO: 125166 - DNA, 31 bp, Homo sapiens; identical to SEQ ID NO: 51654
  chr14:96499773-96499804
  hyper

SEQ ID NO: 125167 - DNA, 1208 bp, Homo sapiens
  chr14:96505312-96506520
  hyper
ggactctgggaggagcgttggcgtggaaagccaggtcactccgatcttggtcctcaggctcgggataacgtgtcagccccaagagagcgctgcccacagccccgggtgggttgggttcaactgcacggggcggggcgccaacagctcaggacttgggttgcaggctggttcttgcaccaaccagcggggcggcctcgggcctcagtttccccatcccgcccacgaagggaggcgattgcgagcgcttggggtttctgacggaccccgccccgggggtggggcggggagtggtcacgtggaggggcgccccgtccgccgagccccgccccaccccgccccgcccgcccccgcgctcggggccctccgcctagtagagatctggagccagaagcccagagacagccgagtgcgccgtgcggtctccggacgctcgctgctcagcccgatccccgccaactgtgcaggcggctgacccgcagcggcagcggcagcagcgaggactcgagcgctggctgcagcgacaccatggatctctcctttatggccgcgcaggtaacggggcgtcccccccacgcgccccgggccgccaagtttggggaggttcggggccacggtctcgccctccacgctggggctgggcagtggcgcccgcccgcgatccgcgtcccggtcctttgtcccgagccggacacccccacttggtgcacgcgtcgggggcggcgatcgcggctctcccggggtggggcgggctgcgcgccccgcacccccgcggctcgagctgttcccgcccgggcccctctcgttggcaggaaggctgcgaggagcctgggcagcccgagtcgcccccttctgcccatcccccactgctgtcccccttctggggtcccggagccctccaaggccgggccagctcagacccgcgcgaacgtggatgggcacacagtctcgcccttccccactctgttttcccgaggcgccagtaatctgtctcttgccggtgacctcgggcgccccctttgccgccgcctgaggaaggctctgagacccgctttgtgaccgtgacccgccaagcgtcgacgcgccgcggtcgtttgtcctgttttgctttgtgtagagtctgatggagccaccagtgcccagcgcggccagaacccccccacccccctccccgacacaaacaggctcccagtggccggaaaaacaaatct

SEQ ID NO: 125168 - DNA, 131 bp, Homo sapiens
  chr14:96670921-96671052
  hyper
tttttgccgtcccacgactccaacgggcagccgggctacgcaaacatggaaatcttccaagagcctccctggcccccagggctcagagggtggcagagcggagagcgaaggtggccgcagccttcccggcc

SEQ ID NO: 125169 - DNA, 117 bp, Homo sapiens; identical to SEQ ID NO: 9942
  chr14:96678012-96678129
  hyper

SEQ ID NO: 125170 - DNA, 30 bp, Homo sapiens
  chr14:96830041-96830071
  hyper
ggctgcaggggccccgcgcccgtgttaaga

SEQ ID NO: 125171 - DNA, 30 bp, Homo sapiens
  chr14:96830314-96830344
  hyper
gcgcttctcgcatacgctcgcttaatcctg

SEQ ID NO: 125172 - DNA, 30 bp, Homo sapiens
  chr14:96857875-96857905
  hyper
gtcatcgggtcaagcggacacagggatgtg

SEQ ID NO: 125173 - DNA, 153 bp, Homo sapiens
  chr14:96968599-96968752
  hyper
cagggggtaattgccgggccgcaggcggccttaggaactccgcttcccgtgaggcttcgcggcggacggcgctggtgcgcaggcgcacgcacggcgtgcgtggtggcgtcagcagttctagaacgttgctgtggtagcgctcgggcgccatgt

SEQ ID NO: 125174 - DNA, 30 bp, Homo sapiens
  chr14:96969228-96969258
  hyper
cagcttctccgccccgtccacaaagaaaat

SEQ ID NO: 125175 - DNA, 30 bp, Homo sapiens
  chr14:97050255-97050285
  hyper
actgggccaggtggtcgcgccttgctgaga

SEQ ID NO: 125176 - DNA, 115 bp, Homo sapiens; identical to SEQ ID NO: 51658
  chr14:97050712-97050827
  hyper

SEQ ID NO: 125177 - DNA, 11 bp, Homo sapiens
  chr14:97058806-97058817
  hyper
tacccggagct

SEQ ID NO: 125178 - DNA, 407 bp, Homo sapiens
  chr14:97058943-97059350
  hyper
cgcccgggcccgcggattgccgggtcggttctcagtcaccgcacaggtgccctggagagtgcgaccaccccctgccctccgccccgcgccggccctcggctcagtgccccgcccttcctggagcacggcctgcgcatgcgcgcgccccagggcccagccctgttcctgctccggctcctgcggggatggatgcttcacgcagtaagcgagtaagcgagccctggagaccggggccctgggtgtgcggtcggctcagtgccacgcggtgagataggcatggttatcaacccacgccaaggcggttgtgtacctggcatagaaaacactgctgttgaatgttgtttccatagtcattcgccagcgtccactgatgagaggtgccaccacggacacccggccttgctccg

SEQ ID NO: 125179 - DNA, 80 bp, Homo sapiens
  chr14:97207756-97207836
  hyper
ggcaccctcccatcagccatccgggccagcgcctccagcaccccactgcccggctccgcggcaccccactgtccagcccc

SEQ ID NO: 125180 - DNA, 30 bp, Homo sapiens
  chr14:97263509-97263539
  hyper
ggatctccctttgccgctaagagactccaa

SEQ ID NO: 125181 - DNA, 183 bp, Homo sapiens
  chr14:97263998-97264181
  hyper
tcaggccccgcaggcgcccccggggatgcctggactggccaggccggcccccatctgagctccacgttctggacgcgcgtggtgtcgcggccgagctcgcaaacgccgcctcgggcctcaccgggaagccggttctgtcaggcggggctccgggtgaacagcgcaggcgaggcccctgccccg

SEQ ID NO: 125182 - DNA, 3 bp, Homo sapiens
  chr14:97499846-97499849
  hyper
ggg

SEQ ID NO: 125183 - DNA, 15 bp, Homo sapiens
  chr14:97499970-97499985
  hyper
cgcgtccagctcctc

SEQ ID NO: 125184 - DNA, 325 bp, Homo sapiens; identical to SEQ ID NO: 51661
  chr14:97684971-97685296
  hyper

SEQ ID NO: 125185 - DNA, 621 bp, Homo sapiens
  chr14:97685395-97686016
  hyper
cgctccggccagctgcccgggaagcgcccaagcacacgtcccgagtcccagattggattaagttgcccaactacctactttttctctctttaaggagaagcctaattggagaagattcggttttcttcgccatggcaggtccctttctcctgacccgcagttgcaggggctgagggtaggcgcaggtccgccctggggtcgaagccaccatcgggcctcgaggttgcccccctaacatccggcctgcacgcctggcgggggcgcaacagtgtctcacggctcgggagctcgtttttggcttctgagcaaggtatttttttcatctgccgtgtgtttagctgaattcagtatatttttctcgcacttctcgcttttttttttttctttctgaatctgctcttctgctttgcgggcccctaatctctcccgaatctcgggcgcccggcccggcccaggcgagcgctcgcggttggggacgcgggtggggacgcggcggtctgggcgctgcaggatgcgcctggccgcggaggagacgaccagggagcgggtcgccagatcaagatctgccagtgccactacctctgcttatctccaggggcaatcatcggctgtctcagcttc

SEQ ID NO: 125186 - DNA, 30 bp, Homo sapiens; identical to SEQ ID NO: 51663
  chr14:98978313-98978343
  hyper

SEQ ID NO: 125187 - DNA, 30 bp, Homo sapiens; identical to SEQ ID NO: 51664
  chr14:99325155-99325185
  hyper

SEQ ID NO: 125188 - DNA, 30 bp, Homo sapiens; identical to SEQ ID NO: 51665
  chr14:99656310-99656340
  hyper

SEQ ID NO: 125189 - DNA, 561 bp, Homo sapiens; identical to SEQ ID NO: 51666
  chr14:99736019-99736580
  hyper

SEQ ID NO: 125190 - DNA, 1180 bp, Homo sapiens; identical to SEQ ID NO: 51667
  chr14:99736841-99738021
  hyper

SEQ ID NO: 125191 - DNA, 607 bp, Homo sapiens
  chr14:99738249-99738856
  hyper
gtttttgttttttctcggagactgacccttccgaggctctggggggacaccaggagaggctccttcccagttcacctggcaggctggcgccggccggaggggctgccgagtccccgcgagcgctccccagcgctcccctggcgccgcgggcccggggggagcggggcggaggggcggctcgcccagtgcgcctgggtcggtgcgggcgcagactgggagctatagattgcaacgtgaagatggcggagtccgggttctctgggagctctcggtctctctatggctggggctgcctctgtacaatgggataaaattcaagttcaagtgcggacgtgacgtttaatctgcactagagacaaaaagacccagagagtcggagcactgggggcgactagcggtggctttttaacattgtaccctgtaagagaacaagaaagcacacacagagacacactcgcgcgcgcgcgcacactcacacacacacacacacagtcgccagttgcgcacacccgcagcccaagccggacacacgtgcaaaccgcgtttttgtgcgctcatctcccccgagccccggctgcgcaacagcgggagggggttggggggggcc

SEQ ID NO: 125192 - DNA, 30 bp, Homo sapiens
  chr14:99739074-99739104
  hyper
cagtaagaatcgcttcgtttccctggaaaa

SEQ ID NO: 125193 - DNA, 1775 bp, Homo sapiens
  chr14:99739437-99741212
  hyper
gaccggggcgctccacgtgggagagggacttggacttgccagcccaggagtaggtgtggccaaatctccgcagatactcgggtgggtgactccaggaggcgcccctgacaatcacagcaacctggaagtcacaccccgccccccgcgctcctcggcccagggtaggacttggaaatgcctgtcagactgggaaggacgcagctgccttgtcagccgtttgatctccaaccggcgaggacaagaggagttgtggggcctctccgtggcccggggacaaggccagaccacggcccccgtggacaccccccattccccaggctgtggccaactttgtcaatttgatgacctggcctccagggctgggcgcgccacgcggctggcctcctctcccttctcagggtttctctggaggcggccagggcgggtcggggcctggctccggctaggcttcgcgggcgagtccagctgcacccaccccactccgcccccaggcctggctccggcggcttcacccgggcgcatggcgaggccgtgacgcctcagcgccgcctccctcggggccttttcctcggggggcacacgggggtttttgttttcgtcccgaaggtcttgggtggggcgatggcaccaacaatttaacagcgcccagagtccgtgagcgagaacagaaagagatcccttccagtcccataccctaaaaaataataacaataaaatgtgccctggcttgcagttctgtaaactgtgggctccacggtgggcggacgcgaggccgagcggatggagaccgggggcggggcgcggacttgcacctcctcgccctggccgggcaggctgcacccggctgcccacccccaacaccccacctccacgtggtccaaagtctagtagggcctccctcttctgccatccctctcaccgggaaaatctttccaggaaagtggcttaaaaaaaatatgcccacacgcacctttaataaacttctttaagacattcataaactggccatccctactcgcccggactctaaatttgaaagatcaactcgcgctctctttctgagaactagcgatgtgaagcccagagagggtgagcactttgccctaggacacacagcgcgtcagggacaggtctggacccaaaacaccgcggcgtgcctgcagcccagcgccgccggcggtccgggactcgaaatcccgacccacgaccctcaccttcctggggttgattacaaggaaggcagaccccgccagtggcaaggcgggacggggaggacccctcaggaaaagggagcccctccgcgagcggcgcaagggctctcggagtcccagctgcagccgccaccccgcgtgcggtaaggggccgtgcctggggagggggcaccccctccccactcccagcaggaagtagctggcgtgggccggcgcgtgccccacggacccgaggagcacttcctcattggccccgcgctgccccgacggcgggaagagggacgcgcgggcgggcggacgcagggccggacacgccgccgcccgccggcgcgctccacctcgcggcagccggggagaggctgctctgcccctgcccagccttgagccggccccttcgccctcctcctcccccttttcctccgcatcttcctccccctcctcctccttctccccctccttcccctcctcctcctcctcctcttctcccgagaggcggccgggcgcaggcagggagcgatcccagctgccactccagtctcctctttttccctctgcccgtctggc

SEQ ID NO: 125194 - DNA, 80 bp, Homo sapiens; identical to SEQ ID NO: 51669
  chr14:99741277-99741357
  hyper

SEQ ID NO: 125195 - DNA, 30 bp, Homo sapiens; identical to SEQ ID NO: 51670
  chr14:99787653-99787683
  hyper

SEQ ID NO: 125196 - DNA, 129 bp, Homo sapiens
  chr14:99947368-99947497
  hyper
cccgggggcaagagcggccggctcagccgccgccaaccacgatgtcgcaactggctgcgttcgcccccgccagagctttgattggacgaatctcgacccgggccccgcctacgcgcccaagttccgtta

SEQ ID NO: 125197 - DNA, 1691 bp, Homo sapiens; identical to SEQ ID NO: 51671
  chr14:100069898-100071589
  hyper

SEQ ID NO: 125198 - DNA, 30 bp, Homo sapiens; identical to SEQ ID NO: 51672
  chr14:100097094-100097124
  hyper

SEQ ID NO: 125199 - DNA, 30 bp, Homo sapiens; identical to SEQ ID NO: 51673
  chr14:100111325-100111355
  hyper

SEQ ID NO: 125200 - DNA, 55 bp, Homo sapiens; identical to SEQ ID NO: 51674
  chr14:100111856-100111911
  hyper

SEQ ID NO: 125201 - DNA, 95 bp, Homo sapiens
  chr14:100125686-100125781
  hyper
ccagcacctgccccgcggagcccgtgagccctggctcagggcgaccccgagccgcgccctctcccaccccgcccgcaggtcggcgctgctgggca

SEQ ID NO: 125202 - DNA, 30 bp, Homo sapiens; identical to SEQ ID NO: 51675
  chr14:100149398-100149428
  hyper

SEQ ID NO: 125203 - DNA, 1116 bp, Homo sapiens; identical to SEQ ID NO: 51676
  chr14:100149731-100150847
  hyper

SEQ ID NO: 125204 - DNA, 950 bp, Homo sapiens
  chr14:100259350-100260300
  hyper
gcgcccgctctctcccggccttggtctttgtccccgcgcccccgcaagggccgcccgccgcgccccgcagcccctgagcccccgtgcgcggaggcggggcctggccaaggggacagcgggcggcagacgcgcccctgcggctcccaggccgcccgggccgcgctccccgcggggaaagaggccgcaggcgcggggaggctcggccccgccccgccacgtccccctcccggcccgggccccgcggccgccgaggccgccccctcgcgggcggagcgggcgctgggctcgcgcggctgcggcggcggcggcgggcccggggttgccatggtaaccggcagcagcagccgccacagcagggccggccccagcgccagcgccggtcgcggtcgggctcagctcagtgtgtggtgagcggcggcggcgcggccgggccggggagcgggcgcggcccggcggcctcagcatggaggacggcttctccagctacagcagcctgtacgacacgtcctcgctgctccagttctgcaacggtgaggggcggccgcgcggggccggggcggcgagcggctggtggcgggcggcggcgacggcgacggcggggaccaagccgaggggccgaggcccggcggccgcgggcgaggccgcgcaaagttgttgcggaggggcgcgcggtccccgttcccgccgccggcgcattgtgttggagccgcggggccgcgcctcgctccgggccgccccgggctccccgccgccaccccggctcccggcactggcgcgcggaccccgccggctccagcacccgcggagcgcgcccgggcggaggcgcgtggggcacagggcggcggggaggcccgggcagcctccgcgttccggggaacgtgttgcttttttgcttcccgacccacatctgtttggaaatgactggatgaagaactcgggaaacaaatcct

SEQ ID NO: 125205 - DNA, 30 bp, Homo sapiens; identical to SEQ ID NO: 9955
  chr14:100371996-100372026
  hyper

SEQ ID NO: 125206 - DNA, 163 bp, Homo sapiens
  chr14:100437166-100437329
  hyper
ggaactgtgtcttcttacacacggggagtgagaccctggaggatctggggtttccagccaccagtgagattcactaacctttaggaaagatggggatttaaaaaccagagacaacctggacgaactacttgacgctgtgtacggtaaatgtgatttttcacag

SEQ ID NO: 125207 - DNA, 544 bp, Homo sapiens; identical to SEQ ID NO: 9956
  chr14:100437405-100437949
  hyper

SEQ ID NO: 125208 - DNA, 1009 bp, Homo sapiens; identical to SEQ ID NO: 51680
  chr14:100438017-100439026
  hyper

SEQ ID NO: 125209 - DNA, 186 bp, Homo sapiens
  chr14:100613201-100613387
  hyper
gctgcggcaggtggtcgtagtactcgggcgcgatcttccgcacctgtagagaggagggcggggctcaggggctggttctcctcggggccgcacccgcgagcacacacgcagacacctgagcacacgcggtgggcatgcacatgcatattcatgtacgaacatgtttgcgcgcgcgcacacccacac

SEQ ID NO: 125210 - DNA, 875 bp, Homo sapiens; identical to SEQ ID NO: 51682
  chr14:100625298-100626173
  hyper

SEQ ID NO: 125211 - DNA, 64 bp, Homo sapiens
  chr14:100626295-100626359
  hyper
cgtcgggtttttaccccggcccgttctctccgcagccccgacccgctcgcgggcacgcccctgt

SEQ ID NO: 125212 - DNA, 30 bp, Homo sapiens
  chr14:100680610-100680640
  hyper
gcgcctgagacgcccggcaatggccccgct

SEQ ID NO: 125213 - DNA, 225 bp, Homo sapiens
  chr14:100688017-100688242
  hyper
gtggcctcactgcctcggcaggctttcacttcaggagcattgattgagccgctctttgtaagcagcagtggaatcaagtagcaaccgacacaatcaacagggagagataaccaagcacccaaaccagcacagaactgcaaactgcgctgctatgaaaacacagatggggtgagggagaaggaatattggggagggtggagctgcccggctcgcggtaagcagagg

SEQ ID NO: 125214 - DNA, 30 bp, Homo sapiens; identical to SEQ ID NO: 51684
  chr14:100704656-100704686
  hyper

SEQ ID NO: 125215 - DNA, 30 bp, Homo sapiens
  chr14:100705842-100705872
  hyper
ccgctggtcaccgacgacccgacccaggtg

SEQ ID NO: 125216 - DNA, 30 bp, Homo sapiens; identical to SEQ ID NO: 51685
  chr14:100706273-100706303
  hyper

SEQ ID NO: 125217 - DNA, 30 bp, Homo sapiens; identical to SEQ ID NO: 51686
  chr14:100707051-100707081
  hyper

SEQ ID NO: 125218 - DNA, 209 bp, Homo sapiens
  chr14:100751378-100751587
  hyper
agcgggggggggcggggtagctagggagggagaggaggcaaggaggcaggacggggtctgagcacgcccctcaggtgtttgcatggcttcttcttggcctgccacgtgcgtctgtaccggaccctaggaatatcccgggagctggtggccagccctagcccctgcccgcctggcctttggccagcacttagcgcgggcagccctgcccg

SEQ ID NO: 125219 - DNA, 30 bp, Homo sapiens
  chr14:100751888-100751918
  hyper
gtgtggggtccccgcgagccgccgccgctt

SEQ ID NO: 125220 - DNA, 403 bp, Homo sapiens
  chr14:100771907-100772310
  hyper
cccagagccgcgaccgcgcctcggagaaggtgccccacaccggctcgcccgacccacccaccaccccccttccgcccccaacagctcacaaaaccgcgtaggaaggggcggcgttccaaggcgtgactcggcgccagagtggttcagtgccctccaaggccagccgagtagggggtcggctccgtagccccaaccccgctggatggctgcgcgggacggggtggagtcagtcccgaaatatacggccgggggaggggaccctgctcccagtgcgcaacggatggggatgggggaggggaaggagatgagcccgggacctcggcgcggggggcagtggggcatcctcccggcagtcctggcctccgctcagccacggtgctgccccggcgccccagacctcccg

SEQ ID NO: 125221 - DNA, 371 bp, Homo sapiens; identical to SEQ ID NO: 51689
  chr14:100773261-100773632
  hyper

SEQ ID NO: 125222 - DNA, 30 bp, Homo sapiens
  chr14:100842739-100842769
  hyper
cactgattggctggcggccgcggcgtcgcg

SEQ ID NO: 125223 - DNA, 1064 bp, Homo sapiens
  chr14:101033483-101034547
  hyper
cgcctcggctcaggctccggaaggaaaacacgggaggggtgttcccaaagtaggggtcagggtgccaggggaagtcgtggaggaagtggcaaatattcaaactggctgatcccaggcctgccgcgcaggtggtcccgtgaagtctaccaaggcttaaagtttggcaccgggagggaggccgcgggggacactccccagaagctgtcgcgggattcccccaaaatggctccaagacgcggctgcctggtccagccgcgaggactccatcccccacccccgccccccagaggcggacacttaaaagctcagagccaggcaactggcagcccgggggctggggcgggtggtggttgggggtggggtggggtcgggggagagagcgccggggcagtgcggaacggcacgaacggaacccggagggtccccggggaccagcgagagtccagggcagggagccagaggggcgctgaggaccgcacaggaccaggcggccccgggtagggggcagcccggccctcagtggcgctagccccagcccccgccgcagcggcccgggccggcggaggagccccgcgcgaggctccccagcgcctcgcggcgcgcacacacgcaccacacacacgcacctggcccgcagccccgccgaggccgcccgcgggccctgggggatgcgctcgggtggagcccccttcccccgccttccccagcgccctcacccccgacccggcccccgcgagccgcggcacgggagacgctccactcacctgagtttctccatgtctgcggcagaggcctgcgagaaaccaaacgagagggtcagcaggcaggaggcgtgcgctccgcggccgcgccgggcagagccgggcacagcgggcacggccgggcaaccccgcggggccccgtccgtgggaagcccggcgccgcgcgtccccagcttccagtcccggccgcggcccccgtgactcagtgggcgcgccgggccgcggccgagtaacaggtgagcccgcccgggccgccgcgctccccgcaccgagttacgccccccggggcgaagaaggggccgg

SEQ ID NO: 125224 - DNA, 30 bp, Homo sapiens
  chr14:101034797-101034827
  hyper
ggcatttggagcctcgactcctcaatcagg

SEQ ID NO: 125225 - DNA, 131 bp, Homo sapiens; identical to SEQ ID NO: 51692
  chr14:101053019-101053150
  hyper

SEQ ID NO: 125226 - DNA, 109 bp, Homo sapiens
  chr14:101192401-101192510
  hyper
tttgtgtttcagcgcggctaaggccctgactgagatgctgtgtgtgcgggggtgggtgtgactgaatgcgggcacgggtgtccgtctgtttatacgtgtgtttgcgtgt

SEQ ID NO: 125227 - DNA, 178 bp, Homo sapiens
  chr14:101192968-101193146
  hyper
tgtgcgcggcggccgcgtgctgtacagtgtgagggaacgtgtaccaaacgctcgcgggatacctgtgcccgtctagccaagagtgcacccgtgtgcgcgagcgggcttctgggacgccgccgtggtcgggggcggccctgcgaggggagggggtcacagggactggccggcgccggcc

SEQ ID NO: 125228 - DNA, 402 bp, Homo sapiens
  chr14:101543870-101544272
  hyper
aataaatgaagtgcgcgccggcggagtcagtaactcactgcgcggctcccggcaggcgggggcggagtgggggccgcagaaccggacgtgcctggcgaggttcagaggcgctagcggtgtggtgggtgggcagcgccgggatggctggagggaggggctacggggggaggcgctgccgatcccacactgatctggcggggaggagggaggggcggatggggtttgctggagaacttgaccttgcttcgctcccctcaaggggcagctgctgggagaccaagtgtcaccggctggcaatcagggccccaagcctggagacttctggacaagcggaggcaagccgaccatgacggcttgggtgcagggagcaggtgtctgagcctttgacgtagacttcccgag

SEQ ID NO: 125229 - DNA, 30 bp, Homo sapiens; identical to SEQ ID NO: 9963
  chr14:101656894-101656924
  hyper

SEQ ID NO: 125230 - DNA, 101 bp, Homo sapiens
  chr14:101923237-101923338
  hyper
aggggttcaaggccgcgccgttgtgagtccgctgcggaactaggaactgaaaccccgtggttcccaatgagccagcgaaagtctgtcgaagtattgagcac

SEQ ID NO: 125231 - DNA, 80 bp, Homo sapiens
  chr14:101923606-101923686
  hyper
gaggggagacggggcgggtgtgaagtctgtgccgggaaaagaaaaatatgagtgttctcttttgtgtgcgcacaaacagc

SEQ ID NO: 125232 - DNA, 213 bp, Homo sapiens
  chr14:101924030-101924243
  hyper
gacgccctggcccggtgtccccgacgcgcctggagcccgggagggaggcgcgggcctggcctgggcccaggaggatggagcccgactcagggccgtctctccccgcttgggggtgctcaggagggcccagggtacctgcgcgggcaccttggcggcgggtcaccctccctccgagccactccgtccgtgggcagcggccttaccaggtccgag

SEQ ID NO: 125233 - DNA, 142 bp, Homo sapiens; identical to SEQ ID NO: 9966
  chr14:101924295-101924437
  hyper

SEQ ID NO: 125234 - DNA, 334 bp, Homo sapiens; identical to SEQ ID NO: 9967
  chr14:101924457-101924791
  hyper

SEQ ID NO: 125235 - DNA, 214 bp, Homo sapiens; identical to SEQ ID NO: 9968
  chr14:101924857-101925071
  hyper

SEQ ID NO: 125236 - DNA, 257 bp, Homo sapiens
  chr14:101925655-101925912
  hyper
cggcagagtctctggggcactcggggcgggcggcagcaggtgggacccgcggcccgacccgcgctagggccgcccaccccctcggaccccggccgggtctctccacagcctccgtgcgcgtcccagaaggaaaatgctagcaaaccggaaggccgcacggggccgagccggcctcagcccggccaggagaggccgtcggtgccccgaggaggaaggggacccggcccgggacggccgccccgcggtacccaggaagg

SEQ ID NO: 125237 - DNA, 1095 bp, Homo sapiens; identical to SEQ ID NO: 51701
  chr14:102026076-102027171
  hyper

SEQ ID NO: 125238 - DNA, 75 bp, Homo sapiens; identical to SEQ ID NO: 51702
  chr14:102027654-102027729
  hyper

SEQ ID NO: 125239 - DNA, 30 bp, Homo sapiens
  chr14:102028063-102028093
  hyper
ggggcagcccgagcccgaagtggagctcaa

SEQ ID NO: 125240 - DNA, 258 bp, Homo sapiens
  chr14:102029131-102029389
  hyper
cccgcgcgccctgagcgcagctgggttccaggagactctcagctcagctgagctagttgcctggcacccacctgtcgcgcgcggagagggggttccctgttgcttttgtgtctgtttcctgtccctggtaggggaagtgatgtcgtggatggggaggggtgggcagggtagtttcccccgcttgttttgggtgcacaggagccccactgctgatgacgaactatctctaactggtcttgaccacgagctagttctgaa

SEQ ID NO: 125241 - DNA, 1204 bp, Homo sapiens
  chr14:102029812-102031016
  hyper
ttttcttttccctctgaatagcggcaggaattaaacacaaatccctccctcgcgtccccatagtgaccttgggaagcgggacgggaaggagcctaggctggcaggggcgctggaggaggatggaggaggaagagggtctgcggcggtgcccggggcgctcctacaaccgcacgcacccacctggacggggaacttagctgcgggagaagagcgaggtagcggagcgccgcgggatcctggaaagcggcgggagaggcaagggggccctctcttgctcccgcgcgcgcacacacagaccgaacagatgcagctgcccctgcagccgccgatccaacttaactgagtatccggcggtgtgtggagggggttgggtgaggtggagggcgagaggggctttggacccggtacagcctggctcccgaccgctgcaggcaccactgcgcacctgactcctccctggcccccttccggcacctgcaaccttgcctcttgcccacccgctccaggcagctgaggtccgctggaggcgcgccttggcagaggggcgccctcactccagctgcggctcctactgccgggccagcgtgctgctgggtgcgccccctgcccaggacccccctcctcctgtccctcctccgcttccccaagctccagtcaaaccccaccacccgctccgtgctgggaagcagaggtgggaggccgctgggatgaagagagagagaccagggagaggtgaatggtggattccagggctggggcggggattcggggccttaggcacaggtcccctcttgcagtcacggccaggggctcgctctcgcgcaatccccgccctcactgtctcgcctgttgcgcccggagtgagggcgacccgggggacgcgggattagcttagcccgcagcccctgtgccagcgaaaccttgaacattaagtgaaaggtgggggacacagtgaaagccgctgaggcgggagtgtacggatccaggtgaggggactgggcacggcaacttccctggcgcgccaggacaatgcctgggaacccaggattgtcagggtcgccgggggtgggggtgagtagtgtcggtttgcgcgcttggatgtgagcgcgggtgtacatggcagggttgggtaggggtgcagaggggcgcggcaggcaggatggaagagacgcccccgttcagccaacggcgtccctaattctgc

SEQ ID NO: 125242 - DNA, 214 bp, Homo sapiens
  chr14:102031235-102031449
  hyper
cgcggcagggacgcggcccggcgcctgggagagtcctccctgacctccccgcacgcgcggctggccgggactggagcttggtggcgcggagggtggcctgggacagcgtcagcctcccggcccagcagagaccgctccagccgctccgcgtccctaccggtggcttgggggtccccttggacgcgccaagcgacctctcctacccggaaagcct

SEQ ID NO: 125243 - DNA, 11 bp, Homo sapiens
  chr14:102031507-102031518
  hyper
cgcagcgccgg

SEQ ID NO: 125244 - DNA, 30 bp, Homo sapiens
  chr14:102227578-102227608
  hyper
ggttcgcgtttcgccggctgcagaagttgt

SEQ ID NO: 125245 - DNA, 30 bp, Homo sapiens
  chr14:102228838-102228868
  hyper
tgcattcgggggggcgggtatgtttctgct

SEQ ID NO: 125246 - DNA, 676 bp, Homo sapiens
  chr14:102247585-102248261
  hyper
cttgtttacagctgccgtatttcccgggaccctggcttctgtcctcagggaccccttcagaccttccccaccctccgaagcctcaacccgccctgcgcctcccggtggcacagcgaccttggcggctttggcccctgagccgctaggctgccaaggcgcgctgtgcgcgtggggccaggctcgacctcactcctgttgtcgctgcagacccgcgtgggctcccgccgggccctcctgccgccccccagcctccccgcccctgcccttgccagcctgcgccttcctgggcgcctgacgcacccctctgccccaaccacgttttctcaagagtgttgtctgtcccggccttccaaggagacccttagctcccgccggccgcctccggagcctccggcatgggccccaggccggggtcccgcctttgccccggcctccgctgcctcgccccggagcccggaggaggggagccggccacccggggaagaagcggaggacgccgatctggcctcctgcgttgcgcgctccaaccctctgcttggccgcccgcgaaccgcgctctcccgtttcctttccgtcccgtctcgggggcttcatcctccagccgtggccgtggccgtggccaggtgtaccggagcggcacccaggagcccgccctagcacccgctcccgctcccac

SEQ ID NO: 125247 - DNA, 84 bp, Homo sapiens
  chr14:102276018-102276102
  hyper
aggctgcaaaaagccggaaaatatcccagcttttaaggcacactgacagccaaacagaacgctctttccgtttgcagttttttt

SEQ ID NO: 125248 - DNA, 30 bp, Homo sapiens; identical to SEQ ID NO: 51707
  chr14:102414714-102414744
  hyper

SEQ ID NO: 125249 - DNA, 30 bp, Homo sapiens; identical to SEQ ID NO: 51708
  chr14:102431407-102431437
  hyper

SEQ ID NO: 125250 - DNA, 30 bp, Homo sapiens; identical to SEQ ID NO: 51709
  chr14:102431808-102431838
  hyper

SEQ ID NO: 125251 - DNA, 30 bp, Homo sapiens; identical to SEQ ID NO: 51710
  chr14:102553245-102553275
  hyper

SEQ ID NO: 125252 - DNA, 142 bp, Homo sapiens
  chr14:102605814-102605956
  hyper
ctttggggtcccggcgcccctcagggcagggcgggagaccgctgaggaggcaccctcaagttcacctcaggctcatgacaccagccccgccgcggttccccctgaccggctttccgctggccctggcggctgcggaacggtc

SEQ ID NO: 125253 - DNA, 33 bp, Homo sapiens; identical to SEQ ID NO: 51712
  chr14:102606250-102606283
  hyper

SEQ ID NO: 125254 - DNA, 242 bp, Homo sapiens
  chr14:102771430-102771672
  hyper
ccctcgaaggagagcgttagagatcccgccgccatgttgtgtccctgtcaccctagcaaccgtcaggccctgaacgccatgagctgtcgcctgcgcatgcgcaagatgccccgcccatgtacgcgtgcgcagtgcagcccgtcccctcagcccggttgctaagcagcctttcctccgcttccatgtaaatactgtgcaaatccccgcctttgacacaggcgaccttcgctcggctcgctctc

SEQ ID NO: 125255 - DNA, 30 bp, Homo sapiens; identical to SEQ ID NO: 51714
  chr14:102780814-102780844
  hyper

SEQ ID NO: 125256 - DNA, 30 bp, Homo sapiens
  chr14:102783393-102783423
  hyper
ctcttaggcgctcccgtgggggcccaacgt

SEQ ID NO: 125257 - DNA, 30 bp, Homo sapiens
  chr14:102785745-102785775
  hyper
cggatgcatgatgacgtcagaacacttgga

SEQ ID NO: 125258 - DNA, 61 bp, Homo sapiens
  chr14:102829076-102829137
  hyper
aacctcatgtaatccggggagctcctgagcttctggtccaacctgcggcctaagcagtaac

SEQ ID NO: 125259 - DNA, 160 bp, Homo sapiens
  chr14:102829773-102829933
  hyper
gctgccggtctggccgcgggctctgctccttcgccttaagattgacgtcgtgttctgtcccccactcgcagcccgcgtcccttacatccgcccaccggcgcctggccccaggccttgacactcatccagttggtgttcagtgttcgatgagtggataagt

SEQ ID NO: 125260 - DNA, 378 bp, Homo sapiens; identical to SEQ ID NO: 51716
  chr14:102975680-102976058
  hyper

SEQ ID NO: 125261 - DNA, 30 bp, Homo sapiens
  chr14:102982999-102983029
  hyper
cccaagggtgacagcggccagtgcgcgggc

SEQ ID NO: 125262 - DNA, 30 bp, Homo sapiens
  chr14:102991379-102991409
  hyper
accgaagtcattctcgctggctcctggcga

SEQ ID NO: 125263 - DNA, 219 bp, Homo sapiens
  chr14:103010921-103011140
  hyper
ccctgaaacgctgcccggaacgccccgcgggagaacatctgcgccaggggccgggggccgggggccgcggcgggcgaaatccgagaggcccgggctcctcctgctgcgcggccggggaggggggcgcctgccgggtcggggctggaggacctgcgcgcggccccgggaggccccgcctcgccttccagtctgtgaaatggggcgacggcctgggcgtgg

SEQ ID NO: 125264 - DNA, 96 bp, Homo sapiens
  chr14:103011360-103011456
  hyper
ggacgggcctcagtggcttccccgcccctccccaccgcgtcccggctccccgggcggggggtggggggggtcgcgtgcggacggttccccaccccg

SEQ ID NO: 125265 - DNA, 775 bp, Homo sapiens; identical to SEQ ID NO: 51717
  chr14:103021344-103022119
  hyper

SEQ ID NO: 125266 - DNA, 232 bp, Homo sapiens; identical to SEQ ID NO: 51718
  chr14:103057880-103058112
  hyper

SEQ ID NO: 125267 - DNA, 30 bp, Homo sapiens
  chr14:103059002-103059032
  hyper
ggcggcgatgagagcgaaagttgcgctcgg

SEQ ID NO: 125268 - DNA, 174 bp, Homo sapiens; identical to SEQ ID NO: 51719
  chr14:103242389-103242563
  hyper

SEQ ID NO: 125269 - DNA, 31 bp, Homo sapiens; identical to SEQ ID NO: 9977
  chr14:103263057-103263088
  hyper

SEQ ID NO: 125270 - DNA, 30 bp, Homo sapiens
  chr14:103352351-103352381
  hyper
gagacactcacactccgtgacaataatgac

SEQ ID NO: 125271 - DNA, 30 bp, Homo sapiens
  chr14:103352587-103352617
  hyper
gactctcctgaggagcgaggtaggggcggc

SEQ ID NO: 125272 - DNA, 836 bp, Homo sapiens; identical to SEQ ID NO: 51721
  chr14:103394621-103395457
  hyper

SEQ ID NO: 125273 - DNA, 412 bp, Homo sapiens
  chr14:103430221-103430633
  hyper
gtcccttccaggtcctcgcctgcctcatggcacagcagagctggcctggtttttatgaaactgacgttcattatcgtatcctcgtaaaaccagatctgcaaagaggagactctcagcaaatactgactgaatcactgctgtgtgaaaatggcgttctcgttactgcttggagttagggaaaaatttcaagtgagaatgccatcttcaacctctgttttaaaatattcacgttagcttgaaaggaacaatcttgaattagtgaatggagcggcacggaggtgactaagcagtgagaggggctcctgtcagacagcggtgtgagtctcgctacccagcgtgggggcacaagcacccgctgccgtcaaaacacggctcgcaccgcaccacacccccccgcggcaggcaaggccct

SEQ ID NO: 125274 - DNA, 1542 bp, Homo sapiens
  chr14:103523057-103524599
  hyper
ggatgagggggcgggacgatcgaacgcggatgtcgagcctagggagggcaaggagggatgaaaagctagcggagggacgagggtgcaaggagcggctggagagagatgggctgcgggcctgggggcgctgccagagcgagaggaggcgaagcccacgagctgggtgggcaggagggcggcagggtctgtccgggcggggatgggcgggcgtggggatgcgcgggctggggcgcgggggtcgcagagccgcaggtccggccctgccggcgcgcacttaccccactcgaggaactcggccacgtacttgtcgcggcgcagggccgagtggctgcactcggtgtacaggcagacgagcacgtcgagcagcgtttccacgctcagggcgctctcgttgcgccagggcccgtccaggagcagctgctccagcttcttgagccgcaccttggccgacatggtgccgcgcggcccgctcccgacgcgccggcctctcaccgccggctcggccagtccgtcagggcgcgccctcgggggctcggcggctgcgagccccggcagcagcggcgcctcctcgccgccccgtccgcgtcgtcgcgccccggcctaggccgacatcttgggctccgtcccgacggcgcagagtctggggcgccgggccccgcgggtccatgggccgctctcctcccctcggcgccgccgccctcccagctcgggcggcccgcccccgccgccctcagccccgcccgcggccgcgccctccccgccgccgccgccgcagactaggagcggcgaggagcctagcgctgcgcaagcccggccggcgcccgagcccgaccccagccccgacccggcggcccagccccgcggcccgcagccaaccagggcgcggccagcaccagcgcagccaaccactacggggccggccgccgccgcgctgacctcagcgcgccgccccgccccgcgcccggctccctgctcccggcgggctcgggcctcgccgcttgccgtagggagccgggatgctgggaaggcagggccgggcctggggagcggcgcggggtgggggtggggggggcggggcggggcgagtgggccgctgagattgcggagcccgcgcatgcgcagagcgcgcctggtgggcgtgtgcgccttcgccctgcggacccggtgccttcagtattcggggtccgaccgcgcgcgtcgcggatcccggggccgaagacgaccccaagtatcggagaggcagagtcgcgatctcaggccgtcgagccccgtcccgcagtccgcgggcccatgttgcctgcggggcctcggacctgcccggccgaggtgggggtcgagggcggcccggcaggcgcagctctgatggcctcggcgggttgtgggctatttaaaacggcttgtcccagctcgaagcggtcctggaagactcgggccctacccctgactttaccgatgagagactgaggcccagacggtgtggggtcagggcccaggcttctgggggatgctgccaaggcgggagccagcgtccccagtgcccgg

SEQ ID NO: 125275 - DNA, 78 bp, Homo sapiens; identical to SEQ ID NO: 9982
  chr14:103541956-103542034
  hyper

SEQ ID NO: 125276 - DNA, 31 bp, Homo sapiens; identical to SEQ ID NO: 51725
  chr14:103542258-103542289
  hyper

SEQ ID NO: 125277 - DNA, 273 bp, Homo sapiens
  chr14:103557876-103558149
  hyper
ctgccccaccccgccgcccttcaccgcgagccggggcccagaccgcccagccacgcccagagcccgcgggcggagacgccaggggcggtgccagcgaggtcccgtccccggtaccccgtcccgcccccccacacgcggtgacctggggacgccccgcgggagtcgttctgcggctccccctggcgtcggctggggccaccgcccgggctcccacctcaaccctgcaatatggggttggggcagagtggtctgctgcccgctgcccgcagccgc

SEQ ID NO: 125278 - DNA, 508 bp, Homo sapiens
  chr14:103571011-103571519
  hyper
aggggacccgcggcctcaggtcgggggctgggaggcacgctcagtgcggggcttcgctcgcagctcgtggccgagcacgtgaaggcggccggcgccatctccgcggagctggaggccaccaccctgcgaatctgcacgcgggcgctcggcctcttcgtgcccaggtgcggacgcatcctcagtaggggagcgacctggccgggtgcgctctgcaggtgggagggaggagtctgcgtagggacctgattgggagggtggacccagggtcatcgcgcagctagggagggtccccaaaggctctgtgtatcccgccccaggtttgaaaaggcttttctggcgtcggaggcggtgagcgagccgcacctgggcgcctacatcaacgcctgcgaggagctcaggtagggctcgcccgctcctgtgcgggcgcagcgtggccagcagggggcgcgcgagcgccgggaacctggatggaggggagtgcgcgcgcgtggagggggcagaggtgagg

SEQ ID NO: 125279 - DNA, 110 bp, Homo sapiens
  chr14:103590100-103590210
  hyper
aaaggccccaggtccggcgtgactccccggccgggcgacacaggccgagtcacttcctcgcccgtgcccgggtgtcctcatcgggggatgggtgcgccttccacatcctg

SEQ ID NO: 125280 - DNA, 30 bp, Homo sapiens
  chr14:103593101-103593131
  hyper
acttgcacagtgggccggcaagtggggctg

SEQ ID NO: 125281 - DNA, 30 bp, Homo sapiens
  chr14:103593514-103593544
  hyper
ctgggcgtgctgcggcggccgctggaggcg

SEQ ID NO: 125282 - DNA, 539 bp, Homo sapiens
  chr14:103593754-103594293
  hyper
tttctgcacttgggccgcaccatgaaggaggacctggaggccgtggtggagcggctgaagccgctgttccccgccgagttcggcgtcgtggcggcctacgccgagagctaccaccagcacttcgcggcccacctggccgccgtggcgcagttcgagctgtgcgagcgcgacacctacatgctgctgctctgggtgcagaacctctaccccaagtgagcagaccaggggctgggcccgggccggcagggagggtgtcctctgtaggaggggtgtcgaggggtgtcgaggtgtgccgccggcagcttttagtgaggtcggtgtttgcagagttttgggtccgagaatgcaggggtgggacttggactccctggggcagagcctggacaggcagagactgggcctggacacagggataaggctggggctgggtctgcgttgctcttggaatccttaatttcctgggcctcagtcacattctgctgttggggaaactgaggcacagaaaatggtagggatttcattcacgagcgcccagtctg

SEQ ID NO: 125283 - DNA, 199 bp, Homo sapiens
  chr14:103655330-103655529
  hyper
cactggacgtcccgccggctgtacctggcgccccgtggcctcgctcccgaccgctgccccgcagaggcctcccgaccgccgaggccctcgccacgcccgggtgcccccagggggcgccggcttccacccacagagctccccaggcctgggcgggcgcagggagggcgcgaccggggcgcacccgcgcgggaacttggca

SEQ ID NO: 125284 - DNA, 71 bp, Homo sapiens
  chr14:103674215-103674286
  hyper
gttcccgggggtcacggccaagatccagcggaggatggaccaggtgttcacgctggcggtgcgcgagacgg

SEQ ID NO: 125285 - DNA, 268 bp, Homo sapiens
  chr14:103686609-103686877
  hyper
gggtccgaagggagccgcgtgggaagcggggacggggagcgtgtggagggacccccgcgctcccgggccgaccctctgcggcctctgctctgcgcagtccgtcctcttctcccgacctggcgtgcgtctcctgttccccggccccccatcccatgggaccgtccttcctaacggcacttcaccccgcccggcccacgaggtggtcccgggccggtgacaagatctggacgtggcgactccgggaaggggcgaccgggcgcggagagcc

SEQ ID NO: 125286 - DNA, 30 bp, Homo sapiens
  chr14:103687110-103687140
  hyper
ttggggagctctgcgcgcgggagccggcga

SEQ ID NO: 125287 - DNA, 552 bp, Homo sapiens; identical to SEQ ID NO: 9984
  chr14:103739884-103740436
  hyper

SEQ ID NO: 125288 - DNA, 161 bp, Homo sapiens
  chr14:103740539-103740700
  hyper
cgcagcagccccggcaggcaccctccagcggccgtgggcgcctggtagctatggaggcggtagaggtggaaaccaggcctctgtcttcacacaggaggaactccaggccctcgtttaggactccaggccaaaggctgtgtcagccgcgggtcccccgccac

SEQ ID NO: 125289 - DNA, 49 bp, Homo sapiens
  chr14:103745188-103745237
  hyper
ttgtttttctttctcactggagctggttccagattagatctggtcggac

SEQ ID NO: 125290 - DNA, 54 bp, Homo sapiens
  chr14:103745292-103745346
  hyper
cgcgggtccgggccaaggctggcgggggtcgccgcggcgcgaccgcctcctccg

SEQ ID NO: 125291 - DNA, 234 bp, Homo sapiens; identical to SEQ ID NO: 51733
  chr14:103745669-103745903
  hyper

SEQ ID NO: 125292 - DNA, 30 bp, Homo sapiens
  chr14:103799741-103799771
  hyper
gtgggaacccaccacgaagcgccttcagga

SEQ ID NO: 125293 - DNA, 53 bp, Homo sapiens
  chr14:103800151-103800204
  hyper
gacgatggctcctgcgtcccgggagtcgccatgacgccgcggcctgtcccaga

SEQ ID NO: 125294 - DNA, 30 bp, Homo sapiens
  chr14:103800461-103800491
  hyper
gaaccaatgacgagcgagctgtggcaggcc

SEQ ID NO: 125295 - DNA, 30 bp, Homo sapiens
  chr14:103801121-103801151
  hyper
gcgtcgcgcgtgcccgccgctcgggctgac

SEQ ID NO: 125296 - DNA, 30 bp, Homo sapiens
  chr14:103801645-103801675
  hyper
agagggctcgggttcgttcttcagcacttc

SEQ ID NO: 125297 - DNA, 112 bp, Homo sapiens
  chr14:103851530-103851642
  hyper
ggacaggaggaacccgcagcccgcgggagtcagcggagacccgaccagcactatccagccctctgcaccgcccccgcggcgaggtctggaccaagtcgcccctagcaacaac

SEQ ID NO: 125298 - DNA, 30 bp, Homo sapiens
  chr14:103987372-103987402
  hyper
gagcccccacgggccggggcccagtccctt

SEQ ID NO: 125299 - DNA, 1104 bp, Homo sapiens
  chr14:103988424-103989528
  hyper
cctcgatgatggggtcgaagagatccttgaacacttcgtaggactcctcgtcgcccgccacgcagcccacggtcatgatgtacgggtggcctgggggagggggcgcgggacggggacagtgacgtcactgccgggcccgagcgcgctgctgaggaccctgcggctgcgcggggggagggggggccgggaccccggccccgaggggtcgcgtacccgggttgtccacgcctgtctggatgacgtcgtccagcgtgaagccgctcggcgtgctcttggcgcgcagctccgcgtacagctcgggggtcagcaccttggccatgtggttgttgtgggcgctcaggtcggggaactcgtcctcggccgggaagcgcagcttcagtgcgttgtggctgttggagaagggcatggcggcggcgggctgcggggagacgcggggtcagaggggaccggcacgccggggttcccgggctcccgcgtaccactcaggcccccgccgccgggccccccggcgccccccgggacgcggccaaggtcagcggggtccgcagcgcgcgcggggagcgccatcatcgccggggacccccggccggtccggcgcgcgctccaggcgacgcgccccctttgcacgcagcgcccctagcccgggcgcggacgcccccggcccccgggcccactcaccgggcggccgggcgggggcgggggcgctccgtccgtcggcagctcccggagcgacgcaggcgaacagcggccgctccgcgctcccgcggctcttaaggggcacaacgcgggccgcccattggcggctatttatagcccattcattccattggcccgcgccgcggggtggtgccgccgctttgtccgccgcccgcagcccccaacaccctggccgcccacccgagctgtcccctcgctgggaccccgcgcagcctgcccagtcccccgcccaagacctcgaggccgaaacctcaggtccttggatatctggatcccctcgcacgcccttgcctctgggcgggaaactgaggcggagagcctccgggcactcgaggacgcttgggttcatccgcatcctcgagcctgcccgcctagtccagccagccc

SEQ ID NO: 125300 - DNA, 182 bp, Homo sapiens; identical to SEQ ID NO: 9988
  chr14:103989537-103989719
  hyper

SEQ ID NO: 125301 - DNA, 362 bp, Homo sapiens
  chr14:104029512-104029874
  hyper
acaaacccgggcctcggggccactccctgttctgcacagccgcctcaggcctttgtccaggtgctctcgcgtcctatcccgaacagtcccgcagccccgaggctcccgcatcaacgccctcagtcggatgggactgagggtgccgccgccaccacgccggggactgttgacagccagaacctttaagcgtaacagagtcacctggcaagtttgtacctaccttatttgttcccgagaatgattattttttatttttaaagagctcttggcttaccgtgcgttttttttcgttgtgtgtgtgtgtgttttggctttgttacaattattagtgcttttcttcaagcggcgagcactttatcatc

SEQ ID NO: 125302 - DNA, 120 bp, Homo sapiens
  chr14:104094603-104094723
  hyper
gctggcagcagcgagcggagcctcgcccattgaatcagcatgccctcccggctggctgctgagtcaggcctgcggagccggcgaagccgcaggacttgacccaggcgcgctccgctgccc

SEQ ID NO: 125303 - DNA, 106 bp, Homo sapiens
  chr14:104094809-104094915
  hyper
tcacagtctacaccccggcccttcccctttgcccgtctgaggcgcagtttgtgtcgagggggagcgcctggaaagtttcctcgtacagatacgagggtccaaaagc

SEQ ID NO: 125304 - DNA, 30 bp, Homo sapiens
  chr14:104095621-104095651
  hyper
cgcggggctgtgctcggcggccaaggggac

SEQ ID NO: 125305 - DNA, 30 bp, Homo sapiens; identical to SEQ ID NO: 51738
  chr14:104181378-104181408
  hyper

SEQ ID NO: 125306 - DNA, 175 bp, Homo sapiens
  chr14:104181914-104182089
  hyper
tgagaggggcggagcgtacccgggccagccctcgccgccgattggtgatcgacctcagggttgcaggggcggtgcccttacacggattggagagggcagcgatggggcggagttcaagctccgattagtccgcgctccgtggcgggcttggcgattggacgccggcgctgtcagc

SEQ ID NO: 125307 - DNA, 30 bp, Homo sapiens
  chr14:104182936-104182966
  hyper
agcgaggtcgcagtcgcccactggacagtt

SEQ ID NO: 125308 - DNA, 30 bp, Homo sapiens; identical to SEQ ID NO: 51740
  chr14:104312997-104313027
  hyper

SEQ ID NO: 125309 - DNA, 30 bp, Homo sapiens
  chr14:104314568-104314598
  hyper
cgcctagaaccccgcgcccacctgtgccac

SEQ ID NO: 125310 - DNA, 30 bp, Homo sapiens
  chr14:104376855-104376885
  hyper
ctacaggctgccttcgggacaagacctggt

SEQ ID NO: 125311 - DNA, 30 bp, Homo sapiens
  chr14:104387568-104387598
  hyper
aggtgcactgagcgcgttaaggccaaggag

SEQ ID NO: 125312 - DNA, 30 bp, Homo sapiens; identical to SEQ ID NO: 51741
  chr14:104387797-104387827
  hyper

SEQ ID NO: 125313 - DNA, 235 bp, Homo sapiens; identical to SEQ ID NO: 51742
  chr14:104582800-104583035
  hyper

SEQ ID NO: 125314 - DNA, 987 bp, Homo sapiens
  chr14:104583110-104584097
  hyper
cggccaaggtggagccccgggccctccgtgcgcccgagcacccccggcccagacgagacggttcgggcgtggcccggcggggacccagaacccgggaggccaggtgcgcccaggccaggcgctggaggctggggcgccggatggggcggggcggccgctgagtcagggccacccccgcgcgggcgcgcggagcaggtccccgggccgtggaggatcagtcgcgggacctatgggcccgggagccgccccgcccggaaaaaccggtcgggccagcgcggcgcgggcacattccggcgccgggaagggcggctgcgccgcataaaaggcgccgccgcgctggccaccgccgctcggagctcagccgccctgccacgcggggcccgcgggacgaggggacgccggggccagcgaggacgcggcggggctgggcttggcggctgggatcccccagcgccaggcgagggcgtctaaggcgtccggtacggcgtcggggccgggtggctgcagcagggcagggggtgcgcgaccagcggggatctgggcgcaggggccggtccccgggatccgcaggcgacgcgggcggtcccaagggcgtcgggggctcctctctccgcagctcggcgaaccgacggtgttggggactcgcgcgctgggtccagtggttcttaacagttcaacagttctgtagcgcaattgtgaaatgtttaggaccactagacccggcgggcgcggcgacagcgacggagcgtcccacgcgcggcctggagtcagagtcacagtcaggggtgcgccggcgaccaatccaggggagcccacggaccggctccgcgctccaggtcggccgccccatgcgccgcgccccgcagtccccagggcctggctggctccacctgctgccagggaagaccctcggccggagagccaagtgctgctgggaggtggccgggcgtggccgggctgtgctgtgggaaccgctgggtgggggcg

SEQ ID NO: 125315 - DNA, 261 bp, Homo sapiens
  chr14:104601611-104601872
  hyper
aggacggccttgcggcgccgccggagcagtggggttgtggggcgtggccatggtccttcccaggggagagtagaggagtgcagggggcagagagcacagaaagtctagcccagccttagcaccccagccaggccataggtgcgcgctggcgccgctgaaaacgttctccttccctcgcctgtccaccttccaggtcctgctcaaggcgcctaatatcccctgggcagggtccctgacacttccttaactcccaaagacctt

SEQ ID NO: 125316 - DNA, 3632 bp, Homo sapiens
  chr14:104601963-104605595
  hyper
cgaggctggggcagcccacaggaggagcgcgggacccgggcttgagtttgcacccaggcagagcgcccacccccgcccctagcttcggaccctgaaagtaaagtcgtcgtgcccggcagccagcccgaatcttccagccctcagggagtcggggtcggggcagggaaggccacgggtggcggcacaatcgggatcctggagtggaggcgcagactgcgggtcccgctgcgcacgctccgtggtccggttggggtgggccttggaggtccataggccaaggttgaacgggggctctggagcgtgggcggggtggagtgcacaggtcactgggctctgagcgtttccatgggccaggaccccaacgcgccgtgtcctcaggacagattggagggggaaggggctgcgattatgccccagtcggaagggttttacagcagccgcgctgccctctccctgccggatacccggcagtagacaccgacgtctgggggctagcgaggcaggtgggcgcggaccgcgacccgattctggcttccaacctccgcccagtggcgcgcggggccgtcgccccacacctccagtccgcgtggctggtgtctggctcgccgccggggcggaaggggcgctgtcggcgcaggcgggcggggccggagcgcgggggcgcgcggcgcggagcgagcgcagggctcgggggcgcggggcgcggaggaccgggggcttgacgggcggccctgcgcggtgcggggcgcggcggcggcgggcgcgcggccagtgaacgcgcgggcggggcggcggtggcgggaggcactaggggccgctccccgcgcttccctcttccatggcgctgccccagccgcccgagccgccccgcggcgcgccccgcaaggctcccagcctgctggagatgggggcgctctgcctggactcggagatcatcctgggcttcaccagccacctcctgcggcgacgaggcaaggtgagggctgtcgggaggggggcgggcggcgtaggcgccgtcccgttactttgccgcgcggctcgcgcggccgggggtgctgcgccgggaaggagacggcaggtccggagccgcgtcccgcagcccgggctgggactcgctgccgcactttcccccattagcgttgtccaagtctccctctgccttcaaggctgtgtcccaaccggacccacccggaggctgtggctagggcggagagcgcagcgcagggattctcgggctcaccttgcgccttgctaggatgggcgaagtagggggtcggggcccctgactgatcgtgagcccccgaggtgactccagccttgtgcaccccgtgttctgcggatatgggatgtgagcttgtgcttcccgaagcgccgcggcggtagaagcgctgaagttgcgggtgtggctggccaggggcgcaggaccggtgctcccgaccgctgcgtgcttctgtgttgcgtgtgtgggtggggggacgggatatagagagtgtgtgtcccggagcagtggagcggcgggaggcggtgctgtctgccggcagtgcggggtggggtttgggtgttgtcctcagtacccagatccagatgtgggctgacgcccgttttcattctccaggctgcgaagagacgggtaggggaagcgcttccggccccccaggctgggtggaaagcgactgcaggcttacggatctcagaaagagtggagagcccctgccactttattccatacccccttgcgttttcgaacccctaaggtcatcaacgacccggaaagccgggaggggatcacccaccccactttctggggagtgcgtgcgtgggcggggaggcttatccaagtaaaagggggtgggcaaaacggaaagggtcactttgacgtactgagtctctgcgaaggcctcaccgtatgtgccggcagccgcgtgtcctggtctccgccgggtcacgaccttcggagtttccgagtgcgcctcaggcctgggacgcgcggcgctgtctccccagtctcggagccgtgtgcgcagcggccggcagggggcactcgcgtcacggggagcccgcccgccgcgcccgcctggcttgacccgggctttggggctgacccggagcctggcccggagctgcctgcggccgcggatgccggcgacatttggggcccggctaggcacagagcaactggtcgccagggaagggcgggggggcggcctcccagccggagacaaacaagcaattaattccggagctgagttcccatctgccaggcctgctgacaacaggtccggcgcacgcccgcaggacctcccgcttcccgggcggcacggcgcgcacacccacttgcgggcacacgcgcggctgtaaagacacgtgccgttcgcagacgcgccgaggcacagatacgccggcgcggtcgctgcccggctcgaggcgcacaccgcggcgacactaacccacgcgcgacagttagacctaaagtggcccgcgacacgcagagtacgctgggcttgctggaaaggcgcctgggagtctcggggccggggtcccgccccttcctcggcccacctcgccgtgggccttgggcaagagcgtcccctccgcagcctcagttttcccgcctgtagagggaggggcgtcggcgcctcctgggagacgcgcagccctggtgtcccgggagaggggcgggaggcgcatgcgcgcgcgcaactagatcctcgccgccgcccccagcgcccctccccggggcagggactcacctaacaggttggggtccttggagtgcgcggggccgcgtggggaagcggggaccctaccccccccacgcgccgcccagcactgggcaagggcggggcactctctgggctcccgcccctcgccgcccgccccgggagcccgagccccgcccttccccggccccgccctcgcctcccgagcgcgcccaccggagccaccgcgctcctcgcgacactcgcaggctctgcgaacttccgagcggctgggccgggccatgggggcgcctcggggccggatcacgtagccgcggcgcccccggagagccagcgtggccgggagcgcctgccgggctcttcccgcgccccggccatggtcggccgcggcgtccctctgtgcgctgcgcagcccgcggtacgcgcggcccggcctggagagggaggcgggcggcgggggcccgggacggcgaagatactcgcggtgtgcgctggatccctgggggccgggcctcctgctgagggtagcggacccgcaggcgggacctccggggatggagggagtgggtgagcgccagggtcgtgcccagggctcctaactttggcaagagcgtcacgctggggcagggcgcgcaggggtctggatccgacggacgtcccaggctcactgtccgcttccgcccccacaccctgcaggtggccgagggcggcccggcccgcgagccgccgccgctgctggaggtgtccccccgaaagaggctacccgccgggcccgaccaggacccatgcggcagccgccctgctcccgaaggcgccggggccggcccagagcagggccactcggccggcggaggcggctggtgccgccactgccacacgaagctggtggagctcaagcgacaggcgtggaag

SEQ ID NO: 125317 - DNA, 726 bp, Homo sapiens; identical to SEQ ID NO: 51746
  chr14:105070704-105071430
  hyper

SEQ ID NO: 125318 - DNA, 30 bp, Homo sapiens
  chr14:105106469-105106499
  hyper
aggtggagctccggcgccctcgtgtggccc

SEQ ID NO: 125319 - DNA, 82 bp, Homo sapiens
  chr14:105155745-105155827
  hyper
ggaccgcgagggggcggccaggttattcacgggagtggggagaccccttaaagcgccctcagggaccggccacagtgggcgg

SEQ ID NO: 125320 - DNA, 201 bp, Homo sapiens
  chr14:105156380-105156581
  hyper
atttccgcgcctcgcggctgccacatcctgaccatgaatcagccacagttgggaaaataaacttcaacttcgggtccgccgcccgggtggcaccccgaggtgcgcgccggcctgcggccccaccctgactgcttggcttccagctgcccacgcgcaggtgggcgcacagggagcccttcccaccccgcaaccgctggcagg

SEQ ID NO: 125321 - DNA, 213 bp, Homo sapiens
  chr14:105189960-105190173
  hyper
cgcgcccgggcgggacgcggggcccctgccgtggggcagaagtgcgggcagttgcggggacacaaagtcctcggagaggacgcgctgcgcggctcttcgcggccgccagggggcgcgcccgcgcccagggcactcggggttccacggggggcaggtgcgctcctcgagagtgcggaccctctaggtggggtgcaggacgcagctccccttttg

SEQ ID NO: 125322 - DNA, 38 bp, Homo sapiens
  chr14:105190454-105190492
  hyper
ggaggtcaccggggcgtcactgcgcccgccctggccct

SEQ ID NO: 125323 - DNA, 15 bp, Homo sapiens
  chr14:105190900-105190915
  hyper
cgcttggatgccttc

SEQ ID NO: 125324 - DNA, 440 bp, Homo sapiens
  chr14:105195465-105195905
  hyper
ctgggccaagcagacgctgtggccagaggagtcatccatggcagtaaagggcctatggactgcagggcagagaagggcagtggcaagtgggccgggagtggagggggccctggcaggtcaaaggaggtcaatggacagcccccaagccaggcagatggcaggtggcatcccaaggatttagggacggggtggacaggagcaggacgatggctgcagggcaaggctgggacccgcacgggtgacaagctcagtgcaggggcagggcatgcgccatctgggcagtgtggaggtgaggagcaaggacaaagcctgtgtgtggagacgccttgcacgtgtcagcagcatggcgtcggcgtgggagggaggaggtagcgtcggcgtgggggaggagcgtggcgtcggcgtcgtggggaggagcgtggcgtcggcgtggtggggag

SEQ ID NO: 125325 - DNA, 455 bp, Homo sapiens
  chr14:105196123-105196578
  hyper
gcgtcgtggggaggagcgtggcgtcggcgtcgtggggaggagcgtggcgtcggcgtcgtggggaggagcgtggcgtcggcgtcgtggggaggagcgtggcgtcggcatggtggggaggagctgtggggtggcaacccagaggcaaggaggtgggcagaggcccacgaacctggccctgaccctcagctcgtccccagctcacagcacagccctcccctggctgcctccaaggagtctccagttactgagtggccactccgtgccagctcagcccacccctcaccttcccagtgcctgtggaggcccaactagggtgacgctgggagaggagagggcttggaggagccacgggtcaaatgcaggaggccacacctgcctgcccaggaggactgcaggagccggatccttaacacctggaggggagcgggtgggtgcggtggcgtacatctgtaact

SEQ ID NO: 125326 - DNA, 40 bp, Homo sapiens; identical to SEQ ID NO: 51755
  chr14:105218313-105218353
  hyper

SEQ ID NO: 125327 - DNA, 30 bp, Homo sapiens
  chr14:105218932-105218962
  hyper
gctgacaggaatcccgccaccgacccagcc

SEQ ID NO: 125328 - DNA, 30 bp, Homo sapiens
  chr14:105220011-105220041
  hyper
gttggggagcggggcgtcctgcatggagtc

SEQ ID NO: 125329 - DNA, 30 bp, Homo sapiens; identical to SEQ ID NO: 51756
  chr14:105243204-105243234
  hyper

SEQ ID NO: 125330 - DNA, 30 bp, Homo sapiens; identical to SEQ ID NO: 10001
  chr14:105246536-105246566
  hyper

SEQ ID NO: 125331 - DNA, 30 bp, Homo sapiens
  chr14:105262254-105262284
  hyper
ggctgggccgctaacggagcccggccacca

SEQ ID NO: 125332 - DNA, 318 bp, Homo sapiens
  chr14:105269021-105269339
  hyper
actctccaactcattccggcccccaggctgtgccctgcctaggctgtgacactatcttcctctcccgtcccctccagccaagttctgaggggtgtccaaccagcacctggctctgcccccgtttctccgtgtgagatggcacatccatctcccggcccgggactttcctgaccacctctctggcaggcttggggaggtcttcatgagcctggccccacgctaggtgaattattcacatgtcagaaaagttgttggtgtgcgtcccaatggggcgctgggagggaacaggacactcctggggagcggcagcaggaaccc

SEQ ID NO: 125333 - DNA, 30 bp, Homo sapiens
  chr14:105269506-105269536
  hyper
gtgggtccatgagagcgtgcaattatgacc

SEQ ID NO: 125334 - DNA, 30 bp, Homo sapiens
  chr14:105281628-105281658
  hyper
gccctgccaagcaacgtcacttattacccc

SEQ ID NO: 125335 - DNA, 30 bp, Homo sapiens
  chr14:105282796-105282826
  hyper
agggaggcgcgggccgcatccctcccggag

SEQ ID NO: 125336 - DNA, 30 bp, Homo sapiens; identical to SEQ ID NO: 51758
  chr14:105293184-105293214
  hyper

SEQ ID NO: 125337 - DNA, 679 bp, Homo sapiens
  chr14:105293562-105294241
  hyper
ggtccagctcaaaaacgccaggcccgcccccgccccgcaggtccgcgggaaggaaggaaaaggcgttggggatgcgtaggaggcagaggccttggtggtcgatccggtgtggagtggggcaggggctgcgaggagggcgcccaggactggtatcagtgaacagtgacggtggggcagggcggtgaccttagcaccagcgcttcggtgggggggaggaagcacctgagccgcggagaaaggcctgcgtgaggtgggcacaggctggcgttgaagccctggggtggactcacgtccaggggagggcggtgcttcacacgtcccaggcactgtcttgtgtggccccaagtgctgtctgaatctctcctgcgtcttgggccccagcaccaacagccgtcgccctggagccaggcagcagccttaagcttccctgggaggctgactggctgggagcagggaggtcccatcggggaagtaggggcgtgcagggggcttggcgcctgcagtcctggaggggcagggcagatgataaggctaagtacctcctgtcctttgctcagccagccactaggaggaggccgcagagaagaagccgccaggggctgggggaggccagggacggggcagggaggaggggctgggctgaatgcaggtgccccaggagctgcgggctctccttcca

SEQ ID NO: 125338 - DNA, 646 bp, Homo sapiens
  chr14:105309796-105310442
  hyper
acagtggggctccgtcgccgcagcgccccggcggcctcctcctggccgctggccctcccctaaggcttcctcatcctaaacagcaagtgaagccaaacgaaaaccctgtctctcccgccgttccctccctcctggcctccgtcccccgggctcgcctgccccgccgcccggcggaccggtcccttcctgctttccctggcgggtgctttccgctgctctgttacccggagccaggacgcgcatatattcccagaatccgcgctcagtgcgttcggtcccccgggacacctgttctctgcacaggcgcgtctgggcgcagcgggggcagacacgcgttcccgggcagcgactccggaaggcccgagggagtaaatctggccctcccggttcagcacaaagctcccctggccgcctttcaaaaccgaccgcctcccaactctccgcggacacgagtggcggctgcctcccctcccctcccctagggccgcgcacgcctcccgcagggtctcagtgcctcctgggcgggggataattcctgtccccaccggtgtcctgtactcgcggggtcccgggtgtaagttctgggtcccgggctggctccctggtgagcaaagccgcatcgctcgaattccagaaacccttctcg

SEQ ID NO: 125339 - DNA, 184 bp, Homo sapiens
  chr14:105310485-105310669
  hyper
cggaggtggatttcggaactcaggagagaagaatgagacgctccctagtacccctagtcccccaggggtgggaggggactgtatctcaaaataagattctgcaactcgacttttataggggaaaccaggcacgcatttcaaaatcttctcatccgtccccacctccttgcgccgcttttccgcg

SEQ ID NO: 125340 - DNA, 484 bp, Homo sapiens; identical to SEQ ID NO: 10002
  chr14:105330455-105330939
  hyper

SEQ ID NO: 125341 - DNA, 726 bp, Homo sapiens; identical to SEQ ID NO: 51764
  chr14:105330980-105331706
  hyper

SEQ ID NO: 125342 - DNA, 154 bp, Homo sapiens; identical to SEQ ID NO: 51765
  chr14:105331744-105331898
  hyper

SEQ ID NO: 125343 - DNA, 200 bp, Homo sapiens; identical to SEQ ID NO: 51766
  chr14:105332328-105332528
  hyper

SEQ ID NO: 125344 - DNA, 31 bp, Homo sapiens; identical to SEQ ID NO: 51767
  chr14:105399680-105399711
  hyper

SEQ ID NO: 125345 - DNA, 261 bp, Homo sapiens
  chr14:105433898-105434159
  hyper
tgccactggcccacgcgggacagtccccagccccaccctcagccaccgcactgggagcggctgttcctacactgcctgtagtggggatggagtgcagaggctcagcgagcggcagacctgcctctggccacagagctgcgcagtggggacccctccagtcactgggctggcaggagcctggcccaggaacacaaacaggaagggggaaatcctgcccgcctcgggataaggctgcgcagccaggctaccggcctcggaccc

SEQ ID NO: 125346 - DNA, 27 bp, Homo sapiens
  chr14:105434286-105434313
  hyper
cgcccggcctccggttctcccagacag

SEQ ID NO: 125347 - DNA, 285 bp, Homo sapiens
  chr14:105444348-105444633
  hyper
agagactccagcggccgggaaggcccagaaccacgcgcgagtcccgcaggcgtctccgagtcccccgcccccaaggcccgcactgcgcgcccctggacacgccccggcgcgcgccctcgcgcgtagcccacccgccccaggggagcgggctgcaggcggggaggggcgcaccgctgccgggggttccgggccaggtgggcagcaccatgtggaagcagtcgcacatcgcggcggccaggcggtgcgggcctggcggcccgtcgcgtccagtcgctggtcccggct

SEQ ID NO: 125348 - DNA, 158 bp, Homo sapiens
  chr14:105444788-105444946
  hyper
cggagcgcgctcgcgggcggtgccgtcggcctcattcagcccattggctgccgtcgccgcggccccgcccctcccagccaggccccgccccaccccgcgcccccggcccgcctgtcgcgtccgcagaattaactttggactcccgccagggagcgacc

SEQ ID NO: 125349 - DNA, 30 bp, Homo sapiens; identical to SEQ ID NO: 51771
  chr14:105486766-105486796
  hyper

SEQ ID NO: 125350 - DNA, 30 bp, Homo sapiens
  chr14:105486838-105486868
  hyper
ggagcccagggaagacggcgctggccgacc

SEQ ID NO: 125351 - DNA, 30 bp, Homo sapiens
  chr14:105487200-105487230
  hyper
ccgggcgccgcctccgccccggacccagcg

SEQ ID NO: 125352 - DNA, 231 bp, Homo sapiens
  chr14:105487899-105488130
  hyper
ggcggtctgggctccgaggtctatccaagcctctccagagaccggggttatctccaaaggcttcctaggtttacacgtaagaaatgtaacgtgaaagttcaaagcaggggacacgtgttttaaatctcttagtggaaaaggttttaaataggatgcgagaacctgcaatcattgacttaagtaataccctgagcgcctgcagcaggcccggcaggcgtggctgcagctgag

SEQ ID NO: 125353 - DNA, 98 bp, Homo sapiens
  chr14:105511595-105511693
  hyper
caggacaggaatatccgggtctctttgcacggtgtttgccaccttctgtaaattgggattttttttttttttttttttttttttgagacggagtctca

SEQ ID NO: 125354 - DNA, 566 bp, Homo sapiens
  chr14:105511921-105512487
  hyper
caaaattgggaattatttcaaaataaaaagctggataaatgcatacacacaaggcagtatcgcgtattttccacgagtgcctgtgcaggcaggtaaggatttaggaaaggtctggaaggatgtgcaaaatgttccgcctgcgaaggttccgcggtggcggggacactgctccggctccgctcccgcccgcccgagcgctcggatggggccgcctctgcactgcgtggccacaggcgcggcccggctgcccacgggcgccctttgcagctgctgccccctggcggccgcgggcggctactagcgggaaagcgaaacccgcccggtccattcaagccccgctgcctggcgccctctagggtcgttcttgggaacgggcggacctttcgtcaacactttgcctgcaagatcccccattgggggaaccgaggaggaagttaaaggaagatgtgtgtttttgagcgctgctttgtgccaggctcatcttaggtgtgggacgtgtactatctgaattaataccccaccaggcctgtgggacagtcactgtcaccattcgcaaattatggatg

SEQ ID NO: 125355 - DNA, 221 bp, Homo sapiens
  chr14:105559993-105560214
  hyper
tgtaaccccagggccgtgccaccctcctgatcaccgcaagcatggaccccccagcacgctgcgggtgggacaggcagggcccctgtggggtggcttgactggcctggagttggggacgaagtccccgggcttggtcccccgagggcttggttgggcgtcccggggtaggtggctgccgcggcgatgtgggcggcttgcgtgtggccgatcggggtcgctgc

SEQ ID NO: 125356 - DNA, 156 bp, Homo sapiens; identical to SEQ ID NO: 51773
  chr14:105647608-105647764
  hyper

SEQ ID NO: 125357 - DNA, 336 bp, Homo sapiens; identical to SEQ ID NO: 51774
  chr14:105662772-105663108
  hyper

SEQ ID NO: 125358 - DNA, 30 bp, Homo sapiens; identical to SEQ ID NO: 51775
  chr14:105663387-105663417
  hyper

SEQ ID NO: 125359 - DNA, 184 bp, Homo sapiens; identical to SEQ ID NO: 51776
  chr14:105714257-105714441
  hyper

SEQ ID NO: 125360 - DNA, 145 bp, Homo sapiens; identical to SEQ ID NO: 10008
  chr14:105715247-105715392
  hyper

SEQ ID NO: 125361 - DNA, 36 bp, Homo sapiens; identical to SEQ ID NO: 51778
  chr14:105715538-105715574
  hyper

SEQ ID NO: 125362 - DNA, 30 bp, Homo sapiens
  chr14:105766972-105767002
  hyper
gaccgcgcgggcagcgcccggagcctccca

SEQ ID NO: 125363 - DNA, 30 bp, Homo sapiens
  chr14:105767384-105767414
  hyper
ttggggcggggcctcgtcggtgggcgacac

SEQ ID NO: 125364 - DNA, 13 bp, Homo sapiens
  chr14:105781297-105781310
  hyper
gcgctcaacacgc

SEQ ID NO: 125365 - DNA, 181 bp, Homo sapiens; identical to SEQ ID NO: 51779
  chr14:105781804-105781985
  hyper

SEQ ID NO: 125366 - DNA, 30 bp, Homo sapiens; identical to SEQ ID NO: 10011
  chr14:106326603-106326633
  hyper

SEQ ID NO: 125367 - DNA, 30 bp, Homo sapiens; identical to SEQ ID NO: 10012
  chr14:106326872-106326902
  hyper

SEQ ID NO: 125368 - DNA, 203 bp, Homo sapiens; identical to SEQ ID NO: 51782
  chr15:20478122-20478325
  hyper

SEQ ID NO: 125369 - DNA, 31 bp, Homo sapiens; identical to SEQ ID NO: 10013
  chr15:22544585-22544616
  hyper

SEQ ID NO: 125370 - DNA, 761 bp, Homo sapiens
  chr15:22892003-22892764
  hyper
cagttttcctaaacacgcctgtgaccagctgactccactcagcgtttccgtgtgaggtatgtttcttcaccggcctttcaagattgttttttggcacgagctcaaatcaggttttcttccgtccgccgttcccgcaggtctgcgcacggatttgtccctggttcccgcaggcaatggggccgcaggggccggccgggggggtccccagcgggctctgcgcgccgacctgcagctgggacccgcgcctggaaccctcccgacgagcgcaggtgagcgcctcctgccaagtggggcggcgccacacgggcgtcctgggtgtccccctgagctccttccgcagctcaggccaacccccgccctgacccggtggagccccgggacagggtgcggaccccgttccttcgcgctccgaaccggacggacccgcaggaggaccccacgcccgctccgctccgaccccgccgtcccgcgcaggctgcggtgacccaggccggcaggtagccaggggctctctgcctgggaggacaccttcggcggctggcgtggggaaaggggccgcccggccggggatgccccgccaggaggagggagcggccggggccgcggccgggagggaggagcgccgggaggaagaggccgagccgggagagcccccgccccgggaggaaggggaggaggccgagtgtttcctggcgcattcccggccagcccgagtgactcactcggccaaggaaactcccagggcccgcccaggaccccca

SEQ ID NO: 125371 - DNA, 678 bp, Homo sapiens; identical to SEQ ID NO: 51786
  chr15:22893130-22893808
  hyper

SEQ ID NO: 125372 - DNA, 30 bp, Homo sapiens
  chr15:23034434-23034464
  hyper
gcctcgcgcgcacgcgcagtgccgcaccac

SEQ ID NO: 125373 - DNA, 18 bp, Homo sapiens
  chr15:23086960-23086978
  hyper
aaactacaacaagccggg

SEQ ID NO: 125374 - DNA, 30 bp, Homo sapiens
  chr15:25683334-25683364
  hyper
ggaggcccaaatctcgacgcctcgcacgtc

SEQ ID NO: 125375 - DNA, 326 bp, Homo sapiens
  chr15:25683894-25684220
  hyper
gccgcgagctattccgaggaggagccgaaggaggcgccgccgcccgcagccgagcgcgccgggtcggcagaggtgaagcgtaagtaggcggcggatggcgggcgcccgcgctggcggatggctacgcggcggaggggtgcgcgagcgagcgaagcctggtgtgtcgggtcctggcgaagggaaaaggccccgtcgtctcctgtagtcaccccgagcccagcgccaccatcttgggagacacacggatctcgcggccgcggcgcaagacgggaggactggctgggcgggccgagtatcccggcaggcagcgcgcgccgcccggccgg

SEQ ID NO: 125376 - DNA, 30 bp, Homo sapiens; identical to SEQ ID NO: 51788
  chr15:25684473-25684503
  hyper

SEQ ID NO: 125377 - DNA, 588 bp, Homo sapiens
  chr15:26095516-26096104
  hyper
cagacagcgtggatgcgttttgtacggggaacaaaactgatttccaacttggcaaaaagcaacaggagaggccccggctgtgtctggtaccgcctcagccgagccctgaagggaaaggcccagaaaaagggatgtggccacaccctgggggccagcccacaggcgaggcgagtccccaggcgccattctacgcggccagttttggagaactggaactgtgtagagcgtccggcggcagcggacccagcgctgctccattctccctccctccctccccccccagccccggtgactcactccgcggcccgggcagggcgagaccacgcccaccaccccccaagacctggccgcgctcacctcccctcctgcacagagcacctaagggcccaaagatcacatctgaacaaaggatggaacttggaacttacatttacctttcctgcccctgactttttaaactgttattagaagtatacaaaaacaaaaggcaggacataaaagtagtgaaatgctttaaactctacaaatgactcagttcaaatgtgcggtgacagcctgggtttcctgccatttcgttaacccctcgtg

SEQ ID NO: 125378 - DNA, 284 bp, Homo sapiens; identical to SEQ ID NO: 10017
  chr15:26107459-26107743
  hyper

SEQ ID NO: 125379 - DNA, 143 bp, Homo sapiens; identical to SEQ ID NO: 10018
  chr15:26107845-26107988
  hyper

SEQ ID NO: 125380 - DNA, 12 bp, Homo sapiens
  chr15:26108171-26108183
  hyper
cgtcctgccctc

SEQ ID NO: 125381 - DNA, 78 bp, Homo sapiens; identical to SEQ ID NO: 10020
  chr15:26108248-26108326
  hyper

SEQ ID NO: 125382 - DNA, 290 bp, Homo sapiens; identical to SEQ ID NO: 51794
  chr15:26108548-26108838
  hyper

SEQ ID NO: 125383 - DNA, 434 bp, Homo sapiens
  chr15:26178856-26179290
  hyper
agaaggaagccactctctgcccgccccctgccccatctcaggccctagccctctgccaggagcgtctcctgaggctgaaagtgccccctcccgctctcagactctgcgctgccatctgccttgcttctctcggtaccacttcccctgctctcttttgaatcggattctctccttcaaactccagctgatccagcccgcacatgccaggcccgtatgtagattcgtctgttgccaccgtcctccaagccctagggaggggttgagctccgtggaaggcctctgatgggagggacacgactcggaggctgagcagcacaggacaccgtggtaaactgggattcttctttgcctttctcagggaggcaaaaggtgcagaggcctgcagtgtgctgtgagcgacagtgccagctagtggcgcacgacttacatcgcta

SEQ ID NO: 125384 - DNA, 234 bp, Homo sapiens
  chr15:26327329-26327563
  hyper
aggcttataaatttacgagtttcactgtgttccaaaagaaaggtccagtcattcccacaccgggagtcgaacccgggccgcctgggtgaaaaccaggaatcctaaccgctagaccatgtgggagatgacaagtaaccgttgaattctaaaccaattgaatcatttccgcctgcccttgctttccgccttctgccacgcctccgacaacaaatccctgtctgcgcctgcgcctgc

SEQ ID NO: 125385 - DNA, 292 bp, Homo sapiens; identical to SEQ ID NO: 51797
  chr15:26327610-26327902
  hyper

SEQ ID NO: 125386 - DNA, 127 bp, Homo sapiens; identical to SEQ ID NO: 51798
  chr15:27016781-27016908
  hyper

SEQ ID NO: 125387 - DNA, 266 bp, Homo sapiens; identical to SEQ ID NO: 51799
  chr15:27016944-27017210
  hyper

SEQ ID NO: 125388 - DNA, 250 bp, Homo sapiens
  chr15:27017654-27017904
  hyper
ggcgcggggcgcgggcggctctgaggactgggggctatcccaggaggggcgcgggcgaagggcccccactcccacccgccgctgctccgcggatgcggcccccgcctccctccgcccaggccgccgccgccgtgggtcgcgcttcccgcaacggccgcgcgcagcccacttacccccgaagtcgggtcttaggcgaatgtcgtagcctttcaacagcttgtccaccgtctccttcacaaaggacatgttc

SEQ ID NO: 125389 - DNA, 6 bp, Homo sapiens
  chr15:27018322-27018328
  hyper
aggagg

SEQ ID NO: 125390 - DNA, 265 bp, Homo sapiens
  chr15:27018746-27019011
  hyper
gcctcccgacggtgcctgcagaacgccgggaagcccccgcctcacctgcggggctcagagcctcgggtccccagggtccaggagagccagatgggcagcaggagctccaggagcccggagcacatggcgctgttcctccggcctaacctgctgggatccgctctcccccctactctccgagcagccaaacggcgacgcagggatccccgcccctacccccacccccacccccaggctttcccgcctgacccgtcttccagcccct

SEQ ID NO: 125391 - DNA, 88 bp, Homo sapiens; identical to SEQ ID NO: 10023
  chr15:27112034-27112122
  hyper

SEQ ID NO: 125392 - DNA, 53 bp, Homo sapiens
  chr15:27112889-27112942
  hyper
ggggctctgaggcgcgcggcgtcccggcgctgctcgcggggtggactcggacc

SEQ ID NO: 125393 - DNA, 123 bp, Homo sapiens
  chr15:27113012-27113135
  hyper
cgcgctcccagcccaggaggaaggcgctgcctggcggagcgcttggctcgtacccggggcaggagcaggggaagtctgcgaaagccgggagcgagccggggagggccggggagctggagaccc

SEQ ID NO: 125394 - DNA, 194 bp, Homo sapiens
  chr15:27113215-27113409
  hyper
cgcgcccacctgccctggcgcgccggccctggtgagcctctgtgggggtccggagggtcgtgggagcgcagcctctcctgggggtccctggctcggggctgaggggcggcgggaggcgccgcccgggtttcccgcatgcagcgccgcgtgctcgccgcctggctctggcccgggccccgcgacgagccccccgg

SEQ ID NO: 125395 - DNA, 57 bp, Homo sapiens
  chr15:27113477-27113534
  hyper
cgaggtggaagtacctgttgtgtctcccaattccggagtttgcgggggatgggggtt

SEQ ID NO: 125396 - DNA, 11 bp, Homo sapiens
  chr15:27213017-27213028
  hyper
tcccgccgccc

SEQ ID NO: 125397 - DNA, 244 bp, Homo sapiens
  chr15:27215999-27216243
  hyper
ctcaaccccgggcgacggcgggcacgggaggtcagggagcgctggaggaaacctgcactggggtagaaatggctggaggaaggcggaccgcgggctcgctctcatggtgccaaccccggggacctttcttcaggctccctgcgggatccccagcctcccctccccctcggagctccgcccccttcctggcctcaaactccgagtccattcaaacctcgccttcctcgccctgcgcgttgtcagg

SEQ ID NO: 125398 - DNA, 39 bp, Homo sapiens
  chr15:27216830-27216869
  hyper
cggctgggctgcggcacggcgggccgggaggggactggg

SEQ ID NO: 125399 - DNA, 216 bp, Homo sapiens; identical to SEQ ID NO: 10024
  chr15:28339716-28339932
  hyper

SEQ ID NO: 125400 - DNA, 629 bp, Homo sapiens; identical to SEQ ID NO: 10025
  chr15:28339954-28340583
  hyper

SEQ ID NO: 125401 - DNA, 326 bp, Homo sapiens; identical to SEQ ID NO: 51806
  chr15:28340882-28341208
  hyper

SEQ ID NO: 125402 - DNA, 499 bp, Homo sapiens
  chr15:28341520-28342019
  hyper
ggcgtagccgtgtctcgggagcctggcggtgtccgcaggagcgatgctgtgaccgttgcatttgaagcattccttctagttcccggatcccagggagggggcaggagaagccctgcggccaagaaggcctgaagaagcccgtccaggggtcagcctcctcctcagccggtcctgggctgagacaggggtgtcccgctgagggcagtgtagggtgcggtgcccccaccccacttcgggcctggaccgagaccgcgagtgtgaccgtatatcccttcaggtggatttttcaacatgtgaacttggttaaaagcttctagaacgttaagccaaacatcgtggctttccatccgttttctgttcttgtttgaaagagtacgcctccttccagcctgggaggaggggcggggcccgggagagggcctcgggaggccgcgggtgggctctgccgagggccgcgttcgcagggccccccgggactggcggccccgcggcaggccag

SEQ ID NO: 125403 - DNA, 90 bp, Homo sapiens; identical to SEQ ID NO: 51808
  chr15:28344097-28344187
  hyper

SEQ ID NO: 125404 - DNA, 126 bp, Homo sapiens; identical to SEQ ID NO: 10028
  chr15:28344223-28344349
  hyper

SEQ ID NO: 125405 - DNA, 81 bp, Homo sapiens; identical to SEQ ID NO: 10029
  chr15:28344411-28344492
  hyper

SEQ ID NO: 125406 - DNA, 50 bp, Homo sapiens
  chr15:28344694-28344744
  hyper
cgtctaaggccacgccgccccggcgtccccgacagcgctctccgcgggga

SEQ ID NO: 125407 - DNA, 454 bp, Homo sapiens; identical to SEQ ID NO: 10030
  chr15:28351666-28352120
  hyper

SEQ ID NO: 125408 - DNA, 269 bp, Homo sapiens; identical to SEQ ID NO: 10031
  chr15:28352152-28352421
  hyper

SEQ ID NO: 125409 - DNA, 99 bp, Homo sapiens; identical to SEQ ID NO: 51814
  chr15:28352957-28353056
  hyper

SEQ ID NO: 125410 - DNA, 21 bp, Homo sapiens
  chr15:29033870-29033891
  hyper
gctctgagcgcgactcggagg

SEQ ID NO: 125411 - DNA, 119 bp, Homo sapiens
  chr15:29033933-29034052
  hyper
cgcgggggggagggcgacgctaggacctgcggggccgggcgggagagagggctgccgggaccggccctagacactgagccgcggtgggatccccgccggctctgcgaggccctgcgagc

SEQ ID NO: 125412 - DNA, 46 bp, Homo sapiens
  chr15:29107355-29107401
  hyper
ttggcctcccaagctactgggattccaggcacgagacactgggcct

SEQ ID NO: 125413 - DNA, 392 bp, Homo sapiens
  chr15:29130655-29131047
  hyper
ggaggccgcgatccccgagagttcttcgctcgagggttcttcgctctagggtcccccattacagctgcgcggggccgagcaagcagggcgcggcggccggggcaaggtgcggagcctcgcgttcaccggctctacctgcggagcctcgcgttcactggctctacctgcgggaccagacccctgcagctccccagccagcacggccggggcacgcccgggaatctgtgtgctccccagggcccggggcgttcggggcgccgcgccttccagcgcctgggtcccagccccgatcccggagaccggcccggggggacccggggtcccgagtgcaccctcctgccctgcagactgtcccagcgccggggccagggggcgcaggacctcgcgcacgc

SEQ ID NO: 125414 - DNA, 98 bp, Homo sapiens; identical to SEQ ID NO: 51817
  chr15:29131532-29131630
  hyper

SEQ ID NO: 125415 - DNA, 86 bp, Homo sapiens; identical to SEQ ID NO: 51818
  chr15:29131755-29131841
  hyper

SEQ ID NO: 125416 - DNA, 166 bp, Homo sapiens; identical to SEQ ID NO: 10034
  chr15:29248972-29249138
  hyper

SEQ ID NO: 125417 - DNA, 55 bp, Homo sapiens
  chr15:29395802-29395857
  hyper
gcagccccgcggagccggctccccgggcttggagcttccgcgggggcggaggatg

SEQ ID NO: 125418 - DNA, 124 bp, Homo sapiens
  chr15:29396025-29396149
  hyper
cgctcttcccaaaggcccgaccctctcctgcgcgggcgctgcccccggccctcctgccgagccccatcagctcgccaactccgcaggccagcccggcggcgccatctggcggtccccgggcgtc

SEQ ID NO: 125419 - DNA, 173 bp, Homo sapiens
  chr15:29432128-29432301
  hyper
aggtctgcagactacgcttcccaggctgccgtgcctgggctgccggcaggctctgcctgtagggggtgccagagggcacctggccggcctgcggggcgaggagggagctgcgggtttcctgcgccttcccacctcctcccttctgttccccggctttgcgggctgagagctgc

SEQ ID NO: 125420 - DNA, 1187 bp, Homo sapiens
  chr15:29561184-29562371
  hyper
tcggtgtggggtatccgccggtattccaggtaacgctgtcgcacaaagtcctcagtaatgagtttctttggatctccgaaaattaaatgcttcttggtggggtagacccctaagcgccgcagaaagtcccaggcttcagtttccttgatggtgttgcccttcataaagatgagccctaagacgatcatcaggaggcccgtagtgggcgtgccttggtcacccctcatctcggcatcctcctccacaggctccagggtgttgatgaggatgtaagtgttgctcttgggttcaagttccaccagcttatacccgaagacgtactggaggcgctcggcggcccgtttgaagaggtcggggaagatgtccttgtagtccccgatgacgtgcttcagtatgtcggcccgcttgatcggaatcttcttctggtctttaatcagcaagaactgcaccagctcggacactttcagctccagctgcttctggctcctgggccccacggcgggggcggcctgggcccggcgggcgccctgaggcgaggggccctgcgacccctgcgagccgcccggcccgcgggacgtgctcggggcctcctcggcaaagccgtctctgagaacccgggcgtcttccccggcccgcgaagccccggggtttccgctatggctccagtctctgtccctctcggcctggccgccagagcggccccggttcctcggtttttgcaacatgtctccggcggcaggtgccggcgcacactccggtaggcaagcagccgcggcggggattgcgggtcggcgacccgctaacgccggtgcctggaggcgcgcgcagtgtcggctgagactgcgtgctgcgtcatgaagcctgcgccttgcgtcagggcggctgggcggtgcgcctgcgcggctgcggcgggtaccaaaaggaacagcgttttccgtgcagccctgcaggtccgggcgatgatttttagtatagtgaagtgttgttaccaaaccatgcaaacagagagcgagaaccgaaactcctaaacaagtgtgtcgctaaattcagaccacacaggctcaggcaagttttacagacagtattatgagtttctaaatcgggagcatttgtaaacggaaagaattcagaggatgaacgtgtgagaaaaaaaaaaggtgaagaggaagggccgaccgtggaagtaa

SEQ ID NO: 125421 - DNA, 1682 bp, Homo sapiens
  chr15:29861981-29863663
  hyper
ggtggttaagagtctgaaaatcggtcatccttaaggtctggagctcagaaagcacgccgcccccccttgcctgccccctgccccaggacgccggatgcgggtcgcctgcccagtcccgtcgcccacaaaccacgccgttctgggcggacgcgggaaaccagaagtccccgaagccaagtcagcgagcgaccacaggggccgcccggccgatccccgatatccgggctgacccaaaacccgacgggaggcgcccctcccccgcccccccaccccaccccccacccccaccgcccccggtcagggccgccgcgagggtgagaggcgcgcccacatgctgctccgctccgggttcggctcccacctcctcgcctcggccgcggccgctcggatggcgaggtcgtgtccccggcgcgcgcggtccccggcgctccctccggccgctgcgggctcggaggacggcgggcgcctggctgctgtttcctccaagaaaagtaactccgggaatcagcgcaataggagcgggaacgcgatgctccgagagcggcgagccgggccctggagttattctgctcggagtttcgaactgcgccccgcgctgcagctactcggccccggcgttggccgccggaacttgccgcccgcggtggcgtcccggcggccgcagcgcctagcccccccggcccgcgcagtccccggagcccgtccccgcctggtcgcggacactcaccgagaagcctgcccagaaggggcaggagtggcggacgcgggccgaggtggtgagcgccagcgcggcgaagctgactgccacgatgaggcatccgagcgccatctgcgtggccccgagcgccagcacgatgcgggagcggcccgggcactcgcgcaggcgggacaggctgcggggcagcgcggcgggacgcggcgctcgggggccgccggccggaggcatcgcgccgggcgcccgcacgcctcgcccgctcccgcccggcccggcgcgcgccgccgcctctcctcacagagggtccgaggcaagttgcgccgggtgcagggacggcctcccagccggctgccagggctgcggcggccgcgcgccgggagcgggccgggccgggcggggagccgggcgcccgcagcccccgccggtgcccgcgcccatgccgccgccgccgcgccgcccgcccgccggccgcgccgcgctgcgccctcccccgcccgccccgcgcgctccccggcccgagcgcgggcgcgagccgccgccgctgctgccgtaccgggcgcgagccgctgccgtccccgggcgcgagccccgccgccgtgcgctgggccccagctggggcgggagcgggagccgggacccgggagccgggagaggggcggggaaggcgcaggtgcggtcctggcgtcccagcctccgcgctcacgcctcgcgccctggcggctgcaggtctgcggaaggagagcgggggcggcagcgcatcaagggcaacggcatcagcctccgcggcggagccctgggtcggctgcgcggaggggcccgatagcggcagcgggccagccgagccttcagagcctggggacggctcgggatgggcgcgcggggcgctgaggacggggagacgggctgggagcagacaggagggaaattccgagcgctgggccgcaggtgtggcgaacaggagcctctt

SEQ ID NO: 125422 - DNA, 59 bp, Homo sapiens; identical to SEQ ID NO: 10038
  chr15:29864125-29864184
  hyper

SEQ ID NO: 125423 - DNA, 46 bp, Homo sapiens; identical to SEQ ID NO: 51825
  chr15:29966981-29967027
  hyper

SEQ ID NO: 125424 - DNA, 780 bp, Homo sapiens
  chr15:30113522-30114302
  hyper
atcttattgtccattcgtaggaatactttgtattacttgtgaaagtttaattcaagttaaattattaaatgttaaagaggttattttcaaagttaccttaaataagtaatacagcatgaaagaaaacccgacctactacgcctcacaggctgagtggagtgttttgcagtctcaaagccttatcgctggcgtgcgcataccgcagggagtgacatcagatcgaaactacagggtttcgccggggaccaaccactcctccaaagacagcagctcccggccagcaggaggtggcaccccaagccccgacccgctgagagccggcttccagcccccgaaccctcactggagccgagtttctccgcgagggacctgttgcgtgtccccgccctcagcgagccgcagccaggcacaggcgccggcagctatgcacctgcccagtacggcggccgggcgcccgcagccccctccccggccgcccccagtgcggcccgcgccgcccccgcccgaggggctccccgcggcccgcggcccgcggcccgcggccccgcgccagccctgcccaccccgccgccccggggcccagacagccgccagcgagggagggcgggacgcgggccagatgccggtgggcgggcggcgacggtcggcccggtctggccctggcggccgcggaggcgctcaccttggcggccgcagctctggcggacatcttgtctctctccagcgccgcgcgaggctcctcggacccgaaactccgcggcgctggcccgcccgctcctc

SEQ ID NO: 125425 - DNA, 866 bp, Homo sapiens
  chr15:30114349-30115215
  hyper
cgggggcggccggaagggcccggcccagggggagggaattcaactcggacaaaagtccgggaagcgcccgccccgcccgggtcttctccacggggcgcgcccgaccggcacctccctccgagcgcggccacccactcggcctcccgcagctttcgcagcccggccacgtcggcctcgcccggtcgcccgcccgtcagcagcacccgtggcctcccggcgtctcctcggaagccggcttcgccacgtaacttcccgggaaccggcggccgccaaggaacgcggcgtccgctggctcagccggcgccggcaactcagcggccacgcaaacctgccggcccggcccactgagcatgcccggcccggcgggggcggggctggacgaggcgaggcgaggcgaggcggggagggggcggggccgcggcgggggagggggcgggacgagcggccggggtcccgaccccaagcgcggaaggaaaagccgggtaacccaagtaacttggaagacagtttccgctgccgtgcgagtcttcctgtttgtttttatccaaggtctggcagaattcgcccccaaggagaaagcgcctgtgcaccaaagctttccttaagagacttgtccacttgctcctcgacaagccacgcacatcatggggtgagccccatgcatgagtgcggctggaaaggccggcagagccgatacccgacagttgtttccttcactgggcaaacagcatggtcacggctgtcaccgcgtgcctcggcgttgttcccacggaaggcggaatgcattttctgcaaggcgcgtcatggctttcatctccgaggagctccggcagggtcagaagcgttgctctcgttcaccggcgccg

SEQ ID NO: 125426 - DNA, 788 bp, Homo sapiens
  chr15:30260515-30261303
  hyper
ttctgagccagaacccgccgtaatggagcagaaaggacagacagaggcgggaggccgacgcccgggtgcgggtgccaggcgtcccggccgctccccgtcgccctacgcgccgcgggcacagcgagggtctcggcgaaaccagtcagcgggcacgcggtacaaggcggcgctcggccctgggctcggccttggctgctgcgccccgcgcggcgcgccccgcgtcccgtcgggcccgacagtcgcggcctcgccccccgcccgaccgccccggccgccgctcgctctcccactccggcccccgccccgctccgcgcctagcccggctggggctccgcgcccgcgcggccgcctcaccacagcttcctcttgagcggcaggaggctgccgcggttggagggggtgacgccgatggccatctgcagcaccgtcaggtatttctggtacttcatcttgtccccgctccgctcgcgggcagggccccgccgcctccgccgccgccgcagacacagcccctccaggcgccgcatagatcagctctgggccatccgccgccaccacagctcccaccgctcccgcgcccgccgcacccgcagctgcggccgtgcgtggcccgggctcccgctcccgccgccgccgtcgccgtgcgtgcccggccgctcccgccgccgccgccgtgcgtggcccgcagctcccgccgccgccgccccttccacccctgcaggccgtggcccggcggcgcgctccggtgggcgggtgcgggtctcgcgggaggccgggctggcttggcc

SEQ ID NO: 125427 - DNA, 30 bp, Homo sapiens
  chr15:31195726-31195756
  hyper
tcgcctgtcttccccgcaggaggctgtttg

SEQ ID NO: 125428 - DNA, 30 bp, Homo sapiens
  chr15:31284247-31284277
  hyper
acttacacatgggccgacttcgccctccgg

SEQ ID NO: 125429 - DNA, 132 bp, Homo sapiens
  chr15:31507690-31507822
  hyper
gcagaccgcatgagcgtaggggtcaggggaccgggtcccccagaggtgtcagaaaaatgctcccaggaggaggacgccaggctgctgaggcctgtggctgacaccagggggcagggcggggcggcggggaca

SEQ ID NO: 125430 - DNA, 30 bp, Homo sapiens; identical to SEQ ID NO: 51829
  chr15:31508257-31508287
  hyper

SEQ ID NO: 125431 - DNA, 162 bp, Homo sapiens; identical to SEQ ID NO: 51830
  chr15:31508792-31508954
  hyper

SEQ ID NO: 125432 - DNA, 30 bp, Homo sapiens
  chr15:31619934-31619964
  hyper
tgcgagaaagtttacgggaaatcttcgcac

SEQ ID NO: 125433 - DNA, 15 bp, Homo sapiens
  chr15:31620728-31620743
  hyper
aaaggaatgccctgg

SEQ ID NO: 125434 - DNA, 261 bp, Homo sapiens
  chr15:31620800-31621061
  hyper
cggtgcggggcgggcggcacctgcaccagggcgggcgctgagcctccagcctggggatcaccgcccgcccccgccagcccagcggcaacagttcccacgcgcggcccgatactttgtagttgattcatctgtggcggttccctcccccctttttgtttcgtttttaacataaagatgaaaatattttaatggacggcaatccttccccattttggtgtaaagaattgtatgcttcctctgagctcacgtgagttcttctgt

SEQ ID NO: 125435 - DNA, 415 bp, Homo sapiens
  chr15:31621314-31621729
  hyper
ggccgctccaaaccacgtggcaggtgatggggtagagggtgagagcggggccatttctaggcattcggggtcagttaagggtgtgggggctcaggttgggggtgggagtcagtgtgggctcagagttcagctcgggacgcggctgcagggtgggtgtggccctgggggaggggccaggctaggctcagctcggctccaggtggatcctgagtatcgggtgggggcagcgattggggcgtggctggggttgagatccgctttgggggatgatgcccgtgctgggcaggatacttaatgtttgggaaatttttctacggcctctgtcagggtggcctgccactcggcagcaccggtagcggggaattgaggaggggggtggccgaggggaggggctcgccgtcgtgggcggggccgg

SEQ ID NO: 125436 - DNA, 30 bp, Homo sapiens; identical to SEQ ID NO: 51834
  chr15:31733430-31733460
  hyper

SEQ ID NO: 125437 - DNA, 525 bp, Homo sapiens
  chr15:31774609-31775134
  hyper
ccaggggcccgccagcgacagtccactgtggaagtgccttcaaaggagaaatgtgagcagcctgtcctatctgctcctctatgagcaaatccaaattgtgagatgggaaccctgctttttggaccctaggtgtctttggaaagctcctgtcacctgaactgcccggcactgggagccatcgctgtacctcacggcgcccgcgagacgggtggtccagtgccctttccacggccgcccgcggcttggatggcagtgtgaatggtgcttgagccggggctgggggaggaggttttgcttatgaaatggagctgtgtgtttctaaagggccacagtgaccaccagggcgtcagctggcggccaggtacccgccttctcctaggcctcgggatgggaggcaggtagagctcacagaggagcctccaccgcagccccgggtgcgcgctcgctctaagccctgggtactaccaaccgcgcacaagggaccgctacctggaagaggtcatcgctagggtaggagaaaaaaaa

SEQ ID NO: 125438 - DNA, 124 bp, Homo sapiens; identical to SEQ ID NO: 51836
  chr15:31775349-31775473
  hyper

SEQ ID NO: 125439 - DNA, 154 bp, Homo sapiens; identical to SEQ ID NO: 51837
  chr15:31775483-31775637
  hyper

SEQ ID NO: 125440 - DNA, 104 bp, Homo sapiens; identical to SEQ ID NO: 51838
  chr15:31775678-31775782
  hyper

SEQ ID NO: 125441 - DNA, 44 bp, Homo sapiens; identical to SEQ ID NO: 51839
  chr15:31776145-31776189
  hyper

SEQ ID NO: 125442 - DNA, 1083 bp, Homo sapiens
  chr15:32162215-32163298
  hyper
acgcagtcacagctccggtgcccggcgagcggcctcgcgcgcggctcggggccgggccctgcccggccgtctgcaagagccgcgggacccccgacgcgcgcgcacggaccgaggggtcggtcgccccacgcctggcatcacgttccagtgcggacagccaaagggctgagcggaggcagcagccccgacccagcggtagcgccgcgccctgcccgagagaggcgcgccacgccgggccggagccggtggcccgggagcccgcggggtccggagcggagcccgcaatgcagacgcgccggcgagcccagccggggcccgcgccccccgcgtccccgcgccccggccccgcggtcgcccggcctcaacgcccacctgcctcgccacggagctcgggaaggagacggcgccggccccgcgcccggagagcgcacctgcctggtccgcgggcccggccccgccgcccgccggcagcaccgcggccagcgccgtcttacctgccgcgccgcgccgctccgctccgccagcccgcagcgccgcagtcgccgctacccgacttccattttctctcgctttaaaggaaaaccagatcagctgttttgctcccgctcgggctccgcggccccctccccagctgccgctcgcggtcccggtggcctctcctcccccgcctcctcccgcgctccgctccgcccctcgcgcccctccgctccgcccgcggccgcgcacaacgcccgcctcccggctccgcctgctgcctccgggcgcgcgccctcctctgacgtcaccggtcgcgttcgcgccccgcccccgccccgcgcggacgtgcgcgcgccgcgcctgtgccccgcccccgcccctccggggccgggcacggagagcgcgtgctcgcggccgcgagccgaggaggggacgtacagcgcccgcgcgcccgcgagcccgctccggctctcccatgcttgcccctcggggtgctccttctgcgctctccgcctggactgcaggaaaaggctgcttaaacagcctgccttttcctgctgcctgactcgcgccatctgcggccacctgtctcgtttcttccccctg

SEQ ID NO: 125443 - DNA, 288 bp, Homo sapiens
  chr15:32322644-32322932
  hyper
gaggcgcgcgggggcgggcggggcgggggcgcgcgcccggctccttaaaggcgcgcgagccgagcggcgaggtgcctctgtggccgcaggcgcaggcccgggcgacagccgagacgtggagcgcgccggctcgctgcagctccgggactcaacatgcgctgctcgccgggaggcgtctggctggcgctggccgcgtcgctcctgcacggtaaagccactgcctccccgccctccactcctccgtgggatcccgggcacatcccgggcgcctctgtgcgccccgcgcct

SEQ ID NO: 125444 - DNA, 30 bp, Homo sapiens
  chr15:32908344-32908374
  hyper
ggaagacttggtggcgaacgagggtcagga

SEQ ID NO: 125445 - DNA, 30 bp, Homo sapiens; identical to SEQ ID NO: 51842
  chr15:32994740-32994770
  hyper

SEQ ID NO: 125446 - DNA, 122 bp, Homo sapiens
  chr15:33009639-33009761
  hyper
cggggtcagcgccctcgaagttgggggcctcgggcggggccgccggggagccacgacggccgctcgaccagagcatcccgcagtcccgttccctccagaggggaagaatggccgaatctggc

SEQ ID NO: 125447 - DNA, 420 bp, Homo sapiens
  chr15:33009821-33010241
  hyper
cgcaggcgatgccgggcggccgacagggaaagcccagacctggggcagagaaggaatgaggggccgccagccggggggatttcctcccgctcttccctctccaacgggagcggaaaatgtgatttgctgtgcattccaggcgcggttccctggggtgacctctcccagccggcccgggcggggggagcagacaaagaggcgaggcgggcggagaggggaccccgcggggaagcaggaggggtgcggggggcgggggcagtaccgggaaagggggcggatagcgggtctggcggcggcggcggcgcctggccaatggagaggcgcggccccgggcgccgcgctctgccgccggcatttaaacgggagacggcgcgatgcctggcactcggtgcgccttccgcggaccgggcgacccagtgc

SEQ ID NO: 125448 - DNA, 395 bp, Homo sapiens; identical to SEQ ID NO: 10048
  chr15:33010280-33010675
  hyper

SEQ ID NO: 125449 - DNA, 989 bp, Homo sapiens
  chr15:33010720-33011709
  hyper
cgccagagcgcaggagcatccggacctgctagtcggccgctgactgcgcggcgagttgccttgagagggtcccatgtgcttggggcgccgcgctgggtctgggggcgtcttggggcgcccattggagtccgcgggttggagcatccggagaatccatgatgtgtgcatttgccgatccccgaggtgagatggagactggcaagggcagagccgctgtgttcagccacagcggaaaaccgaacggtgggtaatccgacagctgcggtgcggggcgcggccctggccgcggggtccagcgaacccgcagtgctcacaaggcagacaccacacgcgctcgcggaccggccacgcactcgcgggcgctcgcttctctactccagcctcttccccgccccgcgcacgcccgggctgaatggtagacgttctggcgccgggcagcggccaccggctggttcccacttccgcgcgcaccccttaaactgtgttctagaggccccagcctcgccttgcagcgcctcactagctcctgaggactagggactggcggctgaggcgggttggcggctgcaacgagctgggcgtctttcgttctctctcgctgcctggctggctccgctggcccctccacagcttgcggagcaaggccatagcaggggagtgggaggtatattggggctgtcacctccttgctggccggagttatttgtagactacagactccggaagaacagacgcgccaccgctctcgcttggcattgccttcggatcgcagctcctccttgggggtgccccagcttggcgtttatttgcctgcgccaggctctggcgacggtcaccgggccaggcggggagggacggacggcaggtgaccagcctctgctgtgaagaaattcctgcgcgcccggagctgtccctaatgcattcccgggtcgaatccgtctactgccttcccctcctcgaccgactccgaatctcggctcttatagaca

SEQ ID NO: 125450 - DNA, 30 bp, Homo sapiens; identical to SEQ ID NO: 51847
  chr15:33012486-33012516
  hyper

SEQ ID NO: 125451 - DNA, 31 bp, Homo sapiens; identical to SEQ ID NO: 10050
  chr15:33420377-33420408
  hyper

SEQ ID NO: 125452 - DNA, 30 bp, Homo sapiens; identical to SEQ ID NO: 51849
  chr15:33487105-33487135
  hyper

SEQ ID NO: 125453 - DNA, 917 bp, Homo sapiens; identical to SEQ ID NO: 51850
  chr15:33602691-33603608
  hyper

SEQ ID NO: 125454 - DNA, 142 bp, Homo sapiens; identical to SEQ ID NO: 51851
  chr15:33603647-33603789
  hyper

SEQ ID NO: 125455 - DNA, 210 bp, Homo sapiens; identical to SEQ ID NO: 51852
  chr15:33603879-33604089
  hyper

SEQ ID NO: 125456 - DNA, 30 bp, Homo sapiens
  chr15:34330573-34330603
  hyper
cccgtaaaggctgccgagggaccacgtcgt

SEQ ID NO: 125457 - DNA, 30 bp, Homo sapiens
  chr15:34331542-34331572
  hyper
gttgggggagagaccgtgctaagtgcaagg

SEQ ID NO: 125458 - DNA, 30 bp, Homo sapiens; identical to SEQ ID NO: 10053
  chr15:34331873-34331903
  hyper

SEQ ID NO: 125459 - DNA, 258 bp, Homo sapiens
  chr15:34394020-34394278
  hyper
ccccacagagcggccgccatgacagcagctctgcactcagaccggcagccccggaagccctcccagtctcccggccgccaccgccgccgctggcggcttgatgttgtcatcactgcgcgcccgtttctgtcataagctgtgggatccaaccagagggaagagatcatggccgatcgactagcgaggcggaagtaaggcggaagtactgcccttaactcccggcactctggattggaagacggcgcacagagcctgtgt

SEQ ID NO: 125460 - DNA, 30 bp, Homo sapiens
  chr15:34502420-34502450
  hyper
tagccttgctatggcgcgagaagtgatact

SEQ ID NO: 125461 - DNA, 30 bp, Homo sapiens; identical to SEQ ID NO: 51854
  chr15:34517305-34517335
  hyper

SEQ ID NO: 125462 - DNA, 204 bp, Homo sapiens
  chr15:34635315-34635519
  hyper
agtctgcagtggtccgcccgaccgcgtcacgtgttcgtcaatttccttcctgcataaccggaagtctctctctcctggcactccggaaaatgtagtcaatttttgccttgttttcagctagccagaagggggcgcacgagagcagggcttggcttggggccctacttgcaactttgcaggctaaaacacgtggagtgtccctac

SEQ ID NO: 125463 - DNA, 30 bp, Homo sapiens; identical to SEQ ID NO: 51855
  chr15:34659289-34659319
  hyper

SEQ ID NO: 125464 - DNA, 30 bp, Homo sapiens
  chr15:34659954-34659984
  hyper
actctccacctccgcgtcctgcctgtgcta

SEQ ID NO: 125465 - DNA, 22 bp, Homo sapiens
  chr15:34728766-34728788
  hyper
gtgctgcaggacaggcccctcc

SEQ ID NO: 125466 - DNA, 845 bp, Homo sapiens; identical to SEQ ID NO: 10055
  chr15:34728813-34729658
  hyper

SEQ ID NO: 125467 - DNA, 236 bp, Homo sapiens; identical to SEQ ID NO: 10056
  chr15:34729900-34730136
  hyper

SEQ ID NO: 125468 - DNA, 428 bp, Homo sapiens
  chr15:34786515-34786943
  hyper
ggtgcgtgcgcgccccggccgccgaacaaaggagcaggggcgccgccgcggggacccgccacccacctcccggggccgcgccgcggcctcccgtccaccgccaccatgaccgccaacggcacagccgaggcggtgcagatccggttcggcctcatcaactgcggcaacaagtacctgagggcggaggcgttcgggttcaaggttaacgcgtcggccagcagcctgaagaagcagcagatctggacgctggagcagccccctgactaggcgggcagcgcggccgtgtgcctgcgcagccacctgggccgctacctggcggcggacaaggacggcaatgtgacctgcgagcgcgaggtgcccggtcccgactgccgcttcctcaccgtggcgcacgacgacggccgctggtcgctgcagtccgaggcgca

SEQ ID NO: 125469 - DNA, 20 bp, Homo sapiens
  chr15:34806424-34806444
  hyper
gattacaggcgtgagccact

SEQ ID NO: 125470 - DNA, 981 bp, Homo sapiens; identical to SEQ ID NO: 51860
  chr15:34806507-34807488
  hyper

SEQ ID NO: 125471 - DNA, 30 bp, Homo sapiens; identical to SEQ ID NO: 51861
  chr15:34875123-34875153
  hyper

SEQ ID NO: 125472 - DNA, 30 bp, Homo sapiens; identical to SEQ ID NO: 10058
  chr15:34903026-34903056
  hyper

SEQ ID NO: 125473 - DNA, 364 bp, Homo sapiens
  chr15:35014047-35014411
  hyper
cttctatacaagggccgcgcaactggagagggcccttctgcaggagagaagagggaatgtgctgaatgagttaaagtgccctttgtccaccccccccccccgccccagcactcggcgggcgcaggctgagctggtgacccgggcaggaccggagccaaaggattaatccatcacaatgagacgttctattctgggcaggcggcgcgagcagatgctgggcgccggcggaggcagcgtgcagggctggcgctcacgcaggccgccagcaccctgcgctccaccccaccctgctccctaatgagaagagaggagctgaacccagacagccgctccctgttgacgccttaggcgtttcaaaactaga

SEQ ID NO: 125474 - DNA, 30 bp, Homo sapiens; identical to SEQ ID NO: 10060
  chr15:35045680-35045710
  hyper

SEQ ID NO: 125475 - DNA, 104 bp, Homo sapiens
  chr15:35046504-35046608
  hyper
ggaggaggcagaggacggactggggattggagcgggagactcagtccaggtgtgagaagggactcccgggggccgcccgacggggccccctgaccgccggcttg

SEQ ID NO: 125476 - DNA, 459 bp, Homo sapiens
  chr15:35046689-35047148
  hyper
cgctgtgcatccggaggcagcagacaaagactgggcagcaccgggcacgttcccgctcctggcccctccccgggccgcacttccagaatgggagtgaattgcctcccaattaaagaagcaattttttaaaaaatcctcgaatccccctttccttttattgtacttaaaagagaagaaatggggaaagaaatccaagcgcgtcccgaccgatggggcagttggcgcggtctagagagagggcacgaacctcgggcgccgtccggggttcgggtctggatcccgcggacgccgggacgaggggcggggcggggtggcagcctgcaggtcctccagcgctcgcccgcccaggagaagtctcagcgccgctctccgccgcaggttgggggccaggggagggtccgaacaccggctctgttcctgctacttcagcgggcacctggcgctccggcgcggcagcct

SEQ ID NO: 125477 - DNA, 404 bp, Homo sapiens; identical to SEQ ID NO: 51866
  chr15:35047296-35047700
  hyper

SEQ ID NO: 125478 - DNA, 297 bp, Homo sapiens; identical to SEQ ID NO: 51867
  chr15:35087491-35087788
  hyper

SEQ ID NO: 125479 - DNA, 138 bp, Homo sapiens
  chr15:35279815-35279953
  hyper
tagtaccattaaaacgatgtgaggatttcacgaaagtaagcgaacaagaaatgaaagacctaagagaaacacacacaactttcagttggggaataatctccggcggctgcttctgccccactcgccccgggcccattc

SEQ ID NO: 125480 - DNA, 66 bp, Homo sapiens; identical to SEQ ID NO: 51869
  chr15:35280589-35280655
  hyper

SEQ ID NO: 125481 - DNA, 43 bp, Homo sapiens
  chr15:35280892-35280935
  hyper
caaagtaaatataacgtagaggtcaagcgcaggcgctttgtgg

SEQ ID NO: 125482 - DNA, 30 bp, Homo sapiens
  chr15:35837863-35837893
  hyper
actacagaagaggacgaagaaagcgagggg

SEQ ID NO: 125483 - DNA, 30 bp, Homo sapiens
  chr15:35838710-35838740
  hyper
gacacagttgcggacgtgcaagcgcagaag

SEQ ID NO: 125484 - DNA, 30 bp, Homo sapiens; identical to SEQ ID NO: 10064
  chr15:36053807-36053837
  hyper

SEQ ID NO: 125485 - DNA, 30 bp, Homo sapiens
  chr15:37170723-37170753
  hyper
ggcgggggggggaaccgaggggggtttgca

SEQ ID NO: 125486 - DNA, 603 bp, Homo sapiens
  chr15:37174936-37175539
  hyper
acaaaagtcgttccgcggtgtagattgacactcgttatgtgggggtctggttgcggttggaagacttatccgagtcagggctgcattgccagcgcctttcccaagagtggaggttggcggtgcaggcggtgcggctgccagcctgagattgttccggctctcgttacctgtgcgccctcgcgttacatggtgctcataaatcccgcggcagattaactgggaaaccaagaaaatgcctctatgcaccgaaccgttgaaaaagaaccaaaattctctcaaatagtagcagtctcacaccttgcattggacgtgaaacactatagtaagatcaaatgtcaaagacatcggttattttggtgcacttcagctaccttttccgtttccagcaaaattgagaagtacgaccccaaaaagaatagacacacccatggaaaagacgtgtgtgtgtgtgtgtgtgtgtgtgtgtgtgtgtgtgtgtgtgtagctatggtgacaacttttaaacactttttctgcttaaaaaaaaagattcggacagggtctggtattgctttgcgttgcaggaaagggtcattctggacaaggaaccgtctgaattccgaa

SEQ ID NO: 125487 - DNA, 399 bp, Homo sapiens
  chr15:37175817-37176216
  hyper
gtgggggggttccttcgcattttattattattattattatcatttattcatttaaatgttcagtccttgacaaggtattcccctgccgcggggttttgctggagaatggacgtgggggcggtggaaggagtcagtgaaaggtggggtgcgcagaaaaacaagattcgcttcgcagggggctgacccgcagcgttctgctctaattgccagcagggggcgctctgatgttagctctggactagacagcagagccactctgtgcttgcaagacaggcttggcagtttcacgcagctgcaaaaggaaagggaggggggattgtagttcctaaatcctcaacagctattccacttgggttatttaccctcggttcgaaatgcttctacgtctcactttaccta

SEQ ID NO: 125488 - DNA, 273 bp, Homo sapiens
  chr15:37179522-37179795
  hyper
ggaacggccctctcgcgggcaacccccacgtctgaccctcccacacacacaatgtagtcatagaaacacctagagaacctcgagccccgccgcggaagaggcaggagagggaagaaaagcctcgggcggccgaggtgggggtgggggcgaaaggggacggccagccccagatccaaaccagttccaacgacaaaaacagccagcggcggggggcgaggggagagggacggtctccccacccggcggccaaccctcccgcgcacagttgctcac

SEQ ID NO: 125489 - DNA, 633 bp, Homo sapiens
  chr15:37180022-37180655
  hyper
aaaacaaaggcagcatctgggcgacaccccccttcctgcgttccccccagttatttactgggtgaccccgtcctttctcttcacctcctcacccagcgcctcggattatgagataatggattttgcgattgttcttgtcagggaaaaaaatctccacagaaccccacgttttcatctttcaactgttttatttaagccaatgggaaggtattgagggcagtaattgattcataatgatccataaatcgatgtcggaaagcggggggagagggtggaggtgtactaagagtatgggggggtggcgatgctgtttatttctaaagcttcaactaaagtagctttgacactgttggggctggggggggaggagctgttgggctctgccggatcatccatcattcctgtcacccagagtctgcccggaggagccgtagacgcaatctcccttctgtctctacaccgaaactattaatattaaaacctcccttcaaacactgccccgacggtctccattctcatcacaatctgaccggcctcccccatcagaccagcatttcccccgcgcggcactttctcccagccccggccccgacggagggggcccgccccggcgcgcgacgccctgagttgatg

SEQ ID NO: 125490 - DNA, 30 bp, Homo sapiens; identical to SEQ ID NO: 51874
  chr15:37390651-37390681
  hyper

SEQ ID NO: 125491 - DNA, 509 bp, Homo sapiens
  chr15:37391106-37391615
  hyper
acattatttagcagcggattccctgcgtccttgtcaatttcagagacaaaacaagcagcccaggctagtagtctaggcggcggcgcagcggctgcggcagcgcggccccagcggcggccccggcggcggctcctacgcagcccgtgcccgccccgagccgcgcgagccacggcggcagcggcgcagcagcggcagcaggagaaccgggggaatcgcgctgctggggtaaaagctggagcgaggcgaaagcgtgtaacgattgcacacgcacacacacacaccactcacacgcactcgccgcccgcccgctcgcacagcgctggaacacgcgcgcccagacacgcacacacgcacgcacacacactcgcacacacgcagaggcacgggagggaaagaagccgatgaataattttgctattttttaaaatactggccgccatcatcaagcagcgagcagcagcagaagcgttgaagggagaggaggcatcgggacaggcccctcttaggag

SEQ ID NO: 125492 - DNA, 30 bp, Homo sapiens
  chr15:37393174-37393204
  hyper
ttccttttaattccgcggcctccctctcct

SEQ ID NO: 125493 - DNA, 680 bp, Homo sapiens
  chr15:37393562-37394242
  hyper
gcccgtgcgcgcgcgcgactagtgtgcgtctccaaagtggatctcactcagagctgggaagcacaggaggaaaagacggagagagtgggggagaaagaagttgccgggcgaggaggagtggccggcgctcacagcccagctttgttgtggtcgcccgaggcgcagcggcgggccgcggtaacgcctgctaatggctgtgttaattacacaggggcgatttcgcggggtcagggagatggggccagctccgaaagaacttttccaaaaaggaaaaggaaacgaagggaactaccccacaccgtttgggtggaaactagttgtggccggtgccctgtcctccctggcccgagctgcaccaggcttcacctctgcgcggctggtttcccggcggccgcgcgtcaatcactacgagcccggagttgggggcggagccacggtcaccccgcgcaagccttgccgcccagcagcccccatgcccctcggccccttgtggcgcggccgggcggacaggcgctggaagcgcgtcctctccccaacttctcgctctcgccctcccagtccctggcccagagagtggaaagcggactgttgttctccaacagccgcatccctccccaactttgaacccattctgagaagtggagagtagtgtcttccgcgagccgcgtctaaccgacttt

SEQ ID NO: 125494 - DNA, 178 bp, Homo sapiens
  chr15:37394679-37394857
  hyper
gaggcgcggatagcgcgacgccagggagaggggctgcgggccgcgaggtttctgcccaatggcccgagcagggacggccagactcacggagcttcagggaggagagtgtagcccaggttttcagccactcttttttgccgggcttcaagcctgctagagccgacgggtaggaaatctg

SEQ ID NO: 125495 - DNA, 18 bp, Homo sapiens
  chr15:37398849-37398867
  hyper
tcctgctttttctctcgt

SEQ ID NO: 125496 - DNA, 118 bp, Homo sapiens; identical to SEQ ID NO: 10069
  chr15:37402968-37403086
  hyper

SEQ ID NO: 125497 - DNA, 369 bp, Homo sapiens; identical to SEQ ID NO: 10070
  chr15:37403115-37403484
  hyper

SEQ ID NO: 125498 - DNA, 30 bp, Homo sapiens; identical to SEQ ID NO: 51880
  chr15:38217644-38217674
  hyper

SEQ ID NO: 125499 - DNA, 136 bp, Homo sapiens
  chr15:38365201-38365337
  hyper
cctccccgccggcccgcggccgcagatgggctggcctgggcacgccatcctgcaacccgggcgcgcggcccggcctggcgcgcacagggctccgattcaggacgccggggctggccggggcgacccgggctgcttt

SEQ ID NO: 125500 - DNA, 562 bp, Homo sapiens; identical to SEQ ID NO: 51882
  chr15:38543128-38543690
  hyper

SEQ ID NO: 125501 - DNA, 30 bp, Homo sapiens
  chr15:38544277-38544307
  hyper
gagttgcagtgattcgcccggaggccgcgg

SEQ ID NO: 125502 - DNA, 30 bp, Homo sapiens
  chr15:38544594-38544624
  hyper
ctcttgtcctctcccgccgcttctcgggat

SEQ ID NO: 125503 - DNA, 30 bp, Homo sapiens
  chr15:38544968-38544998
  hyper
atccctgagggaagcgccgcctctgctccc

SEQ ID NO: 125504 - DNA, 31 bp, Homo sapiens; identical to SEQ ID NO: 51883
  chr15:38545321-38545352
  hyper

SEQ ID NO: 125505 - DNA, 64 bp, Homo sapiens
  chr15:38746260-38746324
  hyper
tctcaggcagttaccggccagacccggaccggaaccttggcgcggtgacgctagtttccggcgg

SEQ ID NO: 125506 - DNA, 30 bp, Homo sapiens; identical to SEQ ID NO: 10073
  chr15:38746855-38746885
  hyper

SEQ ID NO: 125507 - DNA, 137 bp, Homo sapiens
  chr15:38857267-38857404
  hyper
ggcacctgtgcccgtcgacctccacctcagctcgggaaacgggctgcgcctagcggctcccatgggaccccctttcccgcagccgacccgcagcttccacgcctcttcctgcggccgctgctcggagcactgcagtg

SEQ ID NO: 125508 - DNA, 31 bp, Homo sapiens; identical to SEQ ID NO: 51885
  chr15:39140581-39140612
  hyper

SEQ ID NO: 125509 - DNA, 489 bp, Homo sapiens
  chr15:39872813-39873302
  hyper
gtgtcccctgcgccccgtcggcccatttttctttttacaaaacgggcccagtctctagtatccacctctcgccatcaaccaggcattccgggagatcagctcgcccgaaagcccctgcgccaccccgcgggccctcctaggtggtctccccagccccgtcccttttcgggatgcttgctgatcaccccgagcccgcgtggcgcaagagtacgagcgccgagcccgtgcgcgccaaggctgcgtgggcgggcaccgacttttctgagaagttctagtgctcccaagccccgacccccgcccccttcactttctagctggaaagttgcgcgccaggcagcggggggcggagagaggagcccagactggcccccacctcccgcttcctgcccggccgccgcccattggccggaggaatccccaggaatgcgagcgcccctttaaaagcgcgcggctcctccgccttgccagccgctgcgcccgagctggcct

SEQ ID NO: 125510 - DNA, 136 bp, Homo sapiens
  chr15:39873365-39873501
  hyper
cgcgcccctccagccctcgccgccctcgccaccgctcccggccgccgcgctccggtacacacaggtaagtcgcccccggcggccgccgaggaccaaagctgcccgggacatccacctggagcgctgaggcttcagt

SEQ ID NO: 125511 - DNA, 30 bp, Homo sapiens; identical to SEQ ID NO: 51887
  chr15:39873899-39873929
  hyper

SEQ ID NO: 125512 - DNA, 30 bp, Homo sapiens; identical to SEQ ID NO: 51888
  chr15:39921485-39921515
  hyper

SEQ ID NO: 125513 - DNA, 46 bp, Homo sapiens; identical to SEQ ID NO: 51889
  chr15:39958297-39958343
  hyper

SEQ ID NO: 125514 - DNA, 150 bp, Homo sapiens; identical to SEQ ID NO: 51890
  chr15:40074511-40074661
  hyper

SEQ ID NO: 125515 - DNA, 345 bp, Homo sapiens
  chr15:40074970-40075315
  hyper
gtggaagaagccgccggtccagatccctcctgcctgtgggaccgctgtttccctggcaaccagatgcgcgatgcttccggtctcgcgatagcggaaagggctgtaccatccggaaatgggaccggggccggcggctgttggagccctgcgagctgggacggccggcgtgtgtccttccgtcttcgctgccgacggtgggggttgggagcgatttttcgtctttaggttggattcggaacgcggacgtctggatgcttgtgtatctctgtccctcatattgctgtgatgccttacaggtcagttatcctctccgagcacagtttcctcctccgtaaaatgggaaca

SEQ ID NO: 125516 - DNA, 67 bp, Homo sapiens; identical to SEQ ID NO: 51892
  chr15:40094249-40094316
  hyper

SEQ ID NO: 125517 - DNA, 1605 bp, Homo sapiens
  chr15:40211819-40213424
  hyper
tccatcctcgggccacgagaaagccctatttgaactcttctgctcccgcgtgggggctggagtccaccgtccctgcttaactacactgcagctacccgggatccttaagcttccttcaactctctgcactttgccaggcacccgaaacccacggcggctgggcggccctgctcccggctctccgagcctgtaccctcggggaggcccggtccggaggcgccccgcgggaggcttaccgagcagcgagcctatgaagatgacgacctgcacggtggtggtgaactggcggtacagctgcgcctcgccgaactccccgagcgcgctgcggttcacacccgcagcctcggcgccggacgcgttgtgcggctcgctggcatttggagagatccagctcccgttatgtcccatggcgaggctgggactccggctccgcgcgccgcccgcctcggagccccgcgcggagcctctcctcctccgggtgaggagggacgcgcgggcgcctggcggagtcctggagaagccggagcagccgacgggtcccctcacgtctccacatcgccaaccccggcgcccgggaggcggggagggagggaggcgcggctgcgccccatgcccactccctcctggatcccagtcagcagccacaagaaggcggcacggtcagagcccgccgagcgtcgtccgtccctcctccagggtggtcagcgtggcccagcccactcgacaggaatggaaacacagaaggaggcattcgatggtcaaggagggcgctctccgctcccgctgcctccttcaaccgcgggtcctccgcccctcgagggctagggcatccctctccagtcccctcgggctgacgcactcgacccctctccttagcgggaggagaacgtttggccgaagctatttttcagtcctgttggcttcgaggctggatggcgatgtgaagccaacgtaatgcccacgccgagtggccggagccacgaggggacccccgagtgcccgacagcgcccatggcttgggtggaaagccctgagcgtccccagcagcctggccctgcgcccggccgcctgccaagacgcccgtgctgggtcctgcttcccagcccctcacttgtggctccgacctcctgcctcagcactggcgacggggaccccgttccgcagcgcctttttgcctctgcatggctgggcgccccctttcttagcccccctcggtccctcggccgctagaacacagcttgacagccgggcggggacgaaggaggacgcccccagtggggcagtggcaccgtctgcgcggccgccagactcggtgcgcgcctggggcagccgggggcgcgcggctggcgaggatggtcacgtggcacgcgcgaccccgcccctcgcgcccaggctgccgcggggagggcgccatcttggccccgcggagcgtgactgtctcggctggaagcgtgggaggccggaggatcagtgactggctgtcgtggacatgctcgctacacctcccggggcttcgcttcgtttactattaactgtcgttactcctctgtatctcgtcagcaggggctgcctgcggtgttagaattacacgcccctgccacctgg

SEQ ID NO: 125518 - DNA, 29 bp, Homo sapiens
  chr15:40225684-40225713
  hyper
cctttaagagtttcccggccgggcgcggt

SEQ ID NO: 125519 - DNA, 149 bp, Homo sapiens
  chr15:40225952-40226101
  hyper
cctggggaacaagagccgaaactctgccaaaaaaaagaaaaaagagtttcccgcactagccatgccagggtggagaagttccagcaagcacttctgttaaagatacttgtttcgtgaaaactatacaatgtggcgttttcattcctatc

SEQ ID NO: 125520 - DNA, 30 bp, Homo sapiens
  chr15:40226573-40226603
  hyper
tgccctggcctccccgggccctgggccaaa

SEQ ID NO: 125521 - DNA, 30 bp, Homo sapiens; identical to SEQ ID NO: 51895
  chr15:40322108-40322138
  hyper

SEQ ID NO: 125522 - DNA, 30 bp, Homo sapiens
  chr15:40330724-40330754
  hyper
ctcatctgctatcacggtctggcgaaaccc

SEQ ID NO: 125523 - DNA, 30 bp, Homo sapiens
  chr15:40331126-40331156
  hyper
agtctggtcagctccgtcaggaactggaaa

SEQ ID NO: 125524 - DNA, 30 bp, Homo sapiens; identical to SEQ ID NO: 51896
  chr15:40364846-40364876
  hyper

SEQ ID NO: 125525 - DNA, 30 bp, Homo sapiens; identical to SEQ ID NO: 51897
  chr15:40383911-40383941
  hyper

SEQ ID NO: 125526 - DNA, 172 bp, Homo sapiens
  chr15:40401048-40401220
  hyper
cactccgcacggtgcggtattgtttccaaaatacgcctgctcggggcatcccgcaaacagctgatgaggccccgcccccctgcgcgtcacgccgaggactgaccaatggcgagtgaagcgccaagtcccgggctgggccgctgccagggacggtcacgaatgtacgaacctt

SEQ ID NO: 125527 - DNA, 30 bp, Homo sapiens; identical to SEQ ID NO: 10075
  chr15:40452916-40452946
  hyper

SEQ ID NO: 125528 - DNA, 30 bp, Homo sapiens
  chr15:40453304-40453334
  hyper
gtacgtgccttggtcgcttctgtagctccg

SEQ ID NO: 125529 - DNA, 637 bp, Homo sapiens; identical to SEQ ID NO: 51900
  chr15:40544704-40545341
  hyper

SEQ ID NO: 125530 - DNA, 58 bp, Homo sapiens; identical to SEQ ID NO: 51901
  chr15:40559554-40559612
  hyper

SEQ ID NO: 125531 - DNA, 30 bp, Homo sapiens
  chr15:40574858-40574888
  hyper
gctccggcctccgcccgcgctctgatacct

SEQ ID NO: 125532 - DNA, 30 bp, Homo sapiens
  chr15:40575087-40575117
  hyper
gactcgaccctctcccgagtctctcgccgc

SEQ ID NO: 125533 - DNA, 377 bp, Homo sapiens
  chr15:40575341-40575718
  hyper
ggggggctcagcggcgcgggagctgccgcccgcctagatacctgactttatagccttgggggtctccatggcaatggctgtcctgggagcggactgcgccgtcagggcagagacggacggggcgggggagaccgctcctgacccccaccccttcgtgggccacgaagtaggggagcggttcctcctccgcgctcccctgggaatgcggcggcggttgcggggcgggggcgggggctgctcgccgggggccacatgcacccaaccgggccaatcccaaagtcgcagtcttctctccccgccctccgcccccaaccgagtcggtgccctcggctccttagaaactggcgggacctcggcctcgtcggggaagactgaaa

SEQ ID NO: 125534 - DNA, 30 bp, Homo sapiens; identical to SEQ ID NO: 51903
  chr15:40616159-40616189
  hyper

SEQ ID NO: 125535 - DNA, 30 bp, Homo sapiens
  chr15:40650127-40650157
  hyper
gcgggcgtggagctcgccctctatccggct

SEQ ID NO: 125536 - DNA, 13 bp, Homo sapiens
  chr15:40650947-40650960
  hyper
aggccctgcccct

SEQ ID NO: 125537 - DNA, 50 bp, Homo sapiens
  chr15:40651001-40651051
  hyper
cgggtttcagcgtgccagtgtgcatgaaggtgtgcgtgaatcgcggatgg

SEQ ID NO: 125538 - DNA, 30 bp, Homo sapiens
  chr15:40675340-40675370
  hyper
ggcctgtcgggtcgcgctatccccgggccc

SEQ ID NO: 125539 - DNA, 30 bp, Homo sapiens
  chr15:40697944-40697974
  hyper
gccggtttggtgggcggcgaagcctggatt

SEQ ID NO: 125540 - DNA, 55 bp, Homo sapiens; identical to SEQ ID NO: 51905
  chr15:40698352-40698407
  hyper

SEQ ID NO: 125541 - DNA, 30 bp, Homo sapiens; identical to SEQ ID NO: 10079
  chr15:40729018-40729048
  hyper

SEQ ID NO: 125542 - DNA, 30 bp, Homo sapiens
  chr15:40732187-40732217
  hyper
ccgtagcttggggacgcgagggagggagtc

SEQ ID NO: 125543 - DNA, 30 bp, Homo sapiens
  chr15:40734354-40734384
  hyper
gggcccgaggggctcgcttggcggtgaagc

SEQ ID NO: 125544 - DNA, 30 bp, Homo sapiens; identical to SEQ ID NO: 10080
  chr15:40734681-40734711
  hyper

SEQ ID NO: 125545 - DNA, 266 bp, Homo sapiens
  chr15:40762822-40763088
  hyper
gaccagcctccggcacgtctggactcggagagagcgctgcccgcctccctgcctccagacccgttgctggaggaagggctaggacaggcctgagtttgtggcgaatcccccttgtccacttccctgaggacacacgctgcaggagagcagcctcgagtcttttctgccttcgaggtctcaggagcttttgtccccaagcccagaggacaggggtggccctgactcaggcgccctcttccgggtaggggtccgcgtgcgccctccca

SEQ ID NO: 125546 - DNA, 30 bp, Homo sapiens
  chr15:40763507-40763537
  hyper
ggggctgggtgggccgcccctgctgctgcc

SEQ ID NO: 125547 - DNA, 30 bp, Homo sapiens
  chr15:40799353-40799383
  hyper
gccaagagggctcccgcctcccctccaagc

SEQ ID NO: 125548 - DNA, 163 bp, Homo sapiens
  chr15:40861434-40861597
  hyper
cttatcgcagaccccgcctcgggactgggcctccctgattcgctggggccgagtgacgtcctcagatcgcgaccctgggagtggagtgggggcagcgtggttatgtggctggaccgccgcggatggctcagggttcttggacattggcgctacgaccttaggc

SEQ ID NO: 125549 - DNA, 30 bp, Homo sapiens
  chr15:40862032-40862062
  hyper
tcagtaccgagttccgagctcagcccctgg

SEQ ID NO: 125550 - DNA, 42 bp, Homo sapiens
  chr15:40886161-40886203
  hyper
aatgttatggaagccgccattttgtacggaagccaaagtcca

SEQ ID NO: 125551 - DNA, 30 bp, Homo sapiens
  chr15:40886486-40886516
  hyper
cggactgctagaggcggctgtctgtttccg

SEQ ID NO: 125552 - DNA, 30 bp, Homo sapiens
  chr15:40986857-40986887
  hyper
acaaaccacaagagcgctagggcccccgct

SEQ ID NO: 125553 - DNA, 30 bp, Homo sapiens
  chr15:40987162-40987192
  hyper
cacgcgtgagccaccgcccccggcataaag

SEQ ID NO: 125554 - DNA, 30 bp, Homo sapiens; identical to SEQ ID NO: 51909
  chr15:40987756-40987786
  hyper

SEQ ID NO: 125555 - DNA, 57 bp, Homo sapiens; identical to SEQ ID NO: 10081
  chr15:41046992-41047049
  hyper

SEQ ID NO: 125556 - DNA, 30 bp, Homo sapiens; identical to SEQ ID NO: 51911
  chr15:41047345-41047375
  hyper

SEQ ID NO: 125557 - DNA, 313 bp, Homo sapiens; identical to SEQ ID NO: 51912
  chr15:41055852-41056165
  hyper

SEQ ID NO: 125558 - DNA, 30 bp, Homo sapiens; identical to SEQ ID NO: 51913
  chr15:41099761-41099791
  hyper

SEQ ID NO: 125559 - DNA, 157 bp, Homo sapiens
  chr15:41136284-41136441
  hyper
cagctctccgagcaccgggtcggaagccgcgacccgagccgcgcaggaagctgggaccggaacctcggcggacccggccccacccaactcacctgcgcaggtaacccgggcccccgcgcgcaaggccgaggcgcaggcggagcgggctggagcatgt

SEQ ID NO: 125560 - DNA, 490 bp, Homo sapiens
  chr15:41136701-41137191
  hyper
cggaacccagaggcccgcgctctgaaggtgacccccctggggaggaaggcgatggcccctgcgaggacgatggcccgcgcccgcctcgccccggccggcatccctgccgtcgccttgtggcttctgtgcacgctcggcctccagggcacccaggccgggccaccgcccgcgccccctgggctgcccgcgggagccgactgcctgaacagctttaccgccggggtgcctggcttcgtgctggacaccaacgcctcggtcagcaacggagctaccttcctggagtcccccaccgtgcgccggggctgggactgcgtgcgcgcctgctgcaccacccagaactgcaacttggcgctagtggagctgcagcccgaccgcggggaggacgccatcgccgcctgcttcctcatcaactgcctctacgagcagaacttcgtgtgcaagttcgcgcccagggagggcttcatcaactacctcacgagggaagtgtacc

SEQ ID NO: 125561 - DNA, 30 bp, Homo sapiens
  chr15:41166617-41166647
  hyper
agctccaagagtcacgcaggtacaaggaca

SEQ ID NO: 125562 - DNA, 30 bp, Homo sapiens
  chr15:41198710-41198740
  hyper
tgggcactagggggcgccgtctaccggctt

SEQ ID NO: 125563 - DNA, 30 bp, Homo sapiens
  chr15:41220704-41220734
  hyper
catacagctgaggacgcgcccccctcctac

SEQ ID NO: 125564 - DNA, 30 bp, Homo sapiens
  chr15:41221361-41221391
  hyper
gcccgactggctgacggggaggggggagcg

SEQ ID NO: 125565 - DNA, 30 bp, Homo sapiens
  chr15:41233823-41233853
  hyper
gtcccttcctcgggcggggatgcgcctgcg

SEQ ID NO: 125566 - DNA, 330 bp, Homo sapiens
  chr15:41245391-41245721
  hyper
tgcccgccgcctgacgcaatccgaggcgcccttgctgcatgccggcgctggagaaacctcccctgccgttgcatcactcctgccaggtttgccacagaggtggagctgaaccaatcagcgggcgcgctgggcccgcggcgcggttaagtgagaagcagaatccgaagttgattggccaaaaggggatttgccccaccccaatcaccgcggcagctggccgcggtgggcgtggtctcccggcaagaaggtttaaagggcgcctccatggggggcgctcagctggagctaccgagcggtgccaggccaggtgtgtgcgtccgtcggtctttc

SEQ ID NO: 125567 - DNA, 30 bp, Homo sapiens
  chr15:41408070-41408100
  hyper
gcccctttaagacgcggcccagttgtcgcc

SEQ ID NO: 125568 - DNA, 30 bp, Homo sapiens; identical to SEQ ID NO: 51916
  chr15:41408390-41408420
  hyper

SEQ ID NO: 125569 - DNA, 473 bp, Homo sapiens
  chr15:41522910-41523383
  hyper
cgccgcagaggcgacgcccgcccggcccaacgtccagtctcgtctgtttcccgaggagccaatcagcacgcggccccgaggccggctccccagcgccccctgcggccgggaggaggacggcagccaggaaagatgaagagcgcgtgcagtccccgaagggtacaccctagggttcccccccacgcgaagtttctctccgcaatccgtgccacctatcgagtaggattcctagtgttcgattcctgtgagaaaaggtagactacgctgcctgtcgcaggttagtttgttgtaaaactgttggtcaatgacgttgcccttttaattgcgtcgttagcgaccgagtggcatcgcccctttaaggccggtggcagctgcggttccgggggcggggtccgtcttcagcaggacttgggctggagctgggctgattcattcggggctggaactcgaacgctgacgttggctcctgagcc

SEQ ID NO: 125570 - DNA, 182 bp, Homo sapiens
  chr15:41576045-41576227
  hyper
tcgaaagagtggggcgagtgctattgattgacgtgcattccaaccaacctacgacgcaaggagagcgcgcgcgagcaagacgatgcccaataaacactcagccccagcggcgggggcggggcttgtgggaacggcccaccgcagggttggccaccttgagaagctgcgaagatggcggagta

SEQ ID NO: 125571 - DNA, 86 bp, Homo sapiens
  chr15:41576676-41576762
  hyper
tccccctctttgcccgtcagcggtatcagttgaggcctgttgtggctctgagtattttgtgtccccagcccgttgaccttgagact

SEQ ID NO: 125572 - DNA, 468 bp, Homo sapiens
  chr15:41624808-41625276
  hyper
aagcacagctcctgcgtcctcattggacatcatgggcaatccaagcactggagtccgagtccgcgcactcgttacctgaacaggcgttacaggccctttggcgcctgcgtattcgtgaagtgtgaaaaaagcgcgcctctgttgggacgggaaatcagcctttctattggtcagggttagaaaccccgcctttgaggcattttcaaccaatggaagcgcggcattcttcatttaaactgtctataaatttctgcctagtcaaagttaagagtggcgccagggatttgaaccgcgctgacgaagtttggtgatccatcttccgagtatcgccgggatttcgaatcgcgatgatcatcccctctctagaggagctggactccctcaagtacagtgacctgcagaacttagccaagagtctgggtctccgggccaacctgagggtacggcgctggcggtgcgggtccctgg

SEQ ID NO: 125573 - DNA, 30 bp, Homo sapiens
  chr15:41625544-41625574
  hyper
cagggcgtcgattacgaaactcaggcccag

SEQ ID NO: 125574 - DNA, 5 bp, Homo sapiens
  chr15:41694512-41694517
  hyper
cgcac

SEQ ID NO: 125575 - DNA, 30 bp, Homo sapiens; identical to SEQ ID NO: 51921
  chr15:41694775-41694805
  hyper

SEQ ID NO: 125576 - DNA, 30 bp, Homo sapiens; identical to SEQ ID NO: 51922
  chr15:41709139-41709169
  hyper

SEQ ID NO: 125577 - DNA, 30 bp, Homo sapiens; identical to SEQ ID NO: 51923
  chr15:41709569-41709599
  hyper

SEQ ID NO: 125578 - DNA, 30 bp, Homo sapiens; identical to SEQ ID NO: 10085
  chr15:41709918-41709948
  hyper

SEQ ID NO: 125579 - DNA, 1117 bp, Homo sapiens; identical to SEQ ID NO: 10086
  chr15:41786423-41787540
  hyper

SEQ ID NO: 125580 - DNA, 104 bp, Homo sapiens; identical to SEQ ID NO: 51926
  chr15:41788033-41788137
  hyper

SEQ ID NO: 125581 - DNA, 115 bp, Homo sapiens
  chr15:41788173-41788288
  hyper
cgccgccctccgagccgtcgggagccggtgcaaatcgccgctgagggcccttccagctccaaggctgcggcttccaggccttccccacccccaggcccgccggggcctccccgaa

SEQ ID NO: 125582 - DNA, 1989 bp, Homo sapiens; identical to SEQ ID NO: 51927
  chr15:41804115-41806104
  hyper

SEQ ID NO: 125583 - DNA, 30 bp, Homo sapiens; identical to SEQ ID NO: 51928
  chr15:41836561-41836591
  hyper

SEQ ID NO: 125584 - DNA, 30 bp, Homo sapiens; identical to SEQ ID NO: 10089
  chr15:41850597-41850627
  hyper

SEQ ID NO: 125585 - DNA, 35 bp, Homo sapiens
  chr15:41851949-41851984
  hyper
cctcggaaaccacacgggccggggctgggcaccca

SEQ ID NO: 125586 - DNA, 1027 bp, Homo sapiens; identical to SEQ ID NO: 51931
  chr15:41913245-41914272
  hyper

SEQ ID NO: 125587 - DNA, 1105 bp, Homo sapiens
  chr15:41952225-41953330
  hyper
ggggctgggcgcggccggggcggagccggcgaggagccctagggaaagggtgaaaggcacagttgagaaaggcccgccgggcattggtttcacagtttccacgaaggcttcgtgtgcaagcctgaggagtttaggtgcctccctcctgcctcgcctttcttggttctagaaccttcagtaggcttttctgggttgcagggacccggaaaagcagcggcttccactcggggggcgggtcccaagggtcttgctgctgctctggggccgtttggactcctggtgttgggggaggggtcagggaggtgctgctcgcgtctccttttgcgcctgcgcggcgggctccgagcgggtaggagcgcgtgcgcggtgacgtggacgtccggtgcgcgcgcgcaggctcttcagctggagcggacacacggtgtgcgaaccgaacagaataacccgcccccagcgggatgtgaaggactccgggtgaggccggccacgccccgcacggtaactctcgggcctgggtggagggcatcgcttagtactggcccgattggagtttttcgagagtttgaagctcttgtgtatttgaacggcgtgagaaacgttccgctgagagagcttcgcacgccctcgccaggccgggccttgcgcagggccgcctttggcgcgcccctgtggtccctgagcgaggctgcgcatgtcacctcgcgcgcgtccccggcctcacttccgcgtcgctcagctacctaactgggaacatcgacgccagagagagcggccacgaggcgggaggggtgagaagcgcccatggctcggccctgccctcgcgtgtgtggggtgccgctccgcgtggtacggtccgcgtgacgacttctcgcccggcgccgggctctaggtcgagagccacgcttacgcgcttttcagtttagagcctaggtctcgtggttctagaactccaagggaaacggtgtcggcgtcgcttttctgagaacttggcgcagcgttttgacacctgtgcaaacgtcttttctaacaagtaatttccggccaaattgtttgaggcaggacgtcaagtttaataaaggagggcgaggaagtgagctgtaggagt

SEQ ID NO: 125588 - DNA, 201 bp, Homo sapiens; identical to SEQ ID NO: 51933
  chr15:42112222-42112423
  hyper

SEQ ID NO: 125589 - DNA, 30 bp, Homo sapiens; identical to SEQ ID NO: 10092
  chr15:42119669-42119699
  hyper

SEQ ID NO: 125590 - DNA, 161 bp, Homo sapiens; identical to SEQ ID NO: 51935
  chr15:42119936-42120097
  hyper

SEQ ID NO: 125591 - DNA, 37 bp, Homo sapiens; identical to SEQ ID NO: 10094
  chr15:42263897-42263934
  hyper

SEQ ID NO: 125592 - DNA, 72 bp, Homo sapiens; identical to SEQ ID NO: 51937
  chr15:42349321-42349393
  hyper

SEQ ID NO: 125593 - DNA, 30 bp, Homo sapiens; identical to SEQ ID NO: 51938
  chr15:42500327-42500357
  hyper

SEQ ID NO: 125594 - DNA, 201 bp, Homo sapiens
  chr15:42565686-42565887
  hyper
ccgggtcctggaaacgtcgcggagcttgtttgctgtgcggcgtagcggcccctctctcagacagtcgtctgtgcgccgtgagactttggacctactgcgcaggcgtcatcctgttggaacctggtcagctgggttagagagatcgctacatgccagcctggcctgagtcttttctgtctcccagccgttaaaggttttagg

SEQ ID NO: 125595 - DNA, 30 bp, Homo sapiens
  chr15:42787702-42787732
  hyper
attcccagactctccgtctgcgtggcaggg

SEQ ID NO: 125596 - DNA, 30 bp, Homo sapiens
  chr15:42787931-42787961
  hyper
cggagggagctggccgggatgaagtctgag

SEQ ID NO: 125597 - DNA, 98 bp, Homo sapiens; identical to SEQ ID NO: 51940
  chr15:42841084-42841182
  hyper

SEQ ID NO: 125598 - DNA, 30 bp, Homo sapiens; identical to SEQ ID NO: 51941
  chr15:42841507-42841537
  hyper

SEQ ID NO: 125599 - DNA, 30 bp, Homo sapiens
  chr15:42867860-42867890
  hyper
gcctgggatgctgccgctgagctgacccgc

SEQ ID NO: 125600 - DNA, 80 bp, Homo sapiens
  chr15:42868394-42868474
  hyper
aagcagaaggtgagggcgtgagggggaaattgaggccgacacaggtcgcggtttctttctatgctcgacagctgatttaa

SEQ ID NO: 125601 - DNA, 482 bp, Homo sapiens
  chr15:42873436-42873918
  hyper
gggctagtgactcccgggatattgggcagatggcaggtggggtctgagccatggaagaactgcgaagatccaacagaaactttctatcataaatgatttgagtttctcctggtgtggtggagaagagcgtcccctcgggcgtggtgcaatagtcaagaggtagctgcgcggcgtcgctgatggccacggtgtgggtggggaaggcgcggctctggctgggctggtggccgctgccagcggaggaggacatggctgtggacgcgggctctgggctttgtgtggcgggtaggcggcggcgccgggccggtctgctccagctcctagggcgggtggaaaagcgagctctgcgcactcctcgctcgcttcctctagttccctcgtctggctccgcccctgccgccagccgatcctcgggcctcgccagcagcctcagcagcagcagcagcggcggcgacgaccacgatgacaggaaacctacatag

SEQ ID NO: 125602 - DNA, 30 bp, Homo sapiens
  chr15:43029187-43029217
  hyper
tgggggcgtgtcaccgctgttacctccgaa

SEQ ID NO: 125603 - DNA, 30 bp, Homo sapiens
  chr15:43029543-43029573
  hyper
ccaccttggctgcccgccctggagcgacct

SEQ ID NO: 125604 - DNA, 30 bp, Homo sapiens
  chr15:43212686-43212716
  hyper
aggaccgggaccggcgggggttaaccctcg

SEQ ID NO: 125605 - DNA, 126 bp, Homo sapiens
  chr15:43213000-43213126
  hyper
ttattctcccccctcgtaacccgacacagcctagcccacctgccctgccagcgcgcacgcccacctctccgctacaggtgctgattggagagtgcgttccgaactcgcagcgtcggttggctagtc

SEQ ID NO: 125606 - DNA, 31 bp, Homo sapiens; identical to SEQ ID NO: 10096
  chr15:43312163-43312194
  hyper

SEQ ID NO: 125607 - DNA, 149 bp, Homo sapiens; identical to SEQ ID NO: 10097
  chr15:43394929-43395078
  hyper

SEQ ID NO: 125608 - DNA, 102 bp, Homo sapiens; identical to SEQ ID NO: 10098
  chr15:43397759-43397861
  hyper

SEQ ID NO: 125609 - DNA, 30 bp, Homo sapiens; identical to SEQ ID NO: 10099
  chr15:43398420-43398450
  hyper

SEQ ID NO: 125610 - DNA, 55 bp, Homo sapiens
  chr15:43415142-43415197
  hyper
gcattgaagtccaaacgtaaatccttccagtttttggcgcccgggtatttgactt

SEQ ID NO: 125611 - DNA, 291 bp, Homo sapiens
  chr15:43415273-43415564
  hyper
cggctcctcacactcagtgtttaggaggtatcatcatatcatgggctgacaggaatgacgggagagaaaccttaacgcagagtgagtccccatggaaaccgcgccaaccccgaccgggggcgtcgccagcgggaaggggtgggtcccctctcgaataccccgcccggctccgggaacgtcaccgacgctctggggcttttgctaagaagcgctcgcccaggaggaggcagggcaaattggtgaacagggcggcgtgtccttatacgggcacgaactcgcgaggtcctgtga

SEQ ID NO: 125612 - DNA, 96 bp, Homo sapiens
  chr15:43425868-43425964
  hyper
tccggcgccggccccgcatccagctctggccctgcgacaatagagtccggaagtgcaggcaaagcggctcccgggagcgccgcgcggtcctgcgcg

SEQ ID NO: 125613 - DNA, 30 bp, Homo sapiens; identical to SEQ ID NO: 51950
  chr15:43477988-43478018
  hyper

SEQ ID NO: 125614 - DNA, 31 bp, Homo sapiens; identical to SEQ ID NO: 10100
  chr15:43584165-43584196
  hyper

SEQ ID NO: 125615 - DNA, 391 bp, Homo sapiens
  chr15:43622046-43622437
  hyper
agggcattaggaaaacgctgggctgcccaggcgatgagggccgcggcactctccggctcgaggtaggtcagcaccgcctcggccaggagcagagtgggtgaggctgcgtcgagccccgcggcgcccagggcctcctccactcgctggagctgccgcaagtccagacccaggatgcagtagtctgcgctctcaaagcacagcgcggacgcgggctcccccctctcgaaaggcccggttaacgcgcacagctctggcgtctctccaatcctttctgctttgcgccgcgccacgtccggaaaatccacctcccagactgcagcccgggccaggcggcccgcggtttttaagcgaaaatagagcgagtcgaagccagcgccgagagacaagatct

SEQ ID NO: 125616 - DNA, 356 bp, Homo sapiens
  chr15:43622637-43622993
  hyper
ttggtgttctgtaccgcgcctgcccgacgctcacggctccgggggcccatggccagaagagactcaggaatggcagtctgtcacggttgtgagccgccccttggttagcacacacctcacggacctcggtagggggaaaaaaaccacccatgctcctggacttccccttccgccggcacttgtgcgtcacttccgggaagagcgcatctcgccaaccagaattgaggagggtgtagccagtgctaagttcgcttgcggctgacctttctttggaatgtcgtgagttccatttgtcccagaatacggtccgctaccgctgtgacatgagtgttagggaaggcgggttgtcacgtttc

SEQ ID NO: 125617 - DNA, 30 bp, Homo sapiens
  chr15:43663043-43663073
  hyper
tgacccggctaaggcgccctgagggcgccc

SEQ ID NO: 125618 - DNA, 69 bp, Homo sapiens
  chr15:43785354-43785423
  hyper
cccctttcccgtcacgtcacacaatatcggatcgtccattcgctgccgccgcccgccactcaagaaatc

SEQ ID NO: 125619 - DNA, 153 bp, Homo sapiens; identical to SEQ ID NO: 10101
  chr15:43802597-43802750
  hyper

SEQ ID NO: 125620 - DNA, 270 bp, Homo sapiens
  chr15:43803489-43803759
  hyper
actaccaatgcatacgtctgcatctccatccctagtgtgcacttcctgagatctgcgcccttgtcacctgcatcttccatgccatgtgtccgtatcctctcgctctactaacatctcgcttgcccatccttactgcacactccatggcgttccgcagtctccctgaggcagcggagctctatgcagcccctggggcccctctggtcacaccctccaccgcagtgttttggaccaggtgtcctgaaagtcctcaccatccctggagaatcc

SEQ ID NO: 125621 - DNA, 147 bp, Homo sapiens
  chr15:43803825-43803972
  hyper
cgtacaaatctcaaatctctgaatgccagtagccaaccactaagtgaccttcgtggctaccagctcctaagtcctcacctccttccccagtgctgtgcctgtggctgtggtgcagtgctgcggagccacctgcgggtggaagcaagc

SEQ ID NO: 125622 - DNA, 186 bp, Homo sapiens
  chr15:43809674-43809860
  hyper
tggagctcagacgtcgtgaaggcaaagaaacagttaagtctccagtgcctcgtcacggaccagcccctcttccccgccctggcgccgccctcctcatcaagcacccccctcccccccccaccgcccgccccactcccaccctaagtgctgcagactcttccctgaagctgccggctgaggccggag

SEQ ID NO: 125623 - DNA, 158 bp, Homo sapiens; identical to SEQ ID NO: 51955
  chr15:44038551-44038709
  hyper

SEQ ID NO: 125624 - DNA, 30 bp, Homo sapiens
  chr15:44039042-44039072
  hyper
ccgggagctggaggcgcctcgccgagagcg

SEQ ID NO: 125625 - DNA, 89 bp, Homo sapiens; identical to SEQ ID NO: 10103
  chr15:44068729-44068818
  hyper

SEQ ID NO: 125626 - DNA, 30 bp, Homo sapiens; identical to SEQ ID NO: 51957
  chr15:44069047-44069077
  hyper

SEQ ID NO: 125627 - DNA, 30 bp, Homo sapiens
  chr15:44085181-44085211
  hyper
agcgtgagctcgcccgccagaagaatatga

SEQ ID NO: 125628 - DNA, 30 bp, Homo sapiens
  chr15:44116864-44116894
  hyper
cgcgaacacagctgcgcgactgatagagaa

SEQ ID NO: 125629 - DNA, 381 bp, Homo sapiens
  chr15:44119066-44119447
  hyper
ggccaaggcggccttcttaagaagcgcgcgtaaaaccccaacttcctgctctggcgctgcggccgctggggatctgagtgggctccgccccgcctcggacccgcccctcccggcctcccgccgcaatcttggcgggaaggcgccggccgctaagaagccgaaagatgtccaggtcgggcgcggcggctgagaaggcggactccagacagcgaccccagatgaaggtgagaaacggactggtgcttccaaggtgtgctcctgcctcggtttttgtgagggttatgcgggacacaggcccaggaggtcgagggcacctggcaccgggggtaggcgggggatccctgcccttaggccttcagctttgacgaaaggttcttatca

SEQ ID NO: 125630 - DNA, 30 bp, Homo sapiens; identical to SEQ ID NO: 10104
  chr15:44486469-44486499
  hyper

SEQ ID NO: 125631 - DNA, 927 bp, Homo sapiens; identical to SEQ ID NO: 10105
  chr15:44486763-44487690
  hyper

SEQ ID NO: 125632 - DNA, 58 bp, Homo sapiens
  chr15:44580502-44580560
  hyper
aacagaaaggactccgacccaggtacctgagacatctgagaccgccaaaattaacaca

SEQ ID NO: 125633 - DNA, 30 bp, Homo sapiens
  chr15:44580816-44580846
  hyper
aagaggggtgtcgacggaaactcggaaatg

SEQ ID NO: 125634 - DNA, 30 bp, Homo sapiens; identical to SEQ ID NO: 51960
  chr15:44581415-44581445
  hyper

SEQ ID NO: 125635 - DNA, 77 bp, Homo sapiens
  chr15:44828875-44828952
  hyper
gaccagagggacagcgcaccctccggtcgaagcggggtaggcgttggcaggggaggggcgacgaagactggcgaggt

SEQ ID NO: 125636 - DNA, 30 bp, Homo sapiens; identical to SEQ ID NO: 51961
  chr15:44829295-44829325
  hyper

SEQ ID NO: 125637 - DNA, 30 bp, Homo sapiens
  chr15:44955601-44955631
  hyper
cctccaggcagcagcgacccccgccccggc

SEQ ID NO: 125638 - DNA, 80 bp, Homo sapiens
  chr15:45003637-45003717
  hyper
ggtgacggtccctgcgggccttgtcctgattggctgggcacgcgtttaatataagtggaggcgtcgcgctggcgggcatt

SEQ ID NO: 125639 - DNA, 30 bp, Homo sapiens
  chr15:45020812-45020842
  hyper
ggcgtgagtcacagcgcccggctgcttttt

SEQ ID NO: 125640 - DNA, 136 bp, Homo sapiens; identical to SEQ ID NO: 51963
  chr15:45404102-45404238
  hyper

SEQ ID NO: 125641 - DNA, 84 bp, Homo sapiens
  chr15:45404748-45404832
  hyper
caccaaagaagacccccagtacggtgcggttgtggagcgacggcaggccggctatgccccgcgtggctgcgttgctgagccggc

SEQ ID NO: 125642 - DNA, 510 bp, Homo sapiens
  chr15:45404897-45405407
  hyper
cggcgctgcaaccggcagcctgcggaggcagggagcggggctctgtctaagcactccatcccctaggatcccccaaacctctccctaagcctccctcaacccccatcccacttcactgacagaaccttccctcaagggtctcttggccccgggagcgcataagattgcgctgtgtaggcagcggagctgctgggcgcgtgttccccgcagattccccgctcagggcctttcgcgccccggcccttcgcgagccacggccccagcacgcccgggcccccagaacgcaccaacagcaccacgctcgtggtgcctcaggttgttaaaccagccgtcatagcgctgcacttcccagggcagtgagagtgcgtcctgactgcctgtgggcacagagaagggcctcctcagcactacgctcccagctacccctcccgagcaacgaaggccttggccagtccttccccagctcgcggagcgcccctaaccggacccaagtgtcgggccgcactggga

SEQ ID NO: 125643 - DNA, 607 bp, Homo sapiens
  chr15:45406347-45406954
  hyper
tcaggacagacctgcgccagtgtgagcatctggacctagggctcaccctcctgccgtggaggtggggcccttatttgcacaacctcttccagctcagaccagcccctgggctgggacacccgtgtggcacgtcgcccacgctgctataaaaggggtcccgcgcgacttccaaactcagcgccaacccgcagaaccaggaaagtaacggctacagacagtgagaaatagtttcgctcgccggctagaaaaactctgtcggtaccaaccccagagcgttgagagcagcccacctccacgcttccttaacggagaggtgcaggactcagacttcaccagcccactcggtcccagccttgtacgcaaagagacgccaaggacgcgctctcccgcgtccaggcagccccagcttgctggcttgcctgcccgcctgcgtgcagcactcggccggcgtgcagcatgaccctgtggaacggcgtactgcctttttacccccagccccggcatgccgcaggcttcagcgttccactgctcatcgttattctagtgtttttggctctagcagcaagcttcctgctcatcttgccggggatccgtggccactcggtaa

SEQ ID NO: 125644 - DNA, 706 bp, Homo sapiens
  chr15:45408665-45409371
  hyper
cgaggtctccgaccgcgggcagccccatgagcccgcctcaccccacagggaccccagtgcatcagctgaacgagaccattgactacaacgagcagttcacctggcgtctgaaagagaattacgccgcggagtacgcgaacgcactggagaaggggctgccggacccagtgctctacctggcggagaagttcacaccgagtagcccttgcggcctgtaccaccagtaccacctggcgggacactacgcctcggccacgctatggtaagtgctggagggaaggctgtgtgcacgtgtgtgtgtgccaggagctgggccgtatgagcgggaggatgcaggcctcggaggcgctgagcagctgcagccagacccgacgcgctcggggtgggcatgacagcctcgcgggttagaagatccacgagatctgcacagacggaatccggagagactccagccaccgcctggacctcaggagcccgcttctcccccggggaattcccctgcaccgctgccatcccagtccctggctttgacgctggggtagggataaagaagagcgcagctgtgggaaccccggtgggctgggagaagcccgctcacagcgggtccccccactccccggcagggtggcgttctgcttctggctcctctccaacgtgctgctctccacgccggccccgctctacggaggcctggcactgctgacca

SEQ ID NO: 125645 - DNA, 25 bp, Homo sapiens
  chr15:45409491-45409516
  hyper
cgctggcaaccggtgaggaccgaga

SEQ ID NO: 125646 - DNA, 30 bp, Homo sapiens
  chr15:45409926-45409956
  hyper
cttcctcggaggggccgtggtgagtctcca

SEQ ID NO: 125647 - DNA, 30 bp, Homo sapiens
  chr15:45410202-45410232
  hyper
actgagcgctgctggcgcgaggcctcggac

SEQ ID NO: 125648 - DNA, 401 bp, Homo sapiens
  chr15:45421279-45421680
  hyper
cacacgaagcgcccccgggggtgtgattaaagagggaaccaggtcccgacgttctgtgaacaaacgcgcgcccttactctcagtggggctcccgtccgacccccactcctctcctaactcacgtaaggacccggctgtgaccggacaaaccgggtctggggtgcttccagtcactcttcaagtcactcccaaacttctcagactgcacccgaggctctgcggcgccgcctccctctcccggcctggtacagagaagggctgggtgcgccaggacagtagtaccggggtctgccagctccgcagaggtccctccaatcccccctcctcctctgcgcccccccacccatgcccagcaatcccagcagctccagcgcaaacctagcgacgcagttccgggtctg

SEQ ID NO: 125649 - DNA, 243 bp, Homo sapiens; identical to SEQ ID NO: 51968
  chr15:45421706-45421949
  hyper

SEQ ID NO: 125650 - DNA, 107 bp, Homo sapiens; identical to SEQ ID NO: 51969
  chr15:45421997-45422104
  hyper

SEQ ID NO: 125651 - DNA, 350 bp, Homo sapiens
  chr15:45427369-45427719
  hyper
cgcatcccgcccggagaccccatgttcgaccccgaccagcgcggggacgtggtgctgcccttccagagaagccgctgggaccccgagaccggacggagtcccagcaatccccgggacccggtgaggcggggaaggcggcgggaagggaccgcaccccagccaggtgggacctgggcttcgggcctggcagggcctggaggggagaggcgcccactccccagccgcggacacccgccgggccccggccttccctagctcgccgccgcccatcgacccgggctcacccgccgcgtgccccgcaggccaaccaggtgacgggctggctggacggcagcgccatctatggttcc

SEQ ID NO: 125652 - DNA, 12 bp, Homo sapiens
  chr15:45427771-45427783
  hyper
cggggcccgacc

SEQ ID NO: 125653 - DNA, 93 bp, Homo sapiens
  chr15:45459389-45459482
  hyper
aaggaacttgatgcttcgaaagtgcttttcacagccgggctgtgtctgctccagagctgatttatacgcagaatctgcgctcgcttctccgct

SEQ ID NO: 125654 - DNA, 263 bp, Homo sapiens; identical to SEQ ID NO: 10110
  chr15:45479774-45480037
  hyper

SEQ ID NO: 125655 - DNA, 48 bp, Homo sapiens
  chr15:45480414-45480462
  hyper
tttacgtgtcgccacgcggtcccctgtggggagcgcatccatccccat

SEQ ID NO: 125656 - DNA, 30 bp, Homo sapiens; identical to SEQ ID NO: 51974
  chr15:45491086-45491116
  hyper

SEQ ID NO: 125657 - DNA, 881 bp, Homo sapiens
  chr15:45492664-45493545
  hyper
ccactatacgatcacggcgagctactagggacacaggacctcggcttgtcgcctgaactcttctctgttgaaagccccgcccccttgcaatgtcattgatttgtcattgtttgttctagcctatctccaccctcgcagccatctgagggcacgcaagagcattaatctctgctttctcgattttggtccacacttgcctgcgcaccagacacggtggccgatttctccaccgtggaggctgctcttggggttccccttacctcgcgcctcaaggaagttgtatggtggtgggtcagaactgattttccttcttgtaaaatttaagagctccagtcccagccaaagtcgttcagatagcatgatagtcagggcatggtgagcgtcagagagactttgggccaccattcgggcgtcctcaggggcttcacatcattgcaggcccggcctcataggaatcctttggttgcaaagcactttcatgtcccttcttttgcggtccgtgcgtacagccaagaggagacttcgggctagggagtccacagcgctcccggctgctcttgcgggtgaacgtgggtgcgggaggaacctggtagataatggacgcttaggaaagctggaatggccgccatctagacgagaagggcaacactgggtcagctgctcgtcgtggcgtcccggtagctcgccgtgatcgtatagtggttagtactctgcgttgtggccgcagcaacctcggttcgaatccgagtcacggcattgtggaaacaatggtacggcaagggcctctttttagacttagaaagccacacattcttctgggaagctaactctaaaagctgttacctggccagggctgaaattataacggacaatgaagtgtg

SEQ ID NO: 125658 - DNA, 224 bp, Homo sapiens; identical to SEQ ID NO: 51977
  chr15:45669905-45670129
  hyper

SEQ ID NO: 125659 - DNA, 650 bp, Homo sapiens; identical to SEQ ID NO: 10114
  chr15:45670188-45670838
  hyper

SEQ ID NO: 125660 - DNA, 117 bp, Homo sapiens; identical to SEQ ID NO: 10115
  chr15:45670932-45671049
  hyper

SEQ ID NO: 125661 - DNA, 30 bp, Homo sapiens
  chr15:45694396-45694426
  hyper
tgggttaggcaactcgatttcacgaaagcg

SEQ ID NO: 125662 - DNA, 515 bp, Homo sapiens; identical to SEQ ID NO: 10116
  chr15:45722444-45722959
  hyper

SEQ ID NO: 125663 - DNA, 30 bp, Homo sapiens; identical to SEQ ID NO: 51981
  chr15:45814512-45814542
  hyper

SEQ ID NO: 125664 - DNA, 166 bp, Homo sapiens
  chr15:45815254-45815420
  hyper
cgccgggggctgggcgttgctgctaggagttccctccaccgaaagtgtgtctcaggaatctcgggtcgggatctgggttgcgggtgctcggcagaagacaaacccagcacttttcttgctaactgaaaaggcaagcagcttttctctcctcgaattgcttgtctct

SEQ ID NO: 125665 - DNA, 32 bp, Homo sapiens
  chr15:45879206-45879238
  hyper
ctaaaaagctgtgccgcgtgagggctgaaagt

SEQ ID NO: 125666 - DNA, 30 bp, Homo sapiens
  chr15:45879938-45879968
  hyper
ggtgcaattgaaggcggttgatggtgaagc

SEQ ID NO: 125667 - DNA, 30 bp, Homo sapiens
  chr15:45926863-45926893
  hyper
gcctctctgcacagcgccccgcctccgctt

SEQ ID NO: 125668 - DNA, 14 bp, Homo sapiens
  chr15:47476225-47476239
  hyper
aggggaagttagag

SEQ ID NO: 125669 - DNA, 129 bp, Homo sapiens; identical to SEQ ID NO: 51985
  chr15:47476290-47476419
  hyper

SEQ ID NO: 125670 - DNA, 337 bp, Homo sapiens; identical to SEQ ID NO: 51986
  chr15:47476468-47476805
  hyper

SEQ ID NO: 125671 - DNA, 104 bp, Homo sapiens; identical to SEQ ID NO: 51987
  chr15:47476876-47476980
  hyper

SEQ ID NO: 125672 - DNA, 246 bp, Homo sapiens; identical to SEQ ID NO: 51988
  chr15:47477012-47477258
  hyper

SEQ ID NO: 125673 - DNA, 133 bp, Homo sapiens
  chr15:47477354-47477487
  hyper
cgctcaccgggctgtaaataaaagtgacgacttggaggagtgggggtcaaggctgccgggagggaaaaggcttgcccattttagaaaccgacttggagctcggaagagcaaacgtagtcgacagagaaaaccg

SEQ ID NO: 125674 - DNA, 1822 bp, Homo sapiens
  chr15:48009297-48011119
  hyper
aaagagggagggaatcgaaaaggttgcttcgcaggctgcagcacccactgcgagctggatgactgaggcactgggagttgctagaaggagcagctactcagaggtggggagagggagggtgcgcagcagagcgccggagaggagggacgcggaggccaccgaggggtcagcagggccgcggcgccagggtgggggcctccaggcggcgctggccacggttcacccgcgagggcgagcgcgcccggccggccgcgcctcctgccgtccgtgcccgggggtgggacccgcgccgggagctgccgagtgcgtggagggagccaggctccggctcgcctgatggattgacttggagatggatcgaattacaccatttgccgtgcatcggtttgttttgctcctgctctgtcccgctgctgctgctgctgctgcaaggggtggtggcgagtttcaggattctatcaaggaagccaagacctaaggagacagagggatatctatttttacaatatttttctttattttctttcttccttgcgcgtggcaagcttttttttttctttttcttttttcttaccagcctccccccaatgaggtaagaccgttttcaacaatttgctaatgctcttgtggcgcccggtgggggtcggaacctgagatcccgaatcgctgtgtgtgtgtgtgtgtgtgtgtgtgtgcgcgcggtgggggtcggaacctgagatcccgaatcgctgtgtgtgtgtgtgtgtgtgtgtgtgtgtgtgtgtgtgtgtgtgtgttgccactggacagttgatttattttccaagctgctctctctgcctgccgtgcaagggacgcgcaaagggctagagaggtttggcggacgcgtcaaaactggcaaagctggcggcttagggggaggggcaagtggacttggaggccctcctccactgtgcacccccttggaaaaaaagcggagggggcatcaagtaaaagtttcttgccaggcagagccagctcggcgtcccccgcacatagctggggttagcaggggttgcttctctgccgggcacagcgtctccaggagccagccggggagagctgagccaaggccgaaggagccgcctgcgggcttagccgccccctcccgcccgttggccccagagcggacgctgggacgcccggggtctggcagctctgcgcccggctaggagcgggcgggcgagcattagcctgcgtcctggagaaggggcgcagcgccgcagttgaggccggagcagcccctcgcgggcgtaggatacctgtcagtgagcgcccggattgcacggcccccgggtagtgcctgccggcgaggggcgggagctcgggtgacttggccatccccatccccggcccaggcccggagggcggccgcttcccaccgtccctctccccttactggcagagcgcgctgcgggcggactcccgggcccggagcagcccaccggccaccccaccgcccacccggctcccggtgtctcctcccggccgctctacccagcaactttccgtgctttgttccccgactggaaatgctttacggaagcgtcttggacagggtctccgccaggcgacaagagctcggtgctgagatgtgttacgttctcatctccccatcaattatggatggaaacaaataaggaagagtcaattttgctgagccccttctccggcaacgagaggcgttctgcagccgggagggagccgccgctcgcgccggcagccgctggcaggggcatggtgaggaggaaggtagggaaacttttatttcccgtcttgacagcggcggtgtttgtccctg

SEQ ID NO: 125675 - DNA, 166 bp, Homo sapiens
  chr15:48011366-48011532
  hyper
gggggattgaagtcccggtatgaatcgcagcgtttgaggaacttagggcagtactccctgttctggggtgaccattcggtaactgatgttccagcatcccgagccctcagcgccgtcagctggatgatctcacagggaaggcgcagcacatcgttactatagatat

SEQ ID NO: 125676 - DNA, 209 bp, Homo sapiens; identical to SEQ ID NO: 51993
  chr15:48469936-48470145
  hyper

SEQ ID NO: 125677 - DNA, 412 bp, Homo sapiens; identical to SEQ ID NO: 10124
  chr15:48470215-48470627
  hyper

SEQ ID NO: 125678 - DNA, 191 bp, Homo sapiens
  chr15:48483065-48483256
  hyper
taccttgctttcaacgtcggttaggtttagaatctacatattcaacactgtttagaaaacgtacctggcagctatctagagctttatcagagcgtttcctggctgctattttgttgtcttctagcttgtgttggggagacaggtctcaccacgcaccatttcagcactacggacagcgcctaggcgccttc

SEQ ID NO: 125679 - DNA, 101 bp, Homo sapiens
  chr15:48483906-48484007
  hyper
cgctaaccagggccctgtgactctacgcaggttccagaacacgccttctacatttgttactgaaccgatcagcgaacacagacaaacgtgccaacacttaa

SEQ ID NO: 125680 - DNA, 157 bp, Homo sapiens
  chr15:48623407-48623564
  hyper
gggcccgggcctggcgtacactctcggaaaaatgggggccagagcaaacaagaagagcgaaagcaagagggctaggcagccagaggcggcagcaagactcaagacgccaacggcgccgtcttcctggggccccagggcctgcgccatccctgggctg

SEQ ID NO: 125681 - DNA, 1007 bp, Homo sapiens
  chr15:48936638-48937645
  hyper
tagtttaaccacgaacggggtggggactaaacaaccctagcacctctaaggtgcccccaggaggtcttgccaaggagtcttccacagggagagtcatcctgcccgttgttctggatcttgaaacttgggagacccacaccaaaggagggaaccggttcctttaccctttaagcgcgtcgtgtcctccaccgcctcttctcttggcccgactggctctggtttccttcacgttcccagcctccaaattggcgtccgccccatggctcgtgtaggacgctaaaagcacggtaaatcccagggcgatctccagcagacgccctcgacgcatgatgccgagccgccaccggctcccgccgcctcttgccgcgcccggggctcggtctgcggccgccgctgcgccctgaagcgcaccgcgccgccggggtcccgctatcccgccgcccgtcccccgggccgggctcctcccgccttctccaggcgctgctcccacttcaggcggcccctgccagctgcaacacagagacaaatccccgaggcggggagactttcagggcatcgggatgctgaagcctcgcggtccccattcccaagcccaacccgtgcgccgcctgcgcgtggcgcagttaatttgggtaagggaagaccgtttggtccacagctggctggaaagcccaggcccccggcggcagcagccccggccgatccctcggcctcccgggccccgccagaagagcgcggcgcaaagtacccatatccccagcggtcctaagccccgggcgagctctctgggtttattttttttagcggcacgaattgcgcgcgatgcgcgctctgaacgccccactcctcagcctgccctctccgccaggctggaagccagccgcgccgtccccgccgactccgggcgatgccaccgccccccgaacatctgacgcggagcccggcaccaagagccccgggccaggaagctgtcaggcaggggagggccagcgccagctgtggacgtt

SEQ ID NO: 125682 - DNA, 888 bp, Homo sapiens; identical to SEQ ID NO: 10126
  chr15:48937709-48938597
  hyper

SEQ ID NO: 125683 - DNA, 55 bp, Homo sapiens
  chr15:49102692-49102747
  hyper
atccacaggctgagcgaatgaccttgaggaactgtttggcgtcagctacggcact

SEQ ID NO: 125684 - DNA, 30 bp, Homo sapiens; identical to SEQ ID NO: 51999
  chr15:49103165-49103195
  hyper

SEQ ID NO: 125685 - DNA, 208 bp, Homo sapiens; identical to SEQ ID NO: 52000
  chr15:49170051-49170259
  hyper

SEQ ID NO: 125686 - DNA, 31 bp, Homo sapiens; identical to SEQ ID NO: 52001
  chr15:49254968-49254999
  hyper

SEQ ID NO: 125687 - DNA, 138 bp, Homo sapiens
  chr15:49255440-49255578
  hyper
ggcaccagtgttctcgccttggaatccttgtcgggagagcctagacccaggctcccggcggcgcgggtcgctcacggccaactcttaggcgcagaacccgggcgagcgccggtcggggggcccgctgcatcactagcc

SEQ ID NO: 125688 - DNA, 136 bp, Homo sapiens
  chr15:49255860-49255996
  hyper
gtactactgacgggcgctgctccgcattgtttcactgacttgtgatgggtccgtgttcctcagatcccctcccagcctgcctaccctcgctcagagcttccctccctcctggattcctctcggagcttttttcaga

SEQ ID NO: 125689 - DNA, 30 bp, Homo sapiens; identical to SEQ ID NO: 52004
  chr15:49268321-49268351
  hyper

SEQ ID NO: 125690 - DNA, 30 bp, Homo sapiens; identical to SEQ ID NO: 52005
  chr15:49338361-49338391
  hyper

SEQ ID NO: 125691 - DNA, 228 bp, Homo sapiens
  chr15:49447913-49448141
  hyper
acttgtagctgattcgctacgactccaaaagagactgcaccaccccccgtttcctccgaagtggttggtgccttagcaactaaagctggcaactgggacatcgtccggtgctgcaggtctcagccgaagggcgtcggaaactgcgctcgcatcgagcagtttccagcctcctgggtaaaggagcagtctcctcccttgcttgggactctggacgcatctcattccggt

SEQ ID NO: 125692 - DNA, 35 bp, Homo sapiens; identical to SEQ ID NO: 10127
  chr15:49448551-49448586
  hyper

SEQ ID NO: 125693 - DNA, 30 bp, Homo sapiens
  chr15:50474530-50474560
  hyper
gcccgccagtccgcccggagcccgcccagt

SEQ ID NO: 125694 - DNA, 367 bp, Homo sapiens
  chr15:50474765-50475132
  hyper
aagcggcggccggcgcgcaccatcctgcgggcgttcctggagaaagcgcgccagacgccacacaagccttttctgctcttccgcgacgagactctcacctacgcgcaggtggaccggcgcagcaatcaagtggcccgggcgctgcacgaccacctcggcctgcgccagggagactgcgtggcgctccttatgggtaacgagccggcctacgtgtggctgtggctggggctggtgaagctgggctgtgccatggcgtgcctcaattacaacatccgcgcgaagtccctgctgcactgcttccagtgctgcggggcgaaggtgctgctggtgtcgccaggtgagccccgaggatcgccctgccctggca

SEQ ID NO: 125695 - DNA, 30 bp, Homo sapiens
  chr15:50647158-50647188
  hyper
gccctacacagacccgcactgacctggaaa

SEQ ID NO: 125696 - DNA, 30 bp, Homo sapiens; identical to SEQ ID NO: 10128
  chr15:50647539-50647569
  hyper

SEQ ID NO: 125697 - DNA, 100 bp, Homo sapiens
  chr15:50716740-50716840
  hyper
gttctctgggaagtcgtccgctgtgaacgatgaacgcctttccttccaccagctgctggttaccccggagacaagctctgtccgcggagaggagtgggac

SEQ ID NO: 125698 - DNA, 46 bp, Homo sapiens
  chr15:50978872-50978918
  hyper
taactcagctccggcgctagcagcagaagccgagtctttcataatt

SEQ ID NO: 125699 - DNA, 30 bp, Homo sapiens
  chr15:50979157-50979187
  hyper
tggtggggtgttcacgccgtatctccgttg

SEQ ID NO: 125700 - DNA, 30 bp, Homo sapiens; identical to SEQ ID NO: 52011
  chr15:50979471-50979501
  hyper

SEQ ID NO: 125701 - DNA, 80 bp, Homo sapiens
  chr15:51058035-51058115
  hyper
gctttccggctgcccgactttaactcacaccgaagcctggcgggagaacggatttctcaaggctcggaagtgtctgagcg

SEQ ID NO: 125702 - DNA, 63 bp, Homo sapiens
  chr15:51200799-51200862
  hyper
ctctggtggcctctcgcgagaacgacgctgaacttgttcaggtgggacgccaataaagatttc

SEQ ID NO: 125703 - DNA, 729 bp, Homo sapiens; identical to SEQ ID NO: 52013
  chr15:51385892-51386621
  hyper

SEQ ID NO: 125704 - DNA, 38 bp, Homo sapiens
  chr15:51552674-51552712
  hyper
ggactgagattaccacgggttttcgggatattgagtca

SEQ ID NO: 125705 - DNA, 764 bp, Homo sapiens
  chr15:51559323-51560087
  hyper
ctctgtcactcccaagcagggcgaatcgagccagatttttgttggacgctttcaggagcaaaaccagctcctcgtattgtgtcccattcacagctggagcagctcgggcactaggcgaggcagggggtgcggcgagcggtctccagccggctgcctgcggtcggtgccgcccgcagaatctgcgcggcccagtgcaaaataaaaacgcggggccccgcgttcaaaaagcaggaaaaagcctttccctttctcccgtggtctttctgtccacctgtctcggcagggtttatttgctagttaagttgcgctggcttgagcacagggacgctggcgggccaaaggccgaccctcacaggcgacccagcgtggcggcgaggtcccttggctgtacgccgaggtctgcgccgcccccacgtccgtggccggccactgcccagggcggagggcagcggtgttcgccgggtgggggcccagaacctgtcccaggaagacgcaggagacgcgaccggggtgagacaagagtccaagctctcaagcatccactgtgttattgcacttcacttacaatacacgaatttgaaggaaaaatgattaagaatttcatatggtgactgcagagcattcattagattccaagcgggaccccttctgagcgcgggaccctatggcggattgccattgaaaccagccctgccggctccccatgccccggggaagggtcttccctgtgcccaccccagcttagcaggcgagagcactggaag

SEQ ID NO: 125706 - DNA, 300 bp, Homo sapiens; identical to SEQ ID NO: 52015
  chr15:51633850-51634150
  hyper

SEQ ID NO: 125707 - DNA, 154 bp, Homo sapiens; identical to SEQ ID NO: 52016
  chr15:51634174-51634328
  hyper

SEQ ID NO: 125708 - DNA, 31 bp, Homo sapiens; identical to SEQ ID NO: 52017
  chr15:51812127-51812158
  hyper

SEQ ID NO: 125709 - DNA, 30 bp, Homo sapiens
  chr15:51915020-51915050
  hyper
gggtgcttgtgaggcgggggagggcaccgg

SEQ ID NO: 125710 - DNA, 238 bp, Homo sapiens; identical to SEQ ID NO: 52018
  chr15:51915458-51915696
  hyper

SEQ ID NO: 125711 - DNA, 175 bp, Homo sapiens
  chr15:51973519-51973694
  hyper
atacaccagctggccggtcgcccctcctttgttccattcccgggggattggagtagcgttggagtcaccgacgccatcccctcccgcctctggcgtgcatggagcatgcgcttccttcctcacttcctctgcaggagggagcgagagtaaagctacgccctggcgcgcagtctcc

SEQ ID NO: 125712 - DNA, 378 bp, Homo sapiens
  chr15:51973763-51974141
  hyper
cgccccaaccctgcttatcccttgaccgtcgagtgtcagagatcctgcagccgcccagtcccggcccctctcccgccccacacccaccctcctggctcttcctgtttttactcctccttttcattcataacaaaagctacagctccaggagcccagcgccgggctgtgacccaagccgagcgtggaagaatggggttcctcgggaccggcacttggattctggtgttagtgctcccgattcaagctttccccaaacctggaggaagccaaggtatgtgaacacttttcttcttcctaccttccttttatttcgccacgaaaaggtaaagtttggcataatacgtgagctgtaaatcaccctgacgcgttttctgatca

SEQ ID NO: 125713 - DNA, 265 bp, Homo sapiens
  chr15:52028981-52029246
  hyper
caggtgtcacattcgcggttgccagtgagcccagagggtgtaatttcacttctacataaagaagcataatcgatagaaccagaaccacccagtaggaacaactgcaccattcctgactcatcacggagcttgttttcacagacaacaaaattcacctcagttgggctttgcgtaaatatagagtagtgtgatggggcctgcaaattgggtgaaggtggttcacggggatgccaaagccctagtcctcttcggcctccctcacgcg

SEQ ID NO: 125714 - DNA, 43 bp, Homo sapiens; identical to SEQ ID NO: 52021
  chr15:52029518-52029561
  hyper

SEQ ID NO: 125715 - DNA, 30 bp, Homo sapiens; identical to SEQ ID NO: 52022
  chr15:52043659-52043689
  hyper

SEQ ID NO: 125716 - DNA, 30 bp, Homo sapiens; identical to SEQ ID NO: 52023
  chr15:52044299-52044329
  hyper

SEQ ID NO: 125717 - DNA, 194 bp, Homo sapiens
  chr15:52121765-52121959
  hyper
tcagcgttgagcctcgcccttcttgctagaactacaactcccaggatgccccgcggcacgggagtgcgcacgcgcgtcggaggcgaaggaggaacccaccgcacctacagggcggtcgagtgagggagctgctggcgggtgggtctggcaactctttgggaggccgacgcgggcggaccggcgggtgctgggaa

SEQ ID NO: 125718 - DNA, 89 bp, Homo sapiens
  chr15:52122374-52122463
  hyper
gcgtcgccgggacgcgatcacaccgagatggcaccgagcctccttcaaaggcttcggcttgttgaaagtggggcggcggagtgggggag

SEQ ID NO: 125719 - DNA, 30 bp, Homo sapiens; identical to SEQ ID NO: 52026
  chr15:52274418-52274448
  hyper

SEQ ID NO: 125720 - DNA, 181 bp, Homo sapiens; identical to SEQ ID NO: 10133
  chr15:52404391-52404572
  hyper

SEQ ID NO: 125721 - DNA, 829 bp, Homo sapiens
  chr15:52587420-52588249
  hyper
cgaggcgctccagtcccgggagatggggacgcacgcgcgacccctgggcactggggattctaggccccgaggccggagcggcggagggggcggcccctcccacagggtcttcccacccacagggcacccaggcgcagcggagccaggagggggcttacccgcgggcagggacggagcacgccggggccctggaggggcgacgctcgctcgtgtccccggtccccgtggcccctccgcggcgcctccgcggcccccagcgcgcgcccgcccgccctgccgtgtcaggtgcgcaggtgtggcaggtgtggcccgggcgccaggtcgagtcagcgttagcagggccggctcccccacagcgctcccaggagcccagcggaccctcctacctgcgtgtacagctcggccaccgccatgggcaggaggggccggggccaggccggggctgccgaacgtgcgaggctcgggggctgggcctgcgccgcagaggccgggcgcaggagagaccgccgcggaaatcaccgccgggccatcttgcccaaagttttccaacggcctcctgttcccgttcccgagttggcggcgaggggagggggcagcggcgggattggtccctccaagcttggcccggctagtcggcgctgccattggccggggccgggcggctgcacctggcgggagcgcgggtggagaaggttggggcccggggcgcgctgccaggcaggaacagatgcatccggaggctgcccggcccgagtgttagctcctcaaagagcagaggatacgaccatttaaatggaagacccaagggaatcaacgtactgaacacaaa

SEQ ID NO: 125722 - DNA, 606 bp, Homo sapiens
  chr15:52820414-52821020
  hyper
ggcagcatctttccccggggctcgccacccccagcgcagctaaactggggagctaaaggtgatacggccaccgtttgcaggattcaaaataacctcacagaaaggctagctggcggtagaagcggcactgcataccaacacaagacgttattttaagcgcgtgtccccacgagagaacccatccgatctactggagcaagcatctcccacccgccgggaattttccaaagccaagcaggaggggaggcacgcccgccctgctaaatccacatgggccccctttccactccgaagcccgctctgcccccagctcgagcagcgcggcaggggcctgggagacccccgaggcgggccaccttccgccgccttcaccatctcgcccgaaagaggaaggtgccgcagcgggcgaccggctggtagggccgagggttctgaggcgctgaaggggatggcgctggtggggctcgcctgggcccggcgctcccgccccctccccagcctgacagctggcggcgagggccgcacagccccagtcctcgacgccggccgcggggtgccttacctttgtgtagagctccgacgcagccatggcgggccccgcgcgcc

SEQ ID NO: 125723 - DNA, 280 bp, Homo sapiens
  chr15:52821286-52821566
  hyper
ccgcgatgctgcctccgctgccgccgccgccaccgccgccgccctgtgcattatgggagcgggaggaggctgcgctccagcgctgccaccgcggctgctctgggctctctcgggctcacgctgcctcccatcggctacgagcacagagcatcatcatcatcagcctgccagccggccccgccgccgcctcgcgccctgccgaggcccggaaacccgcccgggacgtgagccccgagggcgcggcacaccccgggcgcccccaccccgaagcgagcccggg

SEQ ID NO: 125724 - DNA, 30 bp, Homo sapiens
  chr15:52821839-52821869
  hyper
gtctgcagcaaagtcgtctcccgataccag

SEQ ID NO: 125725 - DNA, 30 bp, Homo sapiens
  chr15:52861431-52861461
  hyper
tttctaagtggaaccgcccctccccgccct

SEQ ID NO: 125726 - DNA, 31 bp, Homo sapiens; identical to SEQ ID NO: 10137
  chr15:52972047-52972078
  hyper

SEQ ID NO: 125727 - DNA, 298 bp, Homo sapiens
  chr15:53075361-53075659
  hyper
agggactgaattgaacgttttagcttaatgatccaacccctgtcacacccacagggacgcgaattccgattttataagcaggtgtgcacgtgcactcagatactcacacaaagccgcgtggagggacgaaaagatcaaccacccgatcgacgaggataggtttgatcttttcgattacctcagtgtgccagtgtatattcccggctgggcctagcgccctaagaaacttcggaactttagctgttaatttttgttttcttactatgacttcccaaagacattctatctgcctaccggg

SEQ ID NO: 125728 - DNA, 125 bp, Homo sapiens; identical to SEQ ID NO: 52033
  chr15:53075739-53075864
  hyper

SEQ ID NO: 125729 - DNA, 1015 bp, Homo sapiens; identical to SEQ ID NO: 52034
  chr15:53075985-53077000
  hyper

SEQ ID NO: 125730 - DNA, 163 bp, Homo sapiens
  chr15:53077065-53077228
  hyper
cgctcccagctggcggcgcccctcgccccgggctcagaggcggacacggtcggtcgcgccctgctggccctttgttcgcgccgcagcgggctgggagcagctgcgcgacaccagacccacagcgccaagacgcgaagcgcgaggaaaccgctgcgcttgactc

SEQ ID NO: 125731 - DNA, 627 bp, Homo sapiens
  chr15:53077593-53078220
  hyper
cggacgggaagggggcgccgccaactcccccgcggggtttggaggtttcctcgcctccaagtcccgcagggcagggtcggagtgcccaacacccacccccgcccgaacctcgggcctgcgcgccgccttcccctgggtccgcggtgctgcgcttgctgttgggtgtgtgtcgctgtctctttccgagccggcagctcctgctgtgtggccgaagccctctggaatctttaattggaaactaatcttggtcttgatagacgcccacgtcagaggcgcgccacccacccacaccccccgcctcatcccggaggagacgcggcgagaaccctgtcgctctgctctttaatggggcagcagcaagtagtacatggagggaacatatattgatttttaaaaggtagttaatttggtgggaatttcctcctgtcgcccttcttccaccagccgctgttatttcgtgaccggaaggcgcctccccaaacacagcgccacgtgcaagagggttttgaccctctgcaacaggctgccggcaactggaggacagaggggcgtggagaagccaccactctcccgctgcggagcgaaggaaccgagctcagtgagccctgacctcgcaaggtggttgga

SEQ ID NO: 125732 - DNA, 936 bp, Homo sapiens; identical to SEQ ID NO: 10142
  chr15:53078741-53079677
  hyper

SEQ ID NO: 125733 - DNA, 174 bp, Homo sapiens; identical to SEQ ID NO: 10143
  chr15:53079717-53079891
  hyper

SEQ ID NO: 125734 - DNA, 649 bp, Homo sapiens; identical to SEQ ID NO: 52039
  chr15:53079970-53080619
  hyper

SEQ ID NO: 125735 - DNA, 254 bp, Homo sapiens; identical to SEQ ID NO: 52040
  chr15:53080736-53080990
  hyper

SEQ ID NO: 125736 - DNA, 242 bp, Homo sapiens; identical to SEQ ID NO: 10147
  chr15:53081054-53081296
  hyper

SEQ ID NO: 125737 - DNA, 622 bp, Homo sapiens; identical to SEQ ID NO: 10148
  chr15:53081398-53082020
  hyper

SEQ ID NO: 125738 - DNA, 898 bp, Homo sapiens; identical to SEQ ID NO: 10149
  chr15:53082144-53083042
  hyper

SEQ ID NO: 125739 - DNA, 34 bp, Homo sapiens; identical to SEQ ID NO: 52044
  chr15:53083116-53083150
  hyper

SEQ ID NO: 125740 - DNA, 30 bp, Homo sapiens
  chr15:53083367-53083397
  hyper
gggtgctggtggggccgtggaggctcgggc

SEQ ID NO: 125741 - DNA, 206 bp, Homo sapiens; identical to SEQ ID NO: 52045
  chr15:53090065-53090271
  hyper

SEQ ID NO: 125742 - DNA, 109 bp, Homo sapiens; identical to SEQ ID NO: 52046
  chr15:53090305-53090414
  hyper

SEQ ID NO: 125743 - DNA, 147 bp, Homo sapiens
  chr15:53091057-53091204
  hyper
caggcccgagttcccatcccccactgctgggggtagagccgccaggtcccctccccctagctagggtcctgggcccttggaggcgaagctgagtgagggagaggggcgacccctggccgcagtgggatggggcgatgcaatgctagg

SEQ ID NO: 125744 - DNA, 30 bp, Homo sapiens
  chr15:53092218-53092248
  hyper
cttcaaagtccacaacgtgtttcagataag

SEQ ID NO: 125745 - DNA, 1273 bp, Homo sapiens
  chr15:53095559-53096832
  hyper
catttttaaaagataccaagacgtaaaagacgagaaaaacatcccgggtgctctgcataaaccacacgcaacgaaaaagctcaccgccagacagcttccagcactcgaaccaatacaagtaaagcacatttgcaaatgtgtttgactgtttttgtaggtttaagaagactacgtttttctgaccacttcaaaaaaacaaacacgaattcagccgctgctttaataacctctgaccagaggagctgattttgccaccgagttatcggtcagtgctgcgaggtcagtggcctgtgatcatgtttatagcaggtttggcttggatttggtgacacagccagcaaacctgggagattatgaaaccgtgaaccagcccagggaagtgtagtcaagtttcagtttgggcatttctccgggtgagggaatccggtgggctccatttctacaaggctcacaaacgcaggtgcagttcggccgccgcacgctgcctggcgggagaaacgcgcacaaaccgcagacgcgtgctcctgtagttgccactagctcggggcacgcccgtgttatttacaccctgctcgggggcccccctctcatttgttactttaaactcatggggaggaactgttagctgccgtggcgggactggcaggctgggaggggggcgcccccgctcggctcccgggccgtgacgcggccgctgccctccgcccctggcttccaccctgtttgcatggccacaagctcagcggtggaccagcgtggccaggcccccggagcccttgccccggcctaccgcccctacttcttccccctcaccaccccccccaaacgcttgtgagactggcttaccctggtgggcgagtcgcagcgcattagcggatttcatggcaagttgcttctgtgacatgagatcaggttcgcgttcgaggatttgccccctaggagggaaggaaaggagagtcaatctgcataatttcaaatgagaaataaatagggaaacagggaactgaatttcaagccccctaattcctccctccccccgaacctgtgagccaccccgcaccccccacaacacgccccgtgcacaggtaaaaaaaaaaaaaaaaagtaatcagcacacgtcgcaggtgataccttttattgtgctcattttaaagacaggaacaggatggcctcctgcccgaagactttctctgcagccaggcccggggcaggagggtcagctgggcagcatccgggcccgcggattcctgcaaggtcgcgaggtgagaggtgc

SEQ ID NO: 125746 - DNA, 499 bp, Homo sapiens
  chr15:53097069-53097568
  hyper
gcctcttccgggcgccgactggctctttttggtcaggccagcctcgcatttggggatgcaacttgcatttgaatagctgcctgggcttgttatggacccgggaaagctctgaaagggaatcactatgcaaattgtcccagttacaatcgaaaggttcgatctccaggagctgcctgacggaagttgatgtcagctatctatgcattagggttgcattaccgccttcgtcggcctcctcgccacccccgctcgcgcctgcaggggaggctttttttttttttgcttatgtttatattttccctcagtaattaaaaaaaaataaaaaaagaaaataaaaggctgaaggtggtggcatagctggctagggcctgggaggcccacgggctgagaggggaggaggtgcggaagggcggggttgggtggcggggggggtcgttcttttgcagcaggtgttgatggtgcgtttgaaatcaaacatttagatttttttttcgctttg

SEQ ID NO: 125747 - DNA, 129 bp, Homo sapiens
  chr15:53097777-53097906
  hyper
gggggccttttggggcgccttttaccccagagctcagaaagctccgggcagcggggtggtggcgggatggccagtagccagggcccacctggcggcccgccgggatgtggaggcccactgggttccggc

SEQ ID NO: 125748 - DNA, 207 bp, Homo sapiens
  chr15:53098381-53098588
  hyper
cgcccgccccttgctggcagagtccgggcaggactgccggggcctggggccgcagtccccgcgccgctggccgcccgcagcttctggcgcccccgaaaatgaccatctgtcattcaattaaggtttcagggcagctgatgggggagccagggtcagcgaccccaggacaaaacggcctgctgcctcggataggagaagttcaaatgt

SEQ ID NO: 125749 - DNA, 145 bp, Homo sapiens
  chr15:53489678-53489823
  hyper
ggctgctgagcacatcgagagcgccccctaggcgctggcacgtggctctgcaggaggaagccaccggtcgatcatccctgcgtttgtcaggcgcccaaacccacacacaaagccctggcacaggcggcgacgcggcctctctccg

SEQ ID NO: 125750 - DNA, 163 bp, Homo sapiens
  chr15:54051732-54051895
  hyper
ggcgggaaggcgtgcggctgcaccagccaggggcagacgaagaccaccagcctgggacccggcagcccgacctgcgctctgggggtgcctgccttacctgagccgtggggcggaggagcggcagaggccaggcaggctggcgggtctcgcccttagggtcacg

SEQ ID NO: 125751 - DNA, 420 bp, Homo sapiens
  chr15:54270542-54270962
  hyper
ccctctcggagctacgccgtgctacggcggcaggagagggagcccgggcgctctcggtggaggaggctggggatcgcagtgccggtgctgcattcagaaaagactcagccgcagccggcgatgtgtgaagttcccagcacgcactcagcccggctgctcctcaccctcaaatgttgatgagcctgggcgctcctcaacacacgggagagatcccattttgctttctgggagaaagagatgagaaatgagccgcggaaggtatttggcaatgagaagagtgaaaggcagtttcttgccagcagctaagttgtagaattgcttcggaggctacccgggagtgcgatagaattgacaagaaaagaacagacaccgttgcagaccaaggcatgcctgattgcacgagtcggatccctgggacgc

SEQ ID NO: 125752 - DNA, 487 bp, Homo sapiens
  chr15:55489069-55489556
  hyper
aacacttttcgatacgcatgttgaacccgcgtgtaaccccaccaaacaaacgccaagcttgagaggaagtgatgcaaccccgtcaccggaagttaccttcttcccccttccccgaccggaaaaaggcaagcgtccttcgttctcgcgggtctgttagaccagatgcgaacacgactgtgcctccggcggccgtgtggtcaaatgcgctgccgtttgacgcaggcgcagagctgcagactagacctgttcgctgttactttggggaaatgtggttctgcgccaccttgtgaacttgctctcacagcgcctagttttttctctctgtgtgtcggcatttatgcaagtattatgtatctttggtttgtgctttgcctcggagtgctctcgagagcactctcttaactcatttgtctactgcctgccctagaccagccctcgattctcgtcccacagtgatttgcagggtgtaagcggcgaagaccctgca

SEQ ID NO: 125753 - DNA, 30 bp, Homo sapiens; identical to SEQ ID NO: 52055
  chr15:55581405-55581435
  hyper

SEQ ID NO: 125754 - DNA, 30 bp, Homo sapiens
  chr15:55581961-55581991
  hyper
ccgcgtccacccgccgccggccttttttgg

SEQ ID NO: 125755 - DNA, 30 bp, Homo sapiens; identical to SEQ ID NO: 10156
  chr15:55582233-55582263
  hyper

SEQ ID NO: 125756 - DNA, 30 bp, Homo sapiens; identical to SEQ ID NO: 52057
  chr15:55582555-55582585
  hyper

SEQ ID NO: 125757 - DNA, 30 bp, Homo sapiens
  chr15:55611084-55611114
  hyper
acgtctacaattaccgttaccgtttttaat

SEQ ID NO: 125758 - DNA, 30 bp, Homo sapiens; identical to SEQ ID NO: 10157
  chr15:55611409-55611439
  hyper

SEQ ID NO: 125759 - DNA, 90 bp, Homo sapiens; identical to SEQ ID NO: 10158
  chr15:55699899-55699989
  hyper

SEQ ID NO: 125760 - DNA, 55 bp, Homo sapiens
  chr15:55700703-55700758
  hyper
catccgggagccggcgaccacttccagttgctatggttacgagttgcaacctcca

SEQ ID NO: 125761 - DNA, 30 bp, Homo sapiens
  chr15:55790738-55790768
  hyper
ccttacgatctgagcgaatgttcaaagaag

SEQ ID NO: 125762 - DNA, 961 bp, Homo sapiens; identical to SEQ ID NO: 10159
  chr15:55879821-55880782
  hyper

SEQ ID NO: 125763 - DNA, 220 bp, Homo sapiens; identical to SEQ ID NO: 52061
  chr15:55880890-55881110
  hyper

SEQ ID NO: 125764 - DNA, 323 bp, Homo sapiens
  chr15:56034399-56034722
  hyper
ttccggggcacaaatcggccacttcacttccaaccctgccaattccaccctcccatctcctcctggctggatccagatccggcaagctggtgccgattggggttatgagttcacctattccctctcgcagccctaaaaagtgggggaactcccacaacagacacgggaagccgcgaggaaccgcggcgccccctgcacggcgaggctgccactaaggaaacaatataaataaagccacgtgcagccgcggcggccccggcgggctggcgacccggagtccggccggtcgcggaggcgcggacgcggccggagccgggacaatg

SEQ ID NO: 125765 - DNA, 374 bp, Homo sapiens; identical to SEQ ID NO: 10162
  chr15:56034885-56035259
  hyper

SEQ ID NO: 125766 - DNA, 284 bp, Homo sapiens; identical to SEQ ID NO: 52064
  chr15:56035304-56035588
  hyper

SEQ ID NO: 125767 - DNA, 82 bp, Homo sapiens
  chr15:56035677-56035759
  hyper
cggctagttgaggattggggaaggggaggcggccggggagggctagtgttgagagacagggaaaggccggaggcttctccct

SEQ ID NO: 125768 - DNA, 505 bp, Homo sapiens
  chr15:56285863-56286368
  hyper
ggaggcgctccctcagcgacagcagcgcctcccgcggcgagcgggcactagcggcacccggcagcgcggcgggaaaaggccggcggcgcgcgctcctggggctgggcgggggcgcgcgtggcggggctcggggagtggggagggcgtgcggcggggctcgggtgggatgagcgcgcgcggcggggaccatggcgtggggagcgcgcgtggcggggcgcgccctcggtcccttcccgggaggtgggtggttgacgggcccgccggggagccagggagcgccgggaagcgccgggaagccaagctgcagtgttcctcagcaacaagtctcgctgagatccgacccagagttcggcctctgactagacgcctgggaatccgtgagcttaatccccgcttaaatcccaaacggaaaatcatagcgctttcttgtcggttaagggtgtcattcccataagaagctggacctggggaccgccagggaaagcctgagcgtggcagcaaatgg

SEQ ID NO: 125769 - DNA, 30 bp, Homo sapiens; identical to SEQ ID NO: 10164
  chr15:56535818-56535848
  hyper

SEQ ID NO: 125770 - DNA, 30 bp, Homo sapiens; identical to SEQ ID NO: 52067
  chr15:56538396-56538426
  hyper

SEQ ID NO: 125771 - DNA, 405 bp, Homo sapiens
  chr15:56657422-56657827
  hyper
tgcactaactaagtcgaatttgcagttaggaagccttcctgggttcctgggacagcgccgagtgctgcgagcaaaggccgagcccgctgccagaggctcgcgccgctcgcagcacagaacctgagagtgggaaggcgtaggcgcccgggcgggaggcaaccgggatgtggaaactctcgcgggaagatgcgtcgttgcctcggtaaccgcgtcgcagtcgccgaagatggcggggcgaagtctgtgtctcacggtcagttcaactccaggctcctggggagcgtctgggttccggcgactaggacgcctaacttcctttaacttcgggtctgaaagtctgtggctcttttacagagaagcagcgttccagggactccgttcccgccacccgttcagcaaccctct

SEQ ID NO: 125772 - DNA, 162 bp, Homo sapiens; identical to SEQ ID NO: 52070
  chr15:56757165-56757327
  hyper

SEQ ID NO: 125773 - DNA, 30 bp, Homo sapiens
  chr15:57024868-57024898
  hyper
gcgggttcaccttgacgtttttcctctcca

SEQ ID NO: 125774 - DNA, 30 bp, Homo sapiens
  chr15:57179379-57179409
  hyper
cgtccctggagcaccgcccgcggagccgat

SEQ ID NO: 125775 - DNA, 30 bp, Homo sapiens
  chr15:57179878-57179908
  hyper
tgtacaggccgcatcgggaagctgggtata

SEQ ID NO: 125776 - DNA, 341 bp, Homo sapiens
  chr15:57210211-57210552
  hyper
gtctggtttgaggtacgttttgccctttctcccgcattcggctctgcatcgaatctgaccggccgcgcctactctcggaacggccgaggaggatgggtctcccgtctccacacgcgcggtgtctgcgccgactgcagccctcctggacgggagcctctgggcccagcttagggtggcgtccagcgtgacctactcgggaatggcagccttcagtgtcctgcggcctcgggttccgggaagctcggggacctgggcagcggatccagatgcttccacagctgtgtctccgtcgctccgcttcgggggccgagaaccagcaagaccaacgcgaggaggcgcca

SEQ ID NO: 125777 - DNA, 30 bp, Homo sapiens
  chr15:57212115-57212145
  hyper
atccccagcaacaacgcatggccgctatag

SEQ ID NO: 125778 - DNA, 392 bp, Homo sapiens
  chr15:57598788-57599180
  hyper
cccttctgggaggacgcgcacagcccgaggaggcagagccccagacgggaatgggcttttcagaggtggggtgcgggcgaggggacgatgcattatttttaatatttgatttatttttccaactggacttcttcccggggctctttctgggcccagctgcctttgtgatcccgcgccccggtcctcggcctctcacctccagcgccggggcgccccctgctgtcggaagcggctgtgaccgggcagaggtgctatctgggactctgggttctcagcccggggacagcgaaccgaggggcagatgatccatcagaaaagagccggcactgcccagccccgcgcccctgcccctgcctttttccgggagcgcgccgcgccgcacccgctacggc

SEQ ID NO: 125779 - DNA, 788 bp, Homo sapiens
  chr15:57668406-57669194
  hyper
gagaagaaaaatgcccggtgacggcggaggggaggtggaaggacgaacggctccgggaaggggtgaggtctaagcgcagccccgggcccagcggagccgagggcgggtggtgcgggggttcctgggtaggttcgtcccgacgggccgcgggcggattgaagggagggttgggcccgccggcagccccggcgggtccaggcccccggccagcccctgcccctcctcccaggagggcgggcggcgactgcggggcggggcgcgggctcgctcggcctcccggcggcgccgcggcccttgcactccggccgggctctgctggctgcggcgggagctggacgcgggaggaggcggcggcggcggtgagtgagctccgggctggagcggggcggggtgtgcgccggcagccgggtttcggggtgctaggggccgcccagggcggcgggacccccaggggttcgggctcagccaggtgcactgtgctcagtccgcgcgtccactctcggtgacccgcgccgcgcgtgtcctggggctcgaagatgcgacccggactcccgcgccgcgccccgccgagggcaggcgcagaacagatgcgggcgatccctggggaacccgcttcggggcggggtgggagggaggaggccctgcagaacctccctttagtgaagagggactttctgccttcgcacccctgcctggaccctccggctctagtgacagctgggagagactcacacgaagcagtttctgacctatcctgtcgtacacaagtcctcggcgtgctcggccgg

SEQ ID NO: 125780 - DNA, 152 bp, Homo sapiens
  chr15:57883947-57884099
  hyper
tgaccctgggagggcgcagcgccctgggagaggatggtgctcaactttaaccgggtcggcgccctcgggagaaaatgcagcctgacgggtcgggtgagcgcgctcggccccgccccggcccggcccggccccgcccccggccccacccccgg

SEQ ID NO: 125781 - DNA, 33 bp, Homo sapiens
  chr15:57998719-57998752
  hyper
ctttttgtataaaccgacgaacagctgatgacc

SEQ ID NO: 125782 - DNA, 14 bp, Homo sapiens
  chr15:58357205-58357219
  hyper
tgaaatttgtcaaa

SEQ ID NO: 125783 - DNA, 20 bp, Homo sapiens
  chr15:58357799-58357819
  hyper
cggggtcggccttcacctcg

SEQ ID NO: 125784 - DNA, 287 bp, Homo sapiens; identical to SEQ ID NO: 52077
  chr15:58358503-58358790
  hyper

SEQ ID NO: 125785 - DNA, 30 bp, Homo sapiens
  chr15:59040854-59040884
  hyper
ggtcacccagggaccgaacttctactctaa

SEQ ID NO: 125786 - DNA, 30 bp, Homo sapiens; identical to SEQ ID NO: 52078
  chr15:59041160-59041190
  hyper

SEQ ID NO: 125787 - DNA, 30 bp, Homo sapiens; identical to SEQ ID NO: 52079
  chr15:59041674-59041704
  hyper

SEQ ID NO: 125788 - DNA, 30 bp, Homo sapiens; identical to SEQ ID NO: 10170
  chr15:59042267-59042297
  hyper

SEQ ID NO: 125789 - DNA, 166 bp, Homo sapiens
  chr15:59062962-59063128
  hyper
taaaatctgcatctcgtaagaaatgccttaattttccatattaggagctgagaaaccaagtcccctgagcccttcagggacaagttcttttccaaatactacaaccacctccaaccacccaacaatgcctcaggccgagggtgggccacacgcgacccagcgctaa

SEQ ID NO: 125790 - DNA, 30 bp, Homo sapiens; identical to SEQ ID NO: 52082
  chr15:59063423-59063453
  hyper

SEQ ID NO: 125791 - DNA, 30 bp, Homo sapiens
  chr15:59063870-59063900
  hyper
gagagtcctgctgccgccgaggcgcctctg

SEQ ID NO: 125792 - DNA, 30 bp, Homo sapiens
  chr15:59225439-59225469
  hyper
gtccccgtcctccacgctcgcgggagccgc

SEQ ID NO: 125793 - DNA, 256 bp, Homo sapiens
  chr15:59225883-59226139
  hyper
gctggcccctcccccggtccgccaccctagcgcaacctgcagcagcagccgccagcacccggatgacggccgcgcgtgcgcgttggcgcagggaccggcagcggcgcgctcggtcgagcgggccgcggccacttgggcggtgcgctcccttgtgtggactgggaggtcgggcacgtcctaccgcagcaacgtccgccgcgccgccgttctctcgtcgcttcgttagccattttcttgcaacgtcttgagtcttgag

SEQ ID NO: 125794 - DNA, 30 bp, Homo sapiens; identical to SEQ ID NO: 52084
  chr15:59226394-59226424
  hyper

SEQ ID NO: 125795 - DNA, 40 bp, Homo sapiens; identical to SEQ ID NO: 10172
  chr15:59396924-59396964
  hyper

SEQ ID NO: 125796 - DNA, 454 bp, Homo sapiens; identical to SEQ ID NO: 10173
  chr15:59397169-59397623
  hyper

SEQ ID NO: 125797 - DNA, 133 bp, Homo sapiens
  chr15:59663972-59664105
  hyper
tggcgtccggggcgcggagaccctcggggccggcgcccggcacaggtccggggcggcgtggttgccgcccgcgcccgagtctccctggctcttgacagcccgccggccgccaggtgctcgccctacctggcgc

SEQ ID NO: 125798 - DNA, 513 bp, Homo sapiens
  chr15:59664434-59664947
  hyper
ggcagccatagcaacccggccacagaaagtttcgcgacgcagaaaccgacttggaataaagttttccttggcccctcgctcgctctcccccggcccgggtttacggaaagcggcaggaaatcagagctcgcgacgtgccggctcccgcgtccaccttctccacccctggccccggcagcgcgcccaaggtgggtgcaccacgccggggtttcctgccccgtccccgggtccggcgtcctaggacgcggcgcggccaactcaccatggtgactcgcgccgcggtcgcgtcttcgccgggtcccgctgccggggaactggggctggaacgcagtcttctgggcgaacttcaaaagttggttcccctcgccaaaaacaggctcccgacacccaagcactcacaggagccaatgggaacccagaggggactccatccaggcgggattggcggtgctaggtgagggcgagacggcggcgacttagcaggcggggcgcatgctgcggagggcaagagtc

SEQ ID NO: 125799 - DNA, 84 bp, Homo sapiens
  chr15:59665216-59665300
  hyper
tgtagtcctcctcccgcgccagccaccgaagaacgctgcggacccagctcgctcctggtagcaagacccgaactgtaaggaaca

SEQ ID NO: 125800 - DNA, 383 bp, Homo sapiens
  chr15:59729538-59729921
  hyper
gatgaggcaaaggtcgtgtcccccgcaactccgctgaaatcctgcccaccgagaggaagcacaattatgagtgaatgggcttgtgcgtcctgatgagaatccaaaatcgagaggaaggtggaaagagccaggacgcgctgggaggggatgaagctgacgggagaagaaagggctgggaagaggaggggtgttcggggttcttcttctcgtcgtgtctgctgcgatgagacacgatcctgggtcccaactgcaggtgtcaaggcgattcagtaaatgacacatggcagccccggagggttcgttcacctgcacaggtggggcgtcaccgtggcctaatcaaataacttctccccaatttgaggtggggcgggggagagaactat

SEQ ID NO: 125801 - DNA, 30 bp, Homo sapiens; identical to SEQ ID NO: 10177
  chr15:59915561-59915591
  hyper

SEQ ID NO: 125802 - DNA, 30 bp, Homo sapiens
  chr15:59949321-59949351
  hyper
cctggctgaaaatacggtggtgggctgaag

SEQ ID NO: 125803 - DNA, 203 bp, Homo sapiens
  chr15:60286351-60286554
  hyper
ccccggggcatttcccgggtccctaggcaaatcgctcctcgcccagtggtcctcactcctgggagccagtgacactttcttatttatttatttgcgccctgaaggacgactcggatttccaggccagccggaagaggcagaaagcgaacaggctgctcagaggtagtggcccttccttccaggcgtcgcgctgatccccaact

SEQ ID NO: 125804 - DNA, 572 bp, Homo sapiens
  chr15:60287013-60287585
  hyper
attccagatccagcacggggaaagatgagacatttgccttcgagctcgctaagaaagtggcacctggttggtggaggggagagataccaaatgtcggcgcccagcctgaaataagtggcatgggacgcgcagggagggcgttcagcttcagaaagcagcggctacgctgggtccaaacccggcggctcgggaggccatagctcctaggtgcgtccgagctcctgctaccctgcgcggtgttgtcctaccggaggaagtggctgatgggcagtctaggatcccggcccctgacccagggccctctcctccctgcggtcctggtccgggtcatggtcccggggctggtctgaagtgctgtctacagagggcacttggggaaacatcgtaggtccggaaattcccagggaaagtttttgcaggagttgtggacgccgcagcagccccaactctcccaacccagcttgcgacccgagagaagtcgctcacacttctctttgggggagggcgacagttccggggaggacgcttggatcccgaaaatgacgggatccaggtcccacaaccctcaggaa

SEQ ID NO: 125805 - DNA, 97 bp, Homo sapiens; identical to SEQ ID NO: 52093
  chr15:60287643-60287740
  hyper

SEQ ID NO: 125806 - DNA, 86 bp, Homo sapiens; identical to SEQ ID NO: 52094
  chr15:60288333-60288419
  hyper

SEQ ID NO: 125807 - DNA, 145 bp, Homo sapiens; identical to SEQ ID NO: 52095
  chr15:60288753-60288898
  hyper

SEQ ID NO: 125808 - DNA, 438 bp, Homo sapiens; identical to SEQ ID NO: 52096
  chr15:60289224-60289662
  hyper

SEQ ID NO: 125809 - DNA, 622 bp, Homo sapiens
  chr15:60291858-60292480
  hyper
gtggcaccacagtgcaggggtcgctggcgggggtagggggtgtgggtgggtacggagtcctttcactgcccgtcggcagttggcaccagagcggaaagtgtgtcccctcccccgcctctctcccttgggcagtttgatttcccgccagactcagtcggagtggcctggaagagcgggctcaaactccaaaggcagtcgtgggagagtcgtagcggatacgtttcccctgacatgcgccgggtgctcgtctctgccccccacccgcccccaaaacccaaacctgcaagtcgatgttgtccggtgaccccgggaaaggagaactttctgagctagttccctctggtcccgaaatccagcacgttaaagccaggccttgcggtgctggggggctggtgggggaggcgcacagactccgaggacaaacagcccccaggacactcgggatggccatttttttaattgaccactgacaggctgagggagtttgttttagtgctgaataccccaggaacgaaatccttttgaaagggaggctaagtcgtttcacgccaccaaagtgcagatttgaagaatgactgatgggacaaagaggcgcgatgcgttagcgcgggttcccagagcg

SEQ ID NO: 125810 - DNA, 638 bp, Homo sapiens; identical to SEQ ID NO: 52098
  chr15:60295979-60296617
  hyper

SEQ ID NO: 125811 - DNA, 63 bp, Homo sapiens; identical to SEQ ID NO: 10183
  chr15:60296860-60296923
  hyper

SEQ ID NO: 125812 - DNA, 675 bp, Homo sapiens; identical to SEQ ID NO: 10184
  chr15:60297151-60297826
  hyper

SEQ ID NO: 125813 - DNA, 593 bp, Homo sapiens; identical to SEQ ID NO: 52101
  chr15:60297941-60298534
  hyper

SEQ ID NO: 125814 - DNA, 79 bp, Homo sapiens
  chr15:60690264-60690343
  hyper
gcctcccccttacacggcccgctcccaccccaagtcaggggtgactcaccccggcccgccggcccgcagggaccgcgcc

SEQ ID NO: 125815 - DNA, 220 bp, Homo sapiens
  chr15:60771300-60771520
  hyper
ttaaaggatgtggccgcgccgactcggccctgcgtgatgacgtctcagcgacatagtgggcggggccttgcgtcttgacggctgctcccctcctttcctcccgccacaagcgctcgctgtggttctggcagcgaagtgcgagactgggctcgccaggcggaagtggttggagactgcgtgttttcctagaaagtcctcgaccttcgtcggggagaggagg

SEQ ID NO: 125816 - DNA, 151 bp, Homo sapiens
  chr15:60883425-60883576
  hyper
tggcggccgggcctgcgaagcagctcgggcagattatccacggcgaggaacctgcgggcgcacaagcgggcggcgggcggcgggcggcgtgctgcgggctgagtttctccggagctgtttgcaaccgtcccaagagcgagtctcggtttct

SEQ ID NO: 125817 - DNA, 1569 bp, Homo sapiens
  chr15:60883784-60885353
  hyper
cgactaacccgcgcccgtcggccctcaccacggtctaacctccgcccctgcccgcggatcccgtgggctgccgagttcctccccacctccatccaccagccaaagtgtcaagcggggtgcgccgcggctccctgggccgcccagagcgtcttggcacgctcgaggcgcccgtctcgctccggcccgcgcgctttcggaagtggccgcggcgggacacagcgcgggacacagcgcggacctgcggcacttgcccggccggcggccgctgaggcgctcggggacgcaggggcagggcgcaaggcctggggcgctgaccagtccccggggatgacatcgcgacaacgcgcacgcacggccctgcccggccgcggcgcctccccgacctaggccggagctgtcccgggtgcgggccctggggaccggccgcgggcgtccccggcttcctctgaactccgcagaccctccccttcctttccgaagcgcggcgactcccggcaaactttcttttgggagacccgcccggtgccaagcggacccaagagactgacaggagccggagggggcagcagagggggatccaccccgtgcgcctttgccccccaatcggaggcaggccgatcccgtggccgggctcaggtggcgccgcggcggtggcccagaaggccctggcagggcccccgcgccgagccccgggcagtacgtgcgttcgggcaggcgcgcccacccctccccctgcgcgccctcctccccgccccccggagccgccagcccacccggccccggcggggcgcccgggctcacctttcatcgctgcgatcacaaaatacatcatttaagccgcggtgcggagagcgcagggagagcggatggtccgaccccggagccccctctgccgccgccgcgccgccgccgcccgagccacagcagcagctgccgcagctgcccgcccgccgagagccatcccgagccataagaggctccatgtgaccggctgacatcacggccgccgctctgtttacaccgcgcccctccgcttcctcccggggcgggaggcgggaggcgggaggcgggaggcaggcgcgccccagcgccgcgccccgccccgcccccgcgggcaggtgagtagcagcggcggctctgctggcccaccccggccgggcctgccctcccgcgccccgggccctcgcccgggcgcccgccttcccctcgccttcgggatcacctgtggccgccggtcgcttttctgcacgcagcgccccgcggaacgcgcctctgaccactttctgcccccactcggtggggcaagaggctcgcaacccgacgccactctcccgctggcttgccggagcactcgggggcgataaatgcgccagctcgttggtggaaaagacaggtttggtctggggagctacggtcacccgcatttcctagagtgccccagctctaatcggaaggtacggcccacttctgggccgtggagaacgaagccactgggaccgtccggggagtggagtaagctcctccgaagtctttctggagagactcggcctgggcgggggaactccgccc

SEQ ID NO: 125818 - DNA, 573 bp, Homo sapiens; identical to SEQ ID NO: 52105
  chr15:61519471-61520044
  hyper

SEQ ID NO: 125819 - DNA, 199 bp, Homo sapiens; identical to SEQ ID NO: 52106
  chr15:61520355-61520554
  hyper

SEQ ID NO: 125820 - DNA, 717 bp, Homo sapiens; identical to SEQ ID NO: 52107
  chr15:61520576-61521293
  hyper

SEQ ID NO: 125821 - DNA, 309 bp, Homo sapiens; identical to SEQ ID NO: 52108
  chr15:61521311-61521620
  hyper

SEQ ID NO: 125822 - DNA, 282 bp, Homo sapiens; identical to SEQ ID NO: 52109
  chr15:61521656-61521938
  hyper

SEQ ID NO: 125823 - DNA, 30 bp, Homo sapiens
  chr15:62352159-62352189
  hyper
caccctgagtgcagcgagaggaccacagaa

SEQ ID NO: 125824 - DNA, 515 bp, Homo sapiens; identical to SEQ ID NO: 52110
  chr15:62358991-62359506
  hyper

SEQ ID NO: 125825 - DNA, 360 bp, Homo sapiens; identical to SEQ ID NO: 52111
  chr15:62359733-62360093
  hyper

SEQ ID NO: 125826 - DNA, 827 bp, Homo sapiens
  chr15:62456138-62456965
  hyper
ggccccgatcccggccgcgaccctcatcccgggccttgacgcgaacggccaggcggcgcacctcgtcttccgagaggccgtcgaagcaaaagtcctggtcaaaggaggccttgcggctgcgccccaccacagcgctgcattgccaacgcgcagtgcccggcggccgcaggacgaggctgaggcggcagcggacggcgcggggcccgggggcgcctccgaacaggctctccgcgcggagcagccggaggcggagacgccgggttcccggacagtactcagcagccaggcgcagggcgtcgccggcgcggcccagagccacggtgcccttggcctccaggcgctcaggaagcggggccctggatgacagcgggctcgaggagggggcccgggccggggactcggatcccgcgcggcgctcctcgtcctcgttcccgctggagacggagcggacgcgggccaggcggcgactccttccagcccgcagcgcgcgactcagcagcccgtcggggacgcgcaggaggcggcagcggcggggccccgcagcgagcgcgtcctggggcaggcggggaccgccgggggccgcgggggtggccgggcccggacctcgcgggccgcacagggtccccaggggggcgtccgggcctccgccgccgccgcagctgtgggcccggggccggggcgcgggcgggcccccgagcaggagcgactccttgcggcgcgtgtgcgggctctcgagcagcgcgcagaagccgtaggtggtgcgcacacggggcaggtgcggcagtgacagcgctgcctgcgagcgcgggtcccagtccgtgcggccg

SEQ ID NO: 125827 - DNA, 559 bp, Homo sapiens
  chr15:62457008-62457567
  hyper
cgcagcgccggggcacggcggcggcccggattggagactcgagcgtgcaaggggccggcagccgcggcgggatgcagaattcggggatgcgattcggcgtgagcactttggcgaaggcgggcttcggcgcggagctgcctgcggccgaggaacagagtttctcgaggagccgcatccttggaggctggggctaggagtggcgggaagaggtgcgcctgcgggggagagaagctgctgagtttgggcgcctggagctgctgcagcccctcgacgcggctggatccctcccccagaccctgtaaacgtcccccacgtgtttaagaccccagaccagttccagccttcctctcccctgcacccacaacaaatcagccccgcttcagacctttctctcttcttcagtgtctctggatctggttgcaagctcagtgccagtggcctctagcccgctgccgaggcgccaccttcagtactgcggccaggagagtggcgctcccctcttataccgtaggctgagtcccgcccagccgccagcggcccaacccggaggtgctgcaca

SEQ ID NO: 125828 - DNA, 30 bp, Homo sapiens
  chr15:62682837-62682867
  hyper
cactcccgggcaggcgctctgcaatgagac

SEQ ID NO: 125829 - DNA, 209 bp, Homo sapiens
  chr15:62683363-62683572
  hyper
cgccgggactccagcgccactttgcaaacaagtctcccgccgaggctctgggctaagacagcccgccagtgcggagttccttctccggtgccggacactcagacctgccgatcccacgactgccctttacttggcaatctcgccacgggcgaactgctggccgctgagcgacgggggcagtgccgggccgagagcggggccaggctttg

SEQ ID NO: 125830 - DNA, 56 bp, Homo sapiens; identical to SEQ ID NO: 52115
  chr15:62684294-62684350
  hyper

SEQ ID NO: 125831 - DNA, 212 bp, Homo sapiens; identical to SEQ ID NO: 52116
  chr15:63130455-63130667
  hyper

SEQ ID NO: 125832 - DNA, 642 bp, Homo sapiens
  chr15:63334347-63334989
  hyper
tccagagcgtgagcgcgcaggatgacacctggctggctgagagctgccggggaggcgctggcgggtgccgagagcgcactgaccctgacgcggggtgcagcacggctgggaagcccccgggcctttggctaagcgcgccgggggacggcacaggggggcgacgcgcatccaccacctggtccgcgctctcccggcctccggcagctcagggcgggctcggttggggaccctaatggctgggtgccggccctgggagaagggcacgcggagggcggagggttgcgcctcggccccggctcggccccaacgccctctccctggcgcgcaggtttagaaacagggcggcctctccggccgccgcctcggcggctcgggtccccatatatagtcatatccaccgtcaactgggaggccggcggccggcagcgaatgggcgagcggcccccgcgggaggagcggggagggggcacggggcggagggaggagaggaggaaggggggcaggagaaaaaagcttttccaaaaaagtattggctgtcttgaggaatgcggtcgcccccttgggaaagtacatatctgggagaagcaggcggctccgcgctcgcactcccgctcctccgcccgaccgcgcgctcgccccgcc

SEQ ID NO: 125833 - DNA, 30 bp, Homo sapiens; identical to SEQ ID NO: 10199
  chr15:63335994-63336024
  hyper

SEQ ID NO: 125834 - DNA, 30 bp, Homo sapiens
  chr15:63340316-63340346
  hyper
gcggagcgctcccgcggccagcaggagtcg

SEQ ID NO: 125835 - DNA, 30 bp, Homo sapiens
  chr15:63340566-63340596
  hyper
cgcgcgcccgcctgcggtttgtctgcgcag

SEQ ID NO: 125836 - DNA, 31 bp, Homo sapiens; identical to SEQ ID NO: 10200
  chr15:63341572-63341603
  hyper

SEQ ID NO: 125837 - DNA, 30 bp, Homo sapiens
  chr15:63414052-63414082
  hyper
cggctgtgcagagacgccatgtaccggctc

SEQ ID NO: 125838 - DNA, 30 bp, Homo sapiens
  chr15:63414474-63414504
  hyper
gtcggcggtgctgtcgggggctgagtggac

SEQ ID NO: 125839 - DNA, 203 bp, Homo sapiens
  chr15:63448917-63449120
  hyper
cctagaaaagggctttcgcacgatcaggaaacatatggtaaggcaaactttgtccttctttactcaactgcgtaatgaactgtcttcgatgaaaactgcgcgaagtcgaggtgctaagcaaagaaagtgaccccgactgtggactcgcttagagtagaaactgctgaagtagaccagacaacgtcagcgcctgggtgattttt

SEQ ID NO: 125840 - DNA, 30 bp, Homo sapiens
  chr15:63449325-63449355
  hyper
tcaaagaccaagaccgctcataagctacac

SEQ ID NO: 125841 - DNA, 30 bp, Homo sapiens; identical to SEQ ID NO: 10202
  chr15:63449567-63449597
  hyper

SEQ ID NO: 125842 - DNA, 38 bp, Homo sapiens
  chr15:63449920-63449958
  hyper
ggcttaggccatggcgagggagcgcccgcggccaccgg

SEQ ID NO: 125843 - DNA, 30 bp, Homo sapiens
  chr15:63481400-63481430
  hyper
ctggatttggaaggcgtctgcacacaaaga

SEQ ID NO: 125844 - DNA, 30 bp, Homo sapiens
  chr15:63570084-63570114
  hyper
ccccaaaggcgcctcgccctcttaggaaga

SEQ ID NO: 125845 - DNA, 133 bp, Homo sapiens; identical to SEQ ID NO: 52123
  chr15:63674097-63674230
  hyper

SEQ ID NO: 125846 - DNA, 94 bp, Homo sapiens
  chr15:63779679-63779773
  hyper
gtgtcccctagggggcgagctggggagagaccggagtccctgggagagctctgcgcggaaggcccgagagaattggtcccgcagagcttttaca

SEQ ID NO: 125847 - DNA, 858 bp, Homo sapiens; identical to SEQ ID NO: 10203
  chr15:63795379-63796237
  hyper

SEQ ID NO: 125848 - DNA, 30 bp, Homo sapiens; identical to SEQ ID NO: 52125
  chr15:63892795-63892825
  hyper

SEQ ID NO: 125849 - DNA, 30 bp, Homo sapiens
  chr15:63893397-63893427
  hyper
atacataggataaacgcaagattaaatgga

SEQ ID NO: 125850 - DNA, 30 bp, Homo sapiens; identical to SEQ ID NO: 10204
  chr15:63902646-63902676
  hyper

SEQ ID NO: 125851 - DNA, 30 bp, Homo sapiens; identical to SEQ ID NO: 52127
  chr15:64126195-64126225
  hyper

SEQ ID NO: 125852 - DNA, 99 bp, Homo sapiens
  chr15:64126645-64126744
  hyper
cggccccggccctccggccggctaagttcaatcacataaaagcgtttcacttgacctactcttccaccttgttcatgtctttgcgccttatgggactgc

SEQ ID NO: 125853 - DNA, 30 bp, Homo sapiens
  chr15:64338779-64338809
  hyper
ggacagtcccggggcgagagcccagcttcc

SEQ ID NO: 125854 - DNA, 30 bp, Homo sapiens
  chr15:64385861-64385891
  hyper
tctcttccatgatccggggctgccgggcag

SEQ ID NO: 125855 - DNA, 30 bp, Homo sapiens
  chr15:64388612-64388642
  hyper
agaaccgccgacgccgtcctttgaccctgc

SEQ ID NO: 125856 - DNA, 135 bp, Homo sapiens
  chr15:64443635-64443770
  hyper
ccgtccttggtaggcgcttaactcaggttgggtgacattttcgctcgccagttcctggcatcagtgagtgctccgtcaatgtttgacaaacggttgactccactgccccgcgctgtgggcgcactagacttcggg

SEQ ID NO: 125857 - DNA, 217 bp, Homo sapiens
  chr15:64454727-64454944
  hyper
aaggagagaaaggattcggaatccggcaggcgtgatctttcaccatctccccagcactgaggggtgtttgcaaaaagcctgctctgagactgccagtgtcggccccagatgggtatccggggatccaactaactccctgggtcagggcaggggctgggggtgtcggggtgggtccgggtcgttccctggactgaatgggcaggacggcccagacgcc

SEQ ID NO: 125858 - DNA, 337 bp, Homo sapiens
  chr15:64455662-64455999
  hyper
aaattggctctaaacgttgtggcttccaaacacttcagggacatttatccttaccgagcgtggccttgtacggctcctccacttgtcttgcaaaacttgctgcacaacccacttccttttttactgaggccgtcaagttactacccatttttctctcccttctgtaatcttgctgtgcttactgttgtgtatatcaatggacatcttattgtatacgctgttcttaacttcctttaccttttcccccaatagactacatttttttttttttctgcggaagggactgtgttgcatttactctgtccacagctccctcacagcgcggcagtactgagtg

SEQ ID NO: 125859 - DNA, 415 bp, Homo sapiens
  chr15:64648209-64648624
  hyper
gcaaatgaggcgggcgcggtcccctccccgaggcgccaagtgcttctctacccacccgcagcggtggtttctctctttcccaggagcgggagggaggggagaaggcggacgggagggggaaggcgaggagccgaggggcggctggagccgaaccggaaccactagcgcggccccgccctcgtcccggagtcgcagagtaccctggcgggcctaataggacaaactttgggcaggcagcgttaaactgacaccatcacttccgggttatccccacggctgccccctccttagcaaccgcgtggggttgctaagcggaagtgccttcaaagcaacccacccccatttcttctgggactaccagaagatatatcgggagcactgagctctgctttggcaacacgctcttaccttctgc

SEQ ID NO: 125860 - DNA, 30 bp, Homo sapiens
  chr15:64679810-64679840
  hyper
agtcctacgtttagcgattggcaagaatca

SEQ ID NO: 125861 - DNA, 84 bp, Homo sapiens
  chr15:64752566-64752650
  hyper
tctaaccggcacgccgggttttccagcattccctgagctaagactccctaatctgggctccgggtgagcgcgcattccgagacc

SEQ ID NO: 125862 - DNA, 30 bp, Homo sapiens
  chr15:64995626-64995656
  hyper
ggccatgaccaaggcggtgggtctgcccgc

SEQ ID NO: 125863 - DNA, 57 bp, Homo sapiens; identical to SEQ ID NO: 10205
  chr15:65067771-65067828
  hyper

SEQ ID NO: 125864 - DNA, 30 bp, Homo sapiens; identical to SEQ ID NO: 10206
  chr15:65068311-65068341
  hyper

SEQ ID NO: 125865 - DNA, 257 bp, Homo sapiens
  chr15:65117947-65118204
  hyper
cgtgtctttctttgcgtctctactccaggagcttgggctgtaccaattgcctgctagaggaaggaggtttatggtggtggctgagcataccaaatccagtggacggctgggcgtggtgggaggaggccgccgctgcggcagccacccggcggcgcgtggtgtcgggtctgaaaaccctacgcgactccgaagatttattttcagaaccatccttccagcacactccctctcccctctagcccgcacacagaggctgg

SEQ ID NO: 125866 - DNA, 30 bp, Homo sapiens; identical to SEQ ID NO: 52136
  chr15:65128169-65128199
  hyper

SEQ ID NO: 125867 - DNA, 30 bp, Homo sapiens
  chr15:65133554-65133584
  hyper
ccaagctccaggcccggccccgcccagagg

SEQ ID NO: 125868 - DNA, 30 bp, Homo sapiens; identical to SEQ ID NO: 52137
  chr15:65185956-65185986
  hyper

SEQ ID NO: 125869 - DNA, 221 bp, Homo sapiens; identical to SEQ ID NO: 52138
  chr15:65186315-65186536
  hyper

SEQ ID NO: 125870 - DNA, 508 bp, Homo sapiens; identical to SEQ ID NO: 52139
  chr15:65203767-65204275
  hyper

SEQ ID NO: 125871 - DNA, 80 bp, Homo sapiens; identical to SEQ ID NO: 52140
  chr15:65281789-65281869
  hyper

SEQ ID NO: 125872 - DNA, 44 bp, Homo sapiens
  chr15:65282475-65282519
  hyper
ttcttctttcagttcgcgttttctctgtcgtgtacagctttgga

SEQ ID NO: 125873 - DNA, 111 bp, Homo sapiens; identical to SEQ ID NO: 52142
  chr15:65321807-65321918
  hyper

SEQ ID NO: 125874 - DNA, 101 bp, Homo sapiens
  chr15:65360172-65360273
  hyper
tggcgacgccctggacggccacgcaggtctgcggccggtgggccccgcgcagtgcgcccgcccgtcggggcccaggggagcgggatgcaggcttccctgga

SEQ ID NO: 125875 - DNA, 14 bp, Homo sapiens
  chr15:65360278-65360292
  hyper
cggccccggacccg

SEQ ID NO: 125876 - DNA, 62 bp, Homo sapiens
  chr15:65360323-65360385
  hyper
cgggctgccaccccgcggggaggaggggccggtggagcctggcgggcggggccaccccaagc

SEQ ID NO: 125877 - DNA, 30 bp, Homo sapiens; identical to SEQ ID NO: 52144
  chr15:65425405-65425435
  hyper

SEQ ID NO: 125878 - DNA, 39 bp, Homo sapiens
  chr15:65426170-65426209
  hyper
tgagaaccttccgacggaagtgacgtcgttacgacgcgc

SEQ ID NO: 125879 - DNA, 30 bp, Homo sapiens; identical to SEQ ID NO: 52145
  chr15:65476693-65476723
  hyper

SEQ ID NO: 125880 - DNA, 30 bp, Homo sapiens
  chr15:65477130-65477160
  hyper
ttctacaaagtggccgcattccggccccaa

SEQ ID NO: 125881 - DNA, 39 bp, Homo sapiens
  chr15:65477568-65477607
  hyper
cgctgactcggttccgaaccctttcgcgggccctagacc

SEQ ID NO: 125882 - DNA, 189 bp, Homo sapiens
  chr15:65578945-65579134
  hyper
gccggggtctgggccgcggctcgccgccgaagagagagaccgaggcctggaccgcgggtcggcggggaggttgggcccagggataaaggaactggggctggtgggggggaggggttcccggcctaggggaagggctatgacaatggaatgacaaccgcgggaacgtgctgacacgtgtcctccgcggag

SEQ ID NO: 125883 - DNA, 30 bp, Homo sapiens
  chr15:65579542-65579572
  hyper
gcaccctctcgacccgcccctgtacttgtc

SEQ ID NO: 125884 - DNA, 30 bp, Homo sapiens
  chr15:65588119-65588149
  hyper
ttgccccaagagcaccgtgtgactgctaag

SEQ ID NO: 125885 - DNA, 30 bp, Homo sapiens
  chr15:65596408-65596438
  hyper
attcagtatatccccggagtgcacggttaa

SEQ ID NO: 125886 - DNA, 325 bp, Homo sapiens
  chr15:65647774-65648099
  hyper
cagccaccggagccccggtccaagcggccccaggctccccggcccagggcgcggcaggggcggcgggcgagggcgcgagcccggaggacgcggcgggccccttcccggcggccgggcccgaggcgggggccggttcccacagccgaccgggccgcgcgccgcctttgaagtggccgcagctgcgccccggcccgcggctaatccccgccgacgcgggcgtcccgcccccccgcccctcccgcatagcaatagtgtccgcgctgaatggcgctggctaattacctcgctcgcaccaccgcgggtgaatgagagaatccggcattgt

SEQ ID NO: 125887 - DNA, 256 bp, Homo sapiens
  chr15:65648136-65648392
  hyper
cgcacgccaaacgagggtttgatgtcgctggggcgagcgaggcaccatttcccgccaccccctcccccagagcctcggattccccagctgggcccggccccggcgcactcgcggcggcggagggaaactgaggaagcggtgcctgtctccccgaggaaataggcccttcaccttccgtggaagctgggcggacacgcgcggcccccggactcgccctcgtccctccctccgggcccctccccgagccttctccacc

SEQ ID NO: 125888 - DNA, 45 bp, Homo sapiens
  chr15:65669008-65669053
  hyper
tattcaaacccctgcgcatcctccccatgtcgtgagttcacccgt

SEQ ID NO: 125889 - DNA, 1409 bp, Homo sapiens
  chr15:65669255-65670664
  hyper
cagagtggtggtgaccgagctccaggcagcagagccgagctccaggcagcagaaccggcggaccgcgagagccagggcaaggtctccgcgtgtgcacacttcggggaagggcaggggcacgtgagcatccccgcggctcgctcgctctcgctttcggtggcttctcctctccttcttggctcacgggctctgtcccgggtcgctccctagccacgcgccgccctccaggaatctccctcgtcttctcctgtctctcccgcgcactcctcagcccagtaccagctccaaatgcaggtcgtgccatctccgcccagtgcagccgtcagagtcccggtctccgctccccaggctgctgtcccctgtcttggctgcctcgggctatgtccacggccgggcacccagcaccccagctcgtccgcctcggtcagcgcttagccttgcggtctcccctggctcgtttccctcggtctccacgccagcccgccccgcttgctcccgcttcgctgcactccttgctcctcagtctgggctccgggtcctgccccagtcttcctccggggggttccgtcctcaacacgcccctagggcccccagcagtccggccttggtaccctctccccgtccggatccgcagggtcccccccgcgcggggtccgccctcaggtccgcgccgctctccccgggtccgcccctcgcgcccgctccctccctgctcgcccttcccctggctccgtccgcaaccgcccggtccggggcgctttcactcaccctcgctcggcgcgggcagcagcagcaacagcagcggcagcaggagccggggccagagcggggcgggcgggcggcgcggagacgcggcgcgctgcacagccatggggctctcggtcagctcggctcggcgacgcgcggctcccgggcctctcgcggctcacagcgtcccgcggggccggcgccggggccggggctggggctccggccggggccgagcccaggcggtgggggactggggccgcatgcctgctcagcagcgcggggggcgcagggggagcgccgcttgcgccatcttgcacccacccgggcgatctgtcagcctcgcccggggtgcgcgctccacactcgcaccgctcgcggccgccccgccctcctccccagcccgccgcccccctcctctctgctcccggtcccctcccccagccccctctccccggaggcccggtctggggaacaaaagagccggcgagcgctttaagcggccggacattcccggctgcgcggcggacgcgccccctgcgctttgaactgtggctggagcggccggcgccgtcccgggctgcagccgggtatcccctccccgcgggccagccggggacctggggggctgaggaagtggacaccagcggactggggagtgg

SEQ ID NO: 125890 - DNA, 449 bp, Homo sapiens
  chr15:65713970-65714419
  hyper
gtctctctggaaagccgcagcagctggagagaaatccccctccccacccccacctccaagtccctccccgactctccccggacacatcctcagctcccccctccgcggggaaggcaagaactaggcgaacaaagcggccagcccatccccctcccagccctgccacctacactccccatgagccgcccccaaacgcacaccggacaggaagcgacagagctgtgggtggaagccgcagccctagacacacacccttggggacttcgctatcccctccccagccctttctccagcttggacaactctgacttaccccgtacccactccgcactgggctgcggactggatgaggccctgctgacctcgtccacgcttccctggtcggtccctggggggtggggccggggtgacacgcgtcccatcgtgagaacaagcgctggacatgtcca

SEQ ID NO: 125891 - DNA, 765 bp, Homo sapiens
  chr15:65714727-65715492
  hyper
tctcaacccaagacacgcgcaggcaaggcagagcccgccccgcgaaagccaccgacaccgcagctacccgccccgccgatgccacgccgcgaccatggcacgcactgcggacacgacaggagcactcccaacacacacacacacacacacacacacacacacacacacgactccagactctgcgaaccaaaggcacacacccactgcggacaagcacgccccacaaacgccccccggccgcagctcgcagacccccgcgcaggcatcgcgggcacctggacgcgcagcccccgcacttgctcgggactccggcttgagccagccccgcagcccgatgcagaccagggcgcgggcgcaccagcactccgcagtcgctcctgcctctccgggcgcccgcccttaccgcgcgcggccaacaggcagaaggtcaacgcgaggagcccgcggccgcggccggcgtccccccgcgccatggggctgggctcgggccgccgccgccgccgccgcctccccgtgcttcggccgccgccgcggggggagagcgcgccgggcgtcagtggcccggggaggcgcggcgccgcgggcgggggcgcggcctcgggggcccgggcccgagctggggccggcgcgggggccagggccgctgccgcctcacccgcccctccatcgccatcttgggcgagcggcccgggagggggcgcccggcgagtgtggccaccctggccccgccggggaccctgcgcccgcgcgccacggccctgcgcc

SEQ ID NO: 125892 - DNA, 71 bp, Homo sapiens
  chr15:65715513-65715584
  hyper
cgggtctgtgtcccggtgcctcgccctctccgggtcgccgcgggcccccgtgaggccgcctgttgctgggt

SEQ ID NO: 125893 - DNA, 183 bp, Homo sapiens
  chr15:65809982-65810165
  hyper
ggcggcagtagcagcggccttggcctcggaggctttagcacttccggttcgttgcgatccgctttccgactggcgaaggcgcagccgggccaagaagggcgccgctgtctgctgggtggggtccaacaccacagcgcagtctagtggccggaggagccaaggaggcgcggggtggagactggg

SEQ ID NO: 125894 - DNA, 30 bp, Homo sapiens; identical to SEQ ID NO: 52152
  chr15:65822628-65822658
  hyper

SEQ ID NO: 125895 - DNA, 30 bp, Homo sapiens
  chr15:65823426-65823456
  hyper
ttgggtcaggggtgcggttgtgacagcggc

SEQ ID NO: 125896 - DNA, 30 bp, Homo sapiens; identical to SEQ ID NO: 52153
  chr15:65903313-65903343
  hyper

SEQ ID NO: 125897 - DNA, 237 bp, Homo sapiens
  chr15:66083362-66083599
  hyper
gacttcttttacattcgggctattcttttcattaacgtataatacattttaaagaataacatattcacagagtaatacaatttctgccctcacgggtctctagctggctgacacgcgttttctcctcaaataaatacatgcctgttgactgatgcctgtcctgctgttgcaaacaagaaataactgtcctataagacaaaaacctctctctacggttctaggcgtaaccatacgttt

SEQ ID NO: 125898 - DNA, 30 bp, Homo sapiens; identical to SEQ ID NO: 52154
  chr15:66084102-66084132
  hyper

SEQ ID NO: 125899 - DNA, 199 bp, Homo sapiens
  chr15:66084909-66085108
  hyper
aagaatccagttcgcgccaactgacctgtttcttccttcctccccggcactctgggagtcctgagattgccttgctcggttcgtctcagacttgctagatctgagcagctgctgctcctccaccaagggtgctcacattctccaggaaactcccttaagggttagcaaccgccgagtaggtttcggtcccaagatagaa

SEQ ID NO: 125900 - DNA, 30 bp, Homo sapiens; identical to SEQ ID NO: 52156
  chr15:66162731-66162761
  hyper

SEQ ID NO: 125901 - DNA, 142 bp, Homo sapiens
  chr15:66585519-66585661
  hyper
tcgtttggagatagcgagagcaacgaagagaaaacattaattacccggtattagtattaatacggcggctccattcccacatggacctgggggggacaaacaaagtctcctaatcttggacagctgcgcccagcccttcttc

SEQ ID NO: 125902 - DNA, 30 bp, Homo sapiens; identical to SEQ ID NO: 10213
  chr15:66586009-66586039
  hyper

SEQ ID NO: 125903 - DNA, 66 bp, Homo sapiens; identical to SEQ ID NO: 10214
  chr15:66586476-66586542
  hyper

SEQ ID NO: 125904 - DNA, 30 bp, Homo sapiens; identical to SEQ ID NO: 10215
  chr15:66648673-66648703
  hyper

SEQ ID NO: 125905 - DNA, 166 bp, Homo sapiens
  chr15:66678949-66679115
  hyper
aggtggaggccgcgcggcacctggcctggagagctcaccacacagcgacacagacttcttctcagctgggtccacctgcttgcctcggggcgacagagggcgccacggcgtccgcgacggaccccgcccccaggcagtgcgccgcgctcccgtgacgtatttccgc

SEQ ID NO: 125906 - DNA, 30 bp, Homo sapiens
  chr15:66679654-66679684
  hyper
cggagttggaagcgcgttacccgggtccaa

SEQ ID NO: 125907 - DNA, 30 bp, Homo sapiens
  chr15:66679938-66679968
  hyper
ctcagaccagttagcggatcccgcgggtct

SEQ ID NO: 125908 - DNA, 109 bp, Homo sapiens
  chr15:66797135-66797244
  hyper
agaggagacagccacgctcctctcagcccggctgctgccacaggaaaaggaagtgcttaccactcccgctgtatatgtcaccttccccttgaccgccccaccttgcccc

SEQ ID NO: 125909 - DNA, 31 bp, Homo sapiens; identical to SEQ ID NO: 10217
  chr15:66911653-66911684
  hyper

SEQ ID NO: 125910 - DNA, 508 bp, Homo sapiens
  chr15:66992919-66993427
  hyper
cctgctgttcgcttgcgatttgtgcatttaacgtgcactatctccagggaccttcgtggttctgtgaagcacgaagggcaagcatcctcatccgcggtttcaaacaagaaactgaggctaggaccgctactttaatttggccaaagtagtaggggatgggtgtgaggaagtgtctcagtccgatctttctttcggggagcaacggccactctcagagagcgcagcgcgaacagtacctggttccaggtaaagctcagcaaagggttctgaatcctccttgcaaatgccacccttcccccagcgcacacagactctgggcacggccgggggttcgcaccgccgcgcactccccaggctagctccacgcgtggtcactctccagggagacccgcccgccggcgccccgcggtcaccgcgggggaatggcgcccagccccgggccaatgagagtagcggaatttctttcattcagcgcggggccaggctcctgcccggaaaggggcggggc

SEQ ID NO: 125911 - DNA, 262 bp, Homo sapiens
  chr15:66994355-66994617
  hyper
aacgcgaggcagaaagcgggccgcgggcgctgtcaggccctgggcgggggtgccggggtggtgtggggcgggggcccgagctcggcccgccccgggagccggccccttggagcctccggccctgcaatgggacgtgttctcctttaagagttaagaaacttgaaaccttgtttgcgcaacaatcagcgccgcggagccgccaaagtgtctagactggcatatgatgggaggcagccaatgactccgcggcgctcctccgggg

SEQ ID NO: 125912 - DNA, 1266 bp, Homo sapiens
  chr15:66994911-66996177
  hyper
catgtgttgacacccgcgtccaggagaaactcgctccaagtgcatctagcgcctgggacctgagacggcgttggcctttcgtgcatgcaaatccagggatttaggttttgtttgggatttccttttctttctttccttttttttttctttttgcagggagtaagaagggagctgggggtatcaacaagcctgcctttcggatcctgcgggaaaagcccatgtagttaagcgctttggtttaaaaaaaaggcaaggtaaaggcagggctttccagacacatttaggggttcgcgcgagcgctttgtgctcatggaccagccgcacaacttttgaaggctcgccggcccatgtggggtctttctggcggcgcgccgcctgcagcccccctaaagcgcgggggctggagttgttgagcagccccgccgctgtggtccatgtagccgctggccgcgcgcggactgcggctcggcgtgcgcgtgttcccggccgtcccgcctcggcgagctccctcatgttgtcgccctgcggcgccccttcgacgacaggctgtgcgcggtctgcacggcgctccgcggcggagcttcatgtggggctgcgacccgcgcagccggcgcctcgctgagggaacggacccccggtaaccggagaccgcctcccccccacccctggcgccaaaggatatcgtatgttcaggtccaaacgctcggggctggtgcggcgactttggcgaagtcgtgtggtccccgaccgggaggaaggcggcagcggcggcggcggtggcggcgacgaggatgggagcttgggcagccgagctgagccggccccgcgggcaagagagggcggaggctgcggccgctccgaagtccgcccggtagccccgcggcggccccgggacgcagtgggacagcgaggcgcccagggcgcggggaggcgccggcgcgcagggggccccccgaggcccatgtcggagccaggggccggcgctgggagctccctgctggacgtggcggagccgggaggcccgggctggctgcccgagagtgactgcgagacggtgacctgctgtctcttttcggagcgggacgccgccggcgcgccccgggacgccagcgaccccctggccggggcggccctggagccggcgggcggcgggcggagtcgcgaagcgcgctcgcggctgctgctgctggagcaggaactcaaaaccgtcacgtactcgctgctgaagcggctcaaggagcgctcgctggacacgctgctggaggc

SEQ ID NO: 125913 - DNA, 103 bp, Homo sapiens
  chr15:67058138-67058241
  hyper
aactctggtgttagacgtcctttcttgcagcagtagccacaacacagggctgggatgttgtgcgacacttgatgtaactcaaaagtcccggcctgcaagttcc

SEQ ID NO: 125914 - DNA, 31 bp, Homo sapiens; identical to SEQ ID NO: 52167
  chr15:67135310-67135341
  hyper

SEQ ID NO: 125915 - DNA, 196 bp, Homo sapiens; identical to SEQ ID NO: 52168
  chr15:67357336-67357532
  hyper

SEQ ID NO: 125916 - DNA, 199 bp, Homo sapiens; identical to SEQ ID NO: 52169
  chr15:67357544-67357743
  hyper

SEQ ID NO: 125917 - DNA, 30 bp, Homo sapiens
  chr15:67358121-67358151
  hyper
ttccttcccggaggcggcacccaaacagct

SEQ ID NO: 125918 - DNA, 30 bp, Homo sapiens
  chr15:67358624-67358654
  hyper
acggggcagctggacgagctggagaaggcc

SEQ ID NO: 125919 - DNA, 62 bp, Homo sapiens; identical to SEQ ID NO: 52170
  chr15:67359190-67359252
  hyper

SEQ ID NO: 125920 - DNA, 30 bp, Homo sapiens; identical to SEQ ID NO: 52171
  chr15:67386694-67386724
  hyper

SEQ ID NO: 125921 - DNA, 30 bp, Homo sapiens; identical to SEQ ID NO: 52172
  chr15:67466231-67466261
  hyper

SEQ ID NO: 125922 - DNA, 126 bp, Homo sapiens
  chr15:67547183-67547309
  hyper
ccgtgcttggaaaccgcgcctccgcggaggtagccgttccctgacctagccatggcacagaacactgaaaaccacgaccctgtcggatccatcttaatccaggtgggaaacgggcttcccccggcc

SEQ ID NO: 125923 - DNA, 230 bp, Homo sapiens; identical to SEQ ID NO: 52174
  chr15:67813117-67813347
  hyper

SEQ ID NO: 125924 - DNA, 30 bp, Homo sapiens; identical to SEQ ID NO: 52175
  chr15:67835127-67835157
  hyper

SEQ ID NO: 125925 - DNA, 140 bp, Homo sapiens
  chr15:68112086-68112226
  hyper
cggcctcccaccaaatccggaccctctccagcctcagtctctggtccgcaacaggagtgaggtgggcccggagctctgagcaccttctcaccggctccaaggcccccgccttctcctcacttttggtctcgggttggggc

SEQ ID NO: 125926 - DNA, 12 bp, Homo sapiens
  chr15:68112276-68112288
  hyper
cgcgccgggctc

SEQ ID NO: 125927 - DNA, 287 bp, Homo sapiens
  chr15:68112552-68112839
  hyper
aacctaattaactgacgaaaactgccgttaattcaactagtaaaagatatgtgcttgcggaggaggcgcgtccgcgcagcctcagcccaagccggagcccaaatggacgccaaacccggggcacggaggcagcgcgggctcggccagtgggaggagaagcgcgcaaggcgcagctcgcatccagagtccggctttccgacccctggtgccaccgggaagcggataaaagagagagaatcttcaataatgggggtcaggaaggccaagggcagcgacgcctgcccgct

SEQ ID NO: 125928 - DNA, 1298 bp, Homo sapiens
  chr15:68113276-68114574
  hyper
tattaacccgccggacgccggcccatagtagagccccagctcctacccccacgacctgctccccggtgcccagccctgagcagcggggcttccccagcctctgtccacgcgcctttctccagctcagaccagggacaggagctgggtgggtctcctggcactggccagagcgcggggagctgtccgtagcttggtgctgaacggggacgcagagtcgacgctgcacaccccctggtgcggggcggtaccctttgtctaagaggtcctgggggccccccgcggccgggctgctggaaacggaggcgtctttggccctcgctgtacaacagaggcaggacaggcaggtcctgctcagggggacccagcccatcctctctttcctcccaccccccggcaccctgggggcgtcctggctccaggatcgttgtcaccaccaggccgaattctgagatgccttttaaaaaatcattaggaggctaagaataattaccgaacgagattgtaattatggggtgggggagcctgggccgagggagagggaatgagctggcggggacttgggggcagctctcggactgggaaggaaaataggttcctgtgttctccccggggaaggtgtgggaggaaagacagcgggatagttggagcgggacagaggcacagcctgggaaagacacccgaatggaggggccagaggcagaaagaaaggggccgagcgggttccaggactcccctgggagaaaagggaaaggcagggagatccgagacagaaagaccggaaccgaggagggggaagagggcaagaacgcgatctaaaagagaccctcagaggagacagagcccacaaacttgggagaggttttcggggcctaggagaacggtaacctacgtcagccagggtagccgggaagaaggcaaaggagtctgtgggctgggcctgccctctcctcagtcccttcaccaggcctgagctatcggttcgcgcttccagagtcccttcccagggtctctgcgagccaggagggaaaggaagagaggggagaagtggaggaaaaggggagacacgccccagaggagttggaacgcaggagggaaaggggaccatacccggtagcccgagggaaaaacgaggcgagaggggagaaggcgaccccgcgctgctacccgcggaagatttatggcgcctcccgggttccaaggacaggctgcgttcgtcgctgctgccaccgccggtagtcgccgtggccgctgcgccccctgcccaggcggcccgtcgcgccccaggccatccctgccat

SEQ ID NO: 125929 - DNA, 30 bp, Homo sapiens; identical to SEQ ID NO: 52179
  chr15:68115216-68115246
  hyper

SEQ ID NO: 125930 - DNA, 1024 bp, Homo sapiens
  chr15:68115495-68116519
  hyper
gtgcagggtgctggacgcaggtgtgcggccgcttacctggggcgtgcaggccttgggctgcggggaggcggcgggcgccgcgcgtggcccgcgggcgggcggacccggggagggcgctagcgactgcgcgggcggtgggtgtggcgccccggctctcagctgtcaggcgcgcctgccccgccactcgggctgtgaccgcgccgtccccgccgccgcgccatgcgctccaggcttcggcctcttcttccggccagtccccggcctcggggtcaacggctcagggttcgcatctccgcgcccggggtcccggcgccccgtgcccgctgagagcgggaggggccgcgggtgggagcgcggagaaccagggagcacggctgtgcgcgcgcgcggggaggggccgcgccgtcacccggagagcccggcggatcccggactcccgcccgccgctcctcccgccgcgcacctccgctcaccgctcgcccggctccagccgccgccgcactgtgagtacccacgtccggtagcccgccgcccccgcgctctgctcctgcagcttttttttcgtttagttctgatttgggctcctgtggctgttgtttttatgattatacctaaagacaccaccgcctcgctcccaccactgccagtctcccgcttcgctgccctccccaagctcgtccatctagctccgggagccgacgggggttcctcaagctgctctggctgctgctccttgtcgctgcatatggctcttcgcctgtgctttccgctttggcccccgaaattccgttcctttcctagggacccccttcttctgactccgggcccggacccccctcctctcactcagggaaaaccgcgcagggacccaggaccctcaactggggtacgctctcggctcgggcgctgtcttcactgtatgcgggccaggcatagttgccgatttcgagaaaccgagaagctgtcatttcccagcgctgcgcgccctccagccacctccaggagggcgcgaggcttgtcagcc

SEQ ID NO: 125931 - DNA, 333 bp, Homo sapiens
  chr15:68117232-68117565
  hyper
ggcccgagtgggaaacgtatatctgaaggaggaaagctcaaggagtgggcgactggaagctaagaagtggatcccaacaaagttccttgagaacctctctgtcccacacgttgacctcggtggaaaccagctttggtctggaatacagctaaaaatgcagaaaatgtggttagaactgcaggatcctggtctcactaatagctggaaagaaaacggtttatatatccagccgaaatctttctgctcaacgaacgcgggcgccagccgtgagaggagaagctcgggtttgtggaaactggcaatgttgtcccctgaagccggctcgggcaccaa

SEQ ID NO: 125932 - DNA, 984 bp, Homo sapiens
  chr15:68117891-68118875
  hyper
gttgccgaaggcgcacggatctgggcgctgaaaaagccaggatttggcaatggctttgctgtgtggccttgggcaagtcactctgcgtatctgggtttcacttccttcccaatccgaaaacgggattgggttccttgcagcccgggcattcctgaggtctcctttaccccttctcctcccccaagccccgggggctgttgttaacggcgccaacatgggtctgagtaacaaaagacgcctgtccagggggtgaatgagtttggactccccactgccaagtatcccccgcgcgcccaactcggagcgccctgctgggcgggcccgagcctcggcggcggcgctgaaaatggctcatctgctctctgctttctctatttcgcaggagcggcggcatggaggctctcaccactcagctggggccggggcgcgagggcagttcctcgcccaactccaagcaggagctgcagccgtactcgggctccagcgctctcaaacccaaccaggtgggcgagacgtcgctgtacggggtgcccattgtgtcgctggtcatcgacggccaggagcgcctatgcctggcgcagatctccaacaccctcctcaagaactacagctataatgagatccacaaccgccgcgtggccctgggcatcacgtgcgtgcagtgcacgccggtacagctggagattctgcgtcgggccggggccatgcccatctcgtcgcgccgctgcggcatgatcactaagcgagaggccgaacgcctgtgcaagtcgttcctgggcgagcacaaaccacccaagctgcccgagaacttcgccttcgatgtggtgcacgagtgcgcgtggggctcgcgtggtagcttcatccctgcgcgttacaacagctctcgtgccaagtgcatcaagtgcggctactgcagcatgtacttctcgcccaacaagttcatcttccactcgcaccgaacacccgacgccaagtacacgcagc

SEQ ID NO: 125933 - DNA, 245 bp, Homo sapiens
  chr15:68118929-68119174
  hyper
cggccacagacgaactgagccatgcttgggaggacgtcaaggccatgtttaatggcggcacgcgcaagcggaccttctccctacaaggaggcggcggaggcggtgccaatggcgggtcgggtgggcaggggaagggtggtgctggcggcggtggcggcggtggcccagggtgcggtgcagagatggccccaggcccgccgccccacaaaagcctgcgctgtggcgaagatgaggctgccgggcct

SEQ ID NO: 125934 - DNA, 774 bp, Homo sapiens; identical to SEQ ID NO: 10227
  chr15:68119578-68120352
  hyper

SEQ ID NO: 125935 - DNA, 328 bp, Homo sapiens; identical to SEQ ID NO: 10228
  chr15:68120630-68120958
  hyper

SEQ ID NO: 125936 - DNA, 808 bp, Homo sapiens; identical to SEQ ID NO: 52185
  chr15:68121149-68121957
  hyper

SEQ ID NO: 125937 - DNA, 5 bp, Homo sapiens
  chr15:68122469-68122474
  hyper
ggcag

SEQ ID NO: 125938 - DNA, 594 bp, Homo sapiens; identical to SEQ ID NO: 52186
  chr15:68125162-68125756
  hyper

SEQ ID NO: 125939 - DNA, 538 bp, Homo sapiens
  chr15:68126031-68126569
  hyper
gtgagcctggagaggcgcccagagtgaccctcgcgactgtctccccagaagcccacgacgccctgcaccatttctcctgcaagatgctgacgccccgccactgcactggcaactgctccttcaagccaccgctgttgccctagggccggcctggccgcacccctgcgccctcaagccatgctgctccttgtaaatacccgctgctgcggtggccctgagcgaggaacaagccattcggacccgaccgatgtaaatacagccgcccgtccgcccgccttcctcccgggctccccggccttgcccgccccctcccgggcgtccctgtccagggccccggcttggtttccaagtgtaaataccgcctcgcgcctcaaatccccctaccccgtgtgaactctagggcatcggacctcaaggggttaactggacagacggggggcgggaggggagagcgccccctcccattgtatagccttgaacccgattgtgaatacaatgtagcaacttcgctggcgcctgccccgcactccccgtcccg

SEQ ID NO: 125940 - DNA, 1793 bp, Homo sapiens
  chr15:68126854-68128647
  hyper
tgtacccgtgactttcgtttttaataataataataataataataaaagatgtcacttctggggctacggaggtgggagtgcaccggcggagcggggcggcggaacaccgtgcaacaggtgggggtgggagccgccccgcgggttctggggctcccagggtcagaatcgggcctgctcaagtgggcagcagcgagcactcaacctctccactgtgccctccagacacactcagttttcccccacagggcactccctctccgcgtttaggaccctcccttgggcccggaatggaggaggggcattacgtcacggtccttagcgcagcggtcccgggctctttcctcaagagctcgaaggcgccgagggttcatccatgcccatttccacgcctgccacaccggggaagttacctccggggcgctcacagacagggcgccctgccgggaatcccaggttcaaccagaattgtccctttagatggcgcgggcaccgccggcctggcctggcctgggagcgctgcggcagggcggaggtctcagggagtaaggtggtctccgccgggcaggcttggaaaggaaggcgggacttggagagctcggtcacagacggcctcccgtctgccccgccgctacccgaaaggagggagccccgtccgcattttctgttcggtccattttagttcgagaggggctaaggactcgccgggcctcggctggggcgtccgacgtccgggtcacggttggcaaggcctcccagcggcctcagtttccacagcgcacctcctgcttgggctacagacgacgctgcaaattgcagaacactctttgcagggaggagagtgtggatggagtgggagagagctcacggcacagggaatcattcagccttggctttcatttctcgccctcggctggctagtgggggtcccgggttgagcccttcttttatctttcctgggtctccgtttcggcctctatgaaataacacgcaggcctccgtccatgcggctcgtagaaggcgggcggcaggccccgcgccaccggccagcagctcgggaccgggagccctgggctgagggggccgggaagtttcgtggcgggttgtcttggtgggccttggacggagccggctagtaggggcgtgctctgggcctccccgaagctgtgcagacgaggagtcccgctgcgcggtacagccaggaagccagtccctagagtcctttgcgctgggggtcggagccttggagtcccaggatgttccgacggctaagaccagagcggacacaaaggagataacaatgaagagggcgccggcaaatggcgaagcatcgcctccggacaggccatctccgggcagggcccctctagggagcgggaacgtttcatatgcatgggacccaccagatccgctttccgctggaccggtggcgaaactgaggtccagagaggaagagactggagtctccaggccgcgccagggcccgcggaactgcgacggggcgggacagcgcgggtgtgggagtttgccggcccctttccccaccgcggattgcacctttggaagctgcacttttcttctctgtaaaatgggcatcaccattaccacccaggcaggaagttccgtggctgcggctcgacagaggagccaggcaaatgctccttcccacccttccttcccaactccccccaaagtggaaaagctcctaggcagctggggccctccggaagggacgccccatctgggcaggaatctctgcggactggagtcgtaggcggatccgacccagaaagctc

SEQ ID NO: 125941 - DNA, 30 bp, Homo sapiens
  chr15:68128893-68128923
  hyper
aatgttgccaccttgcgacagattttaagc

SEQ ID NO: 125942 - DNA, 30 bp, Homo sapiens; identical to SEQ ID NO: 52189
  chr15:68132781-68132811
  hyper

SEQ ID NO: 125943 - DNA, 30 bp, Homo sapiens
  chr15:68155858-68155888
  hyper
tccctcaacccctgcgcggggagccggggc

SEQ ID NO: 125944 - DNA, 30 bp, Homo sapiens
  chr15:68176958-68176988
  hyper
aaccagacaacgcccgcccccgccagaagg

SEQ ID NO: 125945 - DNA, 72 bp, Homo sapiens; identical to SEQ ID NO: 52190
  chr15:68177207-68177279
  hyper

SEQ ID NO: 125946 - DNA, 280 bp, Homo sapiens; identical to SEQ ID NO: 10233
  chr15:68260480-68260760
  hyper

SEQ ID NO: 125947 - DNA, 30 bp, Homo sapiens; identical to SEQ ID NO: 52192
  chr15:68346415-68346445
  hyper

SEQ ID NO: 125948 - DNA, 30 bp, Homo sapiens
  chr15:68346909-68346939
  hyper
gttattgttgtgggcgcctctggcgggggt

SEQ ID NO: 125949 - DNA, 316 bp, Homo sapiens; identical to SEQ ID NO: 52193
  chr15:68347699-68348015
  hyper

SEQ ID NO: 125950 - DNA, 41 bp, Homo sapiens; identical to SEQ ID NO: 10234
  chr15:68521277-68521318
  hyper

SEQ ID NO: 125951 - DNA, 192 bp, Homo sapiens
  chr15:68549436-68549628
  hyper
tgacttctgcaggcctctccccgccagcgagcgcacggcagcggtgcccaggggctggaggcagcggaacgcacgcgcccggcgtcgctgagggcttgcgccagccccagagtacccgcgtgcccgagggagcgcgcccgcctctggctccgagcttgggggaggggcggcgtgagggagggaggatcttgt

SEQ ID NO: 125952 - DNA, 331 bp, Homo sapiens
  chr15:68569510-68569841
  hyper
aaacggaggttctgccggctcaggatgagattcctgctctgtctgaacgcgggactcgctttccttcccaggatacctcgctccttccaccgcgagcgcagctccccttcgctcccatctttctctcacacttaacccctttctccgggaaagtcaggccgtacttccagtcccttctcagagcctggtgttgtggctctcaagccctcccacatttcgggaactcagaaacgccgcccttttcctgaaatggaccctccgagtacgcgcaaccccttccctaaccccggctcaggggcagaagcaggacccgcaccgtctatagtaaaat

SEQ ID NO: 125953 - DNA, 30 bp, Homo sapiens
  chr15:68570321-68570351
  hyper
cgggtcaggagagacgcgcccatctttcgc

SEQ ID NO: 125954 - DNA, 30 bp, Homo sapiens; identical to SEQ ID NO: 10235
  chr15:68570803-68570833
  hyper

SEQ ID NO: 125955 - DNA, 47 bp, Homo sapiens
  chr15:68598772-68598819
  hyper
ctccagaaagctttccggggatgtccctcgctcggaatcgctcccct

SEQ ID NO: 125956 - DNA, 976 bp, Homo sapiens; identical to SEQ ID NO: 52198
  chr15:68723465-68724441
  hyper

SEQ ID NO: 125957 - DNA, 191 bp, Homo sapiens
  chr15:68724480-68724671
  hyper
cgcggcgcctgcagcctgcactgcgcggggcgccgggctccctgacagctgcggctcattcagaggaagtgggagggctcgagcggaggggaggggcgccggacaccactccggctcgggctctgggccagtctcggccgctctgccacctgggcaggcggcgcgctgcctcgacgcgcctgtgcagcgct

SEQ ID NO: 125958 - DNA, 231 bp, Homo sapiens
  chr15:68821323-68821554
  hyper
cctaaaaggtggaaacggtgcagactaatcctaaattagtctttctctttgcctcaacaactactagatatcttctgatctctgacactccaatgtttcctggacaaacaaagggagcgaagtacgtgggttgttcaataggaagtggcttgaaggtggtttggcaggctggggttttattccctgactctctgtgggtacattcttactgtggctcgtcaggagatagta

SEQ ID NO: 125959 - DNA, 30 bp, Homo sapiens
  chr15:68851378-68851408
  hyper
ctaccacgcgctaggcgccgttcttcctgc

SEQ ID NO: 125960 - DNA, 30 bp, Homo sapiens; identical to SEQ ID NO: 52200
  chr15:68851670-68851700
  hyper

SEQ ID NO: 125961 - DNA, 1147 bp, Homo sapiens
  chr15:68870280-68871427
  hyper
ggaagccagcacttccgggcttgccaggctgtcctgcttggagaacccctctgcttccacctctgctaactcctcccctccaccctctccgcggttctgtatctgcggaaaccggttctgctcaggtgcttgggagggagactcctttctcaagacttgcgaggtcaccttcaggtgactgtccctcaaatctccgcagcagctccaggacacactgtgccccgagtcaggattggatcaacacacaggacgcacctgtgttatcactccaccagtagagcggcactcagtggtagtgtagacagtcctagggcagggcagcttctataacaagaggttccttagggagctagcggccgagtggaaagagcgggaggaacggctcgggcaggcaggtcctgtgctgtggtctaagtcacttcccacgtccgtcccactctgatcgtcagtttcctcctctgcaaaactcactaaggcggccttcgggcaagtcatcgcggcgggaattagattcgaaagagtgcttacacaaatccgtctggccaccctgtgccccgggccagcgcgaggtgggggtgcgggcagggctcccgggcttgcggctgccacgcccctcccagcccgccgcgccacactcacggcccacgggccgactttgcgagcctccagggggcgaacccgaccgccttctttgcccgcgcagcgcctcggccgtccagcctgtgacttcaccagcgtccccgggccagcgggacacccgagagcccggggcgccgcccgttctcccagccggcaggtgccgggagccagcctcgcccagccgcgtggcgtccgcaggcccgaaggggttaaggccgcggacccgggcgcccgtccggactccgggagcagcggtgcccggcggccggcgatcgagcgggaggctcggggcacggccgctggcgggctgcgcttcctcctcctcctccctccgcctcctcctttgtagcgagttcccggcccctcttcctccccccgccccccagcccgggccctctccctctctccctttcttcctgcctcgccttcctgcggcgaaggaggctcatctattataaatgcacattcggggctgacatcagcgacgagcggcgggcgagcgccgacg

SEQ ID NO: 125962 - DNA, 30 bp, Homo sapiens; identical to SEQ ID NO: 52203
  chr15:69059068-69059098
  hyper

SEQ ID NO: 125963 - DNA, 263 bp, Homo sapiens
  chr15:69109437-69109700
  hyper
aaccagcacctatatcggctttttaaaattctcagagatgccagcatcggaggacccgacgcgacgaattgcctggctcctaagtcaacatccggagaaaggcggtttacttttttcaaaagcaaaccttcatccctctctttcgctttaggatctcattactattgtagctgccttctcccaggcaaaaataaaagggggaaggagcaggtttagaccgaggaggagggttcccctagcctgcagggcgctgcaacatccac

SEQ ID NO: 125964 - DNA, 30 bp, Homo sapiens
  chr15:69110110-69110140
  hyper
gcggaaacccccatcggggctcatagcaca

SEQ ID NO: 125965 - DNA, 174 bp, Homo sapiens
  chr15:69111352-69111526
  hyper
ccagtccacagctgcgttaaggcggggagggggtagacaaaaaggatcttgttttcaaaagtctcactcaggtttgggggaggaactagggaaaagaggaagcgaggcctgccttcgccgggattcgggtttaacgggctagaggggcgacaggccagcgcacggtgctgccca

SEQ ID NO: 125966 - DNA, 30 bp, Homo sapiens; identical to SEQ ID NO: 52205
  chr15:69112049-69112079
  hyper

SEQ ID NO: 125967 - DNA, 128 bp, Homo sapiens
  chr15:69113814-69113942
  hyper
ctcgcgctggggagcgtggctgcccccgtcacccccaccgcggctgcccagcagcccgcgcgccccttcccctccggcctcgtccctgtcaggccgccaccatcgccaccctcgtatacataagtcag

SEQ ID NO: 125968 - DNA, 305 bp, Homo sapiens; identical to SEQ ID NO: 10237
  chr15:69114201-69114506
  hyper

SEQ ID NO: 125969 - DNA, 246 bp, Homo sapiens; identical to SEQ ID NO: 10238
  chr15:69136218-69136464
  hyper

SEQ ID NO: 125970 - DNA, 31 bp, Homo sapiens; identical to SEQ ID NO: 10239
  chr15:69351241-69351272
  hyper

SEQ ID NO: 125971 - DNA, 431 bp, Homo sapiens; identical to SEQ ID NO: 52209
  chr15:69366378-69366809
  hyper

SEQ ID NO: 125972 - DNA, 30 bp, Homo sapiens; identical to SEQ ID NO: 52210
  chr15:69452447-69452477
  hyper

SEQ ID NO: 125973 - DNA, 103 bp, Homo sapiens
  chr15:69452708-69452811
  hyper
ttattaaggaggagcggagaagaagaggggcggagaaggggcggggagaatcacctttccttttttacaattggtcgtagtagactccgagtcctgccgcccg

SEQ ID NO: 125974 - DNA, 454 bp, Homo sapiens; identical to SEQ ID NO: 52212
  chr15:69453522-69453976
  hyper

SEQ ID NO: 125975 - DNA, 69 bp, Homo sapiens; identical to SEQ ID NO: 52213
  chr15:69591244-69591313
  hyper

SEQ ID NO: 125976 - DNA, 46 bp, Homo sapiens; identical to SEQ ID NO: 52214
  chr15:69591722-69591768
  hyper

SEQ ID NO: 125977 - DNA, 83 bp, Homo sapiens
  chr15:69706604-69706687
  hyper
tccctgcggacgggcgctgattggcccgtttgaaatgcgccaggcgggagctcacctgggctcttagcgtcgccgccggcttc

SEQ ID NO: 125978 - DNA, 80 bp, Homo sapiens
  chr15:69744998-69745078
  hyper
accgtatttgcaggcgctgagaaactttctcaacagtaagaaccaatcaggcgcagtgcgcaggcgccttcagtgggtcc

SEQ ID NO: 125979 - DNA, 30 bp, Homo sapiens; identical to SEQ ID NO: 52216
  chr15:69745577-69745607
  hyper

SEQ ID NO: 125980 - DNA, 30 bp, Homo sapiens
  chr15:70387887-70387917
  hyper
cgccccccaggcccgcggccgcatctcacc

SEQ ID NO: 125981 - DNA, 71 bp, Homo sapiens
  chr15:70388125-70388196
  hyper
ggggatttgggtccccgccgtggggagggggatgtgaaacaattcgaaacttcccgcgagccaaaggactt

SEQ ID NO: 125982 - DNA, 286 bp, Homo sapiens
  chr15:70388411-70388697
  hyper
ccccctccgtccccgcgggggatggcaggagccgcgcaggggacccacccctccccgccagccccggggcggcccccaccggccttacctgtgatactgagcttgcaggaactggaattcgtctttgatcctgtcacaagactcagccaccgtgaatttaaatcccggctgcccgggttgatggggagcctggagcccgcgaagacaagacaggggagggggcgggggcatgagaccgcgctcagagcggccccggcccctccccaacggcgcccaaccaaaagag

SEQ ID NO: 125983 - DNA, 30 bp, Homo sapiens
  chr15:70390350-70390380
  hyper
ggtgccgctgggcgcgacgtcacaatgccc

SEQ ID NO: 125984 - DNA, 77 bp, Homo sapiens; identical to SEQ ID NO: 10243
  chr15:70391278-70391355
  hyper

SEQ ID NO: 125985 - DNA, 30 bp, Homo sapiens
  chr15:70391883-70391913
  hyper
tggctcctctttggcgcttcctttccccct

SEQ ID NO: 125986 - DNA, 30 bp, Homo sapiens
  chr15:70392162-70392192
  hyper
gcttctgagcctcccgcttgcaaatagtgc

SEQ ID NO: 125987 - DNA, 30 bp, Homo sapiens
  chr15:70392978-70393008
  hyper
gcagctctgtctctcgcccgggtgtccctc

SEQ ID NO: 125988 - DNA, 30 bp, Homo sapiens
  chr15:70551254-70551284
  hyper
accaggcggaagggacgagggtggcaacca

SEQ ID NO: 125989 - DNA, 1441 bp, Homo sapiens
  chr15:71054802-71056243
  hyper
tcgccattcttgtaacgtgacaaattatctaaatcacaacatctgcggtcaggctgtttctcaagatttctgttctcctgccaactaaagaggccccgactactccttggcgcgcacactgaggccgcgctgcaggtcagcaccgaaagagccccgcacggatcccgccccacaggtgcgatttacacaacccacatcaccaccacccctcccaacttcaccacctctagggtcaccaccctgtggggttttgtctttacgactaagccgattccctctgcctcgctggggaatcaaacttcccagtgacaacgacagcggccagcacgggacgtccaccagcccggcagggcttgacgctgtctcagacccggggaaggtccggagtccgggcacggtggcgcggggtgcgcagccctgcccacctgccctacctggtgcgagccccggccccggggactggggagccaacacggccgagcgggcgtgggcagcagggcgagcgccgggagaggagagcgacgagggggggtcaacggaaagagcggagtaggggtgccaatcgaggaactttggatttaggaggagggggccagaaccgccccactgaggtttcttccagaagttcggaggcttgggagaaaggggtggggaagagacccgtagaggctcgggtgcggcggcggggaggatccccggggtctctgggctgacggagtctccggcctcagggaggagtcgccagggccgccgaagccgaactggcagaggaaaagcagaggaaggcggcgcgcgaactcgccagcaaaggagggctgcgctgctcccggagcggagcgcctcgcagcccggaccgcgggactcaccgcgctggcggcggcggcgccagacgacgcggggccgggcacgtcctgcctcctcaggcgggacttgaggctcttcatggctaactcttgcctggcccccgcgcgaaccttaaaggctgcggagtgccagcgcgcaaggagtagacggcagcggctgcagcagaggcggcgcgggctgtaccagccccacctgcctgccacctgcgggccccgggcagcagacgtcgacaggcctgaggcggggctcccctcccgtagccaattgacccgctgccctggcgggggcgtggcaaaccgcgaccaatcggaatgcgggaatggggcgggacttcccttttaaactgagtaacacccttcctctcccagctggaggaaaagtttgggaactttagcccgggaaggggcggaggaggtgggcggccagaggcgtggagatgcgcgcaggccgggctccaggccaccggcgcccgcccacccggagcttaagatctagagagagcacggggtcccgcctttgccacctctcatcttcccggactcccctcctctttccacccacgcgctctttaccaagt

SEQ ID NO: 125990 - DNA, 120 bp, Homo sapiens
  chr15:71056446-71056566
  hyper
aaagaccttgaaagacgttatagtaagttacagtacaagttacgtgctcgtttatttgttgagtgaagaatccgccgtattggaagcaaagggacggaatgggggcggggagggaggaga

SEQ ID NO: 125991 - DNA, 242 bp, Homo sapiens; identical to SEQ ID NO: 52220
  chr15:71146070-71146312
  hyper

SEQ ID NO: 125992 - DNA, 489 bp, Homo sapiens; identical to SEQ ID NO: 52221
  chr15:71146345-71146834
  hyper

SEQ ID NO: 125993 - DNA, 1163 bp, Homo sapiens
  chr15:71184273-71185436
  hyper
cctcgcgtgtccaggcggcctgcttggtctccctcctctcccctcttaggtgccggggcgggcacccggtgcagggtgggcacggcgcctgccaccagcctcaggcgctgggagaagcgcaggttcttctggataaccgaagagacgtcaaaacaggctggggcaaagtggtcagagcagatgaccgagcggtcattgcctccgtaccagtcggcgcggcaaccccgcacgaagcggtcccagagcagccgcacggcccggtccttgggaaagcggaacagcgacttcccagacttggtggtgttgccgcagtgggcggccacacaacgggccggcatggcggccgtcttcggtgcgcgggagccgggttccctggaccttcgcccttgggcacgctcctcgcagcggcctcggcgaggcaagtcctcccctcctcacctgtccactccgggtcgggattgtttccttccctacctctggtcaccggaagtggcgatctggggcccccaatgggagggctctttgatatcttcctcctcctcctccctgcgctgctccccaggagccagtggacacaagcagagggatacaaatttcgcgcgggcagcgctgaggtgggccgtaaagaggaacggaccggaagtggtggtggttatagcaaccagtgtggccagcctcttccccagcttatcctcctcccaatactcccgctctgtttttatgaggctgggaaaatagaacgaggaagtggtgacgcactgggctctcacgaatacaactagaagctgcaacgactgtgtggctctatcgattcgggagaggtccagaccggaaatggtcgtttccatggtaaccctgagcaggttgcctgggagatgacctctttcgggtctctttgaatctccgctgtagcgtcacctggaaggcagatctaacagagaacctggactgtctcctatcatgattcccgggaaatatcgctctgtttctggccgggctgcgaacaacgtaagttgggccttctactttctctttcttcccactggtactctttctgactggcgtctttgtcctaggagatgggctgtattattaggaccggcaccgctgggtctactcaagctattgtctgaccagggtttgaggttcgtgggctggaccaa

SEQ ID NO: 125994 - DNA, 1048 bp, Homo sapiens
  chr15:71407570-71408618
  hyper
gccccctcccgccctcgtggcctctgtctagaccgtactccctcctactgggtgatgtctcttcccctgggacccagggaccatcccgttgttgacctccggggtcaggggtgcggatgggggccggcccttcccgcggtcgccgccagggggcggcaggagcggctccagatgacagcgggaggccgcaagaggggagggaggaaggaccgagggagcgcggatcccgctctcggatcgcaaactctgagccagagctctccgcgcgcgcctgaaccgctggccgcccgcgcagcccgacgcggaatcggggcacagcgggagcccgtgcagggcgggcgcggggcggctgggcggcggtggcggccgtccatgcggcggcgctcggggctgcccggcgccgggaaccacgcgggggcgaggcgaggcgaggcggccgccggtcgctccgggacgcggaccgccaggtgagcagagccgcgcgccccgcgtcccctgcgcgccgcccgcgcggccccgacccggcttccgctgcccaggctccggctcccgctctctggccggcggggcgggctggcgcgggctacccagtgggtgtgtccggggcgccgcgggctgcgccgctccgggctcggggagccagcgcgcgcctggtccgtgcggacggctgcgcctccttctctggttctcttccttgctgggagtcttgctctgtgctggcgccggcgctcatccctccaccctcgactctagggacagtcttaaactctagggacaatccacctcagtcgtccccgggtcggggccccgtgctccccgggtcgggtcggaggggaccggcgagtgcacacccagcccgtgcgccccccacctcagcctcgcctccctcccgcctggggcccgagagccgggcaagtctcggtcagcgctccttgagtcctggcctggggcctcggatctgtgtgtctgtctgtctcagtttagttgctgcaacccagcgagcgcctggagcccgagtggatgggttgtttccgccaactctggacac

SEQ ID NO: 125995 - DNA, 232 bp, Homo sapiens; identical to SEQ ID NO: 52224
  chr15:72072596-72072828
  hyper

SEQ ID NO: 125996 - DNA, 142 bp, Homo sapiens
  chr15:72409487-72409629
  hyper
tgacaccacatctaccgggagtaagaacaccatgacagcggctatctgaaagccgtgatggctagggttagtgctagtcggcttggtgatgagcgagctgggaggggttctactaagaagagtagggcgaggggcacatggg

SEQ ID NO: 125997 - DNA, 30 bp, Homo sapiens
  chr15:72410179-72410209
  hyper
gcgagcggccgcggcgcatcccccgccctg

SEQ ID NO: 125998 - DNA, 30 bp, Homo sapiens
  chr15:72411054-72411084
  hyper
cagaatgtcagaggcgaattaagtggtgtc

SEQ ID NO: 125999 - DNA, 310 bp, Homo sapiens
  chr15:72522192-72522502
  hyper
ccccgcggcctccgcgttccacaatcaggacgcatttgttaaaaaatgtgccggataattaaaaaaaaaaaaaagaaagaaaaaagaaaggaaaagaaagaaacgtgccggagaggcgcggaacgggcgagggccaggaggccccagcaaagcctgcagaggtttatcccgcccgttacgaggcccaaggccatcgcccggtgaagcggggtgggccctgggcgcggccgctacgtgcagcccggccgcggcgagatggagcgtggtccctggcggccacccggcaagggccggtcgagctctcgggccc

SEQ ID NO: 126000 - DNA, 1075 bp, Homo sapiens
  chr15:72522951-72524026
  hyper
gaggggaaccagaacgcagtttcaatgagttacacagaaagcattagaatcaggggacacgcacagcttgaagaggagggggtggaaggaccagacttaaggaggaagaggggaaaacgagcacggaacaggcggcgcggagaaaggggaagcaagggtggaatcaatcacgagggaccgagagaaggcaggcgaggatggaggcgcattgaggattggggcaggaggaagaggatgggaccagaatgagggggtagggctggggcgggaaaggagccggcggacccgcctgatctggaaggaacggcgctggggacttctgaagagcaggccccaggcgtgaggagccgttctcctctctctgagctccactgcatcccagacgccctggatcctgcgccgccctgcctgcgtgcccggggccggccggcgcgccgggattccgcactagccgggcgactggcccttggtggggactgatggcgtagcctcctgcaccgctcacctccggcgctgaccgactcgggctacgctgcaaagacgaagagatccggagccacggcgcgtgcagctgctgtgcaaggagccactgcctcagcctcaaggttatcccgctgcgggccgccgcaatccctccgccgccccgccctctgcccaatcccggctccgggcgacccgggccccgccccctgcgtccccgcgggcgcagtcaccttcaggaggaagcgcggcggcggcggcggaacgcgcgggcaggttgccctttcggtgggactaaattctgcggcggaaggacacagattcagagtcacattttaagaaacctgatgaccaatggggacgcggcggggcaacggggcccgcccccggagcgactttcctcccagacccccgggcgccgggccacctgttgccgccaagttgggctgccagatggggtgtcttttcttggctctcggcccaggccaccccagctgtcccggcctacctgggcagggcccagatttatgggttccggggcagcattctcccggccccgccctgccactccccactcctccgggtgtctgctctg

SEQ ID NO: 126001 - DNA, 647 bp, Homo sapiens
  chr15:72564619-72565266
  hyper
gcctccccaggaaagacgctctgggcccgatctatgccgcccggccgccgggcctgagtgaagcctgtccagcctaggaggggccctcagaacctcccggtccaagcctctcacttcgtccacccctgcggagacggggcgagccccgcacccttcccgtggcccggccgcaccgccctgtgcccgtggtggcggccacacaggccagcctggcgagtactcacggcgaccccgggccgcgcgcggccgcagccgacgggacgagcggcccgggacgccccgcgggggcggagcggcaggccaaggggcgggggccgggcctggcgggcgaggtcgcgcaccccacgcctcgtcgttccgtcacgggcgcgctcagccactctgcgcacgctcgcgcggtgacacgatggcacgtggcccgctcctgaccaacagcctgacggcctgctcctgggcgcgcctcagcagccgacgccagccttgagacgcctgcgcggcggtcgctagtcgggaaagggtgcggagtggggggtggcgcctgcgccgtgggtaggggaggcagtggagaaggaagagggactctgggggagtgcggggagccttccaaaggagaatacttgcatttagcgccccgagtggttgggagg

SEQ ID NO: 126002 - DNA, 124 bp, Homo sapiens; identical to SEQ ID NO: 10256
  chr15:72612097-72612221
  hyper

SEQ ID NO: 126003 - DNA, 493 bp, Homo sapiens; identical to SEQ ID NO: 10257
  chr15:72612513-72613006
  hyper

SEQ ID NO: 126004 - DNA, 337 bp, Homo sapiens
  chr15:72668398-72668735
  hyper
cacgtgaccagaggcggctctgcgcctgcgaccccaggaggacccacaccctgccctttcacttccggcctggacctgaggctcctgctacgtgcagcggattgtgccgggcgtcggcaactgctcggctcgccagactgttcacgggcccagtagagcagtaaataaccggccacccctgcggccgtgccggccgtgatggaactagacagctcacccgactcgagaagaacggggtggggaggcgaggacgcagggcgacctggagaagaaagtttcccagatggctctagggtgaatcttgaatgttgtgatgcagctcgccaggcctacgggg

SEQ ID NO: 126005 - DNA, 30 bp, Homo sapiens; identical to SEQ ID NO: 52234
  chr15:72766455-72766485
  hyper

SEQ ID NO: 126006 - DNA, 31 bp, Homo sapiens; identical to SEQ ID NO: 10258
  chr15:72827182-72827213
  hyper

SEQ ID NO: 126007 - DNA, 30 bp, Homo sapiens; identical to SEQ ID NO: 10259
  chr15:72827251-72827281
  hyper

SEQ ID NO: 126008 - DNA, 102 bp, Homo sapiens
  chr15:72978670-72978772
  hyper
ttcctggagagaggcggagctgggtgccgagcgtctcagggtgggcggggcgacacggtcccctttttactgtcccgggaactggtcgcctggggcaagtct

SEQ ID NO: 126009 - DNA, 30 bp, Homo sapiens
  chr15:73075357-73075387
  hyper
tctagactacacggcgtttcgaaagtgggt

SEQ ID NO: 126010 - DNA, 30 bp, Homo sapiens; identical to SEQ ID NO: 52238
  chr15:73075920-73075950
  hyper

SEQ ID NO: 126011 - DNA, 30 bp, Homo sapiens
  chr15:73089219-73089249
  hyper
gcccgaaggctgggcgcagcccccgcccgc

SEQ ID NO: 126012 - DNA, 298 bp, Homo sapiens; identical to SEQ ID NO: 52239
  chr15:73344007-73344305
  hyper

SEQ ID NO: 126013 - DNA, 386 bp, Homo sapiens
  chr15:73611100-73611486
  hyper
caggcttcctctcagcggggcctgtccccactgcttccccacagccccagaggccaggcctcagccattcagacgcgggggaggtgatcgcagcacagggccgcgccctgcctctgccgctccgggggtccccaaggaagcaccaacgcctggccgcagggggcagttgtcatggggacgccagggcccgctgagctgcctccttagcaacgggactccccggccagttgccatggaaacagcatcccctggcaagcggtgatggggaacggctgggtttcctgcccttttccgaggactttcccctcctagggcgggagacacggcactccctataccggcgggagccgcgaggacttggtttttccagtcgcccgtcgccaccc

SEQ ID NO: 126014 - DNA, 30 bp, Homo sapiens
  chr15:73639238-73639268
  hyper
tgacgttcagcaccacggacagcgcccagc

SEQ ID NO: 126015 - DNA, 732 bp, Homo sapiens
  chr15:73659594-73660326
  hyper
gtctccaatgcagcccagacccgagaagaccagtgactgaacccagaggaaagttcccccagcgcggtgcaggagggggcctgggggtgtctcggagcctagaggcgccctgcctctcttggagctcccagcgcaaggcaggaaagttaactccggctgggaggcagggtcaggaggaggcatgcctgccaccgcgcagggcacccacaggatcatcgctgtggccccttacctgaagtcactgtaggggtggataatccaaaatccggccgacttgaccctctcctgttcgcgctccacggctttctggctgccgaacatccttagggagaatttgttgaccccgggttggagcatggccccgaactggcgctgcatgaagccggcctggcccaggcgcacctcggcctccgggaggatctggtcgccggcagccgcgcctccctccactttgatagcggtgtccaccgagggctgctcgcaggaggcggaggccggctgcggtggctgctggggcggcggcggcgaggctgcgggctgcgccgaggcgccggggcgctcgggctcggccgccaggcctgggggcgtcctgtcctcgccgggggacgcgtcgccctcggcgatgagccgccgctcctccgcggagtcatgcaggtgtccgtgactgctgccgctccccgtgccgccgctgccgccgccccggctgcccagcgaggccaggctcccgcggaa

SEQ ID NO: 126016 - DNA, 277 bp, Homo sapiens; identical to SEQ ID NO: 52242
  chr15:73660446-73660723
  hyper

SEQ ID NO: 126017 - DNA, 594 bp, Homo sapiens; identical to SEQ ID NO: 52243
  chr15:73660793-73661387
  hyper

SEQ ID NO: 126018 - DNA, 158 bp, Homo sapiens
  chr15:73661626-73661784
  hyper
tttcctcttgggaggcgaccgggttcgtctggatgcagagtcccggccttcccgcaaccctcctggagagggggcttccggaaatgcgccgcgtcggggaggctcccacggttttcctgtgacatgggcagggtgcgaaccccgcgccagtctttccc

SEQ ID NO: 126019 - DNA, 30 bp, Homo sapiens; identical to SEQ ID NO: 52245
  chr15:73661987-73662017
  hyper

SEQ ID NO: 126020 - DNA, 30 bp, Homo sapiens
  chr15:73925517-73925547
  hyper
cgagagggccagggcgctgggcagcgacga

SEQ ID NO: 126021 - DNA, 30 bp, Homo sapiens; identical to SEQ ID NO: 52246
  chr15:73926043-73926073
  hyper

SEQ ID NO: 126022 - DNA, 30 bp, Homo sapiens; identical to SEQ ID NO: 52247
  chr15:73928978-73929008
  hyper

SEQ ID NO: 126023 - DNA, 58 bp, Homo sapiens; identical to SEQ ID NO: 10263
  chr15:73976030-73976088
  hyper

SEQ ID NO: 126024 - DNA, 982 bp, Homo sapiens; identical to SEQ ID NO: 52249
  chr15:73976464-73977446
  hyper

SEQ ID NO: 126025 - DNA, 224 bp, Homo sapiens
  chr15:74044798-74045022
  hyper
cggagggctgggagggcgccgggatcccctcagcccacgcccggcattccccgggctctgcaccgtccgggattcgctctgtccagtccagatcggccgggtccgtgttccgctggggtctgccctgccctaccccgcccggagtgagctggcaccgccgggcgcccgggacgcgctcagcccggacccagaacgtccgtgccccggcacccgcggcgtccgga

SEQ ID NO: 126026 - DNA, 646 bp, Homo sapiens
  chr15:74045074-74045720
  hyper
cgctcccacggctcagttcacgttccgaaaggtccggaatccaccgggtccccgaggaggggcgatgtcagccgcggggacccggtccccgccgggcccagccgagagcgcgcgaagccgggggccccggccgggctgggttcggcggcccgggcgcaggcgggagcagcgccgggcggaggagaggagaggaggcgagaagaggcgaggggaggaggcgcggcgaggggaagggaggggagggggcgagcggcgggccgggccgggccggggcgcactaggctcgcagcctccgctcggctccgctacctcccgtccgttcgctctcggctccccgcctcagcagcccccgggcgccgggtcgccgccggtggggcaaacaggcgccgggtcggggctgggcctcccttcaccgcctcgccctgccctgccccgccgggctcccggggcctgggcccgctccccaagcgccgcggcgccgcgccgcccgcgccccggccgcccccggcccgccccgccgccccccgccggactggccgcccgggcgggcgctggctcccttaaaggccgcccggctcgcttggctccgcttgcctcggcgctgtcagggaaggggccggcccgccgcgccgggagggagctttta

SEQ ID NO: 126027 - DNA, 269 bp, Homo sapiens; identical to SEQ ID NO: 52252
  chr15:74219415-74219684
  hyper

SEQ ID NO: 126028 - DNA, 377 bp, Homo sapiens; identical to SEQ ID NO: 52253
  chr15:74219933-74220310
  hyper

SEQ ID NO: 126029 - DNA, 30 bp, Homo sapiens; identical to SEQ ID NO: 52254
  chr15:74229274-74229304
  hyper

SEQ ID NO: 126030 - DNA, 191 bp, Homo sapiens; identical to SEQ ID NO: 10268
  chr15:74268223-74268414
  hyper

SEQ ID NO: 126031 - DNA, 30 bp, Homo sapiens; identical to SEQ ID NO: 10269
  chr15:74284466-74284496
  hyper

SEQ ID NO: 126032 - DNA, 30 bp, Homo sapiens; identical to SEQ ID NO: 52257
  chr15:74284717-74284747
  hyper

SEQ ID NO: 126033 - DNA, 30 bp, Homo sapiens
  chr15:74286808-74286838
  hyper
agtgccagtgtgaacggatgaatggatcaa

SEQ ID NO: 126034 - DNA, 30 bp, Homo sapiens; identical to SEQ ID NO: 10270
  chr15:74287164-74287194
  hyper

SEQ ID NO: 126035 - DNA, 30 bp, Homo sapiens; identical to SEQ ID NO: 10271
  chr15:74392490-74392520
  hyper

SEQ ID NO: 126036 - DNA, 483 bp, Homo sapiens
  chr15:74420292-74420775
  hyper
accctctgcgctagcggcttggaaccttgtcaccctcccctcccccacccctacttccacacacctgattagttgtctgtttctttaatgatcaaagacgtgggcggcggcgggatgaggtcttggttcccggctccacagccctccctaactgtcattattaacgttataaacattagacccgcttctgcgcgccggacggcgccggacgaggtgcgcgcagtcttctagctgagctcggaggcagatccagaagtcgcggctcccaccccaggcctcggcggactctgcctggggcgactcgggctccagccctgcccgggcgggcactgggctctccagggtcgaaggcaggggtaaggggcgtctttcccccagggcagcctccgggaacaaaagcatttgctgtagagtgagctagagcctccgggcccgcgggagtcagctcccgcccaggggtggtcaccgcgtccttaaccaccc

SEQ ID NO: 126037 - DNA, 229 bp, Homo sapiens; identical to SEQ ID NO: 52261
  chr15:74421724-74421953
  hyper

SEQ ID NO: 126038 - DNA, 989 bp, Homo sapiens
  chr15:74421979-74422968
  hyper
cgtcgctgaaagaaatgtcggggtttcatcagagctagggagcgacagtcgggaacagcgagtctgccgaagccggctgttgtgtgagggtgtgagacggcggggcggtgaggggccaccgcggcttgggggatagtgcgtgtggggttgaccgtgtgtctgcttgagaggctgtgaagatatggggggcagatatgggagaaatgctcgggcctgaagtccccagcccaccgtgctcaagagtagcggacgttttgccaccatccttgtctgtgctactgtctgctgcagcttccgtgccccgttctcctggagcaggcaagacctggagtgaggtgcttgggtgcgctcgagagagcttccccctgctccacctgtcccgcggtgcgcgcaggccaacgcgtcgggcagtgggcttcaagcgctggtttagccacaaaagaccagaagtaaagagttccggcttaagaggctgggcagggctgcggtgggctggggaggggggtgtcccttcccagcacgccctgcagggctgtgcgttctggtgtcgggttagactagcaggcggggcgggggggttggggcggcggggcgggggagactagggcttatatcagcccagatccaggcaaaaatggtagggagggtgcggcgctctgctaacactatcaattatgcatcatgttgaacgtggcttcggggaggaggcggctagcagcggggggtgcgggagggaagggtccgcgcgagctcggctgcgcgcagctcagcgggtcccgctcgaagtctgtcggtgccaccgcctgcatttgcaaaaagagtttaaaggcaaagacacgccttccccccccacttcagccgcgcgcctttccttcccccaaattcctcaaagatggtttgtctcacgtgttgcagggcgtaaaagcggcttgcattcaattagcagcgaagctcgcgggcgctggcgggacaggcgcgtgagggtgagt

SEQ ID NO: 126039 - DNA, 15 bp, Homo sapiens
  chr15:74427056-74427071
  hyper
cgagaaaagctaccc

SEQ ID NO: 126040 - DNA, 514 bp, Homo sapiens; identical to SEQ ID NO: 52263
  chr15:74428168-74428682
  hyper

SEQ ID NO: 126041 - DNA, 574 bp, Homo sapiens
  chr15:74428716-74429290
  hyper
cgacgggatccggatggagccgagcccctccgtcctcgcgtctcggtcctcgcgtcgccccgccccacccgcccctgcttcggcgggaatcgtgtttgcccggcgtgtagtccctgacaagcgtgccctgtaggagaaaagtctgtgtcctgtgaagtgtgaccgtgtagtgtaggggggcgggcgggggggcggatgggcggggagggagggaaggggaggggcgcggcgcggcgactcggggcggggttcttttttccattttgaaagaaagcgtcggggttggggtggggggagtttcagtcctcgggatcagccctctccgcgaagcgcagcacaagcgcgggcctgggacggagtagccccccggagcccgtgcccttttctaaacgcgtctgtatgcagtcaataaaacaatcgatttgaactgggctcggtgactttttgtcaggggacagagggaggaggcctgggcgatgaaggaggaaaccgcggaaggaaggagcccccccagagcctcccgttggaatcttttgagtgatttcctgtttgcgtgaccatcctgtgatttttt

SEQ ID NO: 126042 - DNA, 30 bp, Homo sapiens; identical to SEQ ID NO: 52265
  chr15:74473110-74473140
  hyper

SEQ ID NO: 126043 - DNA, 127 bp, Homo sapiens
  chr15:74537932-74538059
  hyper
gtgtggctcctaggcaggcaccgcgacccgcgccatcacccggttgccatgggaacgcgcggcaggagcctaggcgacacgagcctgggtgggggttcggagagccgggcacaccccgagtcctcct

SEQ ID NO: 126044 - DNA, 30 bp, Homo sapiens; identical to SEQ ID NO: 52266
  chr15:74583574-74583604
  hyper

SEQ ID NO: 126045 - DNA, 234 bp, Homo sapiens
  chr15:74658162-74658396
  hyper
ggccgggcagagaaacgcataccgggtcgctccctgcttcgccgccgcctcctggcagggccagcgaagccagtgctccagcgcccccgtaacacctcaaagcgcacggagtccgtgttggggaacttggcggcagagtgactgggacctaggacctgcggtggggccgccgccgcctccgcggggccgagcgcctggacctcgccctgaggtaaacgcgggtcgacccggggg

SEQ ID NO: 126046 - DNA, 103 bp, Homo sapiens
  chr15:74658501-74658604
  hyper
cgcggcccgggcggcggcgtgcgctgggaggaatgctgggtctgtcgctagcgccaaacttgaccacgctgcgaccttttcactctgtgctctgaccttcaaa

SEQ ID NO: 126047 - DNA, 30 bp, Homo sapiens
  chr15:74667698-74667728
  hyper
aaccaagttcatctcgtgtcctctcaggac

SEQ ID NO: 126048 - DNA, 129 bp, Homo sapiens; identical to SEQ ID NO: 10276
  chr15:74685055-74685184
  hyper

SEQ ID NO: 126049 - DNA, 389 bp, Homo sapiens
  chr15:74725113-74725502
  hyper
atttggggacagagccgaatcggactgggggcggggaggcatttgtgtgcaatgcaggggaggggagatcagttcctcgcggcagaaagcctcaaacccccgcctaaccggctttctgtcccatagtacagggtctaaactgaggtgccctgggggagactccagtcccccaggttcttattatctaccctggcctaaaggctgcacccccgccctagatccaccgcctgggggtcccaacggccgtgccccacccaacgggcactgccccccaacgctggagccgatttctggtgacaactgccacgtgcgggcaaggggggagcggccggtcccggcattgctgaggcagcgccctggtaccccaagccgccgcaccgcaccatgtc

SEQ ID NO: 126050 - DNA, 680 bp, Homo sapiens
  chr15:74725548-74726228
  hyper
cgggccggggcgggggcgggggcaggcggcggggtctttgttcccgctgccgaagcgcggcggcggcggcaaggggtccgcgccccccttgccggcccagcctgcgccccgcgcgccagcagagcccgcagctcaaaaggagggtacccgggttggggtcccaggcggggaaaggtcctccgccgaagcccccgagccagaggacccagagtggctcggggccgagagaggggcccgccccctcccctggcgcccgggcgttgcggctcctggctgccagggacttggtgcgacttagccggggctccggcccccgccgctcgctcgccgcagcgttacagccggctctggtgtgccagcgtgtacactcacacacactcacccaaacccacacgctccacgcggggacagcgcggggacagcccgggacccgcagagctgcgcgcacgcactccctccgggtgcagcacactccgcacccgccccgcgcagcgtctgatcccgcgcctgaccggccgcgcggcgccgcctacctttccagacggcgaagatgcggggtccgctccttaggtggccctgggcggaggcggcggccgcccagagcagcagcagcagccgcagccgcagcggaagccccaaccgagccggcgggccagggacgcgggcgcgcggtgcgctgg

SEQ ID NO: 126051 - DNA, 230 bp, Homo sapiens
  chr15:74753654-74753884
  hyper
gaaatgtccggcgccggaatgtctgggtgctttggttggagagggtcccatttccagtcattcttcagcctggtgattcccgcgctcccctgaggagcatatgaagtacgtcggttctgccaggttggaacgcgctgctggacactcggccgtaaggcggatcccggatcccctcccactccgacccttccctccagaagggccggttcccaaacggcccctttagacac

SEQ ID NO: 126052 - DNA, 30 bp, Homo sapiens; identical to SEQ ID NO: 52272
  chr15:74833616-74833646
  hyper

SEQ ID NO: 126053 - DNA, 30 bp, Homo sapiens
  chr15:74907572-74907602
  hyper
ccagactccggccccgccagagtagctcta

SEQ ID NO: 126054 - DNA, 30 bp, Homo sapiens
  chr15:74908223-74908253
  hyper
cggagcctgggagacggtaagtgtgggctg

SEQ ID NO: 126055 - DNA, 177 bp, Homo sapiens
  chr15:74912312-74912489
  hyper
acccagctgaccagcgtccccatcccccttttggcagccatgaccgcctgccctaccagaggaggtaccgggagcgccgtgacagcgatacataccggtgtgaagagcggagcccatcctttggagaggactactatggaccttcacgttctcgtcatcgtcggcgatcgcgggaga

SEQ ID NO: 126056 - DNA, 278 bp, Homo sapiens
  chr15:74988540-74988818
  hyper
gtcttggctggaatcggggctctacccacgactccccagcctcgatgcctgggcccccctcttgcaggctcgatgaaaagcacccgcttcccctcctgttaccccagcgccaatcgcagagctggagcggaggactttcagggaggcctggtgacgtgacagcccctccgtgctaaactgcagctgtgggacttaataagtgcgacaaccccctgatggattaaagaaaacaagatattcctgccgtggtcgatcttcaaagcgtatcagcttcagcc

SEQ ID NO: 126057 - DNA, 138 bp, Homo sapiens; identical to SEQ ID NO: 52275
  chr15:75017909-75018047
  hyper

SEQ ID NO: 126058 - DNA, 8 bp, Homo sapiens
  chr15:75018311-75018319
  hyper
cgggggcg

SEQ ID NO: 126059 - DNA, 46 bp, Homo sapiens
  chr15:75018659-75018705
  hyper
agagcacagaaatccggcggcggggggccacggaaagactcgggcc

SEQ ID NO: 126060 - DNA, 487 bp, Homo sapiens
  chr15:75075779-75076266
  hyper
accagttcacttccccgcccattttgtacacccgggaaccgaggctcaaagggagaagttgctaccccaggcctctagtggagttaggctggctgtcctttcatccccagctatacagggctggatggctgtgggtggaaggaaaccaggcaggcaccttcacccactggggacacaggcccccagcccggccccagagggaccttgttggttgagcacgtgcttccctgcagagggctggagggagtgaaagggcttccggctccagctgtggctgggtcagctagcaggagatgtggggaatgtgtggtgtatggccatctgtgtggtgtggcaggaaggtccggtcctggccccggctctgagttgaaacaacctggtggtcagtcctgacccagcactcgccacacctatggcccagctggcacaggagcagccaagttcaggatataaatggggtcacatgggaaccgtggaagctctgtct

SEQ ID NO: 126061 - DNA, 715 bp, Homo sapiens
  chr15:75118799-75119514
  hyper
ggcgggagtggggagcgggcacgtggtccagccttctcagccccgtgctgccccccgcccccagtgaggaggggtttggggaggtgggggcgggcccgggcgggggcgggcggcgggcggtgccaagcgtggggcgcgggcccgcggcgggagctgtccgcgaaacctagtgctgaagtaggcgcggacgtgcccggtgcctggcgcgtggtagcaggcgcccggtgccccggccggcgaagaccatggcgttcatggtgaagaccatggtgggcggccagctgaagaacctcactgggagcctgggaggcggcgaggataagggagatggggacaagtcggcagccgaagctcagggcatgagccgggaggagtacgaggagtatcagaagcaactcgtggaagagaagtgagtgggatcccttcctggctccaacgacctcccctccccacccccacagctgctcagtccatccccgggccagcctcaggtcccaatcccttctcccctactttcctagacacggtaagagaccgggaggtgtcctctacactgcccccagacccatcctatctgacacccaaaaccccgctccagcatcatgctccggccaagggggagtggggggaggggcgaccggacgagggaccgaccggagcctgggacgaggaagggggtgcacgtgcgtttctgacgaaacgataatcccttaat

SEQ ID NO: 126062 - DNA, 227 bp, Homo sapiens
  chr15:75165609-75165836
  hyper
cagcgggcgaactccgcgaacgctgctgcctccgggcacccagacccagcggcgcttcgtgtagaccctccacttccgggagcgaggcagcggttctggcgcaggcgcgatgccctcccccgagggcgtggccctatgacggcaccggggtcgctccgccccccccccccccccccccgcccagcccacaatagtgcggtgggtgggcattcggcttccgtccacat

SEQ ID NO: 126063 - DNA, 30 bp, Homo sapiens
  chr15:75182440-75182470
  hyper
ggctggggtgtcggcgagtgtgttcgtgga

SEQ ID NO: 126064 - DNA, 30 bp, Homo sapiens; identical to SEQ ID NO: 52282
  chr15:75198941-75198971
  hyper

SEQ ID NO: 126065 - DNA, 30 bp, Homo sapiens
  chr15:75230043-75230073
  hyper
cagccaggaagttgcgcggggggaggcccc

SEQ ID NO: 126066 - DNA, 321 bp, Homo sapiens; identical to SEQ ID NO: 52283
  chr15:75230420-75230741
  hyper

SEQ ID NO: 126067 - DNA, 268 bp, Homo sapiens; identical to SEQ ID NO: 52284
  chr15:75248822-75249090
  hyper

SEQ ID NO: 126068 - DNA, 128 bp, Homo sapiens
  chr15:75249801-75249929
  hyper
aaaggcggtaggctcgctccacccaggccctagagcccacccttagagctgcgcgctttagggtgagccaggcacgatgccttgccaacgtggccgcccccttcctcccaggcggaattcgctcaggc

SEQ ID NO: 126069 - DNA, 425 bp, Homo sapiens
  chr15:75250988-75251413
  hyper
cttgggagcggccctcggtccctgctgttcagaaccgggatttaccctcttaccacttcctgggagtggctgcggcgactggaccttggcaccgcaatgtgtgaatggctgaccccctccccgtctcctggtgggatcaggaaccctcggggtatgctccgaaccgggacttcggtctcggtccagtctccatgggccccacacagcggtgggggctggaggcacagcagccttgggaagaaacaaagactgtccgcagcgcgtagcggggcgtggagaaccgagggctgtgtaaggtcaggccctgagaaaaagcccccgaaaggctggaagttacgttggaacgggctggttgtggaaggagcgagctctccgtccccgggagtatgcaagtttgggctgcacgatcacttggaagggattgg

SEQ ID NO: 126070 - DNA, 422 bp, Homo sapiens
  chr15:75251478-75251900
  hyper
cggttctgcgtccggccaggttggccctcgaggacccagccgtccccaacctcctaaactgctgtcggatgtagaagactcgcattcactgctctccacagtcggtgaagggagaacgccgaaaagggccgcattccctcctgccggtcccctccccttcccgcgctccctctgcagcacttaaaatgtaaatgtacatcgtgattagccgcggggtcgctaattacagctgaagccattcattacactgtcagcgcgcgtcgcagcccgccggctgtgcgctccctcctagccgtgaaggggtgtagggggtgggggcgggagatgcggggagtgagggaggaaggatggggtgctgtgaattagggtaatgtggcaggcctggaggaagctggagtgggagagagcgggcagcgagcggg

SEQ ID NO: 126071 - DNA, 30 bp, Homo sapiens; identical to SEQ ID NO: 10283
  chr15:75315709-75315739
  hyper

SEQ ID NO: 126072 - DNA, 159 bp, Homo sapiens
  chr15:75316096-75316255
  hyper
tgaagctctgtttgcgactgtgcgtgggtaggcggccgtccatctgtgcgacctcactttcccggctgtacgggtggggccgcctggagcaggagggacccccgagccctgagtggagggtttgcatctgtacccgtccagcccgactttgtgctgctc

SEQ ID NO: 126073 - DNA, 149 bp, Homo sapiens
  chr15:75470761-75470910
  hyper
gtggctcggccactgcgccaggtcttggaacatctaaggcagaaacaggaccaacacccgcaagcctccaacagcccctggggctccgtccagccgttggggtggaggggttggggggaggtgcaggggcgggcactgtggggggtggg

SEQ ID NO: 126074 - DNA, 22 bp, Homo sapiens
  chr15:75471217-75471239
  hyper
cggtttccccatctgtgaaacc

SEQ ID NO: 126075 - DNA, 30 bp, Homo sapiens
  chr15:75493804-75493834
  hyper
ggacaggggaatgccggcacctactgtgtg

SEQ ID NO: 126076 - DNA, 92 bp, Homo sapiens
  chr15:75495097-75495189
  hyper
atgtgggccatgcacgtacgtgcaggcacgggtttgcatgcgtggcggcggcctgtgtgtcagcctgctggatgcacgtgcgtctcggcgcc

SEQ ID NO: 126077 - DNA, 374 bp, Homo sapiens
  chr15:75639262-75639636
  hyper
ctgccagcactaacccgcagctatactccagccacacaggacttctttgagttctttcagtgaccaatctctttctcgcctcagggcctttgtactggcggttccttccgccggacacgtcgggtttcctcgtttttgcggactggcgctttctgatttcagagactctccgcaacagaaccatctcaagtgggtctacctcctcgcctttttttgttgttgttgttgcttggctgcgcttctgacagggcaggccgtgatgatgtttgtttatgagttaggtctgactgttcgttggtgcttaagatccccaccgggtccctagggcctgtgcgtaccgcgcacctgtgcacgtcctgcgcgcagctgcaggc

SEQ ID NO: 126078 - DNA, 30 bp, Homo sapiens
  chr15:75639966-75639996
  hyper
tggctgcagtggcgacgagcggaacggagt

SEQ ID NO: 126079 - DNA, 30 bp, Homo sapiens
  chr15:75640259-75640289
  hyper
acgggcgtctgccgtcgctaagtgccccct

SEQ ID NO: 126080 - DNA, 5 bp, Homo sapiens
  chr15:75640490-75640495
  hyper
gggga

SEQ ID NO: 126081 - DNA, 455 bp, Homo sapiens
  chr15:75640520-75640975
  hyper
cgcccgcctcgtcctggcccctgccctgacccgggggcggccgcggggatgtccggtccgtggggcaggcccggttctcgctgcggccaagcggccgattcggccgctcccgccgctcccccgcgccaggccgagcttcgctctttccctcggtggtgagcggccagatccaggcgggtcctaagtgtggggggaggggggcgcagggaggggcggccacgcgatcctaagaccctttcagatggtgggagagcctggagaaagagacagcgtgtgcggagggggtgctccctcagatggggggtcaggaagtctccctcaagtgtctgggacagagggacagcaggggccaaggcggagatgagatccgtgagtgaggggagccgggaagaagtaaggctgcagccgcggccccgcaaggattgggactttcgtctaaacgcggtggaagccca

SEQ ID NO: 126082 - DNA, 30 bp, Homo sapiens; identical to SEQ ID NO: 52292
  chr15:75660374-75660404
  hyper

SEQ ID NO: 126083 - DNA, 211 bp, Homo sapiens
  chr15:75661044-75661255
  hyper
acaccggcggctctcggaagcccagctgctgtctgaactttgagccgagttggaagctagaaactgtttttgaggctctcctatgttgtccgaaatagtgggccgcagggaaaatctcaaaataaaatgggaaatttgacgattagaactctcgaaagtctcaagacagagacttaggccattcggcaagacaggcgggagcctcagctgc

SEQ ID NO: 126084 - DNA, 30 bp, Homo sapiens; identical to SEQ ID NO: 10286
  chr15:75743121-75743151
  hyper

SEQ ID NO: 126085 - DNA, 203 bp, Homo sapiens
  chr15:75744074-75744277
  hyper
ggaagactcagcttcgttccaatacaggacgcaatacccgcccgtcaaagactcagccaaccaccgaggcctgtcttatgattttcccgccccttccccctcgactggtaggggagggggagccgctctccttctccacgcccctattggcggggagcttccctaactcaaccccgcctattggagacggactgctgaagccc

SEQ ID NO: 126086 - DNA, 30 bp, Homo sapiens
  chr15:75744600-75744630
  hyper
aattccaccctgcgcgaggaggctgaacct

SEQ ID NO: 126087 - DNA, 31 bp, Homo sapiens; identical to SEQ ID NO: 10287
  chr15:75745114-75745145
  hyper

SEQ ID NO: 126088 - DNA, 30 bp, Homo sapiens
  chr15:75745214-75745244
  hyper
accttctccttggccgggagtgttaatagc

SEQ ID NO: 126089 - DNA, 30 bp, Homo sapiens
  chr15:75746543-75746573
  hyper
cgataggcggagctcgggagaatgtcatcc

SEQ ID NO: 126090 - DNA, 109 bp, Homo sapiens
  chr15:75748048-75748157
  hyper
ccagaccgagcggccggcggactagccccccaaacgcctgagattggggggaccaaattaaaagcagctgtttaacataccttccgagccaggcgaggagtcctgaatg

SEQ ID NO: 126091 - DNA, 30 bp, Homo sapiens
  chr15:75748553-75748583
  hyper
gacctaaccgtgttcggtccgctctgttag

SEQ ID NO: 126092 - DNA, 30 bp, Homo sapiens; identical to SEQ ID NO: 52295
  chr15:75871792-75871822
  hyper

SEQ ID NO: 126093 - DNA, 30 bp, Homo sapiens
  chr15:75917777-75917807
  hyper
ggccatgcatgattcgcccctgccccacag

SEQ ID NO: 126094 - DNA, 30 bp, Homo sapiens
  chr15:75931938-75931968
  hyper
caaagtgggagatccgctaggcttccagat

SEQ ID NO: 126095 - DNA, 30 bp, Homo sapiens; identical to SEQ ID NO: 10288
  chr15:75932567-75932597
  hyper

SEQ ID NO: 126096 - DNA, 183 bp, Homo sapiens
  chr15:75932854-75933037
  hyper
ttcagagtctcccccgcaagagctgaagaggccatttctggggaagaggggtgactgcggcttgttgattgggtttactgtgctaacttgcactgggctcctgccatgccttgggggagcttgccggagccggctctcctggggctgacctggtagtccccgccgcccgccagcgtcaggtcc

SEQ ID NO: 126097 - DNA, 356 bp, Homo sapiens; identical to SEQ ID NO: 52298
  chr15:75939284-75939640
  hyper

SEQ ID NO: 126098 - DNA, 73 bp, Homo sapiens; identical to SEQ ID NO: 52299
  chr15:75939671-75939744
  hyper

SEQ ID NO: 126099 - DNA, 220 bp, Homo sapiens; identical to SEQ ID NO: 52300
  chr15:75976175-75976395
  hyper

SEQ ID NO: 126100 - DNA, 30 bp, Homo sapiens; identical to SEQ ID NO: 52301
  chr15:76005072-76005102
  hyper

SEQ ID NO: 126101 - DNA, 30 bp, Homo sapiens
  chr15:76030550-76030580
  hyper
ttgggggcaggctccgccagctctccgcca

SEQ ID NO: 126102 - DNA, 30 bp, Homo sapiens; identical to SEQ ID NO: 52302
  chr15:76050980-76051010
  hyper

SEQ ID NO: 126103 - DNA, 30 bp, Homo sapiens
  chr15:76136422-76136452
  hyper
cttctggcccatctcggtccccgtctccta

SEQ ID NO: 126104 - DNA, 59 bp, Homo sapiens; identical to SEQ ID NO: 52303
  chr15:76136831-76136890
  hyper

SEQ ID NO: 126105 - DNA, 526 bp, Homo sapiens
  chr15:76351369-76351895
  hyper
gctgcctccaaggggcgcaatgttactttttatgcatcaagcacggataacacatacagcacataagcaggtcgacagtgtatctgcggtactgggatttcacggggaaaggagatggggacgtgtaaaaagcctttttaagagtcagataacgaaaaacggaaaaagaggagaaacacggtcctacaagggtcctgagctgaggccatcaaatgaatgtactgacaggtatttttctcccaggcagccaactgagagtcaaggcactctgaccgtgctatgactccggccacacagaaagaggtgttttcccctcggtggcctccaagcgcagcgggcactgcgtgccatccgctccctcaccgggcgccccgcgcggatgaaacggagcaactgggaaagagctctggaaactgcaaagcgctgcgccaaagcgacgggaggttcccattctcagctgtacgaaatcccgcgggggtcctccgcttccccgagcgacgccctcggcctccgcacttgttgcttc

SEQ ID NO: 126106 - DNA, 30 bp, Homo sapiens
  chr15:76352104-76352134
  hyper
cctagacagccgcgccgccgttccgcagcc

SEQ ID NO: 126107 - DNA, 160 bp, Homo sapiens
  chr15:76352474-76352634
  hyper
ggctgggatcttgccgctgaccttcatccccctggccgggggagccaggcgagggtgcgtggggcagcccagggcttcagctccagcctggagacctgcttcttgtcacatgcttcttatttatttttgcaaactgccctggttcgggtccagctgcaga

SEQ ID NO: 126108 - DNA, 30 bp, Homo sapiens
  chr15:76603642-76603672
  hyper
ggttgacggggggccgtccctgggttcgcc

SEQ ID NO: 126109 - DNA, 30 bp, Homo sapiens
  chr15:76603970-76604000
  hyper
gagtaagcccgggccgcggagcggcagaga

SEQ ID NO: 126110 - DNA, 72 bp, Homo sapiens; identical to SEQ ID NO: 52304
  chr15:76627464-76627536
  hyper

SEQ ID NO: 126111 - DNA, 512 bp, Homo sapiens; identical to SEQ ID NO: 52305
  chr15:76627575-76628087
  hyper

SEQ ID NO: 126112 - DNA, 699 bp, Homo sapiens; identical to SEQ ID NO: 52306
  chr15:76628326-76629025
  hyper

SEQ ID NO: 126113 - DNA, 65 bp, Homo sapiens; identical to SEQ ID NO: 52307
  chr15:76629162-76629227
  hyper

SEQ ID NO: 126114 - DNA, 630 bp, Homo sapiens
  chr15:76629494-76630124
  hyper
cggctaggatgacttcgggctgcgaaatctgcttctgttttgcgcaaaggcaattaggtttgatttagggatgtgggtttttttttttttggttgttgtttgtttgcctttcggtttttcaaagctaggaagctttctttcgcttgctctgggatatttaaactaagaaatgtctgagaggatgagcggggactgccgaaagacgatgtgtctgtgttgggataggaggcagccgctgtgagtgggagtgtgtgagcggaaatgccaggacagcaccgttaggtgttgatatccaggcgtccgcagtgcctgtgtatttactctcttcttagtttcgtgtttgcgtttagtttcaagacacgtcgacaaaacgactgtcattaatgaatgtaataacgaaatatttggggtgggggacagaagaaaccttcagcaatccacaagatactggtttttcgtttccaatgccctggacctttagagagctcatcatctttccttatggtcgcaagtcttgaaagaaagagcaagagagcgagcgggttgggttggggctggagtagccgaggccggcctgggtccgggcagtcaggcctgacgcggccccgcgcccttccccggcagagaagc

SEQ ID NO: 126115 - DNA, 399 bp, Homo sapiens
  chr15:76630519-76630918
  hyper
ggagccgtagcagccagggagatgagggcggccgcaggcccagcgctgacaccgccgcaccttgggcccgcaggctgttcggcatcaagtgcgccaagtgccaggtgggcttcagcagcagcgacctggtgatgagggcgcgggacagcgtgtaccacatcgagtgcttccgctgctccgtgtgcagccgccagctgctgcctggggacgagttctcgctgcgggagcacgagctgctctgccgcgccgaccacggcctcctgctcgagcgcgccgcggccggcagcccgcgcagccccggcccgcttcccggcgcccgcggcctgcatctgcccggtaagcgcgccggggcctgtgccggggtgagcggggtgtatgtgcgtgcgtgtgtgtaggggt

SEQ ID NO: 126116 - DNA, 652 bp, Homo sapiens
  chr15:76632517-76633169
  hyper
cgaaatcgggccccggggggctgggccacccggaggttgggctcggggcgggtgggtggcggcccctcgctaacctctggcctcaccctgtcctggcagacgctgggtcgggccggcagcccgcgttgcgcccgcacgtgcacaagcagacggagaagacgacccgcgtgcggactgtgctgaacgagaagcagctgcacactctgcggacctgctacgccgccaacccgcggcccgacgctctcatgaaggagcagctggtggagatgaccggcctgagcccgcgggtcatccgcgtctggttccagaacaagcgctgcaaggacaagaagaaatccattctcatgaagcagctgcagcagcagcagcacagcgacaagacggtgagcagccgctgggccggaggctcgagtcgggtgggggctgcgcttccgccgcggtatctgcgtgcccttttctgggcgagccctgggagatccagggagaactgggcgctccagatggtgtatgtctgtaccttcacagcaaggcttcccttggatttgaggcttcctattttgtctgggatcggggtttctccttgtcccagtggcagccccgcgttgcgggttccgggcgctgcgcggagcccaaggctgcatggcagtgtgca

SEQ ID NO: 126117 - DNA, 778 bp, Homo sapiens
  chr15:76633206-76633984
  hyper
cggcagctgcagaaaggtgggagtgcaggtcttgcctttcctcaccgggcggttggcttccagcaccgaggctgacctatcgtggcaagtttgcggcccccgcagatccccagtggagaaagagggctcttccgatgcgatcgagtgtgcgcctccccgcaaagcaatgcagaccctaaatcactcaaggcctggagctccagtctcaaaggtggcagaaaaggccagacctaactcgagcacctactgccttctgcttgccccgcagagccttcagggactgactgggacgcccctggtggcgggcagtcccatccgccatgagaacgccgtgcagggcagcgcagtggaggtgcagacgtaccagccgccgtggaaggcgctcagcgagtttgccctccagagcgacctggaccaacccgccttccaacagctggtgaggccctgccctacccgccccgacctcgggactctgcgggttggggatttagccacttagcctggcagagaggggagggggtggccttgggctgaggggctgggtacagccctaggcggtgggggagggggaacagtggcgggctctgaaacctcacctcggcccattacgcgccctaaaccaggtctccctggattaaagtgctcacaagagaggtcgcaggattaaccaacccgctcccccgccctaatccccccctcgtgcgcctggggacctggcctccttctccgcagggcttgctctcagctggcggccggtccccaagggacactttccgac

SEQ ID NO: 126118 - DNA, 200 bp, Homo sapiens
  chr15:76634013-76634213
  hyper
cgcgtgcctcttcacctgcctcttcccggtgtttccgccgccccaggtctccttctccgagtccggctccctaggcaactcctccggcagcgacgtgacctccctgtcctcgcagctcccggacacccccaacagtatggtgccgagtcccgtggagacgtgagggggacccctccctgccagcccgcggacctcgcatg

SEQ ID NO: 126119 - DNA, 295 bp, Homo sapiens
  chr15:76634516-76634811
  hyper
gcccacgcggacccccgccctgccccagctcagcgctccctggcggcttcgcccgggctcctagcggggaaaaggaaggggataactcagaggaacagacactcaaactcccaaagcgcatgattgctgggaaacagtagaaaccagacttgccttgaaagtgtttaagttattcgacggaggacagagtatgtgagcctttgccgaacaaacaaacgtaagttattgttatttattgtgagaacagccagttcatagtgggacttgtattttgatcttaataaaaaataataac

SEQ ID NO: 126120 - DNA, 267 bp, Homo sapiens; identical to SEQ ID NO: 52312
  chr15:76634842-76635109
  hyper

SEQ ID NO: 126121 - DNA, 155 bp, Homo sapiens; identical to SEQ ID NO: 52313
  chr15:76635575-76635730
  hyper

SEQ ID NO: 126122 - DNA, 261 bp, Homo sapiens; identical to SEQ ID NO: 10296
  chr15:76638235-76638496
  hyper

SEQ ID NO: 126123 - DNA, 378 bp, Homo sapiens; identical to SEQ ID NO: 10297
  chr15:76638855-76639233
  hyper

SEQ ID NO: 126124 - DNA, 21 bp, Homo sapiens
  chr15:76639453-76639474
  hyper
gccgacacttgcctccgtacc

SEQ ID NO: 126125 - DNA, 22 bp, Homo sapiens
  chr15:76639732-76639754
  hyper
ggagcgccgcgctggacacccg

SEQ ID NO: 126126 - DNA, 30 bp, Homo sapiens; identical to SEQ ID NO: 52316
  chr15:77196825-77196855
  hyper

SEQ ID NO: 126127 - DNA, 30 bp, Homo sapiens; identical to SEQ ID NO: 52317
  chr15:77224349-77224379
  hyper

SEQ ID NO: 126128 - DNA, 30 bp, Homo sapiens; identical to SEQ ID NO: 52318
  chr15:77362705-77362735
  hyper

SEQ ID NO: 126129 - DNA, 30 bp, Homo sapiens; identical to SEQ ID NO: 52319
  chr15:77363284-77363314
  hyper

SEQ ID NO: 126130 - DNA, 210 bp, Homo sapiens; identical to SEQ ID NO: 52320
  chr15:77711491-77711701
  hyper

SEQ ID NO: 126131 - DNA, 30 bp, Homo sapiens
  chr15:77712413-77712443
  hyper
acggccgccgccgccgagcaactgacactg

SEQ ID NO: 126132 - DNA, 30 bp, Homo sapiens
  chr15:77712723-77712753
  hyper
tgcctgattggctgcggagggcggggctaa

SEQ ID NO: 126133 - DNA, 30 bp, Homo sapiens
  chr15:77713247-77713277
  hyper
gcgtgaagtgaaggcgattgagaggggctg

SEQ ID NO: 126134 - DNA, 30 bp, Homo sapiens; identical to SEQ ID NO: 52321
  chr15:77713607-77713637
  hyper

SEQ ID NO: 126135 - DNA, 30 bp, Homo sapiens; identical to SEQ ID NO: 52322
  chr15:77789292-77789322
  hyper

SEQ ID NO: 126136 - DNA, 30 bp, Homo sapiens
  chr15:77897110-77897140
  hyper
agacgggcatgcgagcgtgtctgcgcctct

SEQ ID NO: 126137 - DNA, 116 bp, Homo sapiens
  chr15:77924997-77925113
  hyper
cgctggggccggggtcgaggccgggcgcgctccgccgcggggccggggccggcgggcagcggccgcgcatgctgctcggcgccccgcgtcgggagaggggccggagcggcgcgggt

SEQ ID NO: 126138 - DNA, 381 bp, Homo sapiens
  chr15:77925411-77925792
  hyper
gaggggcgccccagccgctgccctgcacgcttagggcagcgaaacaggcaggggtgcgcaggcgaggggcgcaccagccaggcgctccagctctgcacacggccgcgcccctccgggtccggggctctgggcgagtcccgggccagccgggtgtcggggagtccggcgtgcggtcctccctgggtgtatgcgcgcacaccgttgtgtgtgatttttgtgttgccacatgcgtgtgcatgtgagcgcgcgagtgtgtttacacgtgttaactgggctgtggacgaacacacgcacgaggacggacagggctccctacacgaacagggttgtttggagggcggcatggggaggccgaccgggagcccccgtcctggccctgtc

SEQ ID NO: 126139 - DNA, 302 bp, Homo sapiens
  chr15:77927040-77927342
  hyper
gcgcaggcgactccccggtccctcaactccgcgctgcctggacccctccccagactccccagcccccccaccccggctgtttgtgagctacccgtgcgctcccgccctcccgcgccgcctcctcccaccagcccgacaggaatagacgctcgctggctcctgcgtaaaggctccgccaggcacccggcgggcgcgcagacccgctggggggcgggggcgggggcgagggctattcctggtgcggtgactgacgcaggcaaggcgcggccaccacatctctccgcccccgactcacctgctcc

SEQ ID NO: 126140 - DNA, 143 bp, Homo sapiens; identical to SEQ ID NO: 52323
  chr15:78110976-78111119
  hyper

SEQ ID NO: 126141 - DNA, 95 bp, Homo sapiens
  chr15:78111195-78111290
  hyper
cgcacccctccgcccgccagacggcccggcccgcgcccccgccccactcccctcgcgttctcttctctggaaaggaaggccggagttgcaccctc

SEQ ID NO: 126142 - DNA, 370 bp, Homo sapiens
  chr15:78111498-78111868
  hyper
cgcccaatcagaggccgcgcgcgccgcgccgccggcgggcagacacaccggctccccggcctgcgcccctgcggccctggccccgctgcagcgtcccggcccggccacactcaccgtcccgggcgcgccgtccgcgcgcggctccgctccgggccggcatcccccggctcggctgcctccggtccccgctccggcctcggttcccgctccgcagggctcggctccgcgatggtggccgcggcggcgagcgcggcagggagggcgtgtgtatgcgcgtgagagcgcgcagcgtgtgcatgtgcgtgtgcgcgggagggtcccggctcccctgcgcgtcccgctcctgcctcctgctcgccacgatgcgatg

SEQ ID NO: 126143 - DNA, 647 bp, Homo sapiens
  chr15:78111916-78112563
  hyper
cgcacacacgcgcacacccaggcgcgcacacccggctccgcactcccgactcgccctcctggagcgctcacaaagaccccctgccgggacggccggagcctgcggagcgcggccctgggcccctccgggacccgccggccttaggtgccccgctgctccccgtagggaccccgcgggcggcccggctcccgcaccctgcctggccgggccgcggccgcgctcccagcccgaacctgggcccaggtgccgactcgggcttctcgcactcccgcgggaagcgccggccccctccgcggcgccgccgcccttctcccccccttccagtccggcctctccggcgcctccctgccttgtcccacctgcccagcccggtcctcgttctccccgctgctctccgtctgtctcgccgccgccctctcccgcgccccttcctccccaccgccctgcgctgcctctcacattctccgcattacagcgggtgccgcccgccgctcgcggggcccagggttcgagcgcgcagtgggcggcgaggggacccgccacgcccggccccgccgccccctccgctctccgcggctccgcggctgctagctccggcctggcgctagggtggcgacgtcccgcgctagcctcggctgccgctgaca

SEQ ID NO: 126144 - DNA, 30 bp, Homo sapiens; identical to SEQ ID NO: 10300
  chr15:78112803-78112833
  hyper

SEQ ID NO: 126145 - DNA, 465 bp, Homo sapiens
  chr15:78236698-78237163
  hyper
aagccggccggcctgcgctgtcttacccgccccgtacccccgcccctgtctcgggagcggagtagcggtggacttttctcacgcccgcacacactgtttgcggagaggccagggcagacaacctccacccgtttccggagccactggcgccccctcattcccgctccagcagcccatgcctcgcttcacccctggtgcctcatcatcgcaccaggaagccagggcccgggaatttctttttccggtccgacagggtcaactgagtcgacgatcacttgacttggactaacggcctctgggagggcggggcctgctcgagtgaggccgggagcggaccgcagcccgctggaggtgccgggggcgaaatgctggcgtctcctcctccgtctcccagaatccttccctggaaaaaaacagcatccaccgtcagtttaactgaggaccgaattaaggcattaggaaaga

SEQ ID NO: 126146 - DNA, 30 bp, Homo sapiens
  chr15:78369819-78369849
  hyper
cgaaccagcggctgcggtagccacgcaggg

SEQ ID NO: 126147 - DNA, 30 bp, Homo sapiens; identical to SEQ ID NO: 52330
  chr15:78370171-78370201
  hyper

SEQ ID NO: 126148 - DNA, 30 bp, Homo sapiens
  chr15:78441443-78441473
  hyper
tcttaccttaacagcgagtcaatgaaccag

SEQ ID NO: 126149 - DNA, 30 bp, Homo sapiens; identical to SEQ ID NO: 52331
  chr15:78441797-78441827
  hyper

SEQ ID NO: 126150 - DNA, 30 bp, Homo sapiens
  chr15:78442145-78442175
  hyper
cgcttccccggctgcggccctgctgcggga

SEQ ID NO: 126151 - DNA, 189 bp, Homo sapiens; identical to SEQ ID NO: 52332
  chr15:78556920-78557109
  hyper

SEQ ID NO: 126152 - DNA, 30 bp, Homo sapiens
  chr15:78591701-78591731
  hyper
ctcccctcaggccccgtacaccgaggaaca

SEQ ID NO: 126153 - DNA, 30 bp, Homo sapiens
  chr15:78592139-78592169
  hyper
tccggaagcgcagacgtttagcttccggca

SEQ ID NO: 126154 - DNA, 111 bp, Homo sapiens; identical to SEQ ID NO: 52333
  chr15:78632557-78632668
  hyper

SEQ ID NO: 126155 - DNA, 424 bp, Homo sapiens
  chr15:78632683-78633107
  hyper
cgcaaagcgccagtctccgccttgcgagctcagagtgtgcccgctgcgccgccgctgtccgtacctgccgccgccgccaccgccaccatgcccaacttcgccggcacctggaagatgcgcagcagcgagaatttcgacgagctgctcaaggcactgggtaagctggtgcagagggcgcgccccgacggggagatgcggcccggaggtgccctggtcccggaagtgccccggtcctggagggggtggaagttggggagcccaggcaggagggagtccccggggcaatagatcgccttgtctcccaggcgcaccgggtctcggagaagctggtagagatcccggaacccacgcgttcagcgaacgtttgctgaatgtttggcgccctcctcgatggtgcggactttatctcgtgctagatcatagc

SEQ ID NO: 126156 - DNA, 175 bp, Homo sapiens
  chr15:78633326-78633501
  hyper
cggtcccgagactggcggcgaggccccgtgacccaagcctgtggtgcaccctgcgcaggtgtgaacgccatgctgaggaaagtggccgtagcggctgcgtccaagccgcacgtggagatccgccaggacggggatcagttctacatcaagacatccaccacggtgcgcaccactg

SEQ ID NO: 126157 - DNA, 30 bp, Homo sapiens; identical to SEQ ID NO: 52336
  chr15:78731089-78731119
  hyper

SEQ ID NO: 126158 - DNA, 30 bp, Homo sapiens; identical to SEQ ID NO: 52337
  chr15:78799492-78799522
  hyper

SEQ ID NO: 126159 - DNA, 30 bp, Homo sapiens
  chr15:78799791-78799821
  hyper
cgcagcctcctaggcggggccgggaaaaaa

SEQ ID NO: 126160 - DNA, 30 bp, Homo sapiens; identical to SEQ ID NO: 52338
  chr15:78800230-78800260
  hyper

SEQ ID NO: 126161 - DNA, 30 bp, Homo sapiens; identical to SEQ ID NO: 52339
  chr15:78833161-78833191
  hyper

SEQ ID NO: 126162 - DNA, 30 bp, Homo sapiens
  chr15:78858574-78858604
  hyper
cacctcctgcccgccgcctcttcctccatc

SEQ ID NO: 126163 - DNA, 146 bp, Homo sapiens; identical to SEQ ID NO: 52340
  chr15:78912225-78912371
  hyper

SEQ ID NO: 126164 - DNA, 586 bp, Homo sapiens; identical to SEQ ID NO: 52341
  chr15:78912441-78913027
  hyper

SEQ ID NO: 126165 - DNA, 375 bp, Homo sapiens; identical to SEQ ID NO: 52342
  chr15:78913094-78913469
  hyper

SEQ ID NO: 126166 - DNA, 122 bp, Homo sapiens
  chr15:78913480-78913602
  hyper
cgaccagatctgagcaggtgctgtcaccaccaccaggaaggagagggactcagtttctgtcccaggtttccggggcgtgtgcagctcccgcagggggttgggaccaccgggctaggcgggcg

SEQ ID NO: 126167 - DNA, 30 bp, Homo sapiens; identical to SEQ ID NO: 52344
  chr15:78933615-78933645
  hyper

SEQ ID NO: 126168 - DNA, 30 bp, Homo sapiens
  chr15:79102745-79102775
  hyper
cgcccggcaggtcgccgccaaacaagagtc

SEQ ID NO: 126169 - DNA, 186 bp, Homo sapiens
  chr15:79103103-79103289
  hyper
gggtaaaccgcgctccgtccagcccactcggacgagagctctcccgggagccaggcgcgttgctgcacccgaggtggggaaaccggagcccgaagagcggaaggggcttattccaggcgacaggcagtgtcagtaactgaatcaggggccgaggaagtttccccagaagcgcggcttcgctcccgg

SEQ ID NO: 126170 - DNA, 30 bp, Homo sapiens; identical to SEQ ID NO: 52345
  chr15:79103703-79103733
  hyper

SEQ ID NO: 126171 - DNA, 30 bp, Homo sapiens; identical to SEQ ID NO: 10305
  chr15:79125413-79125443
  hyper

SEQ ID NO: 126172 - DNA, 30 bp, Homo sapiens
  chr15:79166142-79166172
  hyper
ctgctattcttgggcgcagtgccgagatcc

SEQ ID NO: 126173 - DNA, 102 bp, Homo sapiens
  chr15:79237307-79237409
  hyper
gcagcgtggcccacatcgcagcgctggcggcttggctcttgcgctcagggtccgcggaggtggcggcccagagcgtcaactgggagcgcggggggggagcgg

SEQ ID NO: 126174 - DNA, 18 bp, Homo sapiens
  chr15:79381727-79381745
  hyper
ggctcacccccaccccgc

SEQ ID NO: 126175 - DNA, 1285 bp, Homo sapiens; identical to SEQ ID NO: 10307
  chr15:79382098-79383383
  hyper

SEQ ID NO: 126176 - DNA, 771 bp, Homo sapiens; identical to SEQ ID NO: 52349
  chr15:79383438-79384209
  hyper

SEQ ID NO: 126177 - DNA, 310 bp, Homo sapiens
  chr15:79502050-79502360
  hyper
gggcggggagggctcgccgggaaatcaaacgtccatttacatcttgtcctgcaaagcttcatcaaaacttctttgccggccagtcacgtccccttatcacttttccagcccagctttgtgactgtaagtgttggacggagaactgataagggtaggtgattgacactcacagcctccggaacccccgcgccgcctgcacttgcgtgatggggaaaacctggcgttcccgctctgggtgcccgaggacagcaggggattccaggaggagaccttgggcatagggggcccaggtatgcgccccctgcctgag

SEQ ID NO: 126178 - DNA, 30 bp, Homo sapiens; identical to SEQ ID NO: 10310
  chr15:79551660-79551690
  hyper

SEQ ID NO: 126179 - DNA, 544 bp, Homo sapiens
  chr15:79574864-79575408
  hyper
gaccccaggagtggccgcgcctgctccgcgctcaccctcggggagtctaggagccccctgctaagttgctgagcgagtcggagccccaagagctagggtcgagggggtggggcagcaggcgcctctgccgaggctgcaggtaggcacttccccacccccgcggccccctccttcctccttcctcgcagctcgcacacccacacaaccctcgcccgtcgcggctggagagctgctctcggcgccagcgggcagcagcgcgtcgtcagccagcacagccggccgaagaccaagccggaggtctggggctgcgcagagacctgcacacccgcagcgcggaaccgggggcgattcctatctttctttcatgcttctttctttttcttaaaaccaaaccaaaccaaaccaaacccaaaactcccctgctcccaccgcaacttggaggagcggtggaccgatttgaaggaactgacgcagaggttttattcacgaaccttgaagaagttctgggcaagtgactcaacaggacccgcggggcccggggtag

SEQ ID NO: 126180 - DNA, 26 bp, Homo sapiens
  chr15:79576065-79576091
  hyper
cacactctgccggcgcggccggagcc

SEQ ID NO: 126181 - DNA, 159 bp, Homo sapiens
  chr15:79576118-79576277
  hyper
cgagccccgccgcccgaggcgcacagtgagcgtggaacagcccggctccctagcccccggccaacgctgctctcagttcagggcagctacgtaacaccgcccctagctccgcgccagaaagggctctcgaatcgcaaaagcaaacgtgttcgatttctg

SEQ ID NO: 126182 - DNA, 111 bp, Homo sapiens; identical to SEQ ID NO: 52355
  chr15:79603181-79603292
  hyper

SEQ ID NO: 126183 - DNA, 30 bp, Homo sapiens; identical to SEQ ID NO: 52356
  chr15:79723640-79723670
  hyper

SEQ ID NO: 126184 - DNA, 144 bp, Homo sapiens; identical to SEQ ID NO: 10313
  chr15:79723975-79724119
  hyper

SEQ ID NO: 126185 - DNA, 209 bp, Homo sapiens; identical to SEQ ID NO: 10314
  chr15:79724351-79724560
  hyper

SEQ ID NO: 126186 - DNA, 81 bp, Homo sapiens; identical to SEQ ID NO: 10315
  chr15:79724606-79724687
  hyper

SEQ ID NO: 126187 - DNA, 91 bp, Homo sapiens; identical to SEQ ID NO: 10316
  chr15:79724701-79724792
  hyper

SEQ ID NO: 126188 - DNA, 761 bp, Homo sapiens
  chr15:79724863-79725624
  hyper
cgcccggggcgcctcggaggtaagttcggagagcccgggccgggcggagggcgggagcgcacgagtgtgtgtgtgtgtgtgtgtgttcgcggtgtgcccgcggctcggtgcacacgcgcgcgggttgtaaagtcaggagctgcgggagcgcctccctgcctcggcttggccccggagcattgcgggccgcggaggtgtgggggcccttgtcgctgcgctcagggcagcggcggaaaaggtgtgtgcggatgcggggcggggccgcacctggtggacagagcagggattcgggaagagaagccacggaagatgatcatgcagtttggggcaagttttcctggttgagcatcgcttcaggaaacggtgttttgagggttaaatatgtgagctatctgtgcaaaaagcctgacacatcagaggcgcgaagtaagatggaaagctggacaagccccaggtggaccgaccggtgcatccaattcttaaattgagatttccagtcacgttgatgtggaatgggatcgttgttcttcccgagggtttgataaggatgctcaacttcacctgtcagaaagcacgggagctgggcctggcccgcggggagcgtaagctcgctcacacgcggtccaactcaggcaaatgcagcatgcccgacctgctctgccgccatccctccgaaagcgataatttccttgggctaccgaatccatcagagtagtcatttgtcccctcgccggcggtgcggggagcgtaacatttgagta

SEQ ID NO: 126189 - DNA, 30 bp, Homo sapiens
  chr15:80189113-80189143
  hyper
gcccagcgccagcacggaccatgcacagat

SEQ ID NO: 126190 - DNA, 1248 bp, Homo sapiens; identical to SEQ ID NO: 52362
  chr15:80215296-80216544
  hyper

SEQ ID NO: 126191 - DNA, 30 bp, Homo sapiens
  chr15:80263347-80263377
  hyper
ttgtagcactctggacgttttgcttggacc

SEQ ID NO: 126192 - DNA, 56 bp, Homo sapiens; identical to SEQ ID NO: 10319
  chr15:80285824-80285880
  hyper

SEQ ID NO: 126193 - DNA, 30 bp, Homo sapiens
  chr15:80351507-80351537
  hyper
gcagactgaggcgccggcctgcatgggaag

SEQ ID NO: 126194 - DNA, 36 bp, Homo sapiens
  chr15:80351964-80352000
  hyper
gtggctctcctccgcggtcgcgtcataggccgaaca

SEQ ID NO: 126195 - DNA, 30 bp, Homo sapiens
  chr15:80352605-80352635
  hyper
ttttccacctgcggcgtttttcagaaacca

SEQ ID NO: 126196 - DNA, 147 bp, Homo sapiens; identical to SEQ ID NO: 10321
  chr15:80352849-80352996
  hyper

SEQ ID NO: 126197 - DNA, 30 bp, Homo sapiens
  chr15:80444743-80444773
  hyper
ccagctagctgccccgagcgggggctggaa

SEQ ID NO: 126198 - DNA, 158 bp, Homo sapiens
  chr15:80445214-80445372
  hyper
gggcggggtgttcacggtgagaccaaaagtcaggtaggagcctccggggtccctgctgtgtcacccggacaggccgtgggggcgggcaggggggcggggccgggcctgaccacagcggccgagttcagtcctgctctccgcacgccaccttaggcccg

SEQ ID NO: 126199 - DNA, 367 bp, Homo sapiens; identical to SEQ ID NO: 52366
  chr15:80543968-80544335
  hyper

SEQ ID NO: 126200 - DNA, 30 bp, Homo sapiens; identical to SEQ ID NO: 10322
  chr15:80654042-80654072
  hyper

SEQ ID NO: 126201 - DNA, 30 bp, Homo sapiens
  chr15:80696249-80696279
  hyper
gggcagcactggggcgcctttgttcctcgc

SEQ ID NO: 126202 - DNA, 30 bp, Homo sapiens
  chr15:80697014-80697044
  hyper
cggctgtcactacgcggcagccgcagcatc

SEQ ID NO: 126203 - DNA, 30 bp, Homo sapiens; identical to SEQ ID NO: 52368
  chr15:80987182-80987212
  hyper

SEQ ID NO: 126204 - DNA, 266 bp, Homo sapiens; identical to SEQ ID NO: 52369
  chr15:80988125-80988391
  hyper

SEQ ID NO: 126205 - DNA, 1847 bp, Homo sapiens
  chr15:81071386-81073233
  hyper
ccggggacttgctctccgcggtccgccgcggccgctccaccgagtcctggcctccagcgccctcacctggctgctgcgggcgggactctgcgcacccgggctccgcgggctcaggtctgcgtctcccagagccgccgccagagcccgccccggtccggcccgggcacagggcccccgccccacttgggcaaggcgggggcgcgtggagggaagtttcatcggggggcgagggagggagcttcggtgccgcgcgggcgtcaggggctcctcgggggaggagtcagtaaaagtggctataaaagcggcctctcggctgagggccggggagctagcgctcaagcagagcccagcgcggtgctatcggacagagcctggcgagcgcaagcggcgcggggagccagcggggctgagcgcggccagggtctgaacccagatttcccagactagctaccactccgcttgcccacgccccgggagctcgcggcgcctggcggtcagcgaccagacgtccggggccgctgcgctcctggcccgcgaggcgtgacactgtctcggctacagacccagaggtaagagggcctggctgggggcgtcagggatgagctgacggcccatgccacggaagagaggtaagaagtgggggcccgcgcctccacccggcacagggtaaacgttacccgcctcagtttctgtttgtctgtccaccctgtgctgtgcagtctacctctatctgtctgtttgtccatgcgtctgttgatgggcacacgctcttggcactgtcctctgtgggatttctctgagatcttgtgatgctttacaagctgcaggtgccggggggcgctggagtccccagagggcatccagagggggcagactcctgctttccgtagattttcccccttctgaatggcaccgggggcttgcgcccgggagagtgtctcgccgaggagggagtaccacaagggtcaggtctcggtgtcctgccgactgggagccagctcacgccgagctctagcgggcgtgcgcctagcaacaggtctgcgccctgctgctcctgcctcagcacgctcttcctcccagtttccctcgcctcccagtgcctccgggacagcgctaggcacccagcgacgcgctggcgcggggccgagctgaggcaattgcaatgttagatgaacccggggggctctgctgatgtttagactgagactccaaacgtggcatcgctggaagaaggtctggtggtccctggcaaaggacgtcggctccaagaaaggtcgcgttaggttgtgaggaaaggcagagagtcctggcagaacgctggccaggtctccagctcgccgctctgggaacgaaggccagtgacattctggaatggaccccaagggatgcgtgtgctcatgagagaggagcgctgtgcgccctgggtcctcagccgcagacactctctgcgacagccgctgttccccaagggtcggacgctacggcagtcccaggagttccgccagctgccgggtttgaggtcctgagtccttctccaagcagccaacgctacccacaggtgagagctccctttaaaaactaatcttctgatgtgtgagccagtgcctggctgcagccccataccagggacggtgagccggggagcgcgtctctccatccctgcggtctggaaagtgatccagggcgcgcccgagggcggggagccggcggctctgcgtgcccaggcgcgacgccaccatggacagctcccagccacttcctccactcggggtctgtggccctgggtctccggggaagtcgtgcgctttcttcccagacccaaggcgttggggcgctgggaaagagga

SEQ ID NO: 126206 - DNA, 30 bp, Homo sapiens
  chr15:81281900-81281930
  hyper
gtgtgcgcgcgccgcggacctcccattgct

SEQ ID NO: 126207 - DNA, 106 bp, Homo sapiens
  chr15:81282495-81282601
  hyper
tgacctcagtttctcgcctgtgaaataaattggaactggaagttctggaggctgcctcggctctaaaaaagcccatttctggatgtcggacgtttatcctcagtct

SEQ ID NO: 126208 - DNA, 371 bp, Homo sapiens
  chr15:81292678-81293049
  hyper
tctagcaccactcttcggactccccatccagtgctcttttcctcttttcgttacactgcactgctggtcggaaacccatcgtggaagtggatcaaacacaacaaagggcagggggcgttggaaaaccgggcgaagtcgcgcagaccgagacgacccaccggccccagcaaatcaccaggggccgaaatccagtgtcctcctcccttcagcccagaagccaggtcaccttttagacttgctctcttggcggggaggaagcgtggagccccctggtccggctaagagcttacgtaaggcccgcgggcggctgcgccccggtctcccatgggtgtgcgcagagcccccgggccggagcaggccttcccctgtcc

SEQ ID NO: 126209 - DNA, 30 bp, Homo sapiens
  chr15:81293279-81293309
  hyper
ctccagggaggttacggccgaggcggcggc

SEQ ID NO: 126210 - DNA, 208 bp, Homo sapiens
  chr15:81294106-81294314
  hyper
gcctgagctgcctcccgcgctcctccccgaggaaaggattttgatttcaaagaaaggaaggaaggaaggacaactcccagcttccccgtcccgccctccccgctccgagggccgcgccaggccatgcccaagaaggcggcggcggcggcgaaccagcagaagggactttcctggcagcccggcgacgaggagcgcggacagtgagttt

SEQ ID NO: 126211 - DNA, 30 bp, Homo sapiens
  chr15:81316060-81316090
  hyper
acagaaggccaggaacgaactgcctcacca

SEQ ID NO: 126212 - DNA, 30 bp, Homo sapiens
  chr15:81567533-81567563
  hyper
ggcagaagggagagcgatgtccctggatga

SEQ ID NO: 126213 - DNA, 163 bp, Homo sapiens
  chr15:81616529-81616692
  hyper
ggagctcgtagccccgcctctttccgcgcccccgctcccgaattggtccaggccctcagacggatcccgcctcccggagattggcaggacaaggagaccgcggggccaggctctccagttagcgtcagcgcctgggcgggtcccggacgccttgggcgggccg

SEQ ID NO: 126214 - DNA, 1102 bp, Homo sapiens; identical to SEQ ID NO: 52377
  chr15:82336625-82337727
  hyper

SEQ ID NO: 126215 - DNA, 25 bp, Homo sapiens
  chr15:82337802-82337827
  hyper
cgatctcggcgacatgctcagaact

SEQ ID NO: 126216 - DNA, 52 bp, Homo sapiens; identical to SEQ ID NO: 10330
  chr15:82338055-82338107
  hyper

SEQ ID NO: 126217 - DNA, 105 bp, Homo sapiens; identical to SEQ ID NO: 52380
  chr15:82338503-82338608
  hyper

SEQ ID NO: 126218 - DNA, 30 bp, Homo sapiens
  chr15:82339354-82339384
  hyper
agcgccagcgggcggcgcgggcgtgcgcgc

SEQ ID NO: 126219 - DNA, 572 bp, Homo sapiens; identical to SEQ ID NO: 10331
  chr15:82339663-82340235
  hyper

SEQ ID NO: 126220 - DNA, 386 bp, Homo sapiens
  chr15:83315056-83315442
  hyper
cttgcccctcttccccaccaacgacacagcccagtagttgactcaggtgccaggagagagcgcggggaggctgggcggtagccagggagaccaagggaagcggttgccagagaaatgcggcgtcagtcagggccggggctgcaggcgcggggcgggggaggagagacgcggcctcctcccaggcgggcctggcgggaggcaccccggcttctaagagcgaattcggctcccgactctcttcccccagctgagagcacggtgcaaggggccagggctgcagggagcaaagtgcccccgaaaaataagcgcgcgcccacgaaagcgcccaagagcccaggcgtctgcctggcttttctcggtcacggggtcaacgcggggccgctcac

SEQ ID NO: 126221 - DNA, 844 bp, Homo sapiens; identical to SEQ ID NO: 10332
  chr15:83316231-83317075
  hyper

SEQ ID NO: 126222 - DNA, 699 bp, Homo sapiens; identical to SEQ ID NO: 52384
  chr15:83348912-83349611
  hyper

SEQ ID NO: 126223 - DNA, 70 bp, Homo sapiens
  chr15:83349671-83349741
  hyper
cgatcagcaggttacagagtttccggtagtttttgtgaatcaggtcgatgcgctccgggcagacctcctc

SEQ ID NO: 126224 - DNA, 1174 bp, Homo sapiens; identical to SEQ ID NO: 52385
  chr15:83377914-83379088
  hyper

SEQ ID NO: 126225 - DNA, 30 bp, Homo sapiens; identical to SEQ ID NO: 10336
  chr15:83419390-83419420
  hyper

SEQ ID NO: 126226 - DNA, 30 bp, Homo sapiens
  chr15:83478240-83478270
  hyper
ttttcattggttgtcgctggccctctcgtc

SEQ ID NO: 126227 - DNA, 845 bp, Homo sapiens
  chr15:83620895-83621740
  hyper
ccaaacgtggagaacgacaaactgcttagactcacacaggccctggagttgactgcgcccaggggcgaagagaccgcggaatggccgaggcaggaggccggccagggcaccggtccccgtcaggtgcccccgtgcccgggctgtatgggaggggaagggccacgggctccgcgcccaggccagggtgcccctgctgggtgtccgcgtgccccggcggagggcgcgggtcaggtggccccagactcccgggcgcagagtgtgcgctcgctccggcttggggaggcgggggccggcccgccgggaggctccgagcccggttacgccagccgcggccccgcagtccctccggaggggcgcgcggagagcgcgcggcgcgggctcactcaccccatctccggcgctgctccggcggccgctccgacggggcctctcgcgctcgctctccgcccgctcggcagccgctccccgcgcggcacatgcggcggcccgtgcgcgcccggctcagccccggcgccgctccattccgcggggctgcgcggctgccactgctgccactgccgccaccgccgccaggcgcgggcgggcgggggctgggcggccgcgctggggcggtgcccgccccgccctccccagccgctacccccgcccggctccttacgtaacctcgtggcccccgggccgcggcagcgagccaagaggcggggggcgcagcactgtgtgcaccgtcccccgcgcagccgcgcagtcgccgcttttctcccgggccacccagtcctcggtgccggccccgcgttggcgcgcccccgccccacgccgacccggggccctggcgcagtgccatcaac

SEQ ID NO: 126228 - DNA, 30 bp, Homo sapiens; identical to SEQ ID NO: 52388
  chr15:83627114-83627144
  hyper

SEQ ID NO: 126229 - DNA, 376 bp, Homo sapiens; identical to SEQ ID NO: 52389
  chr15:83654592-83654968
  hyper

SEQ ID NO: 126230 - DNA, 106 bp, Homo sapiens; identical to SEQ ID NO: 52390
  chr15:83655930-83656036
  hyper

SEQ ID NO: 126231 - DNA, 30 bp, Homo sapiens; identical to SEQ ID NO: 52391
  chr15:83656501-83656531
  hyper

SEQ ID NO: 126232 - DNA, 135 bp, Homo sapiens; identical to SEQ ID NO: 52392
  chr15:83680650-83680785
  hyper

SEQ ID NO: 126233 - DNA, 30 bp, Homo sapiens; identical to SEQ ID NO: 52393
  chr15:83695057-83695087
  hyper

SEQ ID NO: 126234 - DNA, 30 bp, Homo sapiens; identical to SEQ ID NO: 52394
  chr15:83722444-83722474
  hyper

SEQ ID NO: 126235 - DNA, 30 bp, Homo sapiens; identical to SEQ ID NO: 52395
  chr15:83735225-83735255
  hyper

SEQ ID NO: 126236 - DNA, 30 bp, Homo sapiens; identical to SEQ ID NO: 52396
  chr15:83735850-83735880
  hyper

SEQ ID NO: 126237 - DNA, 30 bp, Homo sapiens
  chr15:83736189-83736219
  hyper
tgctgccgggcctacgggcacccaccccct

SEQ ID NO: 126238 - DNA, 86 bp, Homo sapiens; identical to SEQ ID NO: 10338
  chr15:83775915-83776001
  hyper

SEQ ID NO: 126239 - DNA, 115 bp, Homo sapiens; identical to SEQ ID NO: 10339
  chr15:83776022-83776137
  hyper

SEQ ID NO: 126240 - DNA, 149 bp, Homo sapiens; identical to SEQ ID NO: 10340
  chr15:83776157-83776306
  hyper

SEQ ID NO: 126241 - DNA, 384 bp, Homo sapiens; identical to SEQ ID NO: 10341
  chr15:83776332-83776716
  hyper

SEQ ID NO: 126242 - DNA, 174 bp, Homo sapiens; identical to SEQ ID NO: 52401
  chr15:83776768-83776942
  hyper

SEQ ID NO: 126243 - DNA, 30 bp, Homo sapiens; identical to SEQ ID NO: 52402
  chr15:83777667-83777697
  hyper

SEQ ID NO: 126244 - DNA, 30 bp, Homo sapiens; identical to SEQ ID NO: 52403
  chr15:83801859-83801889
  hyper

SEQ ID NO: 126245 - DNA, 144 bp, Homo sapiens; identical to SEQ ID NO: 10343
  chr15:83875521-83875665
  hyper

SEQ ID NO: 126246 - DNA, 377 bp, Homo sapiens; identical to SEQ ID NO: 10344
  chr15:83875705-83876082
  hyper

SEQ ID NO: 126247 - DNA, 281 bp, Homo sapiens; identical to SEQ ID NO: 10345
  chr15:83876201-83876482
  hyper

SEQ ID NO: 126248 - DNA, 502 bp, Homo sapiens; identical to SEQ ID NO: 52407
  chr15:83876654-83877156
  hyper

SEQ ID NO: 126249 - DNA, 30 bp, Homo sapiens; identical to SEQ ID NO: 52408
  chr15:83912383-83912413
  hyper

SEQ ID NO: 126250 - DNA, 30 bp, Homo sapiens; identical to SEQ ID NO: 52409
  chr15:83950994-83951024
  hyper

SEQ ID NO: 126251 - DNA, 411 bp, Homo sapiens; identical to SEQ ID NO: 52410
  chr15:83951701-83952112
  hyper

SEQ ID NO: 126252 - DNA, 280 bp, Homo sapiens; identical to SEQ ID NO: 52411
  chr15:83952768-83953048
  hyper

SEQ ID NO: 126253 - DNA, 30 bp, Homo sapiens; identical to SEQ ID NO: 52412
  chr15:84006836-84006866
  hyper

SEQ ID NO: 126254 - DNA, 260 bp, Homo sapiens
  chr15:84034238-84034498
  hyper
gttctgcaggctaacgctgatcttccccagacgctaaatcataatcttcgtgtttttcgtatttcacattctagccacaatttcaacatcccatccccgtgacattagggaatgataaatcagcaggcgggacagttcccctgtacagactggtacgggcggaccgggctctgccaacgccctcgctcctgccagatgtcggcgcccgcggggttaaccctttccggcagcgcagccttcccctgcgtccggccgcttct

SEQ ID NO: 126255 - DNA, 30 bp, Homo sapiens; identical to SEQ ID NO: 52414
  chr15:84042481-84042511
  hyper

SEQ ID NO: 126256 - DNA, 30 bp, Homo sapiens; identical to SEQ ID NO: 52415
  chr15:84103752-84103782
  hyper

SEQ ID NO: 126257 - DNA, 237 bp, Homo sapiens; identical to SEQ ID NO: 10348
  chr15:84115616-84115853
  hyper

SEQ ID NO: 126258 - DNA, 407 bp, Homo sapiens; identical to SEQ ID NO: 10349
  chr15:84115931-84116338
  hyper

SEQ ID NO: 126259 - DNA, 175 bp, Homo sapiens; identical to SEQ ID NO: 10350
  chr15:84116377-84116552
  hyper

SEQ ID NO: 126260 - DNA, 112 bp, Homo sapiens; identical to SEQ ID NO: 10351
  chr15:84116651-84116763
  hyper

SEQ ID NO: 126261 - DNA, 260 bp, Homo sapiens; identical to SEQ ID NO: 10352
  chr15:84116828-84117088
  hyper

SEQ ID NO: 126262 - DNA, 30 bp, Homo sapiens; identical to SEQ ID NO: 52421
  chr15:84178217-84178247
  hyper

SEQ ID NO: 126263 - DNA, 30 bp, Homo sapiens; identical to SEQ ID NO: 52422
  chr15:84228139-84228169
  hyper

SEQ ID NO: 126264 - DNA, 30 bp, Homo sapiens; identical to SEQ ID NO: 52423
  chr15:84250230-84250260
  hyper

SEQ ID NO: 126265 - DNA, 60 bp, Homo sapiens
  chr15:84322261-84322321
  hyper
acgagccagcggttccgggcaaacctctgtgtggctgctgggcctgactttgcagagctg

SEQ ID NO: 126266 - DNA, 120 bp, Homo sapiens
  chr15:84322476-84322596
  hyper
ggcggcggcggtggcggcgtcggcaatcccggctcttggcacaacgcctggcggccggcccagggcgaggagtggcttccaggaagcgggcggaggagcgttccagccgagtcccgccgt

SEQ ID NO: 126267 - DNA, 219 bp, Homo sapiens
  chr15:84322993-84323212
  hyper
ggggctgcacgtcccagatacttctgcggcgcaaggtgggtgcaccgagctcggcgcagggcggcccctcaggggtcgggggaaggcgctccccagagggagtaagacttggagcagtggcctctctaagcaagttgggggtctccaagcagagtcggggcgtgccacgcgggccccagggggcctcaggactggggtgctcctcactgctgggcacct

SEQ ID NO: 126268 - DNA, 195 bp, Homo sapiens
  chr15:84323434-84323629
  hyper
gtggaaagtgggcgtgggggtgaccgggacgcggcggaggcactggaggagcgacttcgaggcagcgggtagtcggaggagtgtgcactcggaaggctggtgcgagcaggcgagggtggcgcagagtcccagggccccgcactggccgcctcccttcagccaggagtcgccgcctcaggtcggaaacagcagcac

SEQ ID NO: 126269 - DNA, 30 bp, Homo sapiens; identical to SEQ ID NO: 52427
  chr15:84573172-84573202
  hyper

SEQ ID NO: 126270 - DNA, 47 bp, Homo sapiens; identical to SEQ ID NO: 10353
  chr15:84748572-84748619
  hyper

SEQ ID NO: 126271 - DNA, 627 bp, Homo sapiens; identical to SEQ ID NO: 10354
  chr15:84748678-84749305
  hyper

SEQ ID NO: 126272 - DNA, 30 bp, Homo sapiens; identical to SEQ ID NO: 52430
  chr15:84820321-84820351
  hyper

SEQ ID NO: 126273 - DNA, 30 bp, Homo sapiens; identical to SEQ ID NO: 52431
  chr15:84862070-84862100
  hyper

SEQ ID NO: 126274 - DNA, 30 bp, Homo sapiens; identical to SEQ ID NO: 52432
  chr15:85138337-85138367
  hyper

SEQ ID NO: 126275 - DNA, 30 bp, Homo sapiens; identical to SEQ ID NO: 52433
  chr15:85141961-85141991
  hyper

SEQ ID NO: 126276 - DNA, 578 bp, Homo sapiens
  chr15:85143660-85144238
  hyper
cgcggcagaggaggcggggcagggcgttcctccaaacacaggaataccacgtgcgaaaacaaaggggtgtgcgaagaccgggtgcatgtgtacagctgcaaactgggggaaaggcgccaggcttgggcgatgaggatttgttcccccatggattcccttcctgcccagggtccgctctcgccggtcgagggtgcctaacaatactccttgccacaaggttcgcagccgaaaaggtccttcaagtccggccatccaactttcactttttatagacaaatatacagaggccttagataagtgaaacggcttgtctcgggttacagctctagccaacacagggtttctgacggtcagtctgcggattttcctgcctctggtccgcaggcactgcccaggctgtcagccccaaaccctactccggggaccgcggtcaggttcgtctccgggcggactacatctcccacaatgccttgggcccagcctccctcctgccgcccggctgggtgccgtctccaccaacagaaaggcagaatttccagggccgttctcggcagccaatgagcgcggcggtgggcggg

SEQ ID NO: 126277 - DNA, 30 bp, Homo sapiens
  chr15:85144459-85144489
  hyper
tgctgggggaggggcgtcggggtcgcgctc

SEQ ID NO: 126278 - DNA, 30 bp, Homo sapiens
  chr15:85144792-85144822
  hyper
tttgagtaaatacacgttgagagcttcggt

SEQ ID NO: 126279 - DNA, 30 bp, Homo sapiens; identical to SEQ ID NO: 52436
  chr15:85173528-85173558
  hyper

SEQ ID NO: 126280 - DNA, 30 bp, Homo sapiens
  chr15:85174704-85174734
  hyper
gctagccgaatagccgtgtttgggacctgg

SEQ ID NO: 126281 - DNA, 30 bp, Homo sapiens; identical to SEQ ID NO: 52437
  chr15:85177510-85177540
  hyper

SEQ ID NO: 126282 - DNA, 30 bp, Homo sapiens; identical to SEQ ID NO: 52438
  chr15:85189435-85189465
  hyper

SEQ ID NO: 126283 - DNA, 30 bp, Homo sapiens; identical to SEQ ID NO: 52439
  chr15:85192532-85192562
  hyper

SEQ ID NO: 126284 - DNA, 91 bp, Homo sapiens
  chr15:85197333-85197424
  hyper
acggtggcgagccccgaggccacagctggcccactctgcaccaggatccccaacgtgcctccacccacacccatccgcccgccaggcaagc

SEQ ID NO: 126285 - DNA, 30 bp, Homo sapiens
  chr15:85197648-85197678
  hyper
ctccgcgaaagctccgggaaaagtgacctg

SEQ ID NO: 126286 - DNA, 30 bp, Homo sapiens
  chr15:85198028-85198058
  hyper
ccctccaagtccggcgggggtattgagtaa

SEQ ID NO: 126287 - DNA, 30 bp, Homo sapiens; identical to SEQ ID NO: 52440
  chr15:85198783-85198813
  hyper

SEQ ID NO: 126288 - DNA, 30 bp, Homo sapiens; identical to SEQ ID NO: 52441
  chr15:85199264-85199294
  hyper

SEQ ID NO: 126289 - DNA, 184 bp, Homo sapiens; identical to SEQ ID NO: 52442
  chr15:85200332-85200516
  hyper

SEQ ID NO: 126290 - DNA, 30 bp, Homo sapiens; identical to SEQ ID NO: 52443
  chr15:85201794-85201824
  hyper

SEQ ID NO: 126291 - DNA, 30 bp, Homo sapiens; identical to SEQ ID NO: 52444
  chr15:85207731-85207761
  hyper

SEQ ID NO: 126292 - DNA, 30 bp, Homo sapiens; identical to SEQ ID NO: 52445
  chr15:85223340-85223370
  hyper

SEQ ID NO: 126293 - DNA, 124 bp, Homo sapiens
  chr15:85258868-85258992
  hyper
aaacctcgtctctcccgaaaccacctggagtcgctccgactggagaaatcaagagtccgccgccttaaaatgactaaaacaataagcaaccccaactcccacttcaagcgcgtacggtttccat

SEQ ID NO: 126294 - DNA, 30 bp, Homo sapiens; identical to SEQ ID NO: 10356
  chr15:85259809-85259839
  hyper

SEQ ID NO: 126295 - DNA, 30 bp, Homo sapiens; identical to SEQ ID NO: 10357
  chr15:85290875-85290905
  hyper

SEQ ID NO: 126296 - DNA, 30 bp, Homo sapiens; identical to SEQ ID NO: 52449
  chr15:85292308-85292338
  hyper

SEQ ID NO: 126297 - DNA, 30 bp, Homo sapiens; identical to SEQ ID NO: 52450
  chr15:85328132-85328162
  hyper

SEQ ID NO: 126298 - DNA, 30 bp, Homo sapiens; identical to SEQ ID NO: 52451
  chr15:85358579-85358609
  hyper

SEQ ID NO: 126299 - DNA, 30 bp, Homo sapiens; identical to SEQ ID NO: 52452
  chr15:85399690-85399720
  hyper

SEQ ID NO: 126300 - DNA, 30 bp, Homo sapiens; identical to SEQ ID NO: 52453
  chr15:85412526-85412556
  hyper

SEQ ID NO: 126301 - DNA, 30 bp, Homo sapiens; identical to SEQ ID NO: 52454
  chr15:85447871-85447901
  hyper

SEQ ID NO: 126302 - DNA, 32 bp, Homo sapiens
  chr15:85524761-85524793
  hyper
tttccctcggaccccgcgcctaaaccccggcc

SEQ ID NO: 126303 - DNA, 438 bp, Homo sapiens; identical to SEQ ID NO: 52456
  chr15:85525135-85525573
  hyper

SEQ ID NO: 126304 - DNA, 30 bp, Homo sapiens
  chr15:85903042-85903072
  hyper
aaattcacagaagggcgtcctgagacactg

SEQ ID NO: 126305 - DNA, 13 bp, Homo sapiens
  chr15:85923532-85923545
  hyper
ggcggagaggaga

SEQ ID NO: 126306 - DNA, 56 bp, Homo sapiens
  chr15:85923617-85923673
  hyper
cggcggtcaacctcagcctcccttagcaacctgagtgccccgtccaggagccttac

SEQ ID NO: 126307 - DNA, 99 bp, Homo sapiens
  chr15:86126183-86126282
  hyper
gcagcaaagagaaaccgctattgctccgtggaaataaactatctgaataaaacttcttaacgggggttgaggctgaagctgaaacgggagtcggacacg

SEQ ID NO: 126308 - DNA, 30 bp, Homo sapiens
  chr15:86338075-86338105
  hyper
cggctcccgtcggccggctctccacaggca

SEQ ID NO: 126309 - DNA, 220 bp, Homo sapiens; identical to SEQ ID NO: 52459
  chr15:88798433-88798653
  hyper

SEQ ID NO: 126310 - DNA, 264 bp, Homo sapiens; identical to SEQ ID NO: 10360
  chr15:88798724-88798988
  hyper

SEQ ID NO: 126311 - DNA, 1265 bp, Homo sapiens; identical to SEQ ID NO: 10361
  chr15:88799036-88800301
  hyper

SEQ ID NO: 126312 - DNA, 596 bp, Homo sapiens; identical to SEQ ID NO: 52462
  chr15:88800412-88801008
  hyper

SEQ ID NO: 126313 - DNA, 272 bp, Homo sapiens; identical to SEQ ID NO: 52463
  chr15:88801088-88801360
  hyper

SEQ ID NO: 126314 - DNA, 69 bp, Homo sapiens
  chr15:89010446-89010515
  hyper
ctgcaggcacaacgcgcccaacaagcgccatggggatccgttgcttgagggtgcggctgcaagagccag

SEQ ID NO: 126315 - DNA, 266 bp, Homo sapiens
  chr15:89010953-89011219
  hyper
ggctgtgagaaacgcggggtcgcggttcctgcggtcctggacttggccccagacagccgggtaacaaatgactgccccctcgagcccaccgccacctccaggactatgctcctactcgtgtcccttgagccacccgggccccagtgaccgttaggccgtggccctcaccgagcttttcttcccagcagggtcgtggccagaacgccggccgggaccatctgcacaggcgctcgacagctccaagacgctgcggccaagcagaaagt

SEQ ID NO: 126316 - DNA, 30 bp, Homo sapiens; identical to SEQ ID NO: 52465
  chr15:89089572-89089602
  hyper

SEQ ID NO: 126317 - DNA, 620 bp, Homo sapiens; identical to SEQ ID NO: 52466
  chr15:89147771-89148391
  hyper

SEQ ID NO: 126318 - DNA, 1050 bp, Homo sapiens
  chr15:89148460-89149510
  hyper
cgcggaaacccagcttgcagtttgtttcgctcggtcccgcgcccagtaggagaaagacggccccacagcctcgcgggagccggctctcgcaacccagccgccccaagcccgccgtcgcccctcctcccgcgcttctcgcccctgattctagatgcagctgacttgttgcatgcagaagagcagctgggttcggcgttccaagcctctcctctttgctttgcctgccaccagatctgagcgccaggctggccagcacccagagagcccagagccgcaggaaaaaatgtgaaaagtaccaggagaccactgggtaatcgccccagtgcaaagggcctttcttcctacccaccgcaattgcagcaaataactccagggaggggaatcagaggcgccggggattgcgccctgggagagccctatctgctgaaagagagcgcctaatgccgttacttcccagtgtagcctttccactcggcagaccaagcgcctctccttcgagtcgctacccgcttggagtcggctcagaatcaggctgctaaaggtccctggagcccctcccccagcgaatccgagcctgcagcttcagcaccagaggctggacagcgccccggccctagggtgcccatggtcggtgcctgcgcacggctcggcctcccagcccacgccacttgcgctcgcggcccctcagaccccacgcggaggaggtcaggaggtgacacaggttcgcggaagaaagcgggactcatcttcctcatttctccagggatttaggtgtgggattctaggagagcattctctctcgctctggccacgaccagtggaaaaacttggcgccaaatttaggcagtggtgcggggagcagaggcacgattgcaggcggtgagcaaaggggcaagcgggacagaggatctactgtgagccccaggctctggtgttccgtgaaaaatcgccacatttaaatcctgcgctcccccgtgctccctctcgctctctcccccttcctttttcccttccttccttcctccccgcgctctctgtatgccttaatag

SEQ ID NO: 126319 - DNA, 163 bp, Homo sapiens
  chr15:89164362-89164525
  hyper
tctttaaaatttcccgccagtatggccggctcgcagcacgagttacgccctcttcaggagtccctccccttctgctctcgcccgcctccccgctgccaggcaggctcgaccaatcagaagaggtcttgggcgggcgctgccgtccagcgagccaataggcggg

SEQ ID NO: 126320 - DNA, 30 bp, Homo sapiens; identical to SEQ ID NO: 52468
  chr15:89182088-89182118
  hyper

SEQ ID NO: 126321 - DNA, 108 bp, Homo sapiens
  chr15:89248381-89248489
  hyper
gccccctccaccgggcgtcggggccctggaccccacagcaggggcggggaggctgacgggggcgcagcttttcctcctgagtgttcgctgcccgggctggcggcgcgg

SEQ ID NO: 126322 - DNA, 210 bp, Homo sapiens
  chr15:89248726-89248936
  hyper
ccgccgcgcgccgcccgggctccctcgggctctcatttaccccggccgctggcagcgggacccaggcgccttgccgcctcgctgcggccgcttggtccccacgccgccccctccgcaggcgacgaggcctgcagaccggactgggcagccactcgggcgcccgcggcggtgggcatcatcatgcttcccgggcaaacagcacttccagcc

SEQ ID NO: 126323 - DNA, 29 bp, Homo sapiens
  chr15:89312741-89312770
  hyper
cacacacatcgcacgcgctgcccgccccc

SEQ ID NO: 126324 - DNA, 189 bp, Homo sapiens
  chr15:89312794-89312983
  hyper
cgggcctgtcccgagcctcctgtaagctgcttctgcgccctgaacgctgcctgttgtcccctccagagcgcctcgcggctcctcctcctcctccccgcccggctggaagaggaacacagccctcccttgtccctcctcttgatatttccagtaaaagcacctcgaacacaatctcgctgccacaaccct

SEQ ID NO: 126325 - DNA, 329 bp, Homo sapiens; identical to SEQ ID NO: 10369
  chr15:89345997-89346326
  hyper

SEQ ID NO: 126326 - DNA, 447 bp, Homo sapiens; identical to SEQ ID NO: 10370
  chr15:89346346-89346793
  hyper

SEQ ID NO: 126327 - DNA, 342 bp, Homo sapiens; identical to SEQ ID NO: 52473
  chr15:89346881-89347223
  hyper

SEQ ID NO: 126328 - DNA, 30 bp, Homo sapiens
  chr15:89347768-89347798
  hyper
acacacgaccacgagcggtttttccgtctg

SEQ ID NO: 126329 - DNA, 1308 bp, Homo sapiens; identical to SEQ ID NO: 52474
  chr15:89437677-89438985
  hyper

SEQ ID NO: 126330 - DNA, 30 bp, Homo sapiens
  chr15:89451494-89451524
  hyper
catcacaggcgcggacgagctcagtgttag

SEQ ID NO: 126331 - DNA, 30 bp, Homo sapiens
  chr15:89631664-89631694
  hyper
ggggccggtagcggcgggagctgcactggc

SEQ ID NO: 126332 - DNA, 398 bp, Homo sapiens
  chr15:89787062-89787460
  hyper
gttcggacaggcagcgcccccctccgactgtgagctgggacgctcccgcacgcttcccggcaccccttcagtcttcatggtacaccccgcccgcaggtacccggacggcggaagtgagccgcgggggcggatcttgttgttacgggtaacggaagtgtggcggcgttgggttgagcgggctttttggaagtttgtggcggaggtgaggccgaggtgactgcagagcggctcgcgaggtgctcgggctgtgggactgggcccctgggagggagcggttctgtgggggaaaggaggctcctgtcctgacttggcgttctggtattttctctggcgtggaaagtaggcgcgctccgctgtctcccgccgcctgcctcagctttcgcggttccctcctaggg

SEQ ID NO: 126333 - DNA, 258 bp, Homo sapiens
  chr15:89877891-89878149
  hyper
cccgccggaaacctcggtcctcacggtgcttcccggtctgctgctcccccgaccccaggcccacggcacggcgtcccccttcgcgcggcctacgcagcctcggggtagcgtgtggcctccacccggccggtccgcttcgctggcagccgcaacttcccgtctgcacccagctaggtcccgcggctacccgagaggcaagcgggagactcccagcgcgaccaataggagggccgccaatggagcggtccgcccgcgggg

SEQ ID NO: 126334 - DNA, 252 bp, Homo sapiens
  chr15:89878846-89879098
  hyper
tccagtctccgcatccgtcttgtgttgctccaggtgcttcaacagctctcagcgctcggtggttggtgaactgtggtaaagtgcacgcagaataaggtctacgtgattaagcaccgcctgggggttggggtctggaggcccagctgcacagatgaaagggaggctcagagacgtttgggaccaaccgagatcacacagctgattaggaataaaattcaggtcaagctgaaagtcggccgccaccgtccagcg

SEQ ID NO: 126335 - DNA, 30 bp, Homo sapiens
  chr15:89901955-89901985
  hyper
ggcagcctcagccgcgctcacctgcatctc

SEQ ID NO: 126336 - DNA, 125 bp, Homo sapiens; identical to SEQ ID NO: 10374
  chr15:89902213-89902338
  hyper

SEQ ID NO: 126337 - DNA, 328 bp, Homo sapiens
  chr15:89902763-89903091
  hyper
gccgagaaaaagatacgcaacggcaagccatacttttctggacactggctctgggggcgctgctcctctgaacctcgactttccccaggcacgcacctcagagctgagccccctggggactcccaagctctgcgtctccctgagtcctgaggcaggagaggaggaggcttcaggggcggatgagcctcctccccctagccgtaccctgtcaccctgggagcctggaacgtgcatctgaggccagagcgactcttgcctcttttccagtgagctgggggaaagtcaccctcctgaggagaccagccttcgagggcgtcatgagcgcgtg

SEQ ID NO: 126338 - DNA, 389 bp, Homo sapiens
  chr15:89903425-89903814
  hyper
acacagcccacaagaatcatccgaggctgcaccgtgaccagcccctcaagacagagcgagacccaaataacccccgcgggcggacccgcagcgttctgtgactccaccgcggagtccaaaaggcagctgagggtgggagcggaggggaagggaggggggccacaggcgctcgggcgagggaggcgcgtcaatgggccgcaggggccggatcggtggcctaatggattcaggcctgcacggcagaggcgcacccggcggcctgcccgcgctctcaatagcggacaatggagtcccggggtgacctgaacaaagaatttggaagtagttaaactgcagaacacgttctcggcctgggtgcctcctttcaaaaggagcgctgggagaagaaa

SEQ ID NO: 126339 - DNA, 788 bp, Homo sapiens; identical to SEQ ID NO: 52478
  chr15:89905399-89906187
  hyper

SEQ ID NO: 126340 - DNA, 30 bp, Homo sapiens; identical to SEQ ID NO: 52479
  chr15:89907843-89907873
  hyper

SEQ ID NO: 126341 - DNA, 121 bp, Homo sapiens
  chr15:89908902-89909023
  hyper
cgcgcgcggttaccgcgagtctcgctgaggagccattttgtgcagcatcctgcttaaatcacactccgaggggctcgttcctcgctccctcttccccctcgcttcctctctttcttccctc

SEQ ID NO: 126342 - DNA, 357 bp, Homo sapiens
  chr15:89910428-89910785
  hyper
atccctggtctctgccgcgtgggctagatctactgcaagtgctgggcatggggaaaggaagagagaagttaaaggtgaaatggcttctgctctcggcctctccgtgagcgctctcggccctcctgtggagatcgccacgtcctatcacacgcgtccctaaaccttgtcactcgagcattcttgtctcccaaactctgatggtccgcagtgggtactgggctccctgggccctgggaggaagacggaggagtttgggtgaaagatcagacggtgcgcagccctgaggcttctgagggcagagggtgcgcttccttgccctcggggcggggaagccgtgaacgccgaggccattgtaag

SEQ ID NO: 126343 - DNA, 30 bp, Homo sapiens; identical to SEQ ID NO: 52481
  chr15:89912126-89912156
  hyper

SEQ ID NO: 126344 - DNA, 662 bp, Homo sapiens
  chr15:89913306-89913968
  hyper
gtgactagagtgtttcgggattcacgaggctatgggctgcatcccttgggccgtccctcccttcccaatgcacctgggagcctgtgtgctgatggtgacctcatttcggaggaaaccggagcagcacttcctgcccccttgccctgcactccctgccttcctccctcaccggccaacgggtgtgggcaaaccctgggccccgggcttcgatcttcccctcccaccacccctacccgtttgctgtgttgcaagaactagtccttcacttgccagggtggctttgcagcttcccagcagtgtctacacagttcagatgagtgttgttgttaaacaccactgtcccataccatctgggcaggtctgaaacccgagttgagggtctgatgaaggaggagtctgtgcgggagggcaacgcggcattttcccgctttctacgaaaatctgttgatgcaaacctcccgcttcagagaaagatcgcggcagcagggctgcggagggcgatgagcatgccagttctaatctccaggagcccatcccacaccttccttaaacggccctcggagagaggccagaggccagaggccaacccatccgatttcggcctcctggtacgaatgcctgcccctactagagcaatgttcgaatcccctttggacacttaa

SEQ ID NO: 126345 - DNA, 157 bp, Homo sapiens; identical to SEQ ID NO: 10376
  chr15:89914292-89914449
  hyper

SEQ ID NO: 126346 - DNA, 360 bp, Homo sapiens; identical to SEQ ID NO: 52485
  chr15:89914866-89915226
  hyper

SEQ ID NO: 126347 - DNA, 247 bp, Homo sapiens; identical to SEQ ID NO: 52486
  chr15:89921790-89922037
  hyper

SEQ ID NO: 126348 - DNA, 141 bp, Homo sapiens
  chr15:89922499-89922640
  hyper
ggtaagagcccccctgactgggctgcccaccccgggcaggggcggaaacggccttccccgcgtggggaacaatggcgttattttggagtctgcaaccgcgagcgcttcaagctctttgattattttcgaggagtgttaggt

SEQ ID NO: 126349 - DNA, 1203 bp, Homo sapiens; identical to SEQ ID NO: 52487
  chr15:89942571-89943774
  hyper

SEQ ID NO: 126350 - DNA, 80 bp, Homo sapiens; identical to SEQ ID NO: 52488
  chr15:89943816-89943896
  hyper

SEQ ID NO: 126351 - DNA, 30 bp, Homo sapiens; identical to SEQ ID NO: 52489
  chr15:89945259-89945289
  hyper

SEQ ID NO: 126352 - DNA, 1120 bp, Homo sapiens; identical to SEQ ID NO: 52490
  chr15:89949616-89950736
  hyper

SEQ ID NO: 126353 - DNA, 295 bp, Homo sapiens
  chr15:89951081-89951376
  hyper
ggatttaagtaccttggcgaggcagcgcaggcggctgttctaatcgccgtctccaagtacctgctcatgaataaacaccaaccccatttatcaggtacttagcgctcattgtgaaggggaaattggcccttttctgaaattgtctatccacaacccatctgcgcagttctggttgcagaattcccctcacccttgagacacacacacacacacacacacacacacacacacacacacacactcgcaacacgaggctcctccaagctaagataaactcgcttttcttccggtaagt

SEQ ID NO: 126354 - DNA, 48 bp, Homo sapiens
  chr15:89951465-89951513
  hyper
cggaatgcagggccttaggaaagccctgtccggcgttccagccacagg

SEQ ID NO: 126355 - DNA, 680 bp, Homo sapiens; identical to SEQ ID NO: 10381
  chr15:89951772-89952452
  hyper

SEQ ID NO: 126356 - DNA, 300 bp, Homo sapiens; identical to SEQ ID NO: 10382
  chr15:89952699-89952999
  hyper

SEQ ID NO: 126357 - DNA, 198 bp, Homo sapiens; identical to SEQ ID NO: 52494
  chr15:89954191-89954389
  hyper

SEQ ID NO: 126358 - DNA, 251 bp, Homo sapiens; identical to SEQ ID NO: 10384
  chr15:89954590-89954841
  hyper

SEQ ID NO: 126359 - DNA, 52 bp, Homo sapiens; identical to SEQ ID NO: 52496
  chr15:89955001-89955053
  hyper

SEQ ID NO: 126360 - DNA, 138 bp, Homo sapiens
  chr15:89956215-89956353
  hyper
aacaccccccgcccccgacctactgacccctcttcccccctgacatgaatagtgggactcacagcctccccagcctctccaactagtgcctgcaaagccacggctcctaatcagggtaatttaatatattttaagccc

SEQ ID NO: 126361 - DNA, 35 bp, Homo sapiens; identical to SEQ ID NO: 10386
  chr15:89956422-89956457
  hyper

SEQ ID NO: 126362 - DNA, 233 bp, Homo sapiens; identical to SEQ ID NO: 52499
  chr15:89959771-89960004
  hyper

SEQ ID NO: 126363 - DNA, 195 bp, Homo sapiens
  chr15:89962758-89962953
  hyper
tctctggctctgaggcgagatgggagctgtcctcccagtggtgctgaaactcgggctgcctccgttggggtcaccgacagaggctcacttgttcaggcacttcctgggtcagcctttccgcctctgagacgggctctcccatctcagatgggagattctgcctggaagggaagtagtccacgccatcatcattcc

SEQ ID NO: 126364 - DNA, 6 bp, Homo sapiens
  chr15:89973912-89973918
  hyper
cgccgc

SEQ ID NO: 126365 - DNA, 82 bp, Homo sapiens; identical to SEQ ID NO: 52501
  chr15:90016166-90016248
  hyper

SEQ ID NO: 126366 - DNA, 527 bp, Homo sapiens; identical to SEQ ID NO: 52502
  chr15:90039452-90039979
  hyper

SEQ ID NO: 126367 - DNA, 14 bp, Homo sapiens
  chr15:90118695-90118709
  hyper
cgggagcctttcga

SEQ ID NO: 126368 - DNA, 30 bp, Homo sapiens
  chr15:90118966-90118996
  hyper
tgactcgcagggggcgcggagccggccgtc

SEQ ID NO: 126369 - DNA, 397 bp, Homo sapiens; identical to SEQ ID NO: 52503
  chr15:90198066-90198463
  hyper

SEQ ID NO: 126370 - DNA, 30 bp, Homo sapiens
  chr15:90233874-90233904
  hyper
caaaggccacgagtcgcacggggctcaggc

SEQ ID NO: 126371 - DNA, 38 bp, Homo sapiens
  chr15:90234209-90234247
  hyper
ttccggatgcctgacgcctccccgcagatctcaggttc

SEQ ID NO: 126372 - DNA, 385 bp, Homo sapiens
  chr15:90293503-90293888
  hyper
ttgtgcgggtgtccgcgctcgtgggctccactctcagggggcccctagcgaggggagacccagtcctctgcgtggcctttccctgccttcgcttcttggagccctgggcatactatggtggccaggtggccaggctgccggcggggagcagcagggtgcctggtcctcaccttggcgggcggtggggctgtgcgcgggggcacggacgaagggggcgcggggaaggggacactaaccggggacggtgggcttggctccatcgcctgcccttcagggcacgccgcctcggcgaacagcgcaggcgggtcgcgcggctcgggtgcagctcgggctccggggcaggcaggcggggatccccaggacgccccggcgcggacggcggata

SEQ ID NO: 126373 - DNA, 30 bp, Homo sapiens; identical to SEQ ID NO: 52504
  chr15:90294553-90294583
  hyper

SEQ ID NO: 126374 - DNA, 450 bp, Homo sapiens; identical to SEQ ID NO: 52505
  chr15:90319562-90320012
  hyper

SEQ ID NO: 126375 - DNA, 37 bp, Homo sapiens
  chr15:90320089-90320126
  hyper
cgtggccccgcagaggcgcagacgcaggcggaggggc

SEQ ID NO: 126376 - DNA, 82 bp, Homo sapiens
  chr15:90357977-90358059
  hyper
agcccccgccctcccgccccacttgcctgggccgccgggcgctggaacctggaccctggaccctggcgggttccgagctgcg

SEQ ID NO: 126377 - DNA, 348 bp, Homo sapiens
  chr15:90358102-90358450
  hyper
cgtctttttaaagggaagtaaccggacccgaccactactccacccgattcacccctagcgggccgcccgcccgcagctccgcccgggctcctcccccgtccgcccgcggcttcccgggagccccccagggctcctccgctcctccgacggcccggccttccccccggggcctgggatgcaccagggctcctgctgcccccgacggggtccctgtcgccgcagcccgcgggacccgccggccacatctggacggcatctgccgcgggggaggggctcagagcctcgccctgagtgtcccgcagggagccttgtgcatccggggcaggaagccagcgcatcccgtgcaga

SEQ ID NO: 126378 - DNA, 30 bp, Homo sapiens
  chr15:90437123-90437153
  hyper
agaagcggactagccgtggcttcccatggt

SEQ ID NO: 126379 - DNA, 540 bp, Homo sapiens
  chr15:90455669-90456209
  hyper
ggtggggccggaggtcggcgtgaggcgaagcccagccttcggagacctgtctgggggtcgggaccctctctcgagggcaggcggacaggcggggagctttaagccgatctgtgtcatggggtcgctgggcgggcgcggcggcaggggcgccgggagcggcggactggaggggcggactgaaggcggagaggcggctttggcaaccccagttttcccccacccgcatcccacccccccacccgatcctgttgcggggttcgagccggggcaggggaggccgacccgaggccgtgagcccaggcctacccctggtgggcggcggggtcccaggcccctggcagccggacgctctgcaccgccttgttccggagcgcgccgtcgtggtagatgcggctcattctcccgaccgcccgggcaccccggcacagagccggcgcactgggctgggggcgcggcgcgggaagtgctgcaggacgcgcggggacccgcgattcccagccggcggatccgggaatggcgcggcccggccctcaggcgttc

SEQ ID NO: 126380 - DNA, 30 bp, Homo sapiens; identical to SEQ ID NO: 10391
  chr15:90627537-90627567
  hyper

SEQ ID NO: 126381 - DNA, 69 bp, Homo sapiens; identical to SEQ ID NO: 10392
  chr15:90628226-90628295
  hyper

SEQ ID NO: 126382 - DNA, 30 bp, Homo sapiens; identical to SEQ ID NO: 10393
  chr15:90630474-90630504
  hyper

SEQ ID NO: 126383 - DNA, 370 bp, Homo sapiens; identical to SEQ ID NO: 10394
  chr15:90631579-90631949
  hyper

SEQ ID NO: 126384 - DNA, 30 bp, Homo sapiens; identical to SEQ ID NO: 10395
  chr15:90633802-90633832
  hyper

SEQ ID NO: 126385 - DNA, 82 bp, Homo sapiens; identical to SEQ ID NO: 10396
  chr15:90634776-90634858
  hyper

SEQ ID NO: 126386 - DNA, 30 bp, Homo sapiens; identical to SEQ ID NO: 10397
  chr15:90645565-90645595
  hyper

SEQ ID NO: 126387 - DNA, 30 bp, Homo sapiens; identical to SEQ ID NO: 52515
  chr15:90744665-90744695
  hyper

SEQ ID NO: 126388 - DNA, 30 bp, Homo sapiens; identical to SEQ ID NO: 52516
  chr15:90777187-90777217
  hyper

SEQ ID NO: 126389 - DNA, 30 bp, Homo sapiens
  chr15:90777577-90777607
  hyper
gtcactggagctagcgtttccgggaaacct

SEQ ID NO: 126390 - DNA, 218 bp, Homo sapiens; identical to SEQ ID NO: 52517
  chr15:90792592-90792810
  hyper

SEQ ID NO: 126391 - DNA, 195 bp, Homo sapiens
  chr15:90808536-90808731
  hyper
tttcccagagaagccgagtgcccaaggcactgggctgtcgccgtcagaagactgccgagcggaagccctgcccaccgaggtggcggagacaggcaggcctgggcagccgctggggcggagggacggctcttggaaacggaatccgtactttaattaaagtttatgcagttttccaggagcgtcctgtacctcatt

SEQ ID NO: 126392 - DNA, 90 bp, Homo sapiens; identical to SEQ ID NO: 52518
  chr15:90891917-90892007
  hyper

SEQ ID NO: 126393 - DNA, 138 bp, Homo sapiens
  chr15:90895266-90895404
  hyper
cggttccgggggaccggtagctggggaattgggtttagcactttccaacgcttggaactggacatccacggctccgagtcctttgaggtcttgctcgggactacgtttcccagaaggctaggcgataattgacagctc

SEQ ID NO: 126394 - DNA, 30 bp, Homo sapiens; identical to SEQ ID NO: 10399
  chr15:90895795-90895825
  hyper

SEQ ID NO: 126395 - DNA, 30 bp, Homo sapiens
  chr15:90931159-90931189
  hyper
caccggcagcctttcggttagagttgcgga

SEQ ID NO: 126396 - DNA, 30 bp, Homo sapiens; identical to SEQ ID NO: 52521
  chr15:90931975-90932005
  hyper

SEQ ID NO: 126397 - DNA, 34 bp, Homo sapiens
  chr15:91072782-91072816
  hyper
acctgctcgaggtccggtcgcccaggttccacct

SEQ ID NO: 126398 - DNA, 30 bp, Homo sapiens
  chr15:91260173-91260203
  hyper
tggagaggagagaccgccaaaacatcgcag

SEQ ID NO: 126399 - DNA, 180 bp, Homo sapiens
  chr15:91260438-91260618
  hyper
gggctttggagatacgcgtccctcccggcgctgtacggcgaccccgccccagcagcctgagggggcgggaacagatgtccgagtgcgacagtattggtcggcttccccaggaagcagccaatcggaataggcaagcttccggcgggaagtgagccagggcttggcgcggcggccgtggtt

SEQ ID NO: 126400 - DNA, 131 bp, Homo sapiens
  chr15:91414299-91414430
  hyper
ggctggtcctgccgccgtgcagtcctccctcgacctgggagtggaggaccccaggtccgccgtccctgggcacttaacccggtcaggctcaaattcgtcgcccaggagtggggaagcgggggacggagagg

SEQ ID NO: 126401 - DNA, 31 bp, Homo sapiens; identical to SEQ ID NO: 10400
  chr15:91414432-91414463
  hyper

SEQ ID NO: 126402 - DNA, 121 bp, Homo sapiens
  chr15:91427347-91427468
  hyper
tcccctcagtacccgcggacaccctgggcttccctgggcccagcatctgcctggggcctcgccctgggctccccctcctgacccccaccttgcgccccttcccggtgttcccggggcgctg

SEQ ID NO: 126403 - DNA, 278 bp, Homo sapiens; identical to SEQ ID NO: 52525
  chr15:91427788-91428066
  hyper

SEQ ID NO: 126404 - DNA, 165 bp, Homo sapiens
  chr15:91475571-91475736
  hyper
ctcaatgaggtgcacgccccccacgtttccttcccagtccccaccacccaggtgccgcagccggcgctccgcggccgacgcgcccaccgatggggtggttgatgtagggggtcccctcggggtccttccgccgctgctgccggtgcttgcgagccgcgaagtcgg

SEQ ID NO: 126405 - DNA, 30 bp, Homo sapiens; identical to SEQ ID NO: 10402
  chr15:91477883-91477913
  hyper

SEQ ID NO: 126406 - DNA, 30 bp, Homo sapiens; identical to SEQ ID NO: 52528
  chr15:91537652-91537682
  hyper

SEQ ID NO: 126407 - DNA, 30 bp, Homo sapiens; identical to SEQ ID NO: 52529
  chr15:91565598-91565628
  hyper

SEQ ID NO: 126408 - DNA, 30 bp, Homo sapiens
  chr15:91565868-91565898
  hyper
caggaaggggacggcgtcctgaaagggaca

SEQ ID NO: 126409 - DNA, 901 bp, Homo sapiens; identical to SEQ ID NO: 52530
  chr15:91642936-91643837
  hyper

SEQ ID NO: 126410 - DNA, 30 bp, Homo sapiens; identical to SEQ ID NO: 52531
  chr15:92396225-92396255
  hyper

SEQ ID NO: 126411 - DNA, 444 bp, Homo sapiens; identical to SEQ ID NO: 10404
  chr15:92459206-92459650
  hyper

SEQ ID NO: 126412 - DNA, 30 bp, Homo sapiens
  chr15:92936383-92936413
  hyper
cggagggaaggcgggcgctgagtctcccat

SEQ ID NO: 126413 - DNA, 990 bp, Homo sapiens; identical to SEQ ID NO: 52533
  chr15:92936663-92937653
  hyper

SEQ ID NO: 126414 - DNA, 364 bp, Homo sapiens; identical to SEQ ID NO: 52534
  chr15:92937696-92938060
  hyper

SEQ ID NO: 126415 - DNA, 171 bp, Homo sapiens; identical to SEQ ID NO: 52535
  chr15:92938122-92938293
  hyper

SEQ ID NO: 126416 - DNA, 213 bp, Homo sapiens
  chr15:92938315-92938528
  hyper
cggctcgccgggccgggcccctctccggaacctccaaagggcggtagacgacaggtggggaggcagccggggttctgaggaggcccgaggagagcttcctggccctgggcaaggggaaggtgaggtctcaaagagggcagaaggtctcttcttctgtgggatttgtgctctgccaggcgctcttctcgagtcccgcgccgcgtgcgcccctcc

SEQ ID NO: 126417 - DNA, 907 bp, Homo sapiens; identical to SEQ ID NO: 10407
  chr15:93198353-93199260
  hyper

SEQ ID NO: 126418 - DNA, 30 bp, Homo sapiens; identical to SEQ ID NO: 10408
  chr15:93257898-93257928
  hyper

SEQ ID NO: 126419 - DNA, 116 bp, Homo sapiens; identical to SEQ ID NO: 52539
  chr15:93352979-93353095
  hyper

SEQ ID NO: 126420 - DNA, 144 bp, Homo sapiens; identical to SEQ ID NO: 52540
  chr15:93353295-93353439
  hyper

SEQ ID NO: 126421 - DNA, 230 bp, Homo sapiens
  chr15:93363549-93363779
  hyper
gaaaccccatttcacgttttggcttcccaggagccgcaacccaggccgaccagcgcacaggtttcaggcaggaaatgtcagggcgcctttaagaggaatctgcggtaattttccaccgccccgccgacgcggcgggatgctgggcgcggcaaaatgcggctgcgcggcagggcgcgcgcctccgttgccaggataccgcctcctccacccccggcgcccagggccctttt

SEQ ID NO: 126422 - DNA, 30 bp, Homo sapiens; identical to SEQ ID NO: 52542
  chr15:93427723-93427753
  hyper

SEQ ID NO: 126423 - DNA, 975 bp, Homo sapiens
  chr15:93443565-93444540
  hyper
gaggctctagatggcggctgtgccttagagagagcgcgctctgctccctgcctttgcctcactttacgcaactttccctaactttcgggcagcctcagggggcccccgtagccccctgcctttcctagggacttactggggtcgattcgaacctttttttgggagaaaagcagcttttaggagctttcttttcgtgccttgttggaaagaagcagccgtactgagagcccaggtcgttgttttttccagcttagaagccatggcgcacctccatttttgtgcgctctcctaatgaggttttttttctttcggacctgttttagtattaattattgctttatttttttgaccagttaacatatttgagggttattttatttatttttcgttttttaacggaggattttgcctttatttttaattatttgggatctgatatttttctactagtagataggactcttggtttggacatactacatggatcaggtaagttcacgatcattggtgataattttaaagatttatttgtttaagtttgccttgttttctgtaaatacgagaaattcttggatgacgcaataagatacagagattgttatttgtatctagtgtgctactttgagaaagtttccttattgatagtgatgcttccactgttcggtttatcctgttgttttttcttttaaggaaaaaatagaaatatttagttttttggtgcttaccgttgttgtgttataacaatatcgttaacatcgtcaggactttgttcctgataataaaaagcatcgatagaagccgggaccttacctttctttcaacttttgacagtaaatacctgggcacaggacttcaaagcaaacacagattccccctcccccttaatatttaagaattaaaagatgatgagaaataaggacaaaagccaagaggaggacagttcgctacacagcaatgcatcgaggtatgagctat

SEQ ID NO: 126424 - DNA, 30 bp, Homo sapiens
  chr15:93447762-93447792
  hyper
gcttctttcctggacgcgtttgctcctggc

SEQ ID NO: 126425 - DNA, 753 bp, Homo sapiens; identical to SEQ ID NO: 52545
  chr15:93615625-93616378
  hyper

SEQ ID NO: 126426 - DNA, 444 bp, Homo sapiens
  chr15:93616396-93616840
  hyper
cgcgccgccccccgcgcgcccctccctcgccatccatcactcggttctccgccaatgtcgacgcggccccgcgccccagccgcctgcgcaccgccccctcgcgctcgggtttcagcgaggccggcgaggtagccggaggcggccgggcggggacccaggctgcccggccgcagcgctcgccgtgaggacctcggaaaaccacggccctagatcagagggcgcgccacgctccccgaccctcgcgccatctccagcccgcggctgtccttgcaaaccaggcccagcacccttgggaggccgcagggcatgaggcggggcaggacgcccccttaatcccctccacgaatatccaatccaagtagaaaaactgtccttggaggcaaatcccagccctactttccaaccagactgccgaccccaagcttccaccgacgccccctggct

SEQ ID NO: 126427 - DNA, 30 bp, Homo sapiens; identical to SEQ ID NO: 52547
  chr15:93631095-93631125
  hyper

SEQ ID NO: 126428 - DNA, 20 bp, Homo sapiens
  chr15:93631375-93631395
  hyper
tgggagaactgattctacct

SEQ ID NO: 126429 - DNA, 1634 bp, Homo sapiens
  chr15:93631632-93633266
  hyper
cgtacgccggcgcgccgaggcaaagggccgccgggacgcgagcccacgcggtgcactgcgccgacatccccgagggcaggagatggccaggcagctccgcagccgggcgtcgagcgggaggcgggggcccgggcggcgcgggccaatgggggttcacggcgggacagtcgggtggccggctccgtccggggctccgcgagccgggctgagggaaggagctcccagcccgcacacggtgtaagggacgtgtgccgggtctgcccaaccacgcgcgctggcggctgcccgggggagagtattttaggaaaaaagaacaaacaccaaaccacaaaaactttcctgctgccaacagctaaagcgatagaggcgcagcaaagctccaaatgtgggcaagatgggagcaagatgagacgcggggctaaggaagaccaaagcagcgccgtggccccggcatgtgtcggcggcgcctcggagatgtcagagccgggtctgcccggctcccgacccgcgcttaccttggcggctgcatgagcccctgcggcccgcggggggtggcgctggcggggctgcgggagaagagggggtgtcggggcgccgctcgtctgccccggggcaaggtgggaggggctccgctggcgctggtccccgccgccccggccggctcagcagcggcccggggagcgcctcctgctcccgggctgcatgcctgcgagcgcctggcggagccggcccgggagcgaacggccagtgcttccccggcccagcggctcgggcggcgcagccagcgctcgggagacaactgcagagtggggcggccgggaccagccccctccctcgcccggcccccgcccgccgccgagcgcggcgtcgcgaggttcgtttgcgcgccgaggggagggggcgggccgggcgcccgggccgcgggcggggggcgcgcgcgggcggggccggcagggaggggcggggaggagcggggtgcgggctcgcgttgccccgccccgccgcggccccaccctcccgcatcagcaccggctgggtgggtgcggagtgcgccagcggccaagtcaagactccttgaatgctcaggttagggggcgcgggcggcaagtgcggcgactccccggggcgcctccaactttccgaatcgcccgcagggttgcggtggagcgcacggtgtccttcagttaggcggtggtcgaggggagttcctctgagatttctggagaaggcggttacatccaagacaaatgctgttgcgctctgcggagacgcacctttgttctatagagattttgttgttgtttaagaatcttcctgaaaaaactaatacatatgtattacatgctaacacacgcatacattcttgcgtagaattgtacataactcaggagtgtctagagtgaaaagaccgtatcgcactccctcccacggccgcggctctcccacggccgcggctcccccgcggtaaccttcggtcagggtgtgctctgccgcggttctttccagtctctgcgcttttacatgcacacgcacagattgcgagtggaatctcctgggcttttcaaaagaatgttttcaacattaagcgcatgcacacagtggcttgaacacggccacgtcgggagcagtaaatc

SEQ ID NO: 126430 - DNA, 31 bp, Homo sapiens; identical to SEQ ID NO: 10414
  chr15:93655833-93655864
  hyper

SEQ ID NO: 126431 - DNA, 1066 bp, Homo sapiens
  chr15:94774273-94775339
  hyper
tctgtggatctgggcgggcatcttccacccacagtcgcgcacacgtggcataggttaataggctgtctggctcgggtacctcttcccagggtcagggcgttacaaagggaggctgctgtcttcccatgaatctattagggacctacaggagcgaagagaacccttctgagtatcagcgaagacagcttattaagactttacgagtttgcaagccatcctcgtcctatttcctcacttcggactttttggacacaccttccttttcctgtgagccaacccaaacgaatgagttacaagtaatcgccttctctacgcccagccagtgcccagcaccaagcatagcgcctccttgcaacacccggccgagctcccggcggcagcgcgggcgcttgggtcggaggctgctcaaaggtgacgcgcggccgcctcctcccctttaggcggggctcgcaagggcggtgggggggcccgaggaagtccgggggccctcggtgatgcccccgcccccgccgcgtcagggttgctccctgcgcttccgagtggcgactgcagcgggtccggtgcaggtgaggggcgcgcgcctgcccagctttgcagcccccgaacgcggcctcgcacaggtgagggcggtgccgggttcacctggcagcgcgcgtgggccgggcagcacggtcgccgcctgggggtgggcgtcttctctcaaccgaagctgggagttggggagctggagggtccaggatgagaattcagtggcgctactaccccggagctgcttgtggttcagagatcagaaaggtgtcctgaggactggaggcagaaatccaggcgtggcgtactggaaggcgcactaggggagggcagcctggcccagaatttctttgcattttaaaggccacacattcagtctccccggggcgctacggaggtagtcaccgccacatccaggactccttccacagaggtcagttcctcagctgggtgggctttaatacgctctcttcgtagagacccggaggttcaactttaattctttgcgctgacatttgctcaacgacaccggagcaga

SEQ ID NO: 126432 - DNA, 14 bp, Homo sapiens
  chr15:95387987-95388001
  hyper
agtcctttggagtg

SEQ ID NO: 126433 - DNA, 101 bp, Homo sapiens; identical to SEQ ID NO: 52556
  chr15:95388253-95388354
  hyper

SEQ ID NO: 126434 - DNA, 71 bp, Homo sapiens; identical to SEQ ID NO: 52557
  chr15:95388665-95388736
  hyper

SEQ ID NO: 126435 - DNA, 30 bp, Homo sapiens; identical to SEQ ID NO: 10416
  chr15:96284567-96284597
  hyper

SEQ ID NO: 126436 - DNA, 237 bp, Homo sapiens; identical to SEQ ID NO: 52559
  chr15:96596584-96596821
  hyper

SEQ ID NO: 126437 - DNA, 1134 bp, Homo sapiens
  chr15:96864556-96865690
  hyper
ggaaaaggccaggagcgggaaaaggaagaagaaacgaaaaagattctccccttttcttaccttttgcccctcctttcccctcccgaaatttgcgcctacttgattatttgcagctgtttcgaacctcaaggtttgttcacagtagcgagagagacttgcgcttggagaagtgaaaagccattttcgcgccagggcttcgctgcttgagtttgggggttttgctctccctcccagcaaactcccctcaaagccttgctaacttcgtcaagccctgccagcctttactccttggccacttgggttcgcagtacccagccaagggccccgggcgggtttccatcgctgggggtggcctggtacccccaaagctgagttcccgcctaggagaggacgctgacgtcctggggcttcctcggtgcctgtcacccagccccctgccttcctcctcggcctcagatgtcgtcccacctgcccacgagcagggaacctggaacccactctcccggcagtccccagcgggttccgccacccggcggccgcccctgacaccgagtgggtgggaggaagaggcagctggcggggatgggccattgagacctcttgaaaaatattaaaagacaggatgggtagagatttctccgggagaaagttcgagggtgcatcgggtcgcggctgggaggagtacccgaaatgccagcaggagaaatgcaacctgtttaggccacaccttcaatccccgaggctgtctggagagactgcgtgcgggggacttgccggcgttcccacaccgcgcctgcaatccactcccgcggctgcctggcctctgccactcgcggcttgaagccagtggctctcaagccctcggccccgcggcggcccgcgcagccttcacccggcgccggcaccacgaagcctggccgcagtggactccccgcagctcgctgcgccctggcgtctcccgtcgaggagggagggacggaggcctgagccgggagctccctggcggtggtcgggccgccccccttgaggcctgctcccccctctcggcctcgccaaatccctgaaagcccagtcccccttcgtcaccccgggggcttctaatcactcggtatcgatttccctaactcttttcat

SEQ ID NO: 126438 - DNA, 30 bp, Homo sapiens; identical to SEQ ID NO: 52561
  chr15:96869855-96869885
  hyper

SEQ ID NO: 126439 - DNA, 1254 bp, Homo sapiens
  chr15:96873420-96874674
  hyper
cgggtggtgcgcgagcggcggaattcgtgacatcgccaagttgcgagaggcaaactccccgattccatccaaagcctctcgcggagcctttaagagacgttgtgtgtgcgcgctgcgctagtctccccgccggggcggaaacctcgggtgcgggatgtggggagagcagaggcagcgctcgcagggccagcacgggcccatccccctctcggcggcggcggcggcggcggcgcggccaccccgtccccgcccccccaacccccggtcccccgcgtgccccgcgccgcgccggcgacgccgctcgcgctaggaccgggctgcgcccgcggccgccatggcggggccgccgcagtccggccaatgacggcgagggggcggcgcgcgcgcgcctggccaggccaaccccggctgctgccttataaggcgcgccgtcgccatggcaacgtgcgctaagttgcagcagtcgtgtcaaagttcactatatagagagctcagtgagctgatcgcggagaagccacttctgccagccccggcgcctataaatcgcattccctcccgcgcccccctttttagcatatttgatcactttgattctctgttcttttctctccgcggtgtgtgtgtgcgtgcgcgcgtgtgtgttttcttcttctcctcctcctctccccgagttgcctcctttctccgggtgccgtactgccttttttcccctctttcattctttctctccgtctttttctcccccctctgcgcacgaaggatgtgcttctaggtggtgatctgccctcctctctctcttttatcatttctcccccgccgccggcgagttgactctttccctatgtgtgtgaggcggcggcggcagcagcagcagcagcggctccggcggcggcagcagcggcagcagcgacttcagcggcggcggcggcgctagacgcagcggctccgggcccgacccggcggcttcggcggcggctccggcggcagcggcggcccgggcggcccgcagggaacggcgagcggcctccacccagcgactgcgggcggcggcggccggagagagcgaggcgcgcgccggacgcccggggcaggcggcggcggcggcggcccagcgccaggacgacgccgcgcagcgcccgacgcggaccactttcatgctgattcccccggacccgggcagcgctccggccactccgcgggccgccggcctccgccccggcctgcctggctccctgggcgcgcccgcacccggcg

SEQ ID NO: 126440 - DNA, 635 bp, Homo sapiens
  chr15:96875061-96875696
  hyper
ccaacaaagctgagccgagagaaacaaacaaaacaaacacaccgggccagacaagccatcgacaaaactttgcaaaagcaaaaacaaaaaaggaaaaactaaccaacctcaaccaaccagcccccgagccacccggggcgccctcccgcgccctcttgcaccctcgcacacacaaaaggcggcgcgccggagcccgagacccggggagccgccgccgccccgccgccgcccgcagccaggggagcaggaagtccggacgcagcccccatagatatggcaatggtagtcagcacgtggcgcgacccccaggacgaggtgcccggctcacagggcagccaggcctcgcaggcgccgcccgtgcccggcccgccgcccggcgccccgcacacgccacagacgcccggccaagggggcccagccagcacgccagcccagacggcggccggtggccagggcggccctggcggcccgggtagcgacaagcagcagcagcagcaacacatcgagtgcgtggtgtgcggagacaagtcgagcggcaagcactacggccagttcacgtgcgagggctgcaagagcttcttcaagcgcagcgtgcggaggaacctgagctacacgtgccgcgccaaccggaactg

SEQ ID NO: 126441 - DNA, 373 bp, Homo sapiens
  chr15:96876447-96876820
  hyper
aaattcgccgagcgccgcgagccgtgctttgccaatggcgcgctcggcgcggggcgcgggctccgggttggggcgagccaacgccggggtttctttgtgtttctgcgagagcgactctcccggtccggagtcagataacagcctgggcccgagcctcgccggctttccccggcccttacaggccctgcccaggctccgctagtgccggccgcctgctccctgcctctcccggcttcctctctctttagccggcctctctctctccgccctctccctccgtctctttctccgagcacactgattagacagacgccagacctccgctctctgcttgtctctcactgggggggttccccgccgggctggggctggg

SEQ ID NO: 126442 - DNA, 885 bp, Homo sapiens
  chr15:96883778-96884663
  hyper
ctgggacccagcgagcgcgttctgtgtgaaattgacgagatctttaaaaaagctgctaaacatggcgactctttccctttaagtgtctctttttccttgctgggtttttttttttttttttttttcatctgatctgagctcgctttatttcttttcccaaccccgctccccctcctcctcgtggcgctcgggggtgtgagagaacccagttagacgcgaaatgcaacaatagtgcaaggagagagaggggcgctcgctgcttctcgccactttcaaacaaacctgggggaagattgagcccgggggggattccagcctgctcgctcggctcgcggtcgccctgcctcggcctttcaccattagctctccctgggccgcgaggagctggggctcaaagttagcgggcgacgtccgaggcttagcctctagccggctgcagggacgggggcctggagttggcagctgctacgggaaagtgcctgccccccagcccccgcccccacttacgtgcggcagaattccgccagcgccccgggaaagtccggggtgccgggcgcgcggagctgcactcctgggatgtgcattaagcggcgacaggcggggggggcgagggcgggggcggggggcggtcagggggagctcgagcgtgtgaaactctgcctcgaatctcgcttttgacttggtcctatgagctgagccaacatggcgtctcccactgcaccgcgagcgccgggctgccaggctcggcagggccgggtaatagaaaacacattggttaccaaaaagaaaaaaaggagggcggggggcgctaaaggccattccgtctgcaggcagaaaacccttttttaaactcttgctggcaagtgagtccggtcctcggttctt

SEQ ID NO: 126443 - DNA, 30 bp, Homo sapiens
  chr15:96896718-96896748
  hyper
tgtgacctgctgtgccgtagctcagacttc

SEQ ID NO: 126444 - DNA, 708 bp, Homo sapiens; identical to SEQ ID NO: 10423
  chr15:96897392-96898100
  hyper

SEQ ID NO: 126445 - DNA, 755 bp, Homo sapiens; identical to SEQ ID NO: 52569
  chr15:96899903-96900658
  hyper

SEQ ID NO: 126446 - DNA, 134 bp, Homo sapiens; identical to SEQ ID NO: 10424
  chr15:96903476-96903610
  hyper

SEQ ID NO: 126447 - DNA, 30 bp, Homo sapiens
  chr15:96910903-96910933
  hyper
gaacgcgaggaacttcgggcaatctttttg

SEQ ID NO: 126448 - DNA, 480 bp, Homo sapiens
  chr15:96911211-96911691
  hyper
aaggggacagcaatgcgtttcaaaaaaaagttgcgttcctggccagcagttgcctaagctcctcctggagtcactggttgcctgctagatagagctgccccaaggggatggggacacagggctggttgggtcctcgggtggggctcgaggaacctgctttcaggtgaattcgttccgggcgttcggtgtccctgggcttgcctaggggtactggggacccttagtgggccagaacccgaagctgaacgtgaataagggacagggtaggacctgaaattgcagagacatagaaaatcaatacgtggtcgggagtcaactgcgcgcgaccaagggctctgccctccctctctccgttgatttggacgctgggaagctgcccgccgtccttccccaccccctttgcccagccttggcaagacctctccggaaacatactcgcgttaaggaactgggaaagcttcctggcccggagctaggagc

SEQ ID NO: 126449 - DNA, 54 bp, Homo sapiens
  chr15:96911763-96911817
  hyper
cgctgggatccatctcctcagccccggtttcccgctctgcgagcgggggaagaa

SEQ ID NO: 126450 - DNA, 30 bp, Homo sapiens
  chr15:96951791-96951821
  hyper
gctgccggggttcagcgttggttcccctct

SEQ ID NO: 126451 - DNA, 1007 bp, Homo sapiens
  chr15:96952091-96953098
  hyper
tcaggaggaggccaagccagacgtccagctcaggggcacttggccatgctgaggactgcgcacctgggccacgtggtccgtgggacaccctggagctcgggatccctttgcaagggttggggagagataatgaaacccgcatttgcgcgctccccaacccgggccatctgattagtcatctgagttagcccttcacgtgcacacgtgggacagaaaaactccaacagatcttcatgtttcagttccaggtttatgaaaataataataggatgggtttggctaattaggaaaatggtttgaaccagttacatcaccagcccagtgaaaagccgccgggatgccggctgacgtgaccttggtatcagtcttctatttcacttatcccttgtgttgctctcggtcaggcccccctccaattaaaaaagaagaagaagaaaaaggacaagtgcaaataggcgcctctcgttttgaggaacgcgcctgagcagcacgtgtgtacgcagccccagaggcccagaactttctcccgcaaccgcgccccggaccgcagtaatcccggcggggcagggccggggagctggggacggggtggtctttagggtggcggcttcccccgaccccggacccgggaaccggccgccggcgcggggcgcgatctgcactgccggtcccacaggagttaaaccccgaggcagacaaaagggaggccgccgcggctcctttgctcggctgtcagttgaaaagagaaccgccgccctctggacttcaactcccgacggaaaaggcattttattatgggttatgacaagttgcagagagacgcggacaactcagtaagaaggagcggcgagcggaatcaaaaatgctcgagatgtttgcaagacagagcgaacacggcttcaaatgacaggtgttagcaggactccagacgggatctgcgggatcggccgggtgggagccgcaccgcacggcgccgggtcggggagagaacccggcctggggaggcc

SEQ ID NO: 126452 - DNA, 142 bp, Homo sapiens
  chr15:96953131-96953273
  hyper
cgcgcggcccggagccgaccccgcctcctcttccgaaagtcctaagtcaggacagcggcagatcgtcccagaaaatcagcgccaactccctctgctcaaatttgctactttgtgttttagttccaggcgggaagtctacact

SEQ ID NO: 126453 - DNA, 173 bp, Homo sapiens; identical to SEQ ID NO: 52576
  chr15:96959375-96959548
  hyper

SEQ ID NO: 126454 - DNA, 241 bp, Homo sapiens; identical to SEQ ID NO: 52577
  chr15:96959719-96959960
  hyper

SEQ ID NO: 126455 - DNA, 940 bp, Homo sapiens; identical to SEQ ID NO: 52578
  chr15:96960189-96961129
  hyper

SEQ ID NO: 126456 - DNA, 119 bp, Homo sapiens; identical to SEQ ID NO: 52579
  chr15:97491100-97491219
  hyper

SEQ ID NO: 126457 - DNA, 204 bp, Homo sapiens
  chr15:97491238-97491442
  hyper
cgcccgcgccgcccgcctccccgcgctgctgcccggctctcgggctctcgctttttttttttttttttctttccgcggcagtcttaggattcttgtcacatgatggcttcatcgggcccttctcctcctgatcctttcaagctctttctcctgcctggcatatcaaaggagatttgtgggtcaccgagccgggacgcagcatat

SEQ ID NO: 126458 - DNA, 30 bp, Homo sapiens; identical to SEQ ID NO: 52581
  chr15:98061086-98061116
  hyper

SEQ ID NO: 126459 - DNA, 30 bp, Homo sapiens; identical to SEQ ID NO: 52582
  chr15:98447681-98447711
  hyper

SEQ ID NO: 126460 - DNA, 200 bp, Homo sapiens; identical to SEQ ID NO: 52583
  chr15:98503354-98503554
  hyper

SEQ ID NO: 126461 - DNA, 267 bp, Homo sapiens; identical to SEQ ID NO: 52584
  chr15:98503609-98503876
  hyper

SEQ ID NO: 126462 - DNA, 842 bp, Homo sapiens
  chr15:98503946-98504788
  hyper
cgagccggtgccccatcgggtaccgcacggctgccgcggcggccttaccctgccgcgagcgcctgtgacagcggcgccgctgtgctcgcgaccccggctccgggcctctgccgacctcaggggcaggaaagagtcgcccggcgggatgggcggggaggctgggtgcgcggcggccgtgggtgccgagggccgcgtgaagagcctgggtctggtgttcgaggacgagcgcaagggctgctattccagcggcgagacagtggccgggcacgtgctgctggaggcgtccgagccggtggccctgcgcgcgctgcgcctggaggcccaggggcgcgccaccgccgcctggggcccgagcacctgcccccgcgcctcggccagcaccgcggccctggctgtcttctcggaggtggagtacctgaacgtgcgcctcagcctgcgggagcccccggccggtaagcgcaggcgagcgcctggggttcccccgccaggctgcggggccggggaggggctgggaggccgcgcaccctcgggatgcccacctggcaggtgagatcagggcgggcttccgggggtggggtccggcctaccctcgcgggtaaggagagaccgcaagtcctgggtgcgcagctcttcctggcgccccgcccctggcccgccgggcctgaccgggaccagtggctcgggattttctaggaccgcgacgggagggggccattgggtgcggtgggaacctgtgattggacaatgggggatccagaaatctaggtcctgttccttctggtccaagaaagggacggtggaaccggcggctatgaggttccattctgcggtgcccgtgtcct

SEQ ID NO: 126463 - DNA, 345 bp, Homo sapiens
  chr15:98836082-98836427
  hyper
gcaggggttccaaatggcaggcgtcctctcccctctgtcccacaaagaacagtccgtcccctgggctgggagctgggcccggagccccggggcagcccgcccggccgtgctcgctgcgcccccgggctgcgttcatcaagcgcaactccaggcgcgcgccgcaaccgcgcagggcaaccgggggctctcccgccgaacccgccctcacttacatctttctcgtcgcccttcaggggctgctagtttgctaatgctgccaggaagctctcctcccagttttctagctgccgttccagcgagcagagagagagcctcggtggtaataagcctcgcacagaacacagc

SEQ ID NO: 126464 - DNA, 30 bp, Homo sapiens
  chr15:98964967-98964997
  hyper
agccaggaggcgggcgcgccccgggagccg

SEQ ID NO: 126465 - DNA, 100 bp, Homo sapiens; identical to SEQ ID NO: 52587
  chr15:98965274-98965374
  hyper

SEQ ID NO: 126466 - DNA, 518 bp, Homo sapiens
  chr15:98971413-98971931
  hyper
aagaagaagaaaagacacgcgagcccctttgaagaataaatctcagctgtgttatctgtcttgtcacagcactgaaacgtggggatggggagaacgtagttccacgttggcacagatgagctgtttacatcgaggcggacgagcaggcaggagcgtgcagtccgtgcggctctgtttctttcccctgttaagcgcagagtttctagctgcagctaaagacgcccacccaggccgagcgcccttggattctgtgggagggcggccccgcgtccaccgcctgggggcaccgactcggggctgcggacctcggagcgcgcccggcgggctttggtttgggcaaggctgccatcgtgtggccgccgtgggtatttccctcggaaagcggccgggcagcgagcaggcgcccgcgcctcttctttttacgggagtccgcgctctccgcaagtctgtcctgagatcgccgttttctcccaccagccagaatggggctcactgctgcaacccgggtctcagtcttc

SEQ ID NO: 126467 - DNA, 1309 bp, Homo sapiens
  chr15:99090779-99092088
  hyper
tggtatagccaatagcgtcatattcagccctgtttaattcccactgtcttgggtctagaatttaggcttttgagaaatctttattgaattaatgaaaactcaaagaccacgattctgcattcccccaaatcctgaagtgcagtaggagcccatgcagggcttgggacgggctttttgcctcagcagccaggacagcctctgcatccgtgaccacctccccgcccccctcgcattcccccccatcccctggtgatatccttctagcgcaggctcgtgctctggaggcggggtggggccgggattctgcagctgtaaccaactcccccgctgggggcatggggctggtccctggggcgcacagagaagttgtgacagataattgacgtgatcgggaggggcgtccaggcagacctcatgtgacttctaaaaccaacccacaaatctgaagcgtggcttgcgtggtcagccgcctgcctggcacccggtgaacagtttctcccggactctctgcatctagccccaaagaatctaagattctttgtctagaaaagtgccctggtcttccctggcacccttcgcggtgggtttccttgactccgcataaactcccgttccagcccaaatcagaggcggtcgcagcagccgttcctcgtctccatcagcatccgcgttgccatttccccgtcctgagctgttgctcatatcaaatgtcactcggggatgactaagagccgatgttgatgaggagccttcagcgttacggtaaaggagctcgtgcaaacttagaccccagtcatctgacggtcacgtgggcgggcgtcgcggcccaggcccccgcctcctccgtcctccgcgattcggacatgacacggtcctccgcgaagggcaggcgttacataaacccggcgagctcacaccgtgcggcggggagcagcgcgaacgctcgacccggacacctcccttccaggtcccgttccgtaggcggggccgctcccgaggcacaaggaggcctgcgcggcgcccgaggtgtccggatcccaaaacaggaccccaggagtttctcacactcaggactggcccctagttgtcaatccagaaaaggcatcctccgtcctagatccagcctgtatttcacggaaagcgtttcctcccccatccccaaagccggcaggggtggggcggagaggggaggcccggggagactgactctattatataaacttgtaattggctccggttcctgcggctcgggcggcactgcaggacgtttccaaccagatgggttgtgaggccccgcggcttcctcctc

SEQ ID NO: 126468 - DNA, 30 bp, Homo sapiens; identical to SEQ ID NO: 52591
  chr15:99190542-99190572
  hyper

SEQ ID NO: 126469 - DNA, 30 bp, Homo sapiens
  chr15:99190780-99190810
  hyper
ggtccgggaggccacgccagcgcgacccag

SEQ ID NO: 126470 - DNA, 510 bp, Homo sapiens
  chr15:99191215-99191725
  hyper
aaatgccgcatgcacgcatttatttattttgcaacagctgcaagaaacaatgaagcttttcaagaaccggggaaacgcgctttccagccgcgctgttgttgttttcaatgaacctctcccagccccgcactccccgcccacccctcccctctcctgcccacccctcccctgcctagcctttccctggctacccacccctgccccgccgagaccggaccggcggcgggggcattgtttttggagtcgggcgggaggggagggcgcgtgcggggtggccggcgcagtgcggtgggggcgggagcgggtgggcacgcgcgcgtgtctctgtgtgcgcgcgggaggcggtggggcgggagatgggggcggcgcctcgcagtctcgcgccccacgcccgggctccgctccgcacgtcttggggaaccgggctccggttttttgcgcgcgccggcctgggccgggccctcggcgcgccgctgctgcggcggtggccgctcgagtgtgcgagcgggc

SEQ ID NO: 126471 - DNA, 210 bp, Homo sapiens
  chr15:99191748-99191958
  hyper
cgcgcgcgcgcgagcccccagtgtgtggcagcggcggcggcggcgcggcgaggctggggctcttgtttaccagcattaactccgctgagcggaaaaaaaaagggaaaaaacccgaggaggagcgagcgcaccaggcgaactcgagagaggcgggagagcgagagggacgccgccagcgagcctgcccacggccggcgctcgcagaccctc

SEQ ID NO: 126472 - DNA, 583 bp, Homo sapiens
  chr15:99192161-99192744
  hyper
gcgcggccggcccgccgctttgtgtgtgtcctggatttgggaaggagctcgccgcggcggcggcggcgctgagggaggaggcggcggcgagcggagccaggaggaggaggaggagggggagccgctcattcattttgactccgcgtttctgcccctcgccggcctcgcctgtgacccggacttcggggcgatcttgcgaactgcgtcgcgccctcccgcggcggaagctcgggcgtccggccgcctcccgcgcggccagggccgggcttgtttttcctcgcctaggcagatttgggctttgccccctttctttgcagttttccccccttcctgcctctccgggtttgaaaatggaggccgacgacgccgacagcccgccccggcgcgcctcgggttcccgactccgccgagccctgggccgctgctgccggcgctgaggggccgccccgcgccgcccgccccgtccgcgcacccggagggccccggcggcgccgccttcggagtattgtttccttcgcccttgtttttggagggggagcgaagactgagtttgagacttgtttcctttcatttcctttttttc

SEQ ID NO: 126473 - DNA, 1770 bp, Homo sapiens
  chr15:99192791-99194561
  hyper
ttcatcccaaataaaaggaatgaagtctggctccggaggagggtccccgacctcgctgtgggggctcctgtttctctccgccgcgctctcgctctggccgacgagtggagaaagtgagtatgtgcccgccgcccgcggccactgcgggaacttttcctccgaggggctgcgccctgtttgcgaaacccgagttgccaccgtcgcagctgtcgggcccccgggctcgggagcggcggggtggggcgcagggcggctctgccgggagggaggctgcagcggacccgggacccgggctcgttcgtctggagccccgcgggccctggctccgcgcatccccgcgcgggaagggcttttctctttctccgtcctgacagcccagccgtgtttcccggctaggcgcgaggactcggtagggaagttggtgccggggcgggctccgcggttcccgggccccgcgacccgcacctcgccccttccatgcgcaagagcctctccgcacacagcgctgatcccctgcggcgcgcaggcagcagcgacagcaccctgggccgcaccgcgtctccgctgctggggctgaccgggcagtggggagcgggcagccgcccggcccgcggggtgcgagttgccctcgaggggggaggtgccctgcggagaggccccgaagccccaggacacgtctccaagcgcccgtcgctgcctcccgtcgcccaacgtgcttttgcccctcgggctcctcgggttcctggccttgcccgtcactttggcccgctcctcgttgggttacctgcccccggcgtcccggggctgggcggtggggtgaggggaagcgctctctgggcagccccccgggaagtgcgaggccgggagtcttcctcagcttgtctcttccggggagcgccactgggtccccagttcagagggctctgggatggtctcccagtttctcccgggccgggggatggaggggtactagggccgcatccgagtgtgcgttggtgggtgtgtggtcggagccgacgtgcattccgacacacgtgctcgcagcgcggggtgtagtcgccgcctcacggggacacctagacgcccgtccctggcgagaggtgtcgtacgctgtggtttcagcgccagggtctgcggcggcgcggggagggtgttgtgttttgcgagcgcggagccctggccttggttttgttgtggtcggcgtcgtgtcgccctctcttctgccgccccgcacttcctttgtacgtagttaataagcagtgtcgctccacattcgctgtcttttgcaatctgatagcttttgttttggtggtgtcgggtgggggttagtagggaagcgcggggatgcggggagcgagaactccccccggtgtctacggccggaggaggtgggggttttattcttctgaaaaagttgaaagtgtggcttactggtacattcaagatggtagggtaatttgaacacgattaaaagtttaaatgtcgcagaactgggactgggaacggtgagggcgtgttggtgagtaatggttgccgagggtatgcaggtggtgccgattaactttgaaaaaatcacgactgagccttcacgagtgaggcggggaaggaggaggcagcggaggttgtatggccccatcaccggggcaattcagaaaggctgtttctataaacaaatccttaaacgtctggtaagaaatgagtccgcgacggaacgagagcagatcgtggttcgcgtgtttactgccgagtgggacgcggactggggccgga

SEQ ID NO: 126474 - DNA, 30 bp, Homo sapiens
  chr15:99395830-99395860
  hyper
ccccactaagaaagcgggtggagggtggag

SEQ ID NO: 126475 - DNA, 53 bp, Homo sapiens
  chr15:99791470-99791523
  hyper
gccaatacacagatcgcttggcaaacgagcattttcccgcgcctatcgtgaaa

SEQ ID NO: 126476 - DNA, 30 bp, Homo sapiens
  chr15:99791915-99791945
  hyper
cactctgcggcccgcggcccctgggacccg

SEQ ID NO: 126477 - DNA, 30 bp, Homo sapiens
  chr15:99955056-99955086
  hyper
atgggcaccactcatcggtgggcaccgcag

SEQ ID NO: 126478 - DNA, 39 bp, Homo sapiens; identical to SEQ ID NO: 10433
  chr15:99955138-99955177
  hyper

SEQ ID NO: 126479 - DNA, 31 bp, Homo sapiens; identical to SEQ ID NO: 10434
  chr15:100107046-100107077
  hyper

SEQ ID NO: 126480 - DNA, 61 bp, Homo sapiens; identical to SEQ ID NO: 52596
  chr15:100273843-100273904
  hyper

SEQ ID NO: 126481 - DNA, 337 bp, Homo sapiens; identical to SEQ ID NO: 52597
  chr15:100273945-100274282
  hyper

SEQ ID NO: 126482 - DNA, 33 bp, Homo sapiens
  chr15:100346201-100346234
  hyper
gcagccctttcccaggcggtagcggggacggtg

SEQ ID NO: 126483 - DNA, 683 bp, Homo sapiens; identical to SEQ ID NO: 52599
  chr15:100881160-100881843
  hyper

SEQ ID NO: 126484 - DNA, 600 bp, Homo sapiens
  chr15:100881966-100882566
  hyper
cgcagagggaaggtagccgcaggacgcggggtgaagagggctgtgggagggggcgctacctgtgcccgggtccagtccccaaaccagcagcagcagcacgggcaggacgagcggaggcagcagggcgccgtcacacatggtacccgggaccggcagcccccccggaccgtggcggcgaagcaggagcgcgctaggcggcggcgccagccggagtgaagccctccagcctttggaaaaagtaattagcgctgcggacaaacccaacgtggtaaaccccaagccccgccttcccctcggaaggcgggaggggattgggccctcgctttcctccgccccgcctcctccttccctactggttgggatgggtcgaaaccacagtgcgtagttaggttgtcagcgctttcttacacgtggtttctgggcagtggcggggacacggcaccaggtggcgcgcgggagccgaccggagccgtgggaccctggaagagctggaggatgcggggctggtcttcagagcttgtcctcattttggaactctctcagcctgctgcccagtttcccgggaaggtagggcggaaatcgccccggccaagcggtttc

SEQ ID NO: 126485 - DNA, 562 bp, Homo sapiens
  chr15:100889931-100890493
  hyper
ctgagaccctcttcacgctggttgcaggagtagccaaccccgctccctggcagcccgtgagatgccacatcccctccagcagggggcggccggcatcggtcccgtcttcctaaaccggcgttggtgggaaatgccggcaccagctccctccccgctccagagccctgttttccccatttgtatttcactactttcctgttgagcttggattccagcctcaaattccgcgatttggccggcatcctaatccccgagtgactcttgccaaccactctctgtggggcctgtgtgcttcctcctgggttctggggcgctggcggcgtccgcttcaccgggaacgggagccccagcctcccgaggccttcctgcctggctctgggaatggccactgtccagaaagccccgcggccgtccatgctcgctcgctcagtcaggcccttgtggggatattgcagaacgagtccgagttactatccctttaaatacaggcgtttcggcctagctgccgccggtccaatccgcagcgcttccgtgccccactttcccgcgtcagcctggctcc

SEQ ID NO: 126486 - DNA, 178 bp, Homo sapiens; identical to SEQ ID NO: 52601
  chr15:100913417-100913595
  hyper

SEQ ID NO: 126487 - DNA, 30 bp, Homo sapiens
  chr15:101141940-101141970
  hyper
aagtgcttaacaaacgtgtcttgatcagtc

SEQ ID NO: 126488 - DNA, 247 bp, Homo sapiens
  chr15:101142344-101142591
  hyper
aactctcttcacaccgccatttgagggaacacaaatgcccgctctgggccaccgtagttcacagaaagtacaagctggcacctcctcccgcatgcgcagagaccgccttcggcgaatagtgtctcttagcaacggctttgagtccctccgccaggggcggagcctcggaagccaccacggggaagctgtaaggggaagtgagtgagaccaatcggagacgaatctctgccccgttcggcacgcctcc

SEQ ID NO: 126489 - DNA, 30 bp, Homo sapiens
  chr15:101143121-101143151
  hyper
gggccgtgaggcaccgaggaggatcaggaa

SEQ ID NO: 126490 - DNA, 19 bp, Homo sapiens
  chr15:101419292-101419311
  hyper
cggcgccagggctcctcgg

SEQ ID NO: 126491 - DNA, 271 bp, Homo sapiens
  chr15:101419538-101419809
  hyper
gccccgacccgggcgcggcgcagggcccggcggagagcgcgcattcccgagcgccgcgagccggccgaagtcgggcgagcgcgccgtgcggcggctgggagtgggctgcatgtgccgcgcggggagcccgcccgacttcggggaggcagcggggcgccgtggccccgcggctcagctccctgccgggtcgggtgtcccagccctgcgacttccggggcccggcggctcctcggggagctcgtccacaggcagcctccggggcgagagagcg

SEQ ID NO: 126492 - DNA, 345 bp, Homo sapiens
  chr15:101420038-101420383
  hyper
gggctgcgcagtgtccgggccgagccggtgcgccgcagactagggcgcctcgggccagggagcgcggaggagccatggccaccgctaacggggccgtggaaaacgggcagccggacaggaagccgccggccctgccgcgccccatccgcaacctggaggtcaagttcaccaaggtgaggcgggcgcccctcccacccgacggccgcgggcccctgcgctgggcagccagactcggggcggcgggggcgagggagcagcgggccgggggtccgccgggcgccgccgagacccgagcctccctgcccgggcgcggctctccagaaaccgcacctttcgcgggacgtc

SEQ ID NO: 126493 - DNA, 239 bp, Homo sapiens
  chr15:101420425-101420664
  hyper
cgaagccgggaaaccgaggccgtccagcgcccgcgcggggccgggccgcccgcatccctgcgaggccccgacgtgtccctgcgctgcccgctttgatcgcgagtggaggtgcgcgccgcgttgactcggagcgcgctggttttggggagctccctccccaaaaacccctgcgatgatttccagggtggacgagtctggctttgagagggtcggagggtccgagagcgccaagagagagt

SEQ ID NO: 126494 - DNA, 125 bp, Homo sapiens
  chr15:101420734-101420859
  hyper
cgccttccgtgcttagtttatacccggctcagcagcagaacgaggaggagtaggaaggtgctcgcttactgacgaaacctccccggagcccagaggtcccggtgtttacacacaaggcgcgcgct

SEQ ID NO: 126495 - DNA, 99 bp, Homo sapiens
  chr15:101420971-101421070
  hyper
cggcgagattacctgcccggggcagaaaggaataaaagaagatggtgaggcctccgaggcctctgagctggggctgaggagggccgagagacccgggtc

SEQ ID NO: 126496 - DNA, 525 bp, Homo sapiens
  chr15:101458273-101458798
  hyper
catcttcacctgccgcgtcccctccagcgtctgcccgggccctgggcctgcgctccctcgcggtggcgccaggtggcggggctgcgcgccctggaggagctgcaccgccgtcgcggggctctctcagcactgaggacaccacgccctgcaaattgttgggaacttgtcggtggcaatcacactgctggctcctgcaaactggtgtgaggccctcaggggtgagaacaggattgcagaactgcgctcacccttttggaaagtcgtccagtggcagaagtagcctcccaggagcagagcgaagctgctcggtggtcccctctccaaccagggacccaagaagccgctcaagggaacacggccccgcggcgtccgggaggtcctgcaggagccctgcggctgccccggttctgtgaaatggcagtgagggtgggggagatgtgcgctaaatcctgggaacgtgcgagtcataactttccaggagaggggcccagggcgctggtcctgcagggcgtggaaccctctgct

SEQ ID NO: 126497 - DNA, 1335 bp, Homo sapiens
  chr15:101459064-101460399
  hyper
gaggatatgcaaattgcaggtcgttaacgctttagaacgacacatttctgtatcgccccgtgaagagctctacgcacatgaatgttccccgtctgtttaactgttacggccgcagtgtgtgggccgcaggcgcgctgggggctcatctgctgattttgctgcccctggagcagagggatagcgaaagcggggctgagcgcagcacggaccgatcccatcgccgcgctcgccccgcgtggaggcagccgggtgcccgaacctgaaggaggacccggtgccggaagggcccgcggaccccggcgtctcccggggcatcgagcgccatcgcccgcgttttacggccagggaaactgaggcggccgccgaggggacgcctcgcgacggttcctgggagagctggcggcggccttgctctgcgcgctcttcgcgccgccctccccgcccgcccgcctcaggattgaggaagtgcgtctgggcccggccccggcgcggggggcagacggcggtgggacggccaggccccggccccgccagtgtgtccgcccggccccgcgtcccggagcgcccgcacccggccccgccgccgcctcaggtaagcgccgctcctgccggcgccccccggcggcctggctgcctcccggccccgcccggggaacccagagcccgcgcccggcgcccgcggggagcctcggcctctgcctgcccgcgggcccctgcgctccgggcggccgcgtggtcgggcacggggggccgttgcgcaggggccgcggcccgaggggcgcggagggcgtgtggggcgaccccggtctcacgtccccgctgcctcccgccgcgcccggagcccagccagcctgtgggaggggagcgcgcggggcccgagcagggaaccccgaaaccccgtccgggcagggtcgggaaagctgggaagcggaggcaagagacacgagtcgggagacacgagccggggagcccataggtttcctctgcctttggagcgaacccagtcccttagcggggagcgggcggagtgtgagcgcgcgggtgagcccgtgccggggtgtcggcaagagaccgcccgggagcctctcgctggtccggggcttcctggggttgcggggcggcccagcgaggcttcaccctcctcgatgtctgggtcacgcttcttgcccaggtggtctctggctggcgcagatacaactgctctgtctaccatggtctctgcaagctacaggggaccttcctggcaggcagggacgcgggaaggaagcctaggaaggccggggtcagcgaggagacgctggtggagaatctgagaacccccgtggccatctcaac

SEQ ID NO: 126498 - DNA, 206 bp, Homo sapiens
  chr15:101513805-101514011
  hyper
ggtgccttcgcagcggccccggttgggttgcgggtcgcggggcggcgagcgcagggagcgtcgcggggccacccctctctcttcctgaagcccccgcgatcgtgcaacgggccgcgccgcctcctgctgtgttccacggtgattctcaagagcacgcgggcagtgggcggtgacgccgtgtgtgtgtgcttcctcccgcgcaggtg

SEQ ID NO: 126499 - DNA, 30 bp, Homo sapiens; identical to SEQ ID NO: 52607
  chr15:101547268-101547298
  hyper

SEQ ID NO: 126500 - DNA, 30 bp, Homo sapiens
  chr15:101667956-101667986
  hyper
tattggcgtggtgcccggaaaaaggcctgg

SEQ ID NO: 126501 - DNA, 155 bp, Homo sapiens
  chr15:101791011-101791166
  hyper
attatgagggagacccgatctgtcgggcccttctaacgagaagcttcgatttgcaaaggctaaagtgccttcatcagggtgagaggtacacccagcgaggccacactagtccatctgaccccaaaggccatgttcctgagcgccgcgctcaccat

SEQ ID NO: 126502 - DNA, 30 bp, Homo sapiens
  chr15:101817312-101817342
  hyper
gcaaaaaagacttgcgcaaacaagggacag

SEQ ID NO: 126503 - DNA, 30 bp, Homo sapiens; identical to SEQ ID NO: 52608
  chr15:101834466-101834496
  hyper

SEQ ID NO: 126504 - DNA, 30 bp, Homo sapiens
  chr15:101835079-101835109
  hyper
gtcaagaggcacggcgctaacagaaggctc

SEQ ID NO: 126505 - DNA, 339 bp, Homo sapiens
  chr15:101835609-101835948
  hyper
cctagggtgtgtttcggagtctggaggacccctgattccagacgttggtgtttaaaagttaaggcgaatgtggaaacacccgaggggaactttctcatgcattagcgcacctcgaggtgggaggggaagcggtgactgtcctccctccaccagccgtcgcgggaacccgtggggttcagtgaagggtccagcagttcaggtgcccgccccgggcctgggccttggctccgggctacagtgtgagatcccgggctaggtggcccgcctggggcaggtcgccgggacaaccccaccgccccgcaagtccagcccggcctcgggcacggtagggtttgcggt

SEQ ID NO: 126506 - DNA, 717 bp, Homo sapiens
  chr15:102028776-102029493
  hyper
tttccgacaacccagcggtgtagacattgccactgactgcaaaggagcttgtcaggggagcgacttgccaaaggtcacaccgctcggccatcagaaccgcggcagaagcccccacacaaagcgccctccctccgctcctggagaggttttaaacccaggacccccggccctgcgctgtcccaaggcctctccgacggcggccgggctccagggtgcaggctcccggccatctacccccgggagccgcggacaccgagggagcgcgagtccccgagacgccgggccacgctcatgtcacccaagcagcggccgcggccgccttggcgcgcgcaccgggtccggagctcgcgccgcccgtcgagggcagaggggccgctcccccgcgggggagagccgggtgggcgcccaggacccagcggcggacggcgcgcgacgcctgaggcagcccagactcccccggagcccggcaggtgtccgcgccgccccggcttctgaggccacacttccgagcgcggggttgggcggcactgccgggggacttgcggtcggcgcgccggacctgcgtgggcgcccacgcgggaccccagtcccccccaccccgccgagtgtcccgcgcgcgcccccccgggcgacacccccccccgcagggcgccccggccgcccgccgtccccaagcggtcccggagccttcccacgcgcgcgcggggccggggccgg

SEQ ID NO: 126507 - DNA, 139 bp, Homo sapiens
  chr15:102030030-102030169
  hyper
ggcgcgttcccgcccccgggcccgcgctcctgcgaccgggctccggggccgagagccgtccgggaggcccgaaacgccccccaccgggggaacttccccgccgacttctggggctctcgggacgcggtgccgccccaga

SEQ ID NO: 126508 - DNA, 30 bp, Homo sapiens
  chr15:102192435-102192465
  hyper
tcagccccacccggcgctgaacccagcctt

SEQ ID NO: 126509 - DNA, 30 bp, Homo sapiens; identical to SEQ ID NO: 52611
  chr15:102192775-102192805
  hyper

SEQ ID NO: 126510 - DNA, 30 bp, Homo sapiens; identical to SEQ ID NO: 10441
  chr15:102515284-102515314
  hyper

SEQ ID NO: 126511 - DNA, 67 bp, Homo sapiens
  chr16:103516-103583
  hyper
agaagcggtggcagcgttgtccctcctccacgatcagcccgttcccgcagccggggcagaacagcag

SEQ ID NO: 126512 - DNA, 47 bp, Homo sapiens; identical to SEQ ID NO: 52614
  chr16:122247-122294
  hyper

SEQ ID NO: 126513 - DNA, 30 bp, Homo sapiens; identical to SEQ ID NO: 52615
  chr16:188848-188878
  hyper

SEQ ID NO: 126514 - DNA, 26 bp, Homo sapiens
  chr16:204415-204441
  hyper
ccccaggacaggctgcggcccctccc

SEQ ID NO: 126515 - DNA, 406 bp, Homo sapiens; identical to SEQ ID NO: 52616
  chr16:204480-204886
  hyper

SEQ ID NO: 126516 - DNA, 30 bp, Homo sapiens
  chr16:214760-214790
  hyper
ggggcggggtggggtcgcggggcggggcgg

SEQ ID NO: 126517 - DNA, 701 bp, Homo sapiens
  chr16:215171-215872
  hyper
ccccaggacaggctgcggcccctcccctgcccttcaccctcccacagttcctgccctgactccaataaatggatgaggacggagcgatctgggctctgtgttctcagtattggagggaaggaggggagaagctgagtgatgggtccgggggcttcgcaggaactcggtcgtccccactgtcgtcgcggcctggggttcacttggggggcgccttggggaggttctagcccctgagcaccggagctgcggcccgggtggagcggagcagtcccgggccggcccgcggcgtctcctggggtccttgagtcggacgggcgtttgtgcgtctcccggcttcccatatcgcacaaagattgtcacttcactaagcgtattggaagcgtgtcggggctcagggaacttttccacaaagcctgacgtccgaatcccgggactctggcagctacgggggtccctgaggccggtccctccccgactcctaagagagtagggggtttcctgcccggtgttctctctccggttcctcccatgtgctccctcctggcagagcagtaactttacccgaggggagtaaacagatgcccctaaagtctgcagtaaaggtgcccacgcgcaacggcgtgggtcaatgccagaaaccctgggatcccggaggtcgaggcctccacacagacgggaacccgggctggttacgttccccg

SEQ ID NO: 126518 - DNA, 534 bp, Homo sapiens; identical to SEQ ID NO: 10444
  chr16:215912-216446
  hyper

SEQ ID NO: 126519 - DNA, 273 bp, Homo sapiens; identical to SEQ ID NO: 10445
  chr16:216505-216778
  hyper

SEQ ID NO: 126520 - DNA, 912 bp, Homo sapiens
  chr16:230496-231408
  hyper
cgcggaggaccgggcgctggtgcgcgccctgtggaagaagctgggcagcaacgtcggcgtctacacgacagaggccctggaaaggtgcggcaggctgggcgcccccgcccccaggggccctccctccccaagccccccggacgcgcctcacccacgttcctctcgcaggaccttcctggctttccccgccacgaagacctacttctcccacctggacctgagccccggctcctcacaagtcagagcccacggccagaaggtggcggacgcgctgagcctcgccgtggagcgcctggacgacctaccccacgcgctgtccgcgctgagccacctgcacgcgtgccagctgcgagtggacccggccagcttccaggtgagcggctgccgtgctgggcccctgtccccgggagggccccggcggggtgggtgcggggggcgtgcggggcgggtgcaggcgagtgagccttgagcgctcgccgcagctcctgggccactgcctgctggtaaccctcgcccggcactaccccggagacttcagccccgcgctgcaggcgtcgctggacaagttcctgagccacgttatctcggcgctggtttccgagtaccgctgaactgtgggtgggtggccgcgggatccccaggcgaccttccccgtgtttgagtaaagcctctcccaggagcagccttcttgccgtgctctctcgaggtcaggacgcgagaggaaggcgccgcccctccccaaggaaaggcgagggcctggggcacacccccagtgcccagatccaggcgcgcctctttccacctccagcaggtttggggcctcggccatgggggcaccgaactgcgtgcagcctgaccctcccgaatggggtggtaggtgagggccgcgggacgccccgggcggcgggctgc

SEQ ID NO: 126521 - DNA, 30 bp, Homo sapiens
  chr16:284496-284526
  hyper
cgcagatcgggggtcgacgtcaagaaagaa

SEQ ID NO: 126522 - DNA, 30 bp, Homo sapiens
  chr16:285143-285173
  hyper
catgttcctcaaagcggggttttacctccc

SEQ ID NO: 126523 - DNA, 489 bp, Homo sapiens
  chr16:325110-325599
  hyper
ggccgcggaagcgggcgagggcgggacgagccgggcctcctctcccctatgtgctccccacccttgcacagcgcgctcagcagggctctgagaactgccagactccaggaaaacccaggcctaggccaccagcccagtgaccccagggcccagtgggaggcagggcgctcaccctcctccgagacgcagaacttctgggccaaccactgcacgacgtcgctgcctgcacgggagagacagaggtggagggaggccgaggcgcgcacgcacccccgccccggcgcgcctcacctgtcaccgcgtggggaatgacggtgaccagcaggcgctggctccgcatcttcacgccctggtcggggtcctgcatgctcacgaccacccgctccatctgggcggagggagtcgtcagggggtgtctggccgccccgcaaccctgattccctggcaccggccgggatgccccggatccgggagcgcggagattaacgc

SEQ ID NO: 126524 - DNA, 213 bp, Homo sapiens
  chr16:325889-326102
  hyper
gcggcgcggggccggcggccatggctgcggggcgaggccggcggggatgaccgacgtcccgcccggccccgccccgcgccgcgccgcgcccgggttaaccctcgggccgcgaggccagagtcgcccaggccccggttcgggttttaagagacacggccacggcccagaggcaaacgagccggccccccacgagcgacccgagtcacccccccg

SEQ ID NO: 126525 - DNA, 36 bp, Homo sapiens; identical to SEQ ID NO: 10446
  chr16:330454-330490
  hyper

SEQ ID NO: 126526 - DNA, 124 bp, Homo sapiens
  chr16:347152-347276
  hyper
gcacctcggtgctggcgctcttccccgactcagccttcttggcatttcttttgcacgccacgcccaccttcccactgcaagggcaagagctgcgagtcgccctggcctccggtggccgaggctg

SEQ ID NO: 126527 - DNA, 30 bp, Homo sapiens; identical to SEQ ID NO: 52624
  chr16:347279-347309
  hyper

SEQ ID NO: 126528 - DNA, 14 bp, Homo sapiens
  chr16:374801-374815
  hyper
tgcagaggcagctt

SEQ ID NO: 126529 - DNA, 261 bp, Homo sapiens; identical to SEQ ID NO: 52626
  chr16:374858-375119
  hyper

SEQ ID NO: 126530 - DNA, 30 bp, Homo sapiens; identical to SEQ ID NO: 52627
  chr16:401971-402001
  hyper

SEQ ID NO: 126531 - DNA, 30 bp, Homo sapiens; identical to SEQ ID NO: 52628
  chr16:431528-431558
  hyper

SEQ ID NO: 126532 - DNA, 30 bp, Homo sapiens; identical to SEQ ID NO: 52629
  chr16:432530-432560
  hyper

SEQ ID NO: 126533 - DNA, 30 bp, Homo sapiens
  chr16:452077-452107
  hyper
tgcggggtccggtccgcgggcgccggcgcc

SEQ ID NO: 126534 - DNA, 84 bp, Homo sapiens; identical to SEQ ID NO: 52630
  chr16:475425-475509
  hyper

SEQ ID NO: 126535 - DNA, 30 bp, Homo sapiens
  chr16:475933-475963
  hyper
cgcgcccgccgccgcgccctgagcgccttt

SEQ ID NO: 126536 - DNA, 30 bp, Homo sapiens
  chr16:476714-476744
  hyper
gagcaggtacggagcggcccgggccggggc

SEQ ID NO: 126537 - DNA, 131 bp, Homo sapiens
  chr16:565595-565726
  hyper
gccacacggctgacacggaccggggttcgcatctcggagcagccacacgggcgacacacaccggtgtttgcatctcggagcagccacacgggcgacacgcaccggtgtttgcatctcggagcagccacacg

SEQ ID NO: 126538 - DNA, 252 bp, Homo sapiens; identical to SEQ ID NO: 52631
  chr16:577427-577679
  hyper

SEQ ID NO: 126539 - DNA, 22 bp, Homo sapiens
  chr16:600998-601020
  hyper
ggtgagggtcccctgtcggtga

SEQ ID NO: 126540 - DNA, 103 bp, Homo sapiens
  chr16:609993-610096
  hyper
acggcccctctcccgcgccccgcgccgctgacacccatcacgccgcggcggggacccgggagacctggcggcctctgtgcacccccgcggcagcctgcgggca

SEQ ID NO: 126541 - DNA, 205 bp, Homo sapiens
  chr16:610110-610315
  hyper
cgccgggcgcccctgactcggccgcacacctgcgccgcagtccgctctccgtccgctgcctcccgggttcccggccgctccaccgcgcgccccgagagctgagccggtcccggcgcacgaggccggtgagtgcgcgccagggggcggcggggggcgcgcgggcggcgggggcgcggggttcgggccgggggctgctccttccctc

SEQ ID NO: 126542 - DNA, 157 bp, Homo sapiens
  chr16:610343-610500
  hyper
cgccccccggagcccggagcccaggcgcacgcgcgcccgcctctgccgccaacttcgggaggtgcgagcggcgtcggggggacgcgggcggcggcggaggctgcgggagtcgctgccgctcgagggaccgcggacccgggaggtccggctcccggcg

SEQ ID NO: 126543 - DNA, 30 bp, Homo sapiens
  chr16:610892-610922
  hyper
cgcgctcgccgcacccgcctgtgtggggcg

SEQ ID NO: 126544 - DNA, 38 bp, Homo sapiens
  chr16:619791-619829
  hyper
tcaggtgaggaaaccgagctgacgcggggctggcggcc

SEQ ID NO: 126545 - DNA, 30 bp, Homo sapiens; identical to SEQ ID NO: 52634
  chr16:638609-638639
  hyper

SEQ ID NO: 126546 - DNA, 30 bp, Homo sapiens
  chr16:639194-639224
  hyper
gctcggtgacgccgcgctgtcccagaacct

SEQ ID NO: 126547 - DNA, 30 bp, Homo sapiens; identical to SEQ ID NO: 52635
  chr16:685770-685800
  hyper

SEQ ID NO: 126548 - DNA, 30 bp, Homo sapiens
  chr16:686512-686542
  hyper
aggggactgaacggcgagcttggcttgctg

SEQ ID NO: 126549 - DNA, 30 bp, Homo sapiens
  chr16:691662-691692
  hyper
tgagtgcggtgccccgacactgacatggcc

SEQ ID NO: 126550 - DNA, 30 bp, Homo sapiens
  chr16:692012-692042
  hyper
cccagcaagctggtcgcgcagcgccgcaca

SEQ ID NO: 126551 - DNA, 295 bp, Homo sapiens
  chr16:698980-699275
  hyper
tgtggagcaggggcctctggacggcgagagagcggcagggtgaggcccggccgtccgtggcatggccaggcctcagcgcgacctcgcctcgctgcttgcatgcggcgggagccccggccggccgaggcgctgacaggtgggcgcggcggaggatccgcaaccggcgcgggcttcgaagccggtcgggctaacagggggctgccttgggaggcccgcggggcaaagggcagcgggattcgcggctggagcaaccctggaggccgctgacgtgagcggggtactcccaccggggagg

SEQ ID NO: 126552 - DNA, 51 bp, Homo sapiens; identical to SEQ ID NO: 10451
  chr16:717959-718010
  hyper

SEQ ID NO: 126553 - DNA, 277 bp, Homo sapiens; identical to SEQ ID NO: 52637
  chr16:725375-725652
  hyper

SEQ ID NO: 126554 - DNA, 30 bp, Homo sapiens; identical to SEQ ID NO: 52638
  chr16:729483-729513
  hyper

SEQ ID NO: 126555 - DNA, 30 bp, Homo sapiens; identical to SEQ ID NO: 52639
  chr16:729748-729778
  hyper

SEQ ID NO: 126556 - DNA, 30 bp, Homo sapiens
  chr16:744800-744830
  hyper
cgtcccccccggagccgggaggcggctggg

SEQ ID NO: 126557 - DNA, 76 bp, Homo sapiens
  chr16:745045-745121
  hyper
gctgaggccagtgtccgtgatgcgtacacacctgtggttgcaccagaggggacccccaccttcaaatcacctggcc

SEQ ID NO: 126558 - DNA, 96 bp, Homo sapiens
  chr16:745316-745412
  hyper
ggaagcccccgcccccggccccgtgcagccccgccccgccccgccccgtgcagccccgcccggcccagccccgcccggcgcggcccgggggcgcgc

SEQ ID NO: 126559 - DNA, 898 bp, Homo sapiens
  chr16:750433-751331
  hyper
agggccggctggggtcggcacatgattcgacctcacggccgcccttaggggtggaggggtcgctacctcaggtttggggaaggaacacgaggctctgaggagcgaatttgccccaggtgtccggggaggcctggcgcggggctgcctcggttccctcccagagccggggagaggggatatcgcaggatgccggcgcccgaggcggcagcaccaggcccacgggcgccccagtctaaatatcctccgtgcccctagagcggggaccctcgctccccagacccggaagcgccgccttccccgccagggacgcctgggcctccgcagaccccgccggccggcgcgccacccgcgccagcaccatggacagcggccgccccagccgcgcgctcagggccaggcccgggctggcttccaccgcggacggctgcggggtcggggcagccccgcaatcccaaatcccggcagcccccgctcagcagggaggggccccgggggcgaagagtgggggagaagccgggaaggatccggaggaggcggcgggggcggcgccaggggaggaataatcccggcgcagtgccgatttaggttgaaaacgctcccagtcatgggcctgcacgtggagcgccggggctgggggaggcattcgcggggctcctttcccgccccgctcgggagctcacgtttgccggcgcccacagtcccgtccccacctccaggcctcagggtcgagatggagaaaccaagccgcactttgagagcccacaggagggaggggacaggctgaggagcggccgtctgggtatgggtccggggcctggcttccctcatccacacccgcagcgctgccagaaggcgctgctctgcctgtggtcagccctcgacccgtgtgcttggtggg

SEQ ID NO: 126560 - DNA, 105 bp, Homo sapiens; identical to SEQ ID NO: 10453
  chr16:755703-755808
  hyper

SEQ ID NO: 126561 - DNA, 30 bp, Homo sapiens; identical to SEQ ID NO: 52642
  chr16:756571-756601
  hyper

SEQ ID NO: 126562 - DNA, 112 bp, Homo sapiens; identical to SEQ ID NO: 52643
  chr16:765206-765318
  hyper

SEQ ID NO: 126563 - DNA, 63 bp, Homo sapiens; identical to SEQ ID NO: 52644
  chr16:765585-765648
  hyper

SEQ ID NO: 126564 - DNA, 30 bp, Homo sapiens
  chr16:770716-770746
  hyper
tcatcccggggagccgctttcccaccggct

SEQ ID NO: 126565 - DNA, 31 bp, Homo sapiens; identical to SEQ ID NO: 52645
  chr16:771483-771514
  hyper

SEQ ID NO: 126566 - DNA, 30 bp, Homo sapiens
  chr16:777474-777504
  hyper
tttggagcaggcaccggtggccgagctccg

SEQ ID NO: 126567 - DNA, 256 bp, Homo sapiens
  chr16:778110-778366
  hyper
cgcagggaccacgcgcggggaaacccggagctggcgcggcttcgtcccgggctggcggtgctgggcgcggacgagcgcatcttctcgctgacgcgcaggctggcgcacggcgaggagctgcgggtgagcgcgcgctcccgggaggggcggggagggcgccccgggtccacccgccctcacaggtccgcctgctcctccgccgcagttcggggccatccacgtgcgttgcctcctgacgcccggccacaccgccggc

SEQ ID NO: 126568 - DNA, 122 bp, Homo sapiens
  chr16:778760-778882
  hyper
cgcgtgcgcgctcaccgagcgctcttcctccagaaggtgttctgcggccacgagcacacgcttagcaacctggagtttgcccagaaagtggagccctgcaacgaccacgtgagagccaagct

SEQ ID NO: 126569 - DNA, 30 bp, Homo sapiens; identical to SEQ ID NO: 52646
  chr16:790580-790610
  hyper

SEQ ID NO: 126570 - DNA, 30 bp, Homo sapiens
  chr16:791237-791267
  hyper
cagcgccgcagctccggccccggagtctct

SEQ ID NO: 126571 - DNA, 30 bp, Homo sapiens; identical to SEQ ID NO: 52647
  chr16:837881-837911
  hyper

SEQ ID NO: 126572 - DNA, 30 bp, Homo sapiens; identical to SEQ ID NO: 52648
  chr16:850865-850895
  hyper

SEQ ID NO: 126573 - DNA, 60 bp, Homo sapiens; identical to SEQ ID NO: 10455
  chr16:896899-896959
  hyper

SEQ ID NO: 126574 - DNA, 30 bp, Homo sapiens
  chr16:1020404-1020434
  hyper
gacctgcgcacggacgggtgaccctccacc

SEQ ID NO: 126575 - DNA, 30 bp, Homo sapiens; identical to SEQ ID NO: 10456
  chr16:1021287-1021317
  hyper

SEQ ID NO: 126576 - DNA, 20 bp, Homo sapiens
  chr16:1030250-1030270
  hyper
aatgcaaagcagcaagggcc

SEQ ID NO: 126577 - DNA, 236 bp, Homo sapiens; identical to SEQ ID NO: 10457
  chr16:1030443-1030679
  hyper

SEQ ID NO: 126578 - DNA, 641 bp, Homo sapiens
  chr16:1031782-1032423
  hyper
cggcggcggcggcggcggcggcaggggcgagggtcggggccaccgcgcggcgacctcgggtcccggagcgaccgcagggcagccccgggcgccggccccggtgcgcgtctcctgtgcgcgcccctccgcgcgcggccccgatgctggacatgagcgaggcccgctcccagccgccctgcagcccgtccggcaccgccagctccatgtcgcacgtggaggactcggactcggacgcgccgccgtctcccgccggctccgagggcctgggccgcgcgggggtcgcggtggggggcgcccggggcgacccggcggaggcggcggacgagcgcttcccggcctgcatccgcgacgccgtgtcgcaggtgctcaagggctacgactggagtctggtgcccatgccggtgcgcggcggcggcggcggcgcgctcaaagccaagccgcatgtgaagcggcccatgaacgcattcatggtgtgggcgcaggcggcgcgccgcaagctggccgaccagtacccgcacctgcacaacgccgagctcagcaagacgctgggcaagctgtggcggtgagtgccggcgccccgggggcggggttcgggaccttggccgcccctggtctcggactgcgagcgggggcctggaggg

SEQ ID NO: 126579 - DNA, 214 bp, Homo sapiens
  chr16:1035437-1035651
  hyper
ggcccagtgtgtgtgaccagggcgggaggggccccagtggctgagctccaagtgcctgctgaagtctgcagggaaacacgcttgctgcccgtggccctcggcctccagatggccacacctctgccgacgacggaccagctccctctcccttctatctttctttttgaggtggtgggattattccacaaagaagggctgccgtttggtccctctt

SEQ ID NO: 126580 - DNA, 30 bp, Homo sapiens
  chr16:1035867-1035897
  hyper
tgggatgagtctactcgagcatctccggga

SEQ ID NO: 126581 - DNA, 24 bp, Homo sapiens
  chr16:1122922-1122946
  hyper
ggggtcccgccgtgcgcccccagc

SEQ ID NO: 126582 - DNA, 30 bp, Homo sapiens
  chr16:1131574-1131604
  hyper
cagacaaggccgggacgggggcggccaaat

SEQ ID NO: 126583 - DNA, 30 bp, Homo sapiens; identical to SEQ ID NO: 52656
  chr16:1153167-1153197
  hyper

SEQ ID NO: 126584 - DNA, 31 bp, Homo sapiens; identical to SEQ ID NO: 10458
  chr16:1153581-1153612
  hyper

SEQ ID NO: 126585 - DNA, 40 bp, Homo sapiens; identical to SEQ ID NO: 52658
  chr16:1202546-1202586
  hyper

SEQ ID NO: 126586 - DNA, 30 bp, Homo sapiens
  chr16:1202803-1202833
  hyper
cgccggagcctcccgcgagcgccccctggt

SEQ ID NO: 126587 - DNA, 494 bp, Homo sapiens; identical to SEQ ID NO: 52659
  chr16:1203265-1203759
  hyper

SEQ ID NO: 126588 - DNA, 155 bp, Homo sapiens; identical to SEQ ID NO: 10459
  chr16:1203807-1203962
  hyper

SEQ ID NO: 126589 - DNA, 108 bp, Homo sapiens; identical to SEQ ID NO: 10460
  chr16:1204002-1204110
  hyper

SEQ ID NO: 126590 - DNA, 192 bp, Homo sapiens
  chr16:1204128-1204320
  hyper
cgcccctgttggtgggacctggcgtgggccgggcgcgcgggggtgcagggcaggggctggaggaccgcgctctaatttctgagagtggcgggcttggggggccaccgggcgcctccggactcccttccccagggccggctccggacggagaaggtggaagcgaagcggtgaggcccccgcgggcttggaggg

SEQ ID NO: 126591 - DNA, 30 bp, Homo sapiens
  chr16:1350984-1351014
  hyper
gcccctcccgggggcggccccacggtgaca

SEQ ID NO: 126592 - DNA, 227 bp, Homo sapiens
  chr16:1359097-1359324
  hyper
gtgtccccgcctaccgccccgaactggccaattgcaaggggtttcacagggcgctgaactcgcgggagcgtcaccgtcctgcgacgcttcagaggatccttaggcctcagtggtctttgacccccggccccaggacctgaccccaaggaaacctccgggacctgtggctggagaggtgaccgccaggcatccggggagcctttggagatctcggcttcctttttccc

SEQ ID NO: 126593 - DNA, 30 bp, Homo sapiens; identical to SEQ ID NO: 10462
  chr16:1360204-1360234
  hyper

SEQ ID NO: 126594 - DNA, 30 bp, Homo sapiens; identical to SEQ ID NO: 52664
  chr16:1381990-1382020
  hyper

SEQ ID NO: 126595 - DNA, 203 bp, Homo sapiens
  chr16:1382485-1382688
  hyper
gggccgctgcgccctcggcaagtctgagagcctcaggcccccgacaggaccatgcttagcacggacttctcaaagtgtggtccctggactggcggcagcagactggagctgggaagtgcaggcgctggctggcgtggggaccacacctgtgatctcagcgccttaggaggccggggaagggggatcccttgagcctgggagtt

SEQ ID NO: 126596 - DNA, 323 bp, Homo sapiens
  chr16:1382867-1383190
  hyper
atttttgagagctttttcgagactctgtctgaaaaaaaaagggaaaaaacgcagatcgcgcccccacccagacttcgggaccagcgggttggggacaggacccatcaatgccttaacaaaccctgcaggagaccgcgggcccgctggggttccaggacagcgcagcggaggaagagcggggagccacccgggaggggctggcggggtccagtgcagaccccaggggctccgggggctctggccggctgtgaccccacaagcgccaactgggccctcaccagagccccagggacgatcgccccacagaccgtccgcgtgggcgt

SEQ ID NO: 126597 - DNA, 211 bp, Homo sapiens
  chr16:1384031-1384242
  hyper
gggagggtatccgggcgctggcgacggcctcccccgcacttgagccgccaagcgaggcttcgacccccgcgcctccctccccgggggagcagacgggcccggggcctcccagcacccctcccgggcgggctgcaccccccagcgtcctcgtcccttccctcctcccgcaggtcctcgtaaggccctttagtccccccgaaatccctgcgag

SEQ ID NO: 126598 - DNA, 131 bp, Homo sapiens
  chr16:1384574-1384705
  hyper
ctggaccttggcagccgtctgaggcttcggggagcccaaggccaccggcagcgcttgttagaatgcagattcccggggttcgactggaatgagaccccggggagcagcgtttgcagcgggcccgccaggtg

SEQ ID NO: 126599 - DNA, 30 bp, Homo sapiens
  chr16:1401809-1401839
  hyper
cggacctggggtgccggggactccccaccc

SEQ ID NO: 126600 - DNA, 43 bp, Homo sapiens
  chr16:1402305-1402348
  hyper
tggtgagtgaggagcgctgttggccggcgcgggggtggccgcg

SEQ ID NO: 126601 - DNA, 31 bp, Homo sapiens; identical to SEQ ID NO: 10464
  chr16:1420663-1420694
  hyper

SEQ ID NO: 126602 - DNA, 244 bp, Homo sapiens; identical to SEQ ID NO: 10465
  chr16:1429036-1429280
  hyper

SEQ ID NO: 126603 - DNA, 30 bp, Homo sapiens
  chr16:1471037-1471067
  hyper
gagcagttctgaaccgtcatgaaggtgcgc

SEQ ID NO: 126604 - DNA, 30 bp, Homo sapiens; identical to SEQ ID NO: 52670
  chr16:1524506-1524536
  hyper

SEQ ID NO: 126605 - DNA, 30 bp, Homo sapiens
  chr16:1524912-1524942
  hyper
cgccgcctcctcgtcgtcccggtcccggcc

SEQ ID NO: 126606 - DNA, 435 bp, Homo sapiens; identical to SEQ ID NO: 52671
  chr16:1660448-1660883
  hyper

SEQ ID NO: 126607 - DNA, 427 bp, Homo sapiens
  chr16:1661889-1662316
  hyper
gaccaagtgcccagcgccgctcggctacgctaacgtagcgcagaagcacatactccacccaggaaagggtgcgcttaactgcctcagacgtgcttccacacttctcagaactcaggttcgcgcccgattccacactccgagctaccacgccgttttcttctcacgtatccgtcaacactgctgcggccaatcacagcacgggccctggcctattggctgtctgtccaccaatccaaagagacgcacagtccgcaaggtcgcgaggctggcgtcacaacactactggcgccgcgggctcgcccccgacgcccaccgggctcgtacgtgcgagcgcgcccgcccagcgctagccaatgggagcgccgttttggggagacgggcccgaagaaacattgggggtgctcgcccccgcgttcgtcgccccgcc

SEQ ID NO: 126608 - DNA, 30 bp, Homo sapiens
  chr16:1662786-1662816
  hyper
cgaggaggcttctgcgtccccatcccgaga

SEQ ID NO: 126609 - DNA, 122 bp, Homo sapiens; identical to SEQ ID NO: 52673
  chr16:1663979-1664101
  hyper

SEQ ID NO: 126610 - DNA, 701 bp, Homo sapiens; identical to SEQ ID NO: 52674
  chr16:1664480-1665181
  hyper

SEQ ID NO: 126611 - DNA, 30 bp, Homo sapiens
  chr16:1728883-1728913
  hyper
gccctgcccatggccgcgcttccactagtt

SEQ ID NO: 126612 - DNA, 189 bp, Homo sapiens; identical to SEQ ID NO: 52675
  chr16:1832739-1832928
  hyper

SEQ ID NO: 126613 - DNA, 66 bp, Homo sapiens
  chr16:1875916-1875982
  hyper
gggcggcaccaaatacgggggctggggcctcccttagaatggggtacgcacgccctgccgatgcac

SEQ ID NO: 126614 - DNA, 153 bp, Homo sapiens; identical to SEQ ID NO: 52677
  chr16:1877135-1877288
  hyper

SEQ ID NO: 126615 - DNA, 16 bp, Homo sapiens
  chr16:1877332-1877348
  hyper
cgcagcgcggtgttga

SEQ ID NO: 126616 - DNA, 113 bp, Homo sapiens; identical to SEQ ID NO: 52679
  chr16:1877590-1877703
  hyper

SEQ ID NO: 126617 - DNA, 1213 bp, Homo sapiens
  chr16:1967766-1968979
  hyper
gggcccccacagggcggtcccaaccccactgcccggagcgcacccctgctccctgggaggcaggatatcgtgccgctgctccctggggcgcacgataccctccccaggaaggcgccggtcagggcggacgggccagggtgctcaccggtaccaggcgaggccgcgctcgtagcacctgtcgaagaagtggggctcagagcccagcgcgcggacgtcggggtgcagccgcagaaactccagcagggcgcgcgtgccgcccttcttcacgccaacgatgagcgcttgcgggaagcgccggcggccgggaccgctggccaaaggcaggccgggtgctcccgggcggtggacggagctggacggctcggagggcgcgggggccggcgcgggggcgcgggcggccggcgggcagcggccggggagggcgcagaggcagtaggcgccgagcaccagggccacgagcagcatcggcgcgcgggacgcccgcagagcggccccttgcccggcccctgcgccctggccgcccccggccccgccgcccaggccgccgctacctgccatggggtcgcgccgctccaggcccgggagcgggggcagcaggcgggcgcgcatctcggcccgcgcgccgctcagtccgtgggtgcccggcttgtgctctgcgcccggcggtcccgcagcctgggagcgggcgcggggcgggaccgggggcggggtctggacgccctcccccctccccctcccccgcccactccgcctccgaggccactgcctgggctggacccgccggcagccgccaccacccgggcgcgactcgagctgccgggaccaccaggacgctcctgctccgagatcccaggccctggctcgcttgactccggcatcttcacctctgcgcggggaggatgcggcggcggtggccgttcgggacgcagggcagggacagggcggcgcgcgggcctcgggaccctctgtttgaagaccgatccccttccccccccaccccactccgggacgtgcgcggcaggtgcataggccaagccttggcctgcaggagcgggagcctcatcgccaggccaaggggacccaggaaaagcgtcgatccgggcactcggcctgccaagggagaaagaggccgggacagcaccctagtgtgcagagagggatcccagaacgtgtggggggagtctgcggccgggaatggcgtgcgtcctgcact

SEQ ID NO: 126618 - DNA, 30 bp, Homo sapiens
  chr16:1979607-1979637
  hyper
tgcactccctgtagcggtcacttcgtgaag

SEQ ID NO: 126619 - DNA, 30 bp, Homo sapiens
  chr16:1993340-1993370
  hyper
ttcccagctggccccgcccacgttgactcc

SEQ ID NO: 126620 - DNA, 30 bp, Homo sapiens
  chr16:2009601-2009631
  hyper
gcggagtccgcgcccgccgccgccatgccg

SEQ ID NO: 126621 - DNA, 23 bp, Homo sapiens
  chr16:2014613-2014636
  hyper
cgtcatccgccatttgctgggaa

SEQ ID NO: 126622 - DNA, 277 bp, Homo sapiens
  chr16:2014895-2015172
  hyper
aagcgggagcgggccgagctcctataagacaacctgtgattggctccgcggtgccccgccctcaccgggctctgagtgctcttgcccgtccggccccagccgcggcccgggaatctacgtcacccgaaaagcgactataaacgccggcgcctccgtccccagccgcggctcgggaatccacccgaagagtggctataaacgtccgcgcctccattgcgctctcctcttcacttaggtaggtcctgccgcgttgaccactggcgtctcgctggtggtc

SEQ ID NO: 126623 - DNA, 30 bp, Homo sapiens
  chr16:2015435-2015465
  hyper
cgtcgccaggaccgcggggttgggggaact

SEQ ID NO: 126624 - DNA, 30 bp, Homo sapiens
  chr16:2021776-2021806
  hyper
cccacatcccagaacgccgaaaagcaggag

SEQ ID NO: 126625 - DNA, 30 bp, Homo sapiens
  chr16:2022292-2022322
  hyper
ggggtccgtggaggcgagaggctgtgtgtg

SEQ ID NO: 126626 - DNA, 75 bp, Homo sapiens; identical to SEQ ID NO: 52684
  chr16:2033651-2033726
  hyper

SEQ ID NO: 126627 - DNA, 30 bp, Homo sapiens
  chr16:2034511-2034541
  hyper
gcagcccctgtccccgcccccgcccaggta

SEQ ID NO: 126628 - DNA, 219 bp, Homo sapiens; identical to SEQ ID NO: 52685
  chr16:2040741-2040960
  hyper

SEQ ID NO: 126629 - DNA, 532 bp, Homo sapiens; identical to SEQ ID NO: 52686
  chr16:2040980-2041512
  hyper

SEQ ID NO: 126630 - DNA, 599 bp, Homo sapiens; identical to SEQ ID NO: 52687
  chr16:2041581-2042180
  hyper

SEQ ID NO: 126631 - DNA, 100 bp, Homo sapiens
  chr16:2042498-2042598
  hyper
ggaggcgggacctcgcgccacgcggcgagcccaggcgaggcgccccaagcctcgggcccaccgacctttcctcctccgggcgaggccgccgtgggccacc

SEQ ID NO: 126632 - DNA, 230 bp, Homo sapiens
  chr16:2042617-2042847
  hyper
cgcgccgcactgttcgcaggactctggtccttcctgtggttcgtgggcttctgcttcctcaccaatcagtggcagcgcacggcgccagggccggccacgacgcaggcgggggacgcggcgcgggccgccatcgccttcagcttcttctccatcctcagctgggtgagtgcggggcccgggagggcggggcgaaggggcgggcgctcggctgatcccggctgaccccgctg

SEQ ID NO: 126633 - DNA, 172 bp, Homo sapiens
  chr16:2054056-2054228
  hyper
gaacagagcagctgtcgctctgcggagctttccaggacagagaagaaacgtgttccaagcagctgctaagggaataccaatggccgccagccggggatgcatcaggtgacaaggcccggctaccctgtccggcgcccccgcccccacgtttccatggcgccttcacggcacg

SEQ ID NO: 126634 - DNA, 159 bp, Homo sapiens; identical to SEQ ID NO: 52689
  chr16:2058557-2058716
  hyper

SEQ ID NO: 126635 - DNA, 30 bp, Homo sapiens
  chr16:2059023-2059053
  hyper
tccacagaggaaaacgtcagtctcggaagg

SEQ ID NO: 126636 - DNA, 30 bp, Homo sapiens
  chr16:2060016-2060046
  hyper
ctcgccgggctccacgaactggcgttgtca

SEQ ID NO: 126637 - DNA, 30 bp, Homo sapiens; identical to SEQ ID NO: 10476
  chr16:2060250-2060280
  hyper

SEQ ID NO: 126638 - DNA, 30 bp, Homo sapiens; identical to SEQ ID NO: 52691
  chr16:2070513-2070543
  hyper

SEQ ID NO: 126639 - DNA, 30 bp, Homo sapiens; identical to SEQ ID NO: 52692
  chr16:2076715-2076745
  hyper

SEQ ID NO: 126640 - DNA, 171 bp, Homo sapiens; identical to SEQ ID NO: 52693
  chr16:2097195-2097366
  hyper

SEQ ID NO: 126641 - DNA, 30 bp, Homo sapiens; identical to SEQ ID NO: 10477
  chr16:2097895-2097925
  hyper

SEQ ID NO: 126642 - DNA, 177 bp, Homo sapiens
  chr16:2198064-2198241
  hyper
tgggggagatcgcagcgcccgctgtgtcctcccggtgaccagctgtcacctgagcccagggcgcctgccccagcagcctggtgtgtttgccaagccagggctggagcttcctggacccgcctaccctggaggggatggagcagtgaagggcaccgggccaagcgctaggcatctggg

SEQ ID NO: 126643 - DNA, 30 bp, Homo sapiens; identical to SEQ ID NO: 52695
  chr16:2198464-2198494
  hyper

SEQ ID NO: 126644 - DNA, 317 bp, Homo sapiens
  chr16:2198818-2199135
  hyper
ccagcacccccgctgcctccacgctgcccaccgccaacggggcccgaccggcgcgctccgggactgcgctttccggccccgacgcgccgcccaacgggcccttgcagcccggccggccctcgcttggcggcggtgtcgacttctacgacgtcgccttcaaggtgagccaggcacccgccccccaggccagcgcagcaggtggcgcccggcctgagccaagggttgggggtcggacagggggtgcagggcccgcggccccagggcgcggagccgacgcgggaggaaccccgtggggcttgcacggtgcatcgtgcaca

SEQ ID NO: 126645 - DNA, 30 bp, Homo sapiens
  chr16:2205173-2205203
  hyper
aagaaacctttaaacgctaagggacaaagt

SEQ ID NO: 126646 - DNA, 30 bp, Homo sapiens; identical to SEQ ID NO: 52697
  chr16:2205591-2205621
  hyper

SEQ ID NO: 126647 - DNA, 161 bp, Homo sapiens
  chr16:2245389-2245550
  hyper
ccagaccccacgtgccgacctgcagagccctgtccgtgcccgcacaggtgccctgacacactgacacggctatacgtgcgcagccgcacacgcggctggtccacacgcccatccatccatctccggcggcccccagggaggctacgcgctgagccaggatg

SEQ ID NO: 126648 - DNA, 35 bp, Homo sapiens; identical to SEQ ID NO: 52698
  chr16:2245972-2246007
  hyper

SEQ ID NO: 126649 - DNA, 30 bp, Homo sapiens
  chr16:2255381-2255411
  hyper
gtcccacccacccccgcccgcgccatggtc

SEQ ID NO: 126650 - DNA, 30 bp, Homo sapiens
  chr16:2263898-2263928
  hyper
tgtctgtgtccaggcggtctcccaccatga

SEQ ID NO: 126651 - DNA, 30 bp, Homo sapiens; identical to SEQ ID NO: 52699
  chr16:2264579-2264609
  hyper

SEQ ID NO: 126652 - DNA, 69 bp, Homo sapiens
  chr16:2265373-2265442
  hyper
ccttccccggcaggcgtgagtacgcgcctcagtcctttgcaaaaacgcgttcccggttccttggaggta

SEQ ID NO: 126653 - DNA, 32 bp, Homo sapiens
  chr16:2273283-2273315
  hyper
gtccgctcgcccctcgcgttctctggctctca

SEQ ID NO: 126654 - DNA, 30 bp, Homo sapiens
  chr16:2273883-2273913
  hyper
cctcgcggatctcgcgggaccctcacagcc

SEQ ID NO: 126655 - DNA, 182 bp, Homo sapiens
  chr16:2295227-2295409
  hyper
ctgcacaacacggcacgttttcctcccgagggccagaccccccaaggctgtgggtgaacttgttcctgcagctgaacccagctcaccctgactcacacaagcagagctgggtggatgtttaccccgccctgtctgcaggaaggagggcgacagccacctaatgtgtgcgaggaggaggcggc

SEQ ID NO: 126656 - DNA, 30 bp, Homo sapiens; identical to SEQ ID NO: 52700
  chr16:2301207-2301237
  hyper

SEQ ID NO: 126657 - DNA, 229 bp, Homo sapiens; identical to SEQ ID NO: 52701
  chr16:2301866-2302095
  hyper

SEQ ID NO: 126658 - DNA, 59 bp, Homo sapiens
  chr16:2318221-2318280
  hyper
gtttgtgggagtcgcgctggggacgttcaaggtgtctcctagccggtaaagtccctggg

SEQ ID NO: 126659 - DNA, 273 bp, Homo sapiens; identical to SEQ ID NO: 52702
  chr16:2391769-2392042
  hyper

SEQ ID NO: 126660 - DNA, 30 bp, Homo sapiens; identical to SEQ ID NO: 52703
  chr16:2478785-2478815
  hyper

SEQ ID NO: 126661 - DNA, 30 bp, Homo sapiens; identical to SEQ ID NO: 52704
  chr16:2479936-2479966
  hyper

SEQ ID NO: 126662 - DNA, 30 bp, Homo sapiens
  chr16:2509740-2509770
  hyper
ctcggtggcccaggcgtcagcaagacggct

SEQ ID NO: 126663 - DNA, 30 bp, Homo sapiens
  chr16:2509986-2510016
  hyper
gcttgaggcttgcccgcaaggagggagaga

SEQ ID NO: 126664 - DNA, 197 bp, Homo sapiens; identical to SEQ ID NO: 52705
  chr16:2510305-2510502
  hyper

SEQ ID NO: 126665 - DNA, 30 bp, Homo sapiens
  chr16:2518482-2518512
  hyper
tgggtgcagggcagcgcgacgcgggctcgg

SEQ ID NO: 126666 - DNA, 518 bp, Homo sapiens
  chr16:2521458-2521976
  hyper
gggagcgggggcgacgcctgtcatcgctctaggcccagcgggaggacgcgccaacatccccgctgctgtgctgggcccggggcgtgcccgccgctgctcccacctctgggccgggctggggccgcccgggggccctgttcctcggcattgcgggcctggtgggcagagccgcggagagggcttcttttccccaagggcagcgtcttggggcccggccactggctgacccgcagcggctccggccatgcctggctggccctgggggctgctgctgacggcaggcacgctcttcgccgccctgagtcctgggccgccggcgcccgccgacccctgccacgatgaggggggtgcgccccgcggctgcgtgccaggactggtgaacgccgccctgggccgcgaggtgctggcttccagcacgtgcgggcggccggccactcgggcctgcgacgcctccgacccgcgacgggcacactcccccgccctccttacttccccagggggcacggccagccctctgt

SEQ ID NO: 126667 - DNA, 35 bp, Homo sapiens; identical to SEQ ID NO: 10479
  chr16:2533374-2533409
  hyper

SEQ ID NO: 126668 - DNA, 30 bp, Homo sapiens
  chr16:2551370-2551400
  hyper
ccccctgctggtgccgcatagcatcgcgcc

SEQ ID NO: 126669 - DNA, 30 bp, Homo sapiens; identical to SEQ ID NO: 10480
  chr16:2571000-2571030
  hyper

SEQ ID NO: 126670 - DNA, 30 bp, Homo sapiens; identical to SEQ ID NO: 10481
  chr16:2582582-2582612
  hyper

SEQ ID NO: 126671 - DNA, 551 bp, Homo sapiens
  chr16:2732188-2732739
  hyper
atgtacagtgtagacgtttgctggcatggctcttcctttgaccagttcatgaactggagtcagggtgggggtgaaggctagggtcgaggtctgggtcaggcgctcgtgcaccgctcgtgggaggtcgaggctgatgtccgctgctccccatcagcgttagtgcccagatcaccccgtgctccgctcccgccggaagcgggcccagcctcctgcttttcgggaccggaacttccgcctaccgcgtgacgccggggcgggcgctctaccagggcggacctgtgggcgggacagaactcagaggacgctattaaaagccggacgcttccggtggaagggagctgttgcggggcttgctgggatcatggcggagaatcactgcgagctcctgtcgccggcccggggcggcatcggggcggggctggggggcggcctgtgccgccgctgcagcgctgggctcggcgccctggcccagcgccctggcagcgtgtccaagtgggtccgactcaacgtcggcggcacctacttcctcaccactcggcagaccctgtgcc

SEQ ID NO: 126672 - DNA, 30 bp, Homo sapiens
  chr16:2802214-2802244
  hyper
cggcagcaccaccgcggctgggatatcgtc

SEQ ID NO: 126673 - DNA, 30 bp, Homo sapiens; identical to SEQ ID NO: 10484
  chr16:2802466-2802496
  hyper

SEQ ID NO: 126674 - DNA, 30 bp, Homo sapiens
  chr16:2802696-2802726
  hyper
ggcccctgaggaagcgaggaggcgtcggcg

SEQ ID NO: 126675 - DNA, 30 bp, Homo sapiens
  chr16:2803393-2803423
  hyper
tgaacttcgtgggccggatttaaatggttt

SEQ ID NO: 126676 - DNA, 30 bp, Homo sapiens
  chr16:2827723-2827753
  hyper
gcttagggatggcccgggcgaactccttgg

SEQ ID NO: 126677 - DNA, 30 bp, Homo sapiens; identical to SEQ ID NO: 10485
  chr16:2828287-2828317
  hyper

SEQ ID NO: 126678 - DNA, 223 bp, Homo sapiens; identical to SEQ ID NO: 52714
  chr16:2888901-2889124
  hyper

SEQ ID NO: 126679 - DNA, 30 bp, Homo sapiens; identical to SEQ ID NO: 52715
  chr16:2918165-2918195
  hyper

SEQ ID NO: 126680 - DNA, 30 bp, Homo sapiens
  chr16:2933293-2933323
  hyper
tggggcccttggcgcggaggctgagggacc

SEQ ID NO: 126681 - DNA, 30 bp, Homo sapiens
  chr16:2962415-2962445
  hyper
tctgccccgcccagcgctgccttcctggac

SEQ ID NO: 126682 - DNA, 31 bp, Homo sapiens; identical to SEQ ID NO: 10486
  chr16:2969679-2969710
  hyper

SEQ ID NO: 126683 - DNA, 30 bp, Homo sapiens
  chr16:2977110-2977140
  hyper
catgccaaattgcacggcatcgtacaagca

SEQ ID NO: 126684 - DNA, 30 bp, Homo sapiens; identical to SEQ ID NO: 52717
  chr16:3015077-3015107
  hyper

SEQ ID NO: 126685 - DNA, 43 bp, Homo sapiens; identical to SEQ ID NO: 10487
  chr16:3016806-3016849
  hyper

SEQ ID NO: 126686 - DNA, 274 bp, Homo sapiens; identical to SEQ ID NO: 52719
  chr16:3017156-3017430
  hyper

SEQ ID NO: 126687 - DNA, 31 bp, Homo sapiens; identical to SEQ ID NO: 10489
  chr16:3018712-3018743
  hyper

SEQ ID NO: 126688 - DNA, 30 bp, Homo sapiens; identical to SEQ ID NO: 52721
  chr16:3020204-3020234
  hyper

SEQ ID NO: 126689 - DNA, 31 bp, Homo sapiens; identical to SEQ ID NO: 52722
  chr16:3053912-3053943
  hyper

SEQ ID NO: 126690 - DNA, 297 bp, Homo sapiens
  chr16:3068099-3068396
  hyper
cccggccccaagaggcgtctctccaacacgcacactagccccggactcacctgcgaaggagataagggaaattcctaggccgagtgtcgggacaggggcggaggcgggggtcttaaagaagcggtgacgtcactggaccaccgccccggaggaggggcagagaccctgtccctgacggcagcgggcgtgcgaatcccaggcttgtcagaggggggcgctggaggctggggtcgctgggcccgcctcgggctggcagacgtccagactcacccagggtgagggcgccaggcttagggt

SEQ ID NO: 126691 - DNA, 34 bp, Homo sapiens; identical to SEQ ID NO: 52724
  chr16:3070230-3070264
  hyper

SEQ ID NO: 126692 - DNA, 31 bp, Homo sapiens; identical to SEQ ID NO: 10490
  chr16:3071261-3071292
  hyper

SEQ ID NO: 126693 - DNA, 30 bp, Homo sapiens
  chr16:3073737-3073767
  hyper
aagccccgccgattcgccccaccccgtatt

SEQ ID NO: 126694 - DNA, 4 bp, Homo sapiens
  chr16:3078145-3078149
  hyper
gggc

SEQ ID NO: 126695 - DNA, 476 bp, Homo sapiens
  chr16:3078252-3078728
  hyper
cgatcaccacctgcatgtcgtcctgcgggaggccgtggtcggctcagcgccggtcccgccccttgccccgccccgcacacgggccccgcccctcacctgccaggcctccagctcctgcgtgagcgccaccttctggcggatggcgcgcagcagctcccgagacagggagtctcgctccagcgagacgcggttgagctgcagggacagctccagggccctaggcgggcaggagcagaagacgcgtttgagggcgctagggcctcagggagccggggtggcgggggacttctgtacccgggcgggaggagggctgcaaacacctagatcaaggaggtcagggggcccctgggtgggagtggggatcattataacccgtatcagaagaggaatcaggagcccaggagggcccagagggcgctggggcggtggtcaatggcttgaggcttacttgttcacggcctcgtcccggtctgaga

SEQ ID NO: 126696 - DNA, 240 bp, Homo sapiens; identical to SEQ ID NO: 52728
  chr16:3086763-3087003
  hyper

SEQ ID NO: 126697 - DNA, 272 bp, Homo sapiens
  chr16:3095339-3095611
  hyper
gtctcaaaaaaagcaaaacaaaacaaaacaaaacaaaacaaaagaggacgatacttctggggtgtgcaagcgcagggggacggccgtgtggggaaacagcaagaggacgcccatctgcctgcccaggaggaggcatccggagaaactagcccctcaggcaccttgatcttggccttccagtttccagaactgtgagaacgtaaacttctggttgagcctcccagtccttggtgttttgttctggcggccccagcgagcgggcgcgggatcgc

SEQ ID NO: 126698 - DNA, 30 bp, Homo sapiens; identical to SEQ ID NO: 52729
  chr16:3096094-3096124
  hyper

SEQ ID NO: 126699 - DNA, 41 bp, Homo sapiens
  chr16:3096462-3096503
  hyper
ggcccgccccttgtcgctggacgtccgaagattgggccatt

SEQ ID NO: 126700 - DNA, 69 bp, Homo sapiens
  chr16:3096719-3096788
  hyper
ccctccgggaccctccgctgactccaccgcgcacttcccgggacccccacacacatcccagccctccgg

SEQ ID NO: 126701 - DNA, 225 bp, Homo sapiens
  chr16:3096821-3097046
  hyper
cgccctctccaggcccggatctcctcccccaggtccccggggcggccccagccaggcccccttcgaaccccgccggcggcccgggctggggcgcaccatgcggctgcggctccggcttctggcgctgctgcttctgctgctggcaccgcccgcgcgcgccccgaagccctcggcgcaggacgtgagcctgggcgtggtgagcgcggggtccgcaggctcctgggg

SEQ ID NO: 126702 - DNA, 30 bp, Homo sapiens; identical to SEQ ID NO: 52731
  chr16:3108769-3108799
  hyper

SEQ ID NO: 126703 - DNA, 30 bp, Homo sapiens
  chr16:3150278-3150308
  hyper
tgaaggccaaggggcggggcggggttctgt

SEQ ID NO: 126704 - DNA, 30 bp, Homo sapiens; identical to SEQ ID NO: 10493
  chr16:3156366-3156396
  hyper

SEQ ID NO: 126705 - DNA, 31 bp, Homo sapiens; identical to SEQ ID NO: 10494
  chr16:3156726-3156757
  hyper

SEQ ID NO: 126706 - DNA, 30 bp, Homo sapiens; identical to SEQ ID NO: 52734
  chr16:3184262-3184292
  hyper

SEQ ID NO: 126707 - DNA, 146 bp, Homo sapiens
  chr16:3184679-3184825
  hyper
cgcatcccttcgggcggagcagaagctccacttgtggctaggccatgtgccctctccgttcctcgggccagccttggcttcccctttttgtcgctcaagggccagggtcgcaaggaaatgtgaaaaaaaagcggagacaaaagaga

SEQ ID NO: 126708 - DNA, 235 bp, Homo sapiens
  chr16:3184880-3185115
  hyper
cgcgtatggagtttctgtcttctaataggcagcctgagaattcttcctgttcattggccatcggtcatggagaaggcgggctcagtggacgaacggctttctgggagctggggaatgcttgcgtagcgtagtttcccagcgagccccgcgaggacttccggcgccgggagctcgcggcggaagtgggatctcctgggccgtagtgggcgttgtgtgtttcgggggcgggggcggg

SEQ ID NO: 126709 - DNA, 323 bp, Homo sapiens; identical to SEQ ID NO: 52736
  chr16:3200662-3200985
  hyper

SEQ ID NO: 126710 - DNA, 30 bp, Homo sapiens
  chr16:3202062-3202092
  hyper
gcatggcctccggtcggcggacgctggtga

SEQ ID NO: 126711 - DNA, 30 bp, Homo sapiens; identical to SEQ ID NO: 52737
  chr16:3207631-3207661
  hyper

SEQ ID NO: 126712 - DNA, 592 bp, Homo sapiens
  chr16:3208781-3209373
  hyper
ggttggggtgtggccgggacccgggcggggaggggtaggggtggagtgaaggcggggtctgggggggtgcgcgtggacggggagagtggaaccgcgggtgtggacctccaagtacagacgtcagagaacgtttgtcgtcctggctcgttggtctaggggtatgattctcgctttgggtgcgagaggtcccgggttcaaatcccggacgagcccgcttttttttttttttctgaacaccatcattttctcgcggtgaagattgaggagcttcacggagtctcggccgcagggaacttggtctctccgtggcagctgcaggcgccggggccgatccgacttcccgcttccgtccggcttgcggcccctcgccttgcccggctacaggaaggactcgcctgcgcctcctgactggagccttccacctgggagttctgagtgcgcctaaggcctggcgctgaggcagtggaccccagatccgggacccgaaaggagggcaaacacctccaccgccgcgtctgcctctgcggacgtggccctagatcccgggtggccatggaacttggtctgggcgtgtagttttcctttgagtggg

SEQ ID NO: 126713 - DNA, 45 bp, Homo sapiens; identical to SEQ ID NO: 52739
  chr16:3209411-3209456
  hyper

SEQ ID NO: 126714 - DNA, 2 bp, Homo sapiens
  chr16:3220284-3220286
  hyper
gg

SEQ ID NO: 126715 - DNA, 118 bp, Homo sapiens; identical to SEQ ID NO: 10499
  chr16:3220438-3220556
  hyper

SEQ ID NO: 126716 - DNA, 302 bp, Homo sapiens; identical to SEQ ID NO: 10500
  chr16:3220590-3220892
  hyper

SEQ ID NO: 126717 - DNA, 559 bp, Homo sapiens; identical to SEQ ID NO: 10501
  chr16:3221141-3221700
  hyper

SEQ ID NO: 126718 - DNA, 679 bp, Homo sapiens; identical to SEQ ID NO: 10502
  chr16:3221786-3222465
  hyper

SEQ ID NO: 126719 - DNA, 418 bp, Homo sapiens
  chr16:3232598-3233016
  hyper
ggaaagggtagaaaccgatattttggaccaaaaaccgggctcgtccgggatttgaacccgggacctctcgcaccctaagcgagaatcatacccctagaccaacgagccacacgccccgtagcctccggcttgtctttgtggccttcgtggagtcctcgtggccagaggtggggacccagcagagcagagctaggaggagactccgatttcctgaagtctggaagagacaagttcaagcgcgggtggacgcggagggagccctgagcccccgcttctccctgcgccgcacaaaatggggagcatcccctgtgcccccacaatccggggccccccgggccctcgcccgcctccgcctctcagccctgggctggggatccgcgcgtcacgccgcgtcgcgtagtgaggagctccagctccg

SEQ ID NO: 126720 - DNA, 132 bp, Homo sapiens; identical to SEQ ID NO: 10504
  chr16:3233198-3233330
  hyper

SEQ ID NO: 126721 - DNA, 669 bp, Homo sapiens; identical to SEQ ID NO: 10505
  chr16:3233434-3234103
  hyper

SEQ ID NO: 126722 - DNA, 214 bp, Homo sapiens
  chr16:3234164-3234378
  hyper
cgcacccaaagcgagaatcatacccctagaccaacgagccgccgcttcccctctgttttgttgttgttgttgttgttttttgacacgtccttccgcccctgacgcagagcgagactctctccatcgccccaatagctcagtccttagcgcgcgcacctgcgaatctgggcttttgggttcgcggccaccctcagatttgcgaggcaggctttac

SEQ ID NO: 126723 - DNA, 266 bp, Homo sapiens
  chr16:3237825-3238091
  hyper
atatatcataccagcacgacattgaaaccaccagctcataacctcagcgggtaaccttgttggtttacccagcaggagtaaagcctgcctcggaaatctgagggtggccgcgaacccacaagtcaagattcgcaggtgcgcgcgctaaggactgagctattggggcgatggagagagtctcgctctgcgtcagggacggaaggacgtgtcccccaccagaaaaaggaaaaaaaaaaaaaaaaaaagaaaaaagaaaaaaggaagcg

SEQ ID NO: 126724 - DNA, 1645 bp, Homo sapiens; identical to SEQ ID NO: 52750
  chr16:3238150-3239795
  hyper

SEQ ID NO: 126725 - DNA, 691 bp, Homo sapiens
  chr16:3241320-3242011
  hyper
tgggagatcgcagagcggtgagcaaagtcttgcaccagcggggatgtcggggtggaactgaacctgttgtaggggacccccagtgtgccctggtttctggggctgattcattacgtcacttagtttctactattctcatgccaccccgccaattactagacataaaacgttcccagggaagcccggctagctcagtcggtagagcatgggactcttaatctcagggtcgtgggttcgagccccacgttgggcgacttgttttcttccttgctaccttggagttctggaaacagccagcatttaatgaacactaccaggtgccacatcgcgctctgtgatggtatcccctcaatgattgaattttggtctccgcgcgctcccagcagcaaggattgtcagtgaaatgaccaaaggcagcaccgggacgggctggttgccagccaggggcagaggggcgggggcgggtgagaactgaggggccacaggatgggtgtgaggggtgcaggggcctctccccactttgtgcggtgcggagaggggccggggcgctggcccacccactgagtctgcaatcccagtctcctgtcactttgctttcgcaggcttgagctttatcgctccaagtactccacggctgccacaaagaaaagtaaagggcctgctgctgtggctcgttggtctaggggtatga

SEQ ID NO: 126726 - DNA, 30 bp, Homo sapiens; identical to SEQ ID NO: 52752
  chr16:3332884-3332914
  hyper

SEQ ID NO: 126727 - DNA, 125 bp, Homo sapiens; identical to SEQ ID NO: 52753
  chr16:3355108-3355233
  hyper

SEQ ID NO: 126728 - DNA, 659 bp, Homo sapiens
  chr16:3355250-3355909
  hyper
cgcagaacagacgcggcagtgcgacgcctcccccactggggacacgagacagcgacagccacgcggtgagccggtacaaggccctctaggcttcagcgggtctggatactcggtggcattaacccttccctaccgccggggaagacagcagtttctctggcgaggaagtaggccgggctcaggcgccttagccagagggcgggcctgcgccaccctcggaaagcgtcacttccacttccggccggcgctctggctctgtacctggacagggctgcggtaggccagcggtgggctggcggttgcgctcctcagatcggcggcctttcgggcggtggcttgcgtttgagcctcagaaagcgaggagcggcctccacggaagccaagctggccgaggtaaccgagaagcggcttcccctatggcttcgaccctggagccgctggagcggcggcggccgcagggaggcagccattttccgtaggcggtggccgcggcgcttccgggccgcgcggctggagcctgaggcggggccaccgtcgggcacgagaaaccattctctccccgcttttcgcagctgtatcccagaggcgcggctgaagctcgctgggacactgcccgcttgcccagtgcccacgggcacgcctgtcgcagacacaggctg

SEQ ID NO: 126729 - DNA, 30 bp, Homo sapiens; identical to SEQ ID NO: 52755
  chr16:3450813-3450843
  hyper

SEQ ID NO: 126730 - DNA, 30 bp, Homo sapiens; identical to SEQ ID NO: 52756
  chr16:3451129-3451159
  hyper

SEQ ID NO: 126731 - DNA, 30 bp, Homo sapiens
  chr16:3508527-3508557
  hyper
accctgtggggtgtcgcgcgaggtgaaggg

SEQ ID NO: 126732 - DNA, 742 bp, Homo sapiens; identical to SEQ ID NO: 52757
  chr16:3550752-3551494
  hyper

SEQ ID NO: 126733 - DNA, 64 bp, Homo sapiens; identical to SEQ ID NO: 52758
  chr16:3766892-3766956
  hyper

SEQ ID NO: 126734 - DNA, 172 bp, Homo sapiens
  chr16:3767712-3767884
  hyper
ccgtgaccttggatcgcgttgtcaagggcgacgggccttgcgcgcggaggtgggggaggtggccccgccgcccccggcccacgctggccggctgcgcctagctgtgcgcattcctggaatggggcggatgtcagtatccacgcgagggtgtggaggcgacgctggggaagaa

SEQ ID NO: 126735 - DNA, 1165 bp, Homo sapiens; identical to SEQ ID NO: 52760
  chr16:3781397-3782562
  hyper

SEQ ID NO: 126736 - DNA, 310 bp, Homo sapiens
  chr16:3931081-3931391
  hyper
gacgccagcccgggcccgcccgtcccgctggggcggcgctgcgtgttcccagctcctcgcgtccccttccccagaccctcctaggtggcgtcggtcgggaacggtcggggcgaccccagcccaggccgcgccactagccttcgccgccggccagggaagtggaatggcctctgcaggttacagaccgcccttgggtcctgccgacgaggtgggcggatggggaaactgaggcggggggcgagcaactgctccaaagtggtcgaggcaggaagtggcagggccgggattcgggtcccgccctacctcgtga

SEQ ID NO: 126737 - DNA, 112 bp, Homo sapiens
  chr16:3989146-3989258
  hyper
tgcccaggccacgctcgctcagtcccggagcttgggacttctgaagacgcggggcctcgtttggggtcgcaagtctgagcgctccggctctggttggcgctaggtggcgccc

SEQ ID NO: 126738 - DNA, 30 bp, Homo sapiens; identical to SEQ ID NO: 52763
  chr16:4106772-4106802
  hyper

SEQ ID NO: 126739 - DNA, 1449 bp, Homo sapiens
  chr16:4165531-4166980
  hyper
gcacgcctagaggcccgggacctgctcctgtcctaaggggcggctccagcacgcgacctggacaggcaccatctgttcctgtggttcccggctcagcggtgctcccaccgcccccaccgcccccaccttcgaggcgcacgagaaccgctcgggacggacctagaacgcccgggggtccccgccgcgtggccgccgtggctccgggaccgctttgctcgctcgccttccgcgcctctcgccccgagggtggcctccgcgccgcgcggcttctcctcctcgcgcgctcgcctcctccagctgcggctccggagggaagttcagaccttgagcgctcccagccccgcgagccgcctgcgcacaaacaactccgctggcggcgcggagccctccatcctgcaggagccgcgctccgatgcgtcaaaggcggcgcgcggccggccccgggcccggaccccgacccggagcagcgagcttcggcgggcgcccccggctcgcgctccccggccgccccccgcgctccgggccggccctgcccgcggcggcgggcgctgggggtgggggcgccccgggctgcgagtgcgcggagcccgtcggcgcggcccgtctagtggggcctgcttccccccgagtgcgccgccgctcccgccgcggccgcagctgtcccgggaccgagcgcgtggaaccacggacgcgggcccctcgccgggcggcggtgcagacgctgccgcagagccgggctcccgcgacgccggccgggacgcccgcccgcccgcgcccacgccgggggccgcctccccgagctagagatgcggccgccgccgcgcccgccgccgtgtcccccgcggccgctgcctcatgtcggaagagctgccgccgccaccatctccggcccctgccccgcccgctgtcactgacagacgcgcgcccgcgccgcccctcgcccagccgcagcgcgcacgcgcggcccgcgctcgccgccaccgcctcctggccccggacacgcgcacgggccgcgcgccgccccgccttggtgcgcgcgctgggctggggctgcggggcggggcggggcggggcggggcgcgcgctcggctccgccccccgccccgggcggcgccgcttctaggcggcgggctgtggccgctgtccgcgctccgggcgctgtgggcccgccctccctcggcgtcccagaggccgcgcgccgcccggggtcccgaccctgcggagagacctgaaggcgcctgccgtggaagaagccgctggccgcaacgtttgggaaatcaaaatgttgccttcccactcggcacgcctttgggataaatcgaagtttccaaccgttggatttccctcccgggaggctccccttgctctgtaagcaatgaatgcgggccccggggcactcggcctgccctggacctgctcacggggcgaccttcacgggcctagcctcca

SEQ ID NO: 126740 - DNA, 554 bp, Homo sapiens
  chr16:4233231-4233785
  hyper
ctggagttttcattcgctaagggctgcccttcggttttcaattactggcggagagggcggttcgtttctggcggggaagggaggtgacattccggtaggagaatctcctaaaactcgcatttcctgtttgccctgggcgccggcctcaggtggaaacctcaccccgataactgagggcagcagtcggccttgggcgttcttccgtcacccaggtctccagaacctcccggactcaatggcaagtcactgcacaagttcagggccttttcggtcccgatcgaggatctggagatctcggggcttcccggtcgtctgccccacagcccacgaggcggaccgacctgcggggtgaggcaccgggagcgcatggcagccccggcctcggcctcctggcgccctcccagccacgcggtgaatgcctgagaggacagaggttcgcggccctccccatcccaccggcagcgaccgcaaagcccgggagctgagtccgcggcgtgaagcggcggaggtcagcagcgagggggcagggccggcgctggcggccacggagcttg

SEQ ID NO: 126741 - DNA, 205 bp, Homo sapiens
  chr16:4234086-4234291
  hyper
tgagcggccgcgagatcggtccctgtccgcagggtcgggtagtggccccctcggggacagcgtgtgaggattcgggcgcgaaggacggggtcagattcagccaggtgcccactttccccacggtcacgaccctggtccagaactgccctgccccgggcctcagtttccccactaaggagaggaggcgtgccggggaaatctgagg

SEQ ID NO: 126742 - DNA, 31 bp, Homo sapiens; identical to SEQ ID NO: 10517
  chr16:4291946-4291977
  hyper

SEQ ID NO: 126743 - DNA, 30 bp, Homo sapiens
  chr16:4303440-4303470
  hyper
gtgccgcattgatccggtccctcccacgcc

SEQ ID NO: 126744 - DNA, 30 bp, Homo sapiens; identical to SEQ ID NO: 10518
  chr16:4304209-4304239
  hyper

SEQ ID NO: 126745 - DNA, 209 bp, Homo sapiens
  chr16:4321187-4321396
  hyper
aaggtggggacccccggggcagagggttgggcaggagtgtctacacgtgtgcagcaaccttccctccaggccggattctgcaggcgctagcgtccaccagcctgtgccacaccggcgggctcctcctccctcaatccccgcccagactgcctcgggcggcagagcacgtggctccagccctggggagccatttcgctcctggagcagcg

SEQ ID NO: 126746 - DNA, 30 bp, Homo sapiens; identical to SEQ ID NO: 10519
  chr16:4322735-4322765
  hyper

SEQ ID NO: 126747 - DNA, 378 bp, Homo sapiens
  chr16:4357422-4357800
  hyper
atgtgacatccgaggcggtttcccaattcgactacctgtggctcttgcgcctggaacgtaagccccacgaggacaggactgtttcacttctgactcccgtgtccgcagcgatggaaagaatgactgtgggcgcctacccccggaggatgctgtcggcgcccagtctggcggctcccggcgcgcgcccgcgaggtcacgtccggggcgcgccggccggaaggaggccccgcgtgggggtaggggcggggcgtccgagccaggccacgccccccggactcgcgcccccctctcagcggcagagccagccagcctggggccgcctcgcacttccgctcaccagccggcttgttcatattcatgaggcgggcgagaggcggg

SEQ ID NO: 126748 - DNA, 402 bp, Homo sapiens; identical to SEQ ID NO: 52771
  chr16:4363850-4364252
  hyper

SEQ ID NO: 126749 - DNA, 30 bp, Homo sapiens; identical to SEQ ID NO: 52772
  chr16:4364717-4364747
  hyper

SEQ ID NO: 126750 - DNA, 30 bp, Homo sapiens
  chr16:4365409-4365439
  hyper
cctgccgccttccccgccgcccggggccgc

SEQ ID NO: 126751 - DNA, 31 bp, Homo sapiens; identical to SEQ ID NO: 10521
  chr16:4366576-4366607
  hyper

SEQ ID NO: 126752 - DNA, 769 bp, Homo sapiens
  chr16:4377552-4378321
  hyper
cggggactgcgggcggggggccgggtggctccgccagcgctgcagctgggggccgtctgctcgggctgcggtcgggcacacaatagcagccattgtctcggccagggtggcggggggcccgcccagcccaccctccgggtgacccccgccctgcggtgggtgggaagggcagggcccggtcccccgaagcccccgccgtcccggtggtccccgcggccgcccccgcgcgcttcctccctcgccgcagccgcttcctcccgctcgccccgctctaattagttccttttgcagctggaggagccgcgcagcggccggttccgcggccacccccaccccccaccgacaaccccagccctcgccccaacccctgggcccttgcgtgtgggggcgctgccctgggcgcatcccaggctgagtgctcgagagacgcggccctgggctctgtgcaccctccacgctgcgctgtcccaccggggggaaactgaggaacggaaggctccaccaggaggcgcagaggggcgtggggccggcgggccttgcgctgcgcccggggagcatccacggggtgcccccacctgaccgagagccggctcctgccctcgggaccccgcagtaattagcacccaggcctctggctgagcttgtccagagccaggctgtcggccttacgctggggagagccacggccacccgctcatgggcactcactcagggttccctggttgcaggcccgctgctccccgctctgggcctccgaggctttcaggag

SEQ ID NO: 126753 - DNA, 644 bp, Homo sapiens; identical to SEQ ID NO: 52775
  chr16:4421673-4422317
  hyper

SEQ ID NO: 126754 - DNA, 98 bp, Homo sapiens
  chr16:4465716-4465814
  hyper
aataacacggaaagcggaagagcagagctgacatcgtttccaaggcgcacccctcatcagtcctcctgccgtttcgggggtccgaagggtctcccggc

SEQ ID NO: 126755 - DNA, 30 bp, Homo sapiens
  chr16:4466350-4466380
  hyper
ctcggggttccagacggccctggagggcac

SEQ ID NO: 126756 - DNA, 30 bp, Homo sapiens
  chr16:4466873-4466903
  hyper
ggctgcagcattcgcgattttgtgtgcagg

SEQ ID NO: 126757 - DNA, 30 bp, Homo sapiens; identical to SEQ ID NO: 52777
  chr16:4475540-4475570
  hyper

SEQ ID NO: 126758 - DNA, 220 bp, Homo sapiens
  chr16:4475917-4476137
  hyper
ggttgtggggaccccgcggctgccggctatatcgggtagaggggcccggccgcccagggagggcgtggtgggggcatggctgagccgcaagctgagcgtccccgcctttgcgtcttccctgacctcttgcggcccccgagcgctgctgacattgagacctggtgtcagccttacaggtgagggcaggttccaacttccgagtggcggtttcagggcctag

SEQ ID NO: 126759 - DNA, 157 bp, Homo sapiens
  chr16:4526212-4526369
  hyper
ttcctgccgaagcacgcctacttaccccgctgagcagagcctgagcctgcaacctccagagacctggggaaagccacatactccgcttcccgcccccggcaagggcgtgtcagctacaaggggcgtgtcatctctaggccccgccccgcgctgcgtg

SEQ ID NO: 126760 - DNA, 30 bp, Homo sapiens; identical to SEQ ID NO: 52778
  chr16:4526750-4526780
  hyper

SEQ ID NO: 126761 - DNA, 120 bp, Homo sapiens
  chr16:4587968-4588088
  hyper
gacactgctgggctccgggacggccaaggtcacccgcggggctcggcaggggctggctcggccacggggctcctcctcgaccccctttccttgagaaaacaactcccacccctcccctcc

SEQ ID NO: 126762 - DNA, 634 bp, Homo sapiens
  chr16:4588308-4588942
  hyper
cgccggccccgctttacctccagaagcccggtgcccgaggccggccgaaagcggagaggggcccgggtccggacaggcgccggcagaacaagaccctcagccccgcgcggctttgcgcgcacaacgaaaccccccaacccaccgcccaccccaccgcccagaggcttctaggacttgtagtccgcccggtcaccccccccaccacaacccgctctgagaggctggggactacggtgcccggcatgcaccgcccaggcgccgcgggcgggggcggggagggggcgccacggtccgaggtcacgccccgacctgaggagagctggcgcccagacccttcccccggggaggagggctcccgcgcgaagccgtctccgaatgcgtccagtcgactcaccgtccccgcagccctggggcagcggccgcaacagcaggaccgaacgcctcggcagctggcagtcgcacttctgtcacaaggaggcgggtagactttggaccagggccgaggcccgggacgtcacggtggggggtggggtctcgggaggcacgtgatgcgccgtgatgacgtcagtgggagcggaggcgatttggcctagagctggggctgagcacgtgggatggtcggggcctgtttgcc

SEQ ID NO: 126763 - DNA, 30 bp, Homo sapiens
  chr16:4664047-4664077
  hyper
caccgtgccgggcacgggcggcatctgcac

SEQ ID NO: 126764 - DNA, 47 bp, Homo sapiens
  chr16:4665022-4665069
  hyper
agcccgggaaggggcgtgtctgagcaccgagcgcccgctgtgcggat

SEQ ID NO: 126765 - DNA, 135 bp, Homo sapiens; identical to SEQ ID NO: 52780
  chr16:4666534-4666669
  hyper

SEQ ID NO: 126766 - DNA, 30 bp, Homo sapiens
  chr16:4674627-4674657
  hyper
catttggtttgtcccggagtgcttgtcaac

SEQ ID NO: 126767 - DNA, 30 bp, Homo sapiens
  chr16:4675372-4675402
  hyper
agcgcgggtcccggcgcatcgcttctgcct

SEQ ID NO: 126768 - DNA, 141 bp, Homo sapiens
  chr16:4743269-4743410
  hyper
ccattgcggatggacggggccatgcgggccgggtcggcctcctggggagaaacgggtgggcgcaaggggatcggcgccatcgagggtggagaaaccgcagggaatttcggctgtccgctttggggcgccaaggaagatgtt

SEQ ID NO: 126769 - DNA, 30 bp, Homo sapiens
  chr16:4743688-4743718
  hyper
ctcttaagtggcagcggcggggacggggtc

SEQ ID NO: 126770 - DNA, 30 bp, Homo sapiens; identical to SEQ ID NO: 52782
  chr16:4784425-4784455
  hyper

SEQ ID NO: 126771 - DNA, 30 bp, Homo sapiens; identical to SEQ ID NO: 52783
  chr16:4817330-4817360
  hyper

SEQ ID NO: 126772 - DNA, 30 bp, Homo sapiens
  chr16:4818875-4818905
  hyper
tacatttcccagagcgccccgcgccctccc

SEQ ID NO: 126773 - DNA, 394 bp, Homo sapiens
  chr16:4852796-4853190
  hyper
ccagactggcggctgcgggagtgaggctcgctccgcctggccagggacgcggccggcggctgcacgagtcaggcttgctccggctggccagggacgcggccggcaccagcctggggcgcccgcttgggggcggagctcccggggcgcccccaggatatgatagggcgctctgctccactcgcgctcactcattggccggcaggacagtctgtccccgctcctcctccctattggcccgcttggctccattggtcgtggttccaaccctgccgcggacctcgccgccactcccaagtccgtctcaccccggacgcggaggtcccgaaaacccaccccggccccgccgctgccttctcctcccacccatctcgccgaggacgagggaagcaggact

SEQ ID NO: 126774 - DNA, 30 bp, Homo sapiens
  chr16:4896592-4896622
  hyper
ggagaaacaagctacgcagctcgagggagg

SEQ ID NO: 126775 - DNA, 30 bp, Homo sapiens
  chr16:4897227-4897257
  hyper
ccacaccaagtcgccgagccgcagactcac

SEQ ID NO: 126776 - DNA, 30 bp, Homo sapiens; identical to SEQ ID NO: 52786
  chr16:4986232-4986262
  hyper

SEQ ID NO: 126777 - DNA, 908 bp, Homo sapiens; identical to SEQ ID NO: 52787
  chr16:4986645-4987553
  hyper

SEQ ID NO: 126778 - DNA, 682 bp, Homo sapiens; identical to SEQ ID NO: 52788
  chr16:5007928-5008610
  hyper

SEQ ID NO: 126779 - DNA, 149 bp, Homo sapiens
  chr16:5037518-5037667
  hyper
cccccccaccacggccgctcactgccgctctgcccccaggcctacgagaagcgtttccccacgtgcccacagatcccagtcttcctgggcagcgaggtcttgcgcgagtcccgcagcccggacggggctgtgcacgtggtggagcggag

SEQ ID NO: 126780 - DNA, 174 bp, Homo sapiens
  chr16:5037918-5038092
  hyper
gaactgggcggggttcgcggggccagggccggagctgggtggtgaagatgggttggcggcagggcggaagtcgggggttggtgtcctgggtccgggctgggtgggcggtggcgcaagggacctgggactcagggcagggggtgactggggcaggcccgccggactcgctctcca

SEQ ID NO: 126781 - DNA, 30 bp, Homo sapiens
  chr16:5083938-5083968
  hyper
gtgggctcgcctcacgtgactcaagtccca

SEQ ID NO: 126782 - DNA, 142 bp, Homo sapiens
  chr16:5121864-5122006
  hyper
cttggtcctgctggcgctgtgtctgctgctgccgctgctgctgctgggaggatggaagcgctggcgccgggggcgggcggcccggcatgtagtagcggtggtgctgggcgacgtgggccgcagcccccgtatgcagtaccac

SEQ ID NO: 126783 - DNA, 44 bp, Homo sapiens
  chr16:5122222-5122266
  hyper
ctaggtatagccggcgttaatcttgccacgtgtcagaagtgtgt

SEQ ID NO: 126784 - DNA, 30 bp, Homo sapiens; identical to SEQ ID NO: 10528
  chr16:5666484-5666514
  hyper

SEQ ID NO: 126785 - DNA, 33 bp, Homo sapiens; identical to SEQ ID NO: 52792
  chr16:6068893-6068926
  hyper

SEQ ID NO: 126786 - DNA, 119 bp, Homo sapiens; identical to SEQ ID NO: 52793
  chr16:6068936-6069055
  hyper

SEQ ID NO: 126787 - DNA, 102 bp, Homo sapiens
  chr16:6069094-6069196
  hyper
cgcacacacacacatgcacacattttctcgcgctctctccggctctcctttgtttattttctaatctatatttttactggaagatttcctctttattctctc

SEQ ID NO: 126788 - DNA, 302 bp, Homo sapiens
  chr16:6069249-6069551
  hyper
cgatcaccccagcccccttcctggtctcccgagcgcggggtttgaaggtcacctcctttccagtccccgtgcgagccgcgctgccgccgcctcctccagccagagtcggtgggactggctgcgctgccctgaagtggttctccaagcagcgcggagggtggcggacggcggacggagcccaggggccgcgtcgggtggggaaacccgaactcgcggaggggaatccctccccctccgccccagccccccagcagcacccgcggtggggcgggggcgctctgccagccccgggaacagcagag

SEQ ID NO: 126789 - DNA, 107 bp, Homo sapiens; identical to SEQ ID NO: 52796
  chr16:6069577-6069684
  hyper

SEQ ID NO: 126790 - DNA, 513 bp, Homo sapiens
  chr16:6069940-6070453
  hyper
cgggggtctggggccgagaacgtgaccgcagccgggctcgccgggagttctaggtaagtccaggcggagtcattgcctctgcacccaccctgacctggtgggtcaggtccagaaggtctcatggagggaagcgctaggtccccgagaactggcctcctcctagcgccagtctgggcgctctggacgggaactttttcagggtgtgtggaaagatctcgaggcgtgtccccccctacccccaggaggccgagaccctgagcccccttgtgcgtcgcttccagaagcacgtccttccttgccccagagcgcccctccgaagcatccaggctacctcgtccgtcctcctgggagcgagtcctaggtgccaggagcagcgggagcctgcctgcgcactttgattagtctccctggccggctgcaagcgtgcactcagcgcgcccccggaccgctgcctccgcccgcagggtgtgcaggaggaggcatcttagtgacccgggagggtgtttaggtgcc

SEQ ID NO: 126791 - DNA, 5 bp, Homo sapiens
  chr16:6070542-6070547
  hyper
cggtg

SEQ ID NO: 126792 - DNA, 213 bp, Homo sapiens
  chr16:6533081-6533294
  hyper
tccgacccgtaggggcgggacccacgcagccccagtatccactgccttcccccagctgcaagagtttgcaaaaacattgggcgtctcatttggcgagcgttttggcgcggacagaggccgaggccggccggggaagccggacccgggccctggcgccgccgtggcctccctttgtgcgcgcccgggtgttgattgcctccttgcacgggctgc

SEQ ID NO: 126793 - DNA, 443 bp, Homo sapiens
  chr16:6533425-6533868
  hyper
cgtttgctgttgcctcggacttctcccgtgctgtgttttcccggtgaggaaacaggaggcactttgcagccgacaatgaaatcttggcagctaattgcagtcgtgggagatgcccttcaggtacggcgagcgaagaagactctaaaacactgtcagggaaggagagaaagagggagagagggagggagggaagggagagaccaggcagcttctgcagaggcttcctgaagcccactgactccgcgggagggggttgcagagggacgggggcgggcgacagggggaggagtgtgcaaattgacatttttggctgcctgtggcagaggagcagccgtcagccgctgtccaacgttagcgcagacacggtggcggcgtgtgcgcctccggggctgctgattagaataggggacttggccgtggatggaatccgggaaacccaaacc

SEQ ID NO: 126794 - DNA, 8 bp, Homo sapiens
  chr16:7354031-7354039
  hyper
aaagccag

SEQ ID NO: 126795 - DNA, 101 bp, Homo sapiens
  chr16:7354077-7354178
  hyper
cgcaagtgttttagttggaggcagaggaacgccgggatctagcacatccccaggcggggagagccagggaggagggaccggcggggtgcggtggggggagg

SEQ ID NO: 126796 - DNA, 420 bp, Homo sapiens
  chr16:7354237-7354657
  hyper
agagagagagacagcgcgagccaccggtcattgacttagataaccagcaaaattaaaaaagaaaaaaaaaaattgtagcgcccaggcagagagcaacgtgattgcattcaagcgtccccactcgggctcggcgggcgccagagagacatgatgcagcatcctctgacgggggccacctgcgtggcgctccccaacgtgggcatgtgtccccagctttcgtgtgccttgacttttatgtacttacagcaggtaaggcgcgcgtctgccctcggtggctgctttcctggggctgggccagatgggtccccgcgcgtactgggctgcgcttcggtgccttatgtaggttctgaggagggggctcccgcgttgcgatggaaagggtggatggaagcctcctgctctctgtggagcccgggcacc

SEQ ID NO: 126797 - DNA, 45 bp, Homo sapiens; identical to SEQ ID NO: 52800
  chr16:7354699-7354744
  hyper

SEQ ID NO: 126798 - DNA, 31 bp, Homo sapiens; identical to SEQ ID NO: 10532
  chr16:7615184-7615215
  hyper

SEQ ID NO: 126799 - DNA, 30 bp, Homo sapiens; identical to SEQ ID NO: 52802
  chr16:8223298-8223328
  hyper

SEQ ID NO: 126800 - DNA, 830 bp, Homo sapiens
  chr16:8767885-8768715
  hyper
cacctctgactcccagcgccctgtttgtcttccggagcgctggggccaggcggaggaaagtagctgggagcaagaagggctggcagggccctgagcgccgagatggggagtgaggtggggagggcgggatgctccttcccttctccgcaaaggaaccccttctgattccgactctggagctccagagaccggatccgagacgcgggtggaggtggagttacactcgcctgcagccctgagggtgtaaatggcccattaagatccaggttaaatcaacctatggagctgccccccagagggtcagggtccccacaacttgacgggggtcctcagccgtctcctccccagtcccaggactccctcccagccctcgcggtccctctggtgggtcccgccccagcccccgtctcccccgcccccggaggctggactctgcccccgccccgcctgccacctccctcctgggggcggtggcccgtggcgggcgcacccattggctgtggcgaaagcgagggccggggctggcggcgctgattggccgggacgctcggcggagccagggagtccggcgagtcgctgggggaagtcgagcagacacccagcgctgccggaactcggggcgcgcatcccgcaagtcggaacccggcggatcggatcccgcagatcggagacggggcctggaggtgagcgcgaggcgccgggtggcttgggacgggcccttccgaggggagccgagaggaggtccttctgccctgcccccaggagcaaaacctgggcatcttctcctggaaacggagccctcatcttcccaagacgcggggccctccccc

SEQ ID NO: 126801 - DNA, 30 bp, Homo sapiens
  chr16:8963102-8963132
  hyper
ccaccagcagaaaacgcccctgcaaagtgg

SEQ ID NO: 126802 - DNA, 31 bp, Homo sapiens; identical to SEQ ID NO: 10534
  chr16:9022848-9022879
  hyper

SEQ ID NO: 126803 - DNA, 40 bp, Homo sapiens
  chr16:9053886-9053926
  hyper
ctgttgattcaatagcgtctacaccgaccatctgagtatt

SEQ ID NO: 126804 - DNA, 215 bp, Homo sapiens; identical to SEQ ID NO: 10536
  chr16:9056292-9056507
  hyper

SEQ ID NO: 126805 - DNA, 30 bp, Homo sapiens
  chr16:9057768-9057798
  hyper
cgcatggggggccgcggagcgagcgagcga

SEQ ID NO: 126806 - DNA, 30 bp, Homo sapiens; identical to SEQ ID NO: 52807
  chr16:9186591-9186621
  hyper

SEQ ID NO: 126807 - DNA, 328 bp, Homo sapiens; identical to SEQ ID NO: 10537
  chr16:9186866-9187194
  hyper

SEQ ID NO: 126808 - DNA, 143 bp, Homo sapiens
  chr16:9229668-9229811
  hyper
aagctcactcctgtatcgatggactgaggttacgaatctcttctctgatttaacccaaagtttagatgaggacactgcggatcaagtattcattgacctcttatcaccggccaggctctgtgccctgccgcaacagacaggat

SEQ ID NO: 126809 - DNA, 63 bp, Homo sapiens; identical to SEQ ID NO: 10538
  chr16:10133418-10133481
  hyper

SEQ ID NO: 126810 - DNA, 858 bp, Homo sapiens
  chr16:10274175-10275033
  hyper
gggacccttctccgccgccgcgctcggcgccggaccgcgccagaccagaagggccggcagcaccagcagggtccaatagcccactctgcccatagtcgccactgacggtccctgcaaggtgaagagtgagaggcagggccgcggtgagcaaggcgaccagaagaaagggattaccaacttggcttcctgctctaggagccaggcatggaactcagcagcaggataggctgctgggatcacggactccattccgagtccccgacgccatccacatccctcgatccatctctaactctatccacaactccaattcgagctaattctccatcccccagccccttctcgcatccagcttcctcatcccctgtctccaggcacttccccatccccatctctgtccatatcccccaccgcattccccaagttcgccgcgggccacagaccctaagcgccgcgcgtgttctgtaccccaccaagctcctaggtgcacagaataaaccctccatccaacccctcccacctgggatagagaggaccaagttatcaaccccgccccctgctggcgcggagcgaactacagaccccgcagggcgtgcggaggcggcacccagaccccgcgtcccagcttgagagctcagctagttggctgaccccgccccctacgagcccgtcgtgtgcaccacacactttgctctacgcccagccccaactacagacccggctcctctcagtcagagtacaccccaagtgcttgggagtgaggacgctgcctggtgggcccaggctccgctgtgcctggggaacttggggctcgccccacctcgagccaaggggccgtggagagtccttcacccctac

SEQ ID NO: 126811 - DNA, 857 bp, Homo sapiens
  chr16:10275092-10275949
  hyper
caccctctctcacgcgcgccgtgtgcaatgctgaattctggagagtaggcgcgtccccccgcgggccagcgcgtaggagctggcaaagaacgtgcgtagggggaaaggtaggctcccaagaagctcccagacggacgtggactgtacagcccctccctagcctttctactgcgggcgctgttgccaagtcctaggtgcacgtgggcagtgggccgcacacgctcataggcacgcgcgcttttctgcgcacttcctcagactgctgtagcggtgcccacggccagccggagtcctcacatgtcctcaggtggtgcacacgcatgaactgcggcaggtgcacagccctgcgtacctgcaaataccagcacggtcgtgcacgcgtgccctgacgcgcgcctctcgggacggacgctgctggagccgggggaagttgaggcgaactccaagaggcctcgacgttcctgggtaagcgccgcggagcgcggagccgcagcgccccctggtgcccctcctgcacttcgccgctgggctccctcccgctttccctctccctctctagcctgatccctctcccgctctccctccggtcgagtctccctcctccccggcccaaggagccctgatctccctctgggacgtacctgtagcccgagaaggtcgaggatgcagtggggcgcgctgcgcgcacgagcatctcggccgcctcagcagccaccgggtttagcgggttcccgcatgctgcggccccagcgcgctcccctggctgtcccgcgctgtccgcatcgcccccacggggggcggctatcccagccggaggctctgcagcagggctctaacggggcggaggagagaaggag

SEQ ID NO: 126812 - DNA, 840 bp, Homo sapiens
  chr16:10276210-10277050
  hyper
ccacctccccagcgccggctgctgggagttgtgcgaccgggagctgctgagcgagggaggtagggagagaaagaggaggtaacgagggtgggggggcgctggctgagtttgtgacgagccagcagtaggagagggggagggaaggacgcgggctcccgcggtcccggttccccgagggaggtggatctttcccacgcagcgaccctcttgtgatcctgccgcttcctccctcttcaggcctcccacctccccccttcccaagggggcctcccaggcccggcgtcccgcgctagcactcaccgcagcctctctccacatagttctcagcagtggccgctcctggtcatctccagggctgatggctgcggccgcgattctcagcgctcacccggtcccatgatccggccaagccctaggagctcccctccaagatccctagctccgcttcctgccccactccggacggcaactgcccggtcctctgagcgcgccggagcaccctctccgcaacccagctccgggctggtgtgtttgagggcgagtgtgtgtgtgagtgtgggagcgcgctcgcgtgtggccggggatccccgcggtccccggccgagagaggcgcgggcggggaaaggcagctccctccgggcccttcgctgctgggccagctccgcgccgggcgttcggctccccacttcccagcgggagtccggtgagcgcctggacaccctggttcacagcactggcaaagccgggttcccggggcgtctttctgctgcggtcgcctccgaggaagaggagaaggaaggtagcggcgccctccacaccaacttagggacttgttctcag

SEQ ID NO: 126813 - DNA, 357 bp, Homo sapiens; identical to SEQ ID NO: 52815
  chr16:10277071-10277428
  hyper

SEQ ID NO: 126814 - DNA, 690 bp, Homo sapiens; identical to SEQ ID NO: 52816
  chr16:10479684-10480374
  hyper

SEQ ID NO: 126815 - DNA, 773 bp, Homo sapiens
  chr16:10673912-10674685
  hyper
caagaagtcgctcctcgccgctcgggggcgcgacggagcagcggcgggggcctagaggggtacgcagcccaggaggacccgctggcccggcctggcgcaccagtcctgcccgcgaggcgagtctggggacgctgcccgggaatccctcacgcgacctggggatctccctggactccaagagccccgggtgtaagtccggcggggcgaggggaggcgccctgactcctccccaaacttttcccgcctgcttcggctcaaaaggcgtgggaagctgtcccgggatggcgaagtggaattctggggccggagcgagcgtggcgcagaccagaggtcggcggcatgggtggcacctcggccctcccgttactgtcaccaattccgggggctgctcccggtccagtaagtggaggggtcgcgtccctgctgcccgggcgtacacgatcccggggcccccccgatgtcgccccgcgccctgggtgcgcccacaactcacccggcgctggcggctgcgctggcagctggatcgacggactggctgggggtgcgaggcgaggccgccgggctgttttgaagctctgggctgggactgcgcgccctccctccaccctctaggcggcggggcccctccttccccgatcccgcctcccgggccgtgacgccaggagccgggagagccgagtgggaggggccgccggcgaaaggagggggccctggagggaaaggccgaggccgggagcgccctggcgcccccgcaccaccgttcccgcccgcct

SEQ ID NO: 126816 - DNA, 102 bp, Homo sapiens
  chr16:10837590-10837692
  hyper
aaggttcgcgcgtgcgcacagccccctttccgagacttatttcgcgcggtcggagaatcagattgtgcccacaaggcggaaatgtacgacagcgggttccgg

SEQ ID NO: 126817 - DNA, 30 bp, Homo sapiens
  chr16:10838145-10838175
  hyper
cgcgaaggacctggcgcggatggagggtgg

SEQ ID NO: 126818 - DNA, 115 bp, Homo sapiens; identical to SEQ ID NO: 10545
  chr16:11035551-11035666
  hyper

SEQ ID NO: 126819 - DNA, 30 bp, Homo sapiens; identical to SEQ ID NO: 52820
  chr16:11038654-11038684
  hyper

SEQ ID NO: 126820 - DNA, 417 bp, Homo sapiens
  chr16:11348662-11349079
  hyper
tcccagttaatgctgcgtgcacggcgggcgctgccggtcaaatctggaaggggaaggagctcaggtagtcgcggaggacggggttgagggggatgcgagccaggttctcgcggcccacggtggccacgatgcgctggcggcacagctcctgcagcggccgcacgcggcgctggcgcagcggggcccccagcatgcggcgcggcgccgccacgtagtgctccagcagctcgaagaggcagtcgaagctctcgcggctgccatccaggtgaaagcggccggcctgaaagtgcacgcggatgctcgtgggtcccgaggccatcttcacgctaagggcgaaaaagcagttccgctggcggctgtcgcgcaccaggaaggtgcccacgggctcggcgcgcagccgctcgtgcgccccgtgca

SEQ ID NO: 126821 - DNA, 126 bp, Homo sapiens
  chr16:11350260-11350386
  hyper
cctgccccagcacccgcctctcgaggggctctggccccgaccctgcgccttccggccacttctcggacccctccttcggacttggcgaccccgattttgccccgctacctcgggttccactttctg

SEQ ID NO: 126822 - DNA, 37 bp, Homo sapiens
  chr16:11351143-11351180
  hyper
tgatttagtgattccgattgtcgtgcgaggccatgga

SEQ ID NO: 126823 - DNA, 78 bp, Homo sapiens
  chr16:11439012-11439090
  hyper
gtgatctgcatccacgccaaattttgagatgcgttgaaagaggaagttctttacctctctgccttcaattatttattc

SEQ ID NO: 126824 - DNA, 147 bp, Homo sapiens
  chr16:11439156-11439303
  hyper
cgcactcctggctgctagagagggcctcttcgcccggcggtcccgccttctgacgtcgaccattggccggctctgccagcgcgctcctgattggtggctgagggccgggccccgctgcttctcaaagttggcgggaaagcggaggcg

SEQ ID NO: 126825 - DNA, 30 bp, Homo sapiens; identical to SEQ ID NO: 52822
  chr16:11439518-11439548
  hyper

SEQ ID NO: 126826 - DNA, 30 bp, Homo sapiens
  chr16:11680597-11680627
  hyper
cgcgacccgacccgcgccccctggcatccc

SEQ ID NO: 126827 - DNA, 194 bp, Homo sapiens; identical to SEQ ID NO: 10546
  chr16:11762782-11762976
  hyper

SEQ ID NO: 126828 - DNA, 30 bp, Homo sapiens
  chr16:11836010-11836040
  hyper
cctacagcccgggccgaagtgacaggtcca

SEQ ID NO: 126829 - DNA, 305 bp, Homo sapiens
  chr16:11836647-11836952
  hyper
cggcccgttgctccccaatcccgcagctcgccgcacccgctaacccggacgctccacgtcagccgcgccgccgccgcggggtccgccccacctcacaccccagagcacgcagctccgcccaccgctcacggagtccgggcgggcaccgacaccgcccaaatccccgcccccaacgggccacgccctgcaccctacgtaaatgcacggaagccttccccgcccgcagcccagtcttggccccaccggtcacgaccccgctcacggagtctgcgcaggcgccgtcgcggggcgtggagaagctgctc

SEQ ID NO: 126830 - DNA, 111 bp, Homo sapiens
  chr16:11944970-11945081
  hyper
gcgattcggtcaagcgctaatgatagggaagctaagccaggtcgccaggtctatctcatctagctccacagcacacttgcaacccaattcactagcgccaggccgcaggac

SEQ ID NO: 126831 - DNA, 30 bp, Homo sapiens
  chr16:12009827-12009857
  hyper
ccaaccacctccgacggcctcacagccaac

SEQ ID NO: 126832 - DNA, 30 bp, Homo sapiens
  chr16:12010164-12010194
  hyper
gctctgtgctgggccgaagaccgagagtat

SEQ ID NO: 126833 - DNA, 30 bp, Homo sapiens
  chr16:12070849-12070879
  hyper
ggtctctgatctcccgtggcggggcactcc

SEQ ID NO: 126834 - DNA, 151 bp, Homo sapiens; identical to SEQ ID NO: 52824
  chr16:12211190-12211341
  hyper

SEQ ID NO: 126835 - DNA, 565 bp, Homo sapiens; identical to SEQ ID NO: 52825
  chr16:12897344-12897909
  hyper

SEQ ID NO: 126836 - DNA, 32 bp, Homo sapiens
  chr16:12913373-12913405
  hyper
gggaggagggtcttgcgcgccccctggaggtg

SEQ ID NO: 126837 - DNA, 1405 bp, Homo sapiens
  chr16:12994398-12995803
  hyper
ggagaaatgagagagggcctccggggagctggaattcgctaggagagagagggcagatttggaaacacagaggagacgggaggctggaagctgaggaagcaaggcagagctctgcagcccccggtgaggatttccggggggatccgtggggacaggggccagccagctccagagaccgatgcgcgggctccaggtccgggagggtggctgaggctgggtgcccaggccttgcgctgcgccagatccgggagcgcagaggcggcgccgcggtgttccctcctgtggagcgcagaaaacgctgcgggggcgaagagggacagaaagcggcaggttcgagaggctgggggacttccaaggaaagaccttccaggacacgccatagcctcggccttgttcggctgtcccctcttacccccgaccttctttgattcgttcatcccgagcccctctcccccggagggtgcttatccctggctcaggggcttgccacctgtccttcccagctccgcctgggtccttgcttgggcccagagagttgagccatgcgggttgcgctcagggctggagggcgcagccgggaagggcaaggaggccccgcacgcctgggaggggcgatcctgaccagactgcacccagtctgtcttggagtgaaagccatttagtctgtccccatcctctccgagtcatccttcccctgatgcacagatttcggccgccgctcctgcacacgcaccggtgaaaaagctacgagctgagccgcctctgcgctctggacagggctgagccgcgcctcctacccagagagggcgcgggaggtcctgccgcggttttccacctgcctggaaatccgagcggctcctctagcctcggctgctgccgagctcgctcctccccgtccgctcgcctggctcagctctgcacgccccccagctagctcccgctctagtcacctcttccccgcgcccccgcccctctagagctcgcgcccgcccccccccacccgcgcctcctctgcccgccctcctccccctcccccttccctcctgccctcccttcattccacaagtgtcgcttcgctctcttcagcgcacttggcgagctggtgaggtgagagggatactgcgagagggctaggggcggccagtccggggctgccggccaaggctaggcgctgccagcccgattctcctctgctctccacccccgcctcacccagtggccggccggacctgcaccccgcgcttgaccccgctcatcctccccccgcccggccgggcgcgctcctccccggccggcccctcggcgcgcggcgcgctggaggcgaacgcgggctgaggcgaacgcgggctgagccgagcgcagtggccgccgaccaccgagcgccccgcgccgctccctgcatgtg

SEQ ID NO: 126838 - DNA, 1626 bp, Homo sapiens
  chr16:12996073-12997699
  hyper
cggagaggccagcgagggcgctgaggcatcggacgcgcccccgacccgggcgcccacgccggacttctgccggggctacttcgatgtcatgggccagtgggacccgccgttcaactgcagctcgggcgacttcatcttctgctgcgggacttgtggcttccggttctgctgcacgtttaagaagcggcgactgaaccaaagcacctgcaccaactacgacacgccgctctggctcaacaccggcaagccccccgcccgcaaggacgaccccttgcacgaccccaccaaggacaagaccaacctgatcgtctacatcatctgcggggtggtggccgtcatggtgctcgtgggcatcttcaccaagctggggctggagaaagcgcaccggccccaaagggagcacatgtccaggtgggctgcctccccttcgccctcccctcggggcttcgctctccctgctctctcctccccaccttcccccaggcaatggcgctccccacggtccccgctccccgcatcccagcctctccgctgggggatgtcaccgggaagccaacttcggcttggaacacggagaaggggcgctgggctcagcacaggtgtgggtctgagcgtgttcgtgtgtgtgtgagcgtgtgtgtgtgtgtgtgtgactctgctccctcaccctctggccgcctcctcccgctggtgactgaggcggacttgagacacgtagcctgggagcccgtggccccgaaatcttcgggtttggggagagggtccatggcacccctcggattccaggtgctagctttttggtaaacaggggcaggcgagcccgaaaggggaggggggcgtgtgtgagcccgagcgcgcgtgtgtgaaggagggagggtcagagtgagtgccgcctgcaactcgtacgactcgcgaaaaggagacgagggaggtggagtgaggggagggcgagaacaaaagccttgcttggagcggccgcctcgctttcccagagcttcgccgtccctggatttgggacctcagctgcccccgcccctttacccacctcatccctttctctggccaccacttctccctgcccggggccgtggccatcgctgcagattgagccccttgccctggctggcgtggactccgggggcccgagccccctcctcgcgcgccctcacttccaagcaccctgatttcgtcaactttcgggtttgccttgttcattatgcaagccccagcaccagctagttccagcagatgggagaaggctttgggggattaatggagctatttgccttttgctttttttaaattttttttattttaagtgtctaaatcgattcgcaaactccgtaactttggaggcggaggacgcagccactaggagcactaagcccccggccgcgggagaggctgggggttggcgtgaggtccgggcgggcggggtggaaggagtgactagcggcctgcgaacagctggatggttggggcataagctttaactgtcccctttcagagtctgggcaacgaagtcgctgtatttttctctaccctctccccaccccttcttccgcgccccctctgccgggggcctgtgtgtgtgcgcgcgtgtgtgcacgcgctccgtgtgatgcc

SEQ ID NO: 126839 - DNA, 19 bp, Homo sapiens
  chr16:13648595-13648614
  hyper
gcttcggcctcccaaagag

SEQ ID NO: 126840 - DNA, 178 bp, Homo sapiens; identical to SEQ ID NO: 52830
  chr16:13877529-13877707
  hyper

SEQ ID NO: 126841 - DNA, 30 bp, Homo sapiens
  chr16:14013663-14013693
  hyper
aaactcaaaagagacgtgaatggagcctga

SEQ ID NO: 126842 - DNA, 40 bp, Homo sapiens; identical to SEQ ID NO: 52831
  chr16:14164835-14164875
  hyper

SEQ ID NO: 126843 - DNA, 30 bp, Homo sapiens
  chr16:14165285-14165315
  hyper
gctgggtgggggagcgggcctggtgaacat

SEQ ID NO: 126844 - DNA, 141 bp, Homo sapiens
  chr16:14379225-14379366
  hyper
ttcagcccgggccaaagcgcggagcttccagaagcttttattttctaaatctcacgcctccattcagcaaccctggctgggcgtgggctccctgcaaggcggcggtggacggcccgcagtcgggccgataaggaaacctgc

SEQ ID NO: 126845 - DNA, 30 bp, Homo sapiens
  chr16:14380024-14380054
  hyper
ccggccccggcgatcggctccctacacaca

SEQ ID NO: 126846 - DNA, 380 bp, Homo sapiens
  chr16:14396709-14397089
  hyper
tgggcttggaaattgacgaggcggtggagcgtccgcgtccccgcccccaccccggaaagcccgctcgggaaactgactcgctgcgtgaccccgatctcaatgccgcgcgcggagcaggccggccgcgcccgccgctccacgtgcgcccgagccccgctggcatgggcggcggcgcctgcgggggccgggccccggggatcccggactagccgggaaccaccgtccccagagagttaccgccgccccctaaagttgtcagctccctccccccgagaagcaggcagccctggcgcgttggctttagcttctgcaggacgggggcaaaaaaactaggttccggggtgcggagcggggtgtctgtgcccgagacaacaccaagt

SEQ ID NO: 126847 - DNA, 30 bp, Homo sapiens
  chr16:14723944-14723974
  hyper
gtgtacggcggacacgcactgctcctgatt

SEQ ID NO: 126848 - DNA, 30 bp, Homo sapiens; identical to SEQ ID NO: 52835
  chr16:14724238-14724268
  hyper

SEQ ID NO: 126849 - DNA, 30 bp, Homo sapiens; identical to SEQ ID NO: 52836
  chr16:14727224-14727254
  hyper

SEQ ID NO: 126850 - DNA, 92 bp, Homo sapiens
  chr16:14727904-14727996
  hyper
catcccagcttccgcggaaaacagagtgagagcctagacgctgttaagccctcaactgtcgccattgggtcctccccgccgaagcccattgg

SEQ ID NO: 126851 - DNA, 30 bp, Homo sapiens
  chr16:15068409-15068439
  hyper
cgtctagaattcggcggtaaggtctgagac

SEQ ID NO: 126852 - DNA, 30 bp, Homo sapiens
  chr16:15149260-15149290
  hyper
ggactgggggtccccgccaagatcccccag

SEQ ID NO: 126853 - DNA, 30 bp, Homo sapiens
  chr16:15150010-15150040
  hyper
atccaggacatggccgcaaggcctcacggg

SEQ ID NO: 126854 - DNA, 72 bp, Homo sapiens
  chr16:15188338-15188410
  hyper
agccctgaggatcccgaagaaagggtggaaacaccctggatgtgctaagctgtggccgggtacactcaagtg

SEQ ID NO: 126855 - DNA, 835 bp, Homo sapiens
  chr16:15528308-15529143
  hyper
ccactgcgcatgtgccgtgcatccctgccccttctgggtacccgtaggcgctcccgggcgctggcggcggcggaggagagggagcagcgtcacgggcgcccggcccgttaaaacgctgctggctggagccacctccctccctgcagcccgcaacgggaatggagtaaagggagacccgtcgacctggccacggggatcagcgatggaattaaagcaatctttgtccacccatctggaagccgagaagcctctgaggcgctatggggcggtggaggagacggcttggaaaacggagagactggggagaagtgagtactggggcggggggcggggggccggggacagctggggatccatgcgcctgcgcgggtggtcgcgggagcgcgaggaacgccagcagtggacccagggaagcgcccccgcagcggggctggcagctcagggggatacgcagctctgcgcagcgacgcgctctccccgcgaacaaaagggggggaccctccgggctgagcctcactgggagggttgggagatggccaggcagctaaggcaggagcctgggctcgacttaggagtcccggatccgtcagctcgcagctggtcctgtgaagtcgggtctctcccacagcccagggaggaggatcctctctccgcctgggatgcgccagggcgctggagacgcgggaccgtcctggaaagcgcccacgtccctggagaggggggagtgtctgctggttttccgcttgctttcctaccccctgcgtgaggtttcggagcgcacctgaaattcccagcttttcctccctcgccttccttgggtcggggtgggaggctt

SEQ ID NO: 126856 - DNA, 30 bp, Homo sapiens
  chr16:15736396-15736426
  hyper
gtgtatcacgaggtcgcgttacaactacta

SEQ ID NO: 126857 - DNA, 16 bp, Homo sapiens
  chr16:15736851-15736867
  hyper
cgcaggactgtctgca

SEQ ID NO: 126858 - DNA, 116 bp, Homo sapiens
  chr16:15737213-15737329
  hyper
cctggcttttttggcgaaaacccccagtttaaggaggccttccccctggcttcacgttgtggagtcgaaaggaaccttgaagcggagaatgagctcgtgacgtggacccgaggaaa

SEQ ID NO: 126859 - DNA, 30 bp, Homo sapiens
  chr16:15743782-15743812
  hyper
attttcctgaaatgcgcggcccgcaagccc

SEQ ID NO: 126860 - DNA, 30 bp, Homo sapiens
  chr16:15744026-15744056
  hyper
cagccaatgggaggcgccgaccgcaggctc

SEQ ID NO: 126861 - DNA, 42 bp, Homo sapiens
  chr16:15951327-15951369
  hyper
tgtctggaaagagggccggctgtgcagcgtgaagggtaggga

SEQ ID NO: 126862 - DNA, 211 bp, Homo sapiens
  chr16:15952215-15952426
  hyper
ccccctccccgggagcggcgggagcggcgggcgggagacaacccaaaaagggcaggcgcggactccttcctgcaggaattcccagcgccgcataccagctctgggctgccggctccccctgactaaatatggtgccgagtggccttcctgctccccggcgtcgggggagggggcccttcacgcagccaccggccgccgttgccccgcgggg

SEQ ID NO: 126863 - DNA, 34 bp, Homo sapiens
  chr16:15982612-15982646
  hyper
actccaccaatcagcgagcgctctcggaaggccc

SEQ ID NO: 126864 - DNA, 131 bp, Homo sapiens
  chr16:16043202-16043333
  hyper
ccccaaagatcccaggcgcttccggaaggcgagccaacgctccccaggcccgtccgcgagcgggtgggcctaagccttggaggatctggggtgggggtggcgcggggtccaggcccggggcgccgagaggt

SEQ ID NO: 126865 - DNA, 104 bp, Homo sapiens; identical to SEQ ID NO: 10556
  chr16:16155949-16156053
  hyper

SEQ ID NO: 126866 - DNA, 30 bp, Homo sapiens; identical to SEQ ID NO: 10557
  chr16:17481113-17481143
  hyper

SEQ ID NO: 126867 - DNA, 72 bp, Homo sapiens
  chr16:17510576-17510648
  hyper
ttacggaattctcagcggctgcctccaccaggggttgccaggggcaagcatctgcaccgtggtgaaacatct

SEQ ID NO: 126868 - DNA, 30 bp, Homo sapiens; identical to SEQ ID NO: 10558
  chr16:17563812-17563842
  hyper

SEQ ID NO: 126869 - DNA, 30 bp, Homo sapiens; identical to SEQ ID NO: 52846
  chr16:17564905-17564935
  hyper

SEQ ID NO: 126870 - DNA, 30 bp, Homo sapiens; identical to SEQ ID NO: 10559
  chr16:18178839-18178869
  hyper

SEQ ID NO: 126871 - DNA, 30 bp, Homo sapiens; identical to SEQ ID NO: 52848
  chr16:18801530-18801560
  hyper

SEQ ID NO: 126872 - DNA, 235 bp, Homo sapiens; identical to SEQ ID NO: 52849
  chr16:18812905-18813140
  hyper

SEQ ID NO: 126873 - DNA, 30 bp, Homo sapiens
  chr16:18938076-18938106
  hyper
ggtgccctgcggtgcgcgcgcacacaggcg

SEQ ID NO: 126874 - DNA, 433 bp, Homo sapiens
  chr16:18995157-18995590
  hyper
gctgcttgtcgccaccgctggatggagccttgccggatctcccgggctctgcagcccctctgcggtccctgatgctcggctcctcgcgggggcgccccactccggcttctgtgatgtcagcgccggaacctggaatcccggctccgcgagggaaggccggggaggcggcggcggcggcggcggctggagagggtcctcggcagcctctgaggagcgcggggcgcggccatgagcgagtccagcggcagtgcgctccagcccggcaggcccagccggcagccggcggtccatccaggtagggcggcagggagcgcgcgcggggacggtgcccctggggtccgagggcgcacggagggagccgggtgctggaggctcggcctggccgctgttccctcccacccccgacgccgggtgctcccggctctggggaaca

SEQ ID NO: 126875 - DNA, 30 bp, Homo sapiens; identical to SEQ ID NO: 52851
  chr16:19078967-19078997
  hyper

SEQ ID NO: 126876 - DNA, 31 bp, Homo sapiens; identical to SEQ ID NO: 10562
  chr16:19097801-19097832
  hyper

SEQ ID NO: 126877 - DNA, 30 bp, Homo sapiens; identical to SEQ ID NO: 52853
  chr16:19098052-19098082
  hyper

SEQ ID NO: 126878 - DNA, 37 bp, Homo sapiens
  chr16:19179236-19179273
  hyper
acctccgtttgggacgccctacgcccaccttaacttg

SEQ ID NO: 126879 - DNA, 30 bp, Homo sapiens
  chr16:19179497-19179527
  hyper
gctgacctgtgtaccgccccctcccacccc

SEQ ID NO: 126880 - DNA, 33 bp, Homo sapiens
  chr16:19179913-19179946
  hyper
caaagtggccgtggcggcgccatgcccgggccg

SEQ ID NO: 126881 - DNA, 30 bp, Homo sapiens
  chr16:19180197-19180227
  hyper
tgtgtactctgcaacgcgcgcccttgcctc

SEQ ID NO: 126882 - DNA, 30 bp, Homo sapiens
  chr16:19391803-19391833
  hyper
actaaaattagctttcgtttcctaaataaa

SEQ ID NO: 126883 - DNA, 694 bp, Homo sapiens; identical to SEQ ID NO: 52855
  chr16:19421881-19422575
  hyper

SEQ ID NO: 126884 - DNA, 814 bp, Homo sapiens; identical to SEQ ID NO: 52856
  chr16:19566587-19567401
  hyper

SEQ ID NO: 126885 - DNA, 30 bp, Homo sapiens; identical to SEQ ID NO: 52857
  chr16:19729624-19729654
  hyper

SEQ ID NO: 126886 - DNA, 404 bp, Homo sapiens
  chr16:19894932-19895336
  hyper
tgttcaggtgccccccggcctggtgcagttgggcggccaatgtggcgcgtgggctggggccccaggcggggacgccgctgcccgccacactccaggggcctttgtccgcgctccaaggagccgcccccttagcgaacgggggacggaaagggaggactggctaggcctgggtgtgacagagcaaggacggaggagtgaacccgctgcacgggggagatttctggggcaaggtcgttggccccttcccaggctgttcaaccggctgcccggggccaaggcgggtgcgggctcctcccgcgcgctcccttttcggcctaagcgctagggaccccgggatgtgtggggtccttgtggggctggaagcctgtgtcccccaaggagaggggaccgagaacaggtctagt

SEQ ID NO: 126887 - DNA, 30 bp, Homo sapiens
  chr16:19895563-19895593
  hyper
ccccgcgacaggtgcggctgttcaccccca

SEQ ID NO: 126888 - DNA, 30 bp, Homo sapiens; identical to SEQ ID NO: 52859
  chr16:19896331-19896361
  hyper

SEQ ID NO: 126889 - DNA, 89 bp, Homo sapiens
  chr16:20084494-20084583
  hyper
cgccccctccagatgcgcgcacaaatgcaccttcgaatccatgctcacatgcccagcccatcgcccgccgtcacagtcatcacacacac

SEQ ID NO: 126890 - DNA, 256 bp, Homo sapiens; identical to SEQ ID NO: 52861
  chr16:20084642-20084898
  hyper

SEQ ID NO: 126891 - DNA, 507 bp, Homo sapiens
  chr16:20085303-20085810
  hyper
cggagtgtgtgtggggtgggagggatgcggaagaggagggggtcccagccgcctcgcttggctccactttcaggggagaagatgcagttagacctgggagccccgaaggaagaccggagtggaaaacaggctatccccaatctccaaccccgagggaggggcgtggtgtgggtaggatctgcctctcccgcagcggctcctcactcctccagcgtgtcctcagtttgcctttctccactctcctcgcagccacctctcttgcccctctccaatgcttccagtccatctccggatagaggattctatacctagggcaaagaacgggggaaggggtggggctgttggagcagcgaggatgctaaagcgttgtcggttttcctcgacaagggaagctgagcttgctggctctggaaagaggggtgcgtgcctccctgtgcgtgtgtgtggcgactctgggggtggccgccggtgaactgtcccctaactggagtgcgtttgaagaggata

SEQ ID NO: 126892 - DNA, 311 bp, Homo sapiens
  chr16:20359827-20360138
  hyper
cttcacctggacggacgcatcccacaggcagcagtggccgctccagtgcgcgcaggccttgcggctcacgatgccctcgtcgctggacggatgcgtgccattgagccacatgggggcggccgtgttgcagcgcaggactggcacgcaggtctcggccatgcgcgcaccgccctggcccacgaagcggtaccagccgcgcaggtccgtgtcgcaggcgtagccctccccgtactcggtgctgcgccagtactcgtccagggtgcggtgcgcctggcacggatccgcgcacacgagcgcgtcgccctcgggca

SEQ ID NO: 126893 - DNA, 37 bp, Homo sapiens; identical to SEQ ID NO: 52864
  chr16:20753257-20753294
  hyper

SEQ ID NO: 126894 - DNA, 212 bp, Homo sapiens; identical to SEQ ID NO: 52865
  chr16:20817421-20817633
  hyper

SEQ ID NO: 126895 - DNA, 200 bp, Homo sapiens
  chr16:20911812-20912012
  hyper
agattgcgtcacgacgcacataaagacgtacgaagccgtcgccaagtaagggcaaagacctagcaacccggagggagctgggctggaccatttttttttcttgttttacgggaatggagcggggaggataatgaaagcgtaaaggaaaaatagggggaggaggagctcagcttattgttggatgcggcgggagatgggta

SEQ ID NO: 126896 - DNA, 30 bp, Homo sapiens
  chr16:21170413-21170443
  hyper
gaacctggggaagacgtcgaggcaaacctc

SEQ ID NO: 126897 - DNA, 30 bp, Homo sapiens; identical to SEQ ID NO: 52867
  chr16:21289540-21289570
  hyper

SEQ ID NO: 126898 - DNA, 30 bp, Homo sapiens; identical to SEQ ID NO: 52868
  chr16:21289932-21289962
  hyper

SEQ ID NO: 126899 - DNA, 328 bp, Homo sapiens; identical to SEQ ID NO: 52869
  chr16:21294967-21295295
  hyper

SEQ ID NO: 126900 - DNA, 228 bp, Homo sapiens
  chr16:21295340-21295568
  hyper
cgctggccgctgctccagacgccagggggcccacccgctgcccgtggtcggcgcgcggagctcgaaagcgcgcgcctctaacaaatgaaaacccatagggacttagggttgaattttaacttttttttttttttggcttattgtttagtgctagatagaagggtttgagcggtgtagtcaattttggtgctagtctgacttgaggcaacgtgacgtgacctacgcgtc

SEQ ID NO: 126901 - DNA, 217 bp, Homo sapiens; identical to SEQ ID NO: 10568
  chr16:21531390-21531607
  hyper

SEQ ID NO: 126902 - DNA, 30 bp, Homo sapiens; identical to SEQ ID NO: 52872
  chr16:21610444-21610474
  hyper

SEQ ID NO: 126903 - DNA, 30 bp, Homo sapiens
  chr16:21611092-21611122
  hyper
gtccgtgtggctggcgcggaggatgtggac

SEQ ID NO: 126904 - DNA, 30 bp, Homo sapiens; identical to SEQ ID NO: 52873
  chr16:21611595-21611625
  hyper

SEQ ID NO: 126905 - DNA, 430 bp, Homo sapiens; identical to SEQ ID NO: 52874
  chr16:21831534-21831964
  hyper

SEQ ID NO: 126906 - DNA, 30 bp, Homo sapiens
  chr16:21963780-21963810
  hyper
tcccaaccaagcaacgtagcaaggtacgaa

SEQ ID NO: 126907 - DNA, 85 bp, Homo sapiens
  chr16:21964474-21964559
  hyper
ggctaggagaagaacgcaaaaagcagtgacgtacattattctctgcatatatttacttgggaaattgtgcgtctccctattctga

SEQ ID NO: 126908 - DNA, 30 bp, Homo sapiens; identical to SEQ ID NO: 52876
  chr16:21964777-21964807
  hyper

SEQ ID NO: 126909 - DNA, 30 bp, Homo sapiens
  chr16:22012550-22012580
  hyper
cctgcaaaacgtggcgtgggcattgcacac

SEQ ID NO: 126910 - DNA, 30 bp, Homo sapiens
  chr16:22019322-22019352
  hyper
ggacggagctggggcgcggcggctggggag

SEQ ID NO: 126911 - DNA, 32 bp, Homo sapiens
  chr16:22173698-22173730
  hyper
aatgcaggtgctcccgcgccgggagtgggcgg

SEQ ID NO: 126912 - DNA, 30 bp, Homo sapiens; identical to SEQ ID NO: 10571
  chr16:22200964-22200994
  hyper

SEQ ID NO: 126913 - DNA, 7 bp, Homo sapiens
  chr16:22201751-22201758
  hyper
tgcaccc

SEQ ID NO: 126914 - DNA, 30 bp, Homo sapiens
  chr16:22202103-22202133
  hyper
cacgccttcttccccgctcactgatttcct

SEQ ID NO: 126915 - DNA, 299 bp, Homo sapiens
  chr16:22203674-22203973
  hyper
tgggggaatttggaggagcaccgcctaagccgccactggcctaaacacaacacgtggtaacttctactcttctacactctggccatgccaaggcttgcggttgaactctggtctcgttctctcagagccgcaaacctcggaccatttgaagctggcggtcctggggcttcctttcctctcgataacatgtttacatccaaactcacttccttcctctctttcttctccctgctaatcctgggaaatctgttcttcgagcaggaaaaacaatctcacactgctcacgttattttctagat

SEQ ID NO: 126916 - DNA, 30 bp, Homo sapiens; identical to SEQ ID NO: 10573
  chr16:22207233-22207263
  hyper

SEQ ID NO: 126917 - DNA, 231 bp, Homo sapiens; identical to SEQ ID NO: 52881
  chr16:22217231-22217462
  hyper

SEQ ID NO: 126918 - DNA, 30 bp, Homo sapiens
  chr16:22218468-22218498
  hyper
agtttgttggcaggcgctgctgacatgtgt

SEQ ID NO: 126919 - DNA, 58 bp, Homo sapiens
  chr16:22308549-22308607
  hyper
tgtctttttgtccccgctgcatacactcctggctcagttttgcgcgtgccatcagcgc

SEQ ID NO: 126920 - DNA, 30 bp, Homo sapiens; identical to SEQ ID NO: 52883
  chr16:22385293-22385323
  hyper

SEQ ID NO: 126921 - DNA, 30 bp, Homo sapiens; identical to SEQ ID NO: 10574
  chr16:22385985-22386015
  hyper

SEQ ID NO: 126922 - DNA, 481 bp, Homo sapiens; identical to SEQ ID NO: 52885
  chr16:22824595-22825076
  hyper

SEQ ID NO: 126923 - DNA, 312 bp, Homo sapiens; identical to SEQ ID NO: 52886
  chr16:22825157-22825469
  hyper

SEQ ID NO: 126924 - DNA, 465 bp, Homo sapiens; identical to SEQ ID NO: 52887
  chr16:22825885-22826350
  hyper

SEQ ID NO: 126925 - DNA, 30 bp, Homo sapiens
  chr16:22960115-22960145
  hyper
ttttaaggtaatcccgggtgactccacagc

SEQ ID NO: 126926 - DNA, 60 bp, Homo sapiens; identical to SEQ ID NO: 10578
  chr16:23159922-23159982
  hyper

SEQ ID NO: 126927 - DNA, 30 bp, Homo sapiens
  chr16:23160891-23160921
  hyper
atgcctggaggctgcgggcgcggtcctgct

SEQ ID NO: 126928 - DNA, 203 bp, Homo sapiens; identical to SEQ ID NO: 52889
  chr16:23193695-23193898
  hyper

SEQ ID NO: 126929 - DNA, 437 bp, Homo sapiens
  chr16:23194200-23194637
  hyper
cagggcgtcggacgccgtcagcgcggtgggtggccgagccagcatcagccggtggcggcttcccggtgcccgggatgctgggacaccttgcccgggcggtagcggccagctctcccgggtctacccacgccgtggcccggagcacgaagccagtcgagagccactcagagtccgggggtctgggggtcccgggccacacctggcctcttttctccgcccagcgcctgttcagcccccttccctgccggggtgagtcgcgtggacctgtccgctactgttccttctaccctctggaatgctttctccggggtgacttggtgcagaaagaagcaaacacttgaagtgggctggttggattcgctccagcgccttcagccggcgctcccccggggcagacgtggcttccgccacaggacagcgcccgctcgctccgcgca

SEQ ID NO: 126930 - DNA, 486 bp, Homo sapiens
  chr16:23313252-23313738
  hyper
gtgagcgcgatgcttcgcctaggtgaacgggacaggtacacgcgtggggtgggatggagtgttcatatatgtggcttgtgatatgtactgaggggacgtggggtacactcggatgaggggtctgtggacatattcgtggcgcatgtgggtatcgctggtgtcccgaggtggggagggagaatgcggagcgcgtgcgtgcggggggcgtccagtgtccctgaacctggcgtgtgggggctggagcttattgggaggcgagggaggtggccaggggagccgggaccgtgcgtgtggccaggccggtagcgcccagtaagctccacccgcgggcgctccccgtgcttccccgcccctgaacctgctccctcccagtcggtctcgccgcgctcgccgggtgtcccagtgtcaccaacactcggccgccgccgccagcttggcgcgcaccgccgcctccgccaccgccgacagcgcgcatcctccgtgtcc

SEQ ID NO: 126931 - DNA, 297 bp, Homo sapiens; identical to SEQ ID NO: 52893
  chr16:23313779-23314076
  hyper

SEQ ID NO: 126932 - DNA, 229 bp, Homo sapiens
  chr16:23464124-23464353
  hyper
gccagggccccgagcggctcaccctccacggcgtggttcacctcttggatgaacagctgcagcttcatcaccagggtggctgcgtggccatccgccttcccggacgccgcctccttggagccggccctgaaggccgcattgatccactccttcacgtcgaagtcgtctgccaggaacttggagaagtccatggcggaactgcctcaggcctggcgtccagaacttaaga

SEQ ID NO: 126933 - DNA, 93 bp, Homo sapiens; identical to SEQ ID NO: 52895
  chr16:23464613-23464706
  hyper

SEQ ID NO: 126934 - DNA, 30 bp, Homo sapiens; identical to SEQ ID NO: 10580
  chr16:23521209-23521239
  hyper

SEQ ID NO: 126935 - DNA, 144 bp, Homo sapiens
  chr16:23568684-23568828
  hyper
tgggcttctccctgcgtcacttccggggactgcttccagccaatcggcctccgccacagccagcgcagccttgccccttaaagtcacaggccccctagcgcgaaatcccacgcccccctggacggctgcggccgcactcgccac

SEQ ID NO: 126936 - DNA, 30 bp, Homo sapiens
  chr16:23606984-23607014
  hyper
tgcagagagaaaaccgctctggagaaggct

SEQ ID NO: 126937 - DNA, 30 bp, Homo sapiens; identical to SEQ ID NO: 10581
  chr16:23607377-23607407
  hyper

SEQ ID NO: 126938 - DNA, 93 bp, Homo sapiens
  chr16:23607740-23607833
  hyper
aggcactgcgccctcggagcccatccaggttcggggacgaacaactgcttggtgtcacaactaaactgtgcagacgtcgccgtctttccctaa

SEQ ID NO: 126939 - DNA, 249 bp, Homo sapiens
  chr16:23652253-23652502
  hyper
ccacgtgagcaccacgctatttccacattttcattttctgtgccccctcagccctaagaggagggggtggtcagatgatactgctgccctcggactgccgaggacacaaagccaggcctaaaaccctgggaaagcggggtcagagtcctgcgtccgcccttcccgcacccccggcaccttttccttctcctcacagctgaggggcttcccgggaggctcgtccatcgggcaggcgacagaacgaaaaga

SEQ ID NO: 126940 - DNA, 30 bp, Homo sapiens; identical to SEQ ID NO: 10582
  chr16:23652900-23652930
  hyper

SEQ ID NO: 126941 - DNA, 30 bp, Homo sapiens
  chr16:23690064-23690094
  hyper
aaaggctgctgctgcgcagggcgctcccat

SEQ ID NO: 126942 - DNA, 46 bp, Homo sapiens
  chr16:23706411-23706457
  hyper
cgcgatccaggtccgggttttctacgtactgagcagcagcaagggc

SEQ ID NO: 126943 - DNA, 392 bp, Homo sapiens
  chr16:23724336-23724728
  hyper
ccctcgccccaagtgcgacgccgccccctgcgccccgcgaccagactttggggacttggcgtcggtccctggctctcacctgtggactcagcgtcccgagcagcagcgccgcgaactggagctggagccccagccggggccacggcctcgaccccctgaccgcactcgccatagcgcctgggcagctgcacggctggccaggtccctgggtgcctccaagggagcgctctgtccccgcccgacccggagaaggctccgcccctggctgggcctgcaaccccagcctggagtcctcgccgatccccgcccttctcatcacactcccagccgcatcctcgcgtcccagtcaccccaccaaacacggtggggcgctttcccgggagagggatttt

SEQ ID NO: 126944 - DNA, 580 bp, Homo sapiens; identical to SEQ ID NO: 52900
  chr16:23765897-23766477
  hyper

SEQ ID NO: 126945 - DNA, 291 bp, Homo sapiens; identical to SEQ ID NO: 52901
  chr16:23846762-23847053
  hyper

SEQ ID NO: 126946 - DNA, 201 bp, Homo sapiens; identical to SEQ ID NO: 10585
  chr16:23847310-23847511
  hyper

SEQ ID NO: 126947 - DNA, 86 bp, Homo sapiens; identical to SEQ ID NO: 10586
  chr16:23847788-23847874
  hyper

SEQ ID NO: 126948 - DNA, 544 bp, Homo sapiens; identical to SEQ ID NO: 52904
  chr16:23847933-23848477
  hyper

SEQ ID NO: 126949 - DNA, 30 bp, Homo sapiens
  chr16:23848967-23848997
  hyper
ctggaagagtcaaagcggtctcctgaagca

SEQ ID NO: 126950 - DNA, 176 bp, Homo sapiens
  chr16:24266968-24267144
  hyper
ggctccagtggtgcccgcagcaaaaggcaaacttgcctggctcatggggtgaaagggaggattgaagaatgccgcgttgggtgggtgctgagggagcgccagagtgcgctacgggcttcgctccccttcccctttccttaacccttcctagagcggaggaaccgggtcgtgctgca

SEQ ID NO: 126951 - DNA, 392 bp, Homo sapiens
  chr16:24267220-24267612
  hyper
cgagccggctggctgacccgggaaggaacgggggaagggcggggtgagggaagaaagaccctttagcaccccgggtttctagcccgggcggcggtgtgcagctgcatgagggagctgtcccttcggcaccacggaccttaaagcctaggcgttaagacgacggaggcggggcaacaggcggggagctgtcccttcagcaccacggaccttggcgcccccagggaaaccagccggcccccgccccaggactctgtcttttctccagtttgagcgggggtgtcgggagcaggcggagagctttcctgcgaggctgtggaagcagtgaacactcttctcagcggctcgcctcccagcagtgctattttttgccatccgccctcacccccagcaca

SEQ ID NO: 126952 - DNA, 44 bp, Homo sapiens
  chr16:24267671-24267715
  hyper
ctctctgggtttctttgccttgagtctcccggggctgtgagaag

SEQ ID NO: 126953 - DNA, 45 bp, Homo sapiens; identical to SEQ ID NO: 10589
  chr16:24354627-24354672
  hyper

SEQ ID NO: 126954 - DNA, 192 bp, Homo sapiens
  chr16:24550402-24550594
  hyper
cagcggctgctccacgatttccacttgtcaagagtatagggtagccagtttattggaagcagcagctagggagcgcttgcatagcaaccatagttttctgcgtagcaaccataatgctcacttaaattgggaggcttagaggagctgacggggcctgtggggaagggggagttagccggccacccctaggca

SEQ ID NO: 126955 - DNA, 138 bp, Homo sapiens
  chr16:24551562-24551700
  hyper
cccgtggggtcgctcggactcttaacgtgtggactgaccgctactgactgcaccgccaatccccccgtctctgccggccccttagcatgagcgagggggacccagccgggtgacattgtgcccgttggcggattctcg

SEQ ID NO: 126956 - DNA, 387 bp, Homo sapiens
  chr16:24740562-24740949
  hyper
attcaaaagccgcgcgggctcatcaggctgcagttggggtaaaatttgcgttttaggcaattttttttttttttttttttggcgtgtgtcagtgggggaggggccgggcggcgggtaggaaacttgtgtcgcagcaaagaaggaggaggaggggagggactcccctcctcggtcagaccggagccggccgcaccgaaaaaggttggactcgggactccgcaggcccccccagccactccgcggggcgcctcggaggctgtgacctccagggaggtccggctgggtgcagcgtgacacgccggggcggttgccaaggacctgcccaatctgcgggtccagttgctagggcctccatcttgggggccagtggccgtggcgcccccggaa

SEQ ID NO: 126957 - DNA, 232 bp, Homo sapiens
  chr16:25025360-25025592
  hyper
aatacggtagggaatcgaaaaaattaaacaaggaaactaagcaaaaagatggaggaaatgaaacagtaaaaagcaaatttagaaaactcgagaggaagtaaaagtattttcatacactcaaaaaaaagaagtgtcccacgtgcttcagccaaaccaaactccccttaactgttaaaaacagaaaatcaaaagaagagctgtgagaaattcatactttcgtatctctttgctg

SEQ ID NO: 126958 - DNA, 30 bp, Homo sapiens
  chr16:25025847-25025877
  hyper
taaattggcgcaaggcgtctccataatcct

SEQ ID NO: 126959 - DNA, 30 bp, Homo sapiens; identical to SEQ ID NO: 52909
  chr16:25026512-25026542
  hyper

SEQ ID NO: 126960 - DNA, 30 bp, Homo sapiens
  chr16:25026835-25026865
  hyper
gagctagaaggccccgggcgagaagaccac

SEQ ID NO: 126961 - DNA, 30 bp, Homo sapiens
  chr16:25043308-25043338
  hyper
caagaagcgcctgtcgggcgcgggattcgg

SEQ ID NO: 126962 - DNA, 418 bp, Homo sapiens
  chr16:25078043-25078461
  hyper
ccagcgggcaggcggcgccgcaggaagtgaccgggcaagaacgggggtcgccgcccagctcggccttctggtctctgcgccctcggcctggggctccaggccacaaggggaggccgtgctgggcgggcccgaagggggtgggcggggccccggaagagacgtgggggcggggccaacggaccgcggaggcggagccgctacagtctgggcgctggagcggtgggagcagcgctcgtccgccgttggggcccccagcccgcgcgcgtgaagcagctagccgaccaagccccggaaggcgagtgccggagggggcgggacagctcctccggggccagcgggcaccaggcttgggggctgaggcccagcggcccgagaccaactgggctgaccgaggccgcctccccgccagccctggggt

SEQ ID NO: 126963 - DNA, 84 bp, Homo sapiens
  chr16:25123185-25123269
  hyper
cccaggaacctccacgcccatggccactaggcagagggaatcctctatcacctcctgctgttccacctcgagctgcgacgcaga

SEQ ID NO: 126964 - DNA, 30 bp, Homo sapiens
  chr16:25268458-25268488
  hyper
aggggtcaacttcacgtctagctcaaggtg

SEQ ID NO: 126965 - DNA, 170 bp, Homo sapiens
  chr16:25268732-25268902
  hyper
accgggaggctggacgactgggagaaaaatgaagcaggctgaggaaaggctgggcggaggcggacagccgggccgggagggggtgtgtccgctactcccgggtcgggcgcggagaggcgagtccccgagtgggtggggccggatgtgcaggccccgcccggcgccaggtt

SEQ ID NO: 126966 - DNA, 1333 bp, Homo sapiens
  chr16:25702789-25704122
  hyper
gcttcaagagaagatggggggcggggggcggtggctggaaagatggaagttgggatgggaaagcggttgtagaaaaggattcactcctggaccgaaggcaggaggatatcccgggcgagagaagggagggtcggggatgggctgagttggagtcccagaggaaaagcggaagcgagagcttcgtcacccgctgtcttccagctcccggtgcgcggcaccggaggcaggcgttgggctttacctctctaaaagtactggggcaaaggaatggagaacacggcgtcccgagctcccaagggaggggagtaaacgaggtggggtggggaacaccccaagtgcgtgcgtgctgggggctggggggcacgatctccgttctcccgggtgccccagccctagcgcacgcctccgctcccccgcccccttcgcaggcgcgcgcgaggcgcaccccccttccctcggcggcgccgggcgcgcgcccggccccctcctcctcccctccgcgcctctcctctctcccggcagaaagttagcagcggggaaggaactccgggctgcaacagcgcgcggcggcggcggcagaggctgaagcagaagccgcggcggagccggggaagcgggggcgctgcagacggagcaggtgccgccggcgggtccgcgcgcccccctcggtccccttgcctgaggctgaggggggggcggtggtgggggggccacccggactcggcgggcagcgtggggcggggggccatgcggccgggctcccccctggcgcagcgggacagcggccagggccgggggcgcagcggcgtcgcttcatgcagccggggcggctgggcagcggcggcggcggcggcggcggcggcggcggcgggggcggcggctgaaaccatgtccgggcagcgccgggggctgccgccgccgccgccgccgccgcgagccgggagccgcgatggcccggtggcccgcacctcctccgcctccgcctccgcctccacctctggccgcgccgccgccgcccggcgcctctgctaaggggccgccggcgcgcaagctgctttttatgtgcaccttgtccctgtctgtcacctacctgtgctacagcctcctgggcggctcgggctccctgcaattccctctggcgctgcaggagtcgccgggcgccgccgccgagcccccgccgagcccgccgccaccctctctgctgcctacccccgtgcgcctcggcgccccctcgcagccgcccgcgccgccgccgctggacaacgcgagccacggggagccgcccgagcccccagagcagccagccgcccccgggaccgacggctgggggctg

SEQ ID NO: 126967 - DNA, 420 bp, Homo sapiens
  chr16:25704389-25704809
  hyper
cgcgtgcacccggacgtgcgggcggtgggcgtagagccgcacttcttcgacaggaactacgaaaaggggttggagtggtacaggtaggaccctgggctccgcgggctggtggagacgcgtgggggagacgcggaggggaagccgcggctttccacgcccttcgagcatccaggcaccgtcccgagaggcccaagcccccgcgagggctctgcaaaccctggcggcgttgctcagggggatcggctgagagggctggactccagcgaaaggtcactttatttcagggcgaggggaggaggtgtcaccctgccctgcctcccgcgctcctcatccaaggaggtgctgtctgaatctgcccagctccaagcctgggaacccccagccctcctgcctgctgggtgtttccgaaaccaggctctt

SEQ ID NO: 126968 - DNA, 144 bp, Homo sapiens; identical to SEQ ID NO: 10593
  chr16:27121250-27121394
  hyper

SEQ ID NO: 126969 - DNA, 30 bp, Homo sapiens; identical to SEQ ID NO: 52916
  chr16:27215019-27215049
  hyper

SEQ ID NO: 126970 - DNA, 55 bp, Homo sapiens
  chr16:27215266-27215321
  hyper
ggttcttggcgtcgcgttggtgtaggcctagtgcgcctgcgcgggttttatactc

SEQ ID NO: 126971 - DNA, 259 bp, Homo sapiens; identical to SEQ ID NO: 10595
  chr16:27280120-27280379
  hyper

SEQ ID NO: 126972 - DNA, 30 bp, Homo sapiens; identical to SEQ ID NO: 52919
  chr16:27324985-27325015
  hyper

SEQ ID NO: 126973 - DNA, 291 bp, Homo sapiens
  chr16:27413510-27413801
  hyper
tgggtggcagccagcggcctcagacagacccactggcgtctctctgctgagtgaccgtaagctcggcgtctggccctctgcctgcctctccctgagtgtggctgacagccacgcagctgtgtctgtctgtctgcggcccgtgcatccctgctgcggccgcctggtaccttccttgccgtctctttcctctgtctgctgctctgtgggacacctgcctggaggcccagctgcccgtcatcagagtgacaggtcttatgacagcctgattggtgactcgggctgggtgtggat

SEQ ID NO: 126974 - DNA, 30 bp, Homo sapiens
  chr16:27561105-27561135
  hyper
ggaagggcggcactcgcgtctccagccggc

SEQ ID NO: 126975 - DNA, 191 bp, Homo sapiens
  chr16:27561383-27561574
  hyper
aagtggagctccaccgtcattggtccggggccccgcagtaaccaggggaactgcaaacagtgtagaggccgcttccggttcgagctcccggaaccgccgcctctagggatggacggtgagtgtctgtgggcccctccgggaggtcgggctgttattctcccatccctcccgaccgcgctttgggcagaatc

SEQ ID NO: 126976 - DNA, 40 bp, Homo sapiens
  chr16:28074001-28074041
  hyper
gcatctagtgccccgcgaaaggaagaggaggagggggcga

SEQ ID NO: 126977 - DNA, 149 bp, Homo sapiens; identical to SEQ ID NO: 52923
  chr16:28074076-28074225
  hyper

SEQ ID NO: 126978 - DNA, 519 bp, Homo sapiens; identical to SEQ ID NO: 10599
  chr16:28074417-28074936
  hyper

SEQ ID NO: 126979 - DNA, 299 bp, Homo sapiens; identical to SEQ ID NO: 10600
  chr16:28074955-28075254
  hyper

SEQ ID NO: 126980 - DNA, 30 bp, Homo sapiens; identical to SEQ ID NO: 52926
  chr16:28223137-28223167
  hyper

SEQ ID NO: 126981 - DNA, 128 bp, Homo sapiens
  chr16:28223524-28223652
  hyper
cattttagtaaaggcgtggtttccctttcgcttttttcgcccattcattccgctaaaattttagtgagtgccttttacgggcggagcatcgagctggcagcgtgacgacacgcggccctatggagctt

SEQ ID NO: 126982 - DNA, 30 bp, Homo sapiens; identical to SEQ ID NO: 52927
  chr16:28303456-28303486
  hyper

SEQ ID NO: 126983 - DNA, 158 bp, Homo sapiens
  chr16:28304160-28304318
  hyper
agcggagacttcctcggtatttagaagacagcaagccccctacggcaccgcaaggactccccctcctcagtctgggcccccgccccaagacctagaacgcagtgcccccaggccgggattgcgagaaccccctcccaagatccggtcattacaactcc

SEQ ID NO: 126984 - DNA, 30 bp, Homo sapiens
  chr16:28304648-28304678
  hyper
aggtgagtggccaccgaggtccccatagcc

SEQ ID NO: 126985 - DNA, 404 bp, Homo sapiens
  chr16:28502990-28503394
  hyper
gagccagaggtggtcgttccatgagggtgggcgggaatactcaccctcggaatccgaaaagcgccgccgcgagcctgcacagcctcccatcgcatcaagttcaggtcccccgagggtccagggtcatagagtgtccaaagggggctcccacgggagggatgagggtctgcgacaggtgacaaggatcaacgcccgattgccggtcccagctccggcttgtctagggcactcgcgccccgcgatccatcaaggaagctgggggctccatctcgagcgccctacgacccaccacgccccacccatcgtactctcccccgccccgtctacagcagggaccctgaggcctgtacctttaagagcagcagaatgttctgcactatgcagaggccgtttgtcggatcacg

SEQ ID NO: 126986 - DNA, 30 bp, Homo sapiens
  chr16:28565280-28565310
  hyper
tgtgcggttctcgacgtgccgccaatcttc

SEQ ID NO: 126987 - DNA, 30 bp, Homo sapiens; identical to SEQ ID NO: 52930
  chr16:28565737-28565767
  hyper

SEQ ID NO: 126988 - DNA, 9 bp, Homo sapiens
  chr16:28834071-28834080
  hyper
cggcttcta

SEQ ID NO: 126989 - DNA, 30 bp, Homo sapiens
  chr16:28835262-28835292
  hyper
cgggaaggggtccccggccgtagccaatgg

SEQ ID NO: 126990 - DNA, 30 bp, Homo sapiens
  chr16:28835543-28835573
  hyper
ttcgtggaggggctcgtctggtggcagtgc

SEQ ID NO: 126991 - DNA, 308 bp, Homo sapiens
  chr16:28874812-28875120
  hyper
atctcgctggtttccggtgctcggcggctactctagccctcagccgggccctgggactctatcccctaaggccggttctctatggtcgacatcgcccctttgtcccgaatttcctccgggaggacgctctggtgggatccaagcacttcccccgctgcgtctgtggtcgcttttaggtgcaactggagaaggcactgaagccctacgagattcacaccgtcttcggtctcctggggtcggcgccgagtgggaggatggcggaagtaagtatgaaggtgcccttccctcccgccgctgttctctatggt

SEQ ID NO: 126992 - DNA, 905 bp, Homo sapiens
  chr16:28891021-28891926
  hyper
cggggcgggctggcgcgcagcagcgggtgtgattcgcgtcctcctctctcctcccctgcaccccagaggcaggttttattttaagctttaagggtgttctcagccaaaacaccgaagctaagccaccctcgcggcttcaagagcttggagagctcgggttacccacccgaactccgggctccgggtcccgccgcgatgccggctgcggcgcggggggccactgccactcccggcatgcgccgggcggacggccgctccaccaatccccgcgcccgtcggcgcccctgccccgccctccccagcctcctgacgctgattggtcgaggggaggactcgctcctagtggcgggaaagcgcggcggtgtgatgatgactccaaggagcccggcgcccggtcagggagggcactggcatccctcattacccgcccagcctggccttagcccttccccgcgctccctaggcacccccacccccgcagggcatctccagggctctgcctcctctcccgccctgggggctactccccatcccgcggtccatctgcatgtcgcgggttcttccgcagcatgtgagcctcgctggggactctggaggcaacgaaagcctccctgtgccttggtctccgaacgcaggccccgtcgcgttaagcacaagctggcagggcctctcctctcccttctcagatttgctccttgacatttgcctgctgcctggcggtggcaacagctggggcggggcgcgcgcaggaggccccgtaaccctatccccgctccggctccctcgtgaaaccggagcttccctgccttggccgagggggagggctgcgggggccagaccgcctgcgaagaccacagggtttttcctctcgggttttggctcccgtgggatggatgtggctgtgc

SEQ ID NO: 126993 - DNA, 94 bp, Homo sapiens
  chr16:28936698-28936792
  hyper
tgggtcgcgcggttcgggaggacgcctgcctttcaagcccggaagaggatccttaagaggtcttgcccggcgtctctccgtgaccttggaagcc

SEQ ID NO: 126994 - DNA, 30 bp, Homo sapiens; identical to SEQ ID NO: 52935
  chr16:28947871-28947901
  hyper

SEQ ID NO: 126995 - DNA, 30 bp, Homo sapiens; identical to SEQ ID NO: 52936
  chr16:28962157-28962187
  hyper

SEQ ID NO: 126996 - DNA, 30 bp, Homo sapiens
  chr16:28962506-28962536
  hyper
ctggaggtcgccaccgctcgcggtgccgcg

SEQ ID NO: 126997 - DNA, 30 bp, Homo sapiens; identical to SEQ ID NO: 10605
  chr16:29110443-29110473
  hyper

SEQ ID NO: 126998 - DNA, 80 bp, Homo sapiens; identical to SEQ ID NO: 10606
  chr16:29606231-29606311
  hyper

SEQ ID NO: 126999 - DNA, 118 bp, Homo sapiens; identical to SEQ ID NO: 10607
  chr16:29607009-29607127
  hyper

SEQ ID NO: 127000 - DNA, 30 bp, Homo sapiens; identical to SEQ ID NO: 10608
  chr16:29624399-29624429
  hyper

SEQ ID NO: 127001 - DNA, 538 bp, Homo sapiens; identical to SEQ ID NO: 10609
  chr16:29624653-29625191
  hyper

SEQ ID NO: 127002 - DNA, 31 bp, Homo sapiens; identical to SEQ ID NO: 10610
  chr16:29653961-29653992
  hyper

SEQ ID NO: 127003 - DNA, 157 bp, Homo sapiens
  chr16:29691161-29691318
  hyper
tggtacggggtgaaacggtgaaggtgggggtgtgcgcgtcatttgaaagatgtatagccgtggtggtttatgtgaatttcctttaagctcaaagcatatgtctaactactaagataatcttttttttttttttttttgagacggagtctcgctttcc

SEQ ID NO: 127004 - DNA, 36 bp, Homo sapiens; identical to SEQ ID NO: 52943
  chr16:29691805-29691841
  hyper

SEQ ID NO: 127005 - DNA, 125 bp, Homo sapiens
  chr16:29721780-29721905
  hyper
cagtaactcaataaacgtttctctatggtttctctggtgagcacgtggtatttctaagccacctagtggcaataaaaatcctcttcatgagacacattgctggttctctacggtacattgcagct

SEQ ID NO: 127006 - DNA, 30 bp, Homo sapiens; identical to SEQ ID NO: 10611
  chr16:29801931-29801961
  hyper

SEQ ID NO: 127007 - DNA, 30 bp, Homo sapiens; identical to SEQ ID NO: 52945
  chr16:29802859-29802889
  hyper

SEQ ID NO: 127008 - DNA, 13 bp, Homo sapiens
  chr16:29816660-29816673
  hyper
tttttgtataacc

SEQ ID NO: 127009 - DNA, 16 bp, Homo sapiens
  chr16:29816729-29816745
  hyper
cgggggcgggaccggg

SEQ ID NO: 127010 - DNA, 30 bp, Homo sapiens; identical to SEQ ID NO: 52947
  chr16:29817089-29817119
  hyper

SEQ ID NO: 127011 - DNA, 31 bp, Homo sapiens; identical to SEQ ID NO: 10612
  chr16:29822267-29822298
  hyper

SEQ ID NO: 127012 - DNA, 286 bp, Homo sapiens
  chr16:29822514-29822800
  hyper
tcactaagaactgccgccaaccccaagggtttcttctcggcctggtgtccgtcaatccagccttgctctgccctgtgaggctgtgaggttctggctccgccctccccaggggcagccttactggcggcagcacagatacagggcggggccaaggctgtggctgtggagagcaagttccaggtctctggggaattcccaactcggacaggcccagaatagcccctggaggtttgaagaggccccgtcagaaacccaaacagagctgccagacgggaatgccgccctc

SEQ ID NO: 127013 - DNA, 16 bp, Homo sapiens
  chr16:29823214-29823230
  hyper
cggtcctgcctgtctc

SEQ ID NO: 127014 - DNA, 30 bp, Homo sapiens
  chr16:29826844-29826874
  hyper
gctagattcattcacgtgcttcgtaatgaa

SEQ ID NO: 127015 - DNA, 232 bp, Homo sapiens; identical to SEQ ID NO: 52950
  chr16:29827280-29827512
  hyper

SEQ ID NO: 127016 - DNA, 30 bp, Homo sapiens; identical to SEQ ID NO: 10614
  chr16:29828583-29828613
  hyper

SEQ ID NO: 127017 - DNA, 137 bp, Homo sapiens; identical to SEQ ID NO: 10615
  chr16:29836030-29836167
  hyper

SEQ ID NO: 127018 - DNA, 30 bp, Homo sapiens
  chr16:29873904-29873934
  hyper
accttgattaagagcgcgagcagcgtgtcc

SEQ ID NO: 127019 - DNA, 30 bp, Homo sapiens
  chr16:29874164-29874194
  hyper
ttttcgtctggcatcgcggcgcctcccttg

SEQ ID NO: 127020 - DNA, 505 bp, Homo sapiens
  chr16:29874493-29874998
  hyper
aacctcctcctccgcgcccgtcgttgcaaaattggagagaggaaaaagtggcttaaaaaaatagttgcggcccctttaaggcctgtcggcttcctttcccttttcctccctccgcccctctcccttggctcgtaccaaagcgcagaggaggagagggaggaaggaaccattaacgtcaagcaaagttagaaacggaaaaggaaagggtaaaagagaagaccgaataaaaatctctgctttccttttgtggagggtatgacttcctggaggcaaagataaggcgataaaattcctcctcctgagtctttgcgtccccaagaggccaggagatttggtgcagtcctcactttactccccgccccctaagtctccagccgcctttgctctcgcaggctctaggcggctagagaggctccagagcgccctgcagatgggttgcttttcgcgtgccccttgtgatgggaggattaggtcgcaggctccaccctacgtcatcctcccaagc

SEQ ID NO: 127021 - DNA, 335 bp, Homo sapiens; identical to SEQ ID NO: 52954
  chr16:29888511-29888846
  hyper

SEQ ID NO: 127022 - DNA, 30 bp, Homo sapiens; identical to SEQ ID NO: 52955
  chr16:29910296-29910326
  hyper

SEQ ID NO: 127023 - DNA, 169 bp, Homo sapiens; identical to SEQ ID NO: 10617
  chr16:29910604-29910773
  hyper

SEQ ID NO: 127024 - DNA, 63 bp, Homo sapiens; identical to SEQ ID NO: 52957
  chr16:29910887-29910950
  hyper

SEQ ID NO: 127025 - DNA, 30 bp, Homo sapiens
  chr16:29937175-29937205
  hyper
gtgagggtgcgcagcgtggtgtagtgcaac

SEQ ID NO: 127026 - DNA, 182 bp, Homo sapiens
  chr16:29938015-29938197
  hyper
tggaagctgcagtaatccgtgatcggaccgttgcactctagcctgggcaacataacgtcctttgaaaaaaaaaaaaaaaacagaggccaaaacgggtagcagtggtgcccgggcaccaaggatggaaggcctctctgaggaggtgatgccgagctgaagctgggaagcggatgtgagggaag

SEQ ID NO: 127027 - DNA, 241 bp, Homo sapiens
  chr16:29973074-29973315
  hyper
gcgcgggtaggggacgcacagcccaaaaatgcccgcgacaagcttctggggcagttctcgccagtctctctggagggagcctacgggttctgcgacgtttctcgcacttgctccctggcctcgctcccgtttccacccctcccacggaggttttcctttctggtggctccttccttgggtgtccctttggtacgcccccaccctggcggtgagctgcgaggctggcgcccgcgtggccact

SEQ ID NO: 127028 - DNA, 130 bp, Homo sapiens
  chr16:29984756-29984886
  hyper
gatggttgctaacctcggagcagtctattttcccgccttttccgcgcccagcagcagcttcctttgcccctcccaacttccaccctgcgcgcagtcgcagatcgccgctgctgtccgtccacccgcgccc

SEQ ID NO: 127029 - DNA, 194 bp, Homo sapiens
  chr16:29985279-29985473
  hyper
aggcagagagggcgcggggaccgtcagcagcaccttagctacaatcgttcagctattctcggaagagagaagggagagggaggaggccggggcgggagtgggggctgtcaccctcggaccccggcgtgagaggggccgtgcggccggacgtcctcggggtgggcccccagtcggtggccgaagacctacagctc

SEQ ID NO: 127030 - DNA, 343 bp, Homo sapiens; identical to SEQ ID NO: 52959
  chr16:30006504-30006847
  hyper

SEQ ID NO: 127031 - DNA, 30 bp, Homo sapiens
  chr16:30007054-30007084
  hyper
cggaccgcgtgggccgagaactttgccaga

SEQ ID NO: 127032 - DNA, 207 bp, Homo sapiens
  chr16:30007369-30007576
  hyper
cgctttccagcgtccgccatttttgtggcgtcaccgcgtcgctgctacgccatccccagcgcagtggctgccgcgctcctgtcccagtgtcccccgggaggtcggcccgtgcggtgacgcccctgagcgcggggtacgccgggagttgtagtcctgacggcacagccttgcagcgtctccggaagtggaggcgggagcggcacggca

SEQ ID NO: 127033 - DNA, 30 bp, Homo sapiens
  chr16:30007950-30007980
  hyper
gcaggggcggagggcgatgtgcttcctagg

SEQ ID NO: 127034 - DNA, 31 bp, Homo sapiens; identical to SEQ ID NO: 10619
  chr16:30022360-30022391
  hyper

SEQ ID NO: 127035 - DNA, 30 bp, Homo sapiens
  chr16:30022684-30022714
  hyper
acgcgggctccctgcgccaccaggaagcag

SEQ ID NO: 127036 - DNA, 30 bp, Homo sapiens; identical to SEQ ID NO: 52961
  chr16:30023013-30023043
  hyper

SEQ ID NO: 127037 - DNA, 41 bp, Homo sapiens
  chr16:30032527-30032568
  hyper
agagcacctcacacgcgcagatacacgcctggctttagggg

SEQ ID NO: 127038 - DNA, 30 bp, Homo sapiens
  chr16:30032799-30032829
  hyper
ccacagaagaggaaacggaggtgcagggag

SEQ ID NO: 127039 - DNA, 30 bp, Homo sapiens; identical to SEQ ID NO: 52963
  chr16:30042315-30042345
  hyper

SEQ ID NO: 127040 - DNA, 30 bp, Homo sapiens; identical to SEQ ID NO: 52964
  chr16:30064591-30064621
  hyper

SEQ ID NO: 127041 - DNA, 286 bp, Homo sapiens
  chr16:30075773-30076059
  hyper
caaccaagggcctccgtctggatttccaaggaagaatttcctctgaagcaccggtgagtgggcaggggctccctccccatcaatagggccgacccaagtcttcctcccccttcccccatgccgggccccacgatagtgtgaatgtcaggggcttcaggtttccctaaatataggtccctgccagaggatccgtggcgggaaaagggcaggggtcattagagaagatcggggacacatgtggggcgggcaggagctgccttataaccagcccgggaacccctagctc

SEQ ID NO: 127042 - DNA, 30 bp, Homo sapiens
  chr16:30076310-30076340
  hyper
cgcatgccagaggccgagcagcggccggtg

SEQ ID NO: 127043 - DNA, 326 bp, Homo sapiens; identical to SEQ ID NO: 52966
  chr16:30077526-30077852
  hyper

SEQ ID NO: 127044 - DNA, 30 bp, Homo sapiens
  chr16:30087826-30087856
  hyper
caagccgccgcccacgggttctggcctggg

SEQ ID NO: 127045 - DNA, 126 bp, Homo sapiens
  chr16:30103513-30103639
  hyper
agacccagcttggacggctgtgcctaccccatgccccgccggggctcagaaccgcacaggtctataggggcggaaatctccgcttgagctcccccttcccggattacacgcgagcctgagctgtct

SEQ ID NO: 127046 - DNA, 30 bp, Homo sapiens
  chr16:30107780-30107810
  hyper
aggtctaggccgggcgcggagcgaggaagc

SEQ ID NO: 127047 - DNA, 30 bp, Homo sapiens
  chr16:30194401-30194431
  hyper
ccagggaggagaagcgactcccggggccac

SEQ ID NO: 127048 - DNA, 30 bp, Homo sapiens
  chr16:30195052-30195082
  hyper
ctgggcctgggaggcgcgggtgggccgggg

SEQ ID NO: 127049 - DNA, 30 bp, Homo sapiens
  chr16:30346819-30346849
  hyper
atagcaggcagccccgccccccacggcccc

SEQ ID NO: 127050 - DNA, 30 bp, Homo sapiens; identical to SEQ ID NO: 10621
  chr16:30366420-30366450
  hyper

SEQ ID NO: 127051 - DNA, 30 bp, Homo sapiens
  chr16:30366826-30366856
  hyper
gccggaagtagcttcgagtccgtcattcaa

SEQ ID NO: 127052 - DNA, 30 bp, Homo sapiens
  chr16:30367212-30367242
  hyper
gcccataccctgggcgagttcctggtttct

SEQ ID NO: 127053 - DNA, 297 bp, Homo sapiens
  chr16:30379991-30380288
  hyper
gccctgtttcacagcgggatcctgactgcacagtctcccttccatcagccagacttccccacctctctactccatccctgggacctagggctatgggggaagggagatgcctgcacccctcccaggctatccaccctaagggaccaagggtctctaccagaaccctcgcccaaccaaccctccagaatatccggcctgtagctggagttccccatcaaagagcagggatgacctcaggtatcatctcattcaatccactttatagaggaaaaaactgaggcacggaaatggggaagc

SEQ ID NO: 127054 - DNA, 30 bp, Homo sapiens
  chr16:30380585-30380615
  hyper
acttgtccgtcttgcgcagggccagcccgt

SEQ ID NO: 127055 - DNA, 82 bp, Homo sapiens
  chr16:30382502-30382584
  hyper
tagtcggtgacaaccggagacaagccttatgggagggtgacagctggggacagcacggagaaggggcgggggcattagtgca

SEQ ID NO: 127056 - DNA, 30 bp, Homo sapiens
  chr16:30406518-30406548
  hyper
attacgaagagcctcgggcctcaccaccca

SEQ ID NO: 127057 - DNA, 810 bp, Homo sapiens; identical to SEQ ID NO: 52971
  chr16:30411404-30412214
  hyper

SEQ ID NO: 127058 - DNA, 28 bp, Homo sapiens
  chr16:30418861-30418889
  hyper
cggaccaatgaccggccgtccctgcggt

SEQ ID NO: 127059 - DNA, 195 bp, Homo sapiens; identical to SEQ ID NO: 52972
  chr16:30428810-30429005
  hyper

SEQ ID NO: 127060 - DNA, 98 bp, Homo sapiens; identical to SEQ ID NO: 52973
  chr16:30429060-30429158
  hyper

SEQ ID NO: 127061 - DNA, 30 bp, Homo sapiens
  chr16:30441659-30441689
  hyper
agcggaagagggcccgtcaggtggaaaacc

SEQ ID NO: 127062 - DNA, 30 bp, Homo sapiens; identical to SEQ ID NO: 52974
  chr16:30457322-30457352
  hyper

SEQ ID NO: 127063 - DNA, 30 bp, Homo sapiens
  chr16:30538327-30538357
  hyper
tccctccagaggcccgtctgtccatctccc

SEQ ID NO: 127064 - DNA, 221 bp, Homo sapiens; identical to SEQ ID NO: 52975
  chr16:30545485-30545706
  hyper

SEQ ID NO: 127065 - DNA, 45 bp, Homo sapiens
  chr16:30545947-30545992
  hyper
ggggccagaggcggcgccatggggactgtcagccccagcgacgga

SEQ ID NO: 127066 - DNA, 167 bp, Homo sapiens
  chr16:30546036-30546203
  hyper
cgcccgagaacacttccccggcccggtaccaagggaaggagggacgtcagtagagcccccgaaggcccactagaggggatggaaactaagggccgatggctgcgagtccatggtcagaactggacgatgtcttcaaataaaacggcggcagcgcgacctctcgacct

SEQ ID NO: 127067 - DNA, 30 bp, Homo sapiens
  chr16:30582572-30582602
  hyper
gaatgaaatggatgcgggtgaaaacactcc

SEQ ID NO: 127068 - DNA, 178 bp, Homo sapiens; identical to SEQ ID NO: 52976
  chr16:30583153-30583331
  hyper

SEQ ID NO: 127069 - DNA, 53 bp, Homo sapiens
  chr16:30583721-30583774
  hyper
ggtagaagcaggtgcgtgttttacagtagcttagctgcggagtccacccagcc

SEQ ID NO: 127070 - DNA, 690 bp, Homo sapiens
  chr16:30596383-30597073
  hyper
tgagtgagttgggggcgggggttggggcttctccacggctacttatccaaatgaagtacctgcttcctgtccttggcccctgctgaaagctgcagagctctcaccgtcgggatcctgggcctccgggctccacgcctccacttctccttccacccacgagataaaagcgggtttgggaactgaaaatcctgcgaaggagaaacaatgggctcggctgagcgcacgggaggggagaatgagactgctccctcggcgccccgcttccagcccactagcctctggggacaccgatcaccgcttcccaccgacggactgggggtcccggccggagggcccggcctcacccagcgcgcccaggtggccgaaggtctcccgcatcacgtcccggtacagggccctctgcgctggccgcaggcattcccactcctcgggagagaagtacacggccacgtccgcgaagctcacggcgcccggcctgctttccctcgtcctccggggcccggcctccccgggtacgtgggccgggcgcggcgccaggggcggccccatgggaaaccctttctgcctggcaaagggaggcttccggggaaggtggagatgctggcgctttcctgtctttcctcagacaagtccgtaagggactcctgcccttaaccaagatggaaccttcctggcgtcaacacccctcgc

SEQ ID NO: 127071 - DNA, 188 bp, Homo sapiens; identical to SEQ ID NO: 10624
  chr16:30620878-30621066
  hyper

SEQ ID NO: 127072 - DNA, 905 bp, Homo sapiens; identical to SEQ ID NO: 10625
  chr16:30621123-30622028
  hyper

SEQ ID NO: 127073 - DNA, 30 bp, Homo sapiens
  chr16:30661835-30661865
  hyper
ccctcaaaagatgacgccacccggtccacc

SEQ ID NO: 127074 - DNA, 30 bp, Homo sapiens
  chr16:30662111-30662141
  hyper
tccacgggaggcggcggtgagcagcccttg

SEQ ID NO: 127075 - DNA, 30 bp, Homo sapiens; identical to SEQ ID NO: 52981
  chr16:30662709-30662739
  hyper

SEQ ID NO: 127076 - DNA, 79 bp, Homo sapiens
  chr16:30669804-30669883
  hyper
tcctggcggagaagcgccctaagactccaaaggagacaacaggagtttgtgctggagctcccccgctgcccatcggccg

SEQ ID NO: 127077 - DNA, 380 bp, Homo sapiens
  chr16:30670363-30670743
  hyper
tggcctctttgagccggaggacttgagacacttttaaaggggaggtctgcgtttcggggcgagctttcggccccttttaaaggggtggcccttcctcttcctcggggagacttgcatcgacccctggcagggggtggccaccgcactaggccgccggacactgtcgggtcgtcttaaaggggccgggagctggacaacttggggcctcgccttaaagggacggccgccccgttttcgccgtcgcggccccgccgagcccgcagggggggccctcgggcttgtcgccccgggggcggcgccggctccccgggccgtggccttggggcaagctcggggccagcagatccggctttaaaggagaagccgtggccctctcgtca

SEQ ID NO: 127078 - DNA, 30 bp, Homo sapiens
  chr16:30709551-30709581
  hyper
ttttggtgaggcctcgggagcggcagcggc

SEQ ID NO: 127079 - DNA, 30 bp, Homo sapiens; identical to SEQ ID NO: 52984
  chr16:30710897-30710927
  hyper

SEQ ID NO: 127080 - DNA, 30 bp, Homo sapiens; identical to SEQ ID NO: 52985
  chr16:30773575-30773605
  hyper

SEQ ID NO: 127081 - DNA, 77 bp, Homo sapiens; identical to SEQ ID NO: 52986
  chr16:30786650-30786727
  hyper

SEQ ID NO: 127082 - DNA, 30 bp, Homo sapiens
  chr16:30786956-30786986
  hyper
cgggagcggtgcggcgtgtaccgagcggcg

SEQ ID NO: 127083 - DNA, 232 bp, Homo sapiens
  chr16:30787246-30787478
  hyper
ccggcggcggcgggcacgctggtggaagcgcgggccgcggcaggggaggacatcgggccgcagagaaagtgccgatggcctggggcagcggtgcgagggtgggaaaaacgcaggatattgcatcatagagacgcggccaccttcgcccctggagagcgccagtctcaggagcgccgcaccggtcacgggtggaggtcagccaggcctccgtaagcgcggtccccttccagga

SEQ ID NO: 127084 - DNA, 308 bp, Homo sapiens; identical to SEQ ID NO: 52988
  chr16:30797728-30798036
  hyper

SEQ ID NO: 127085 - DNA, 473 bp, Homo sapiens
  chr16:30798318-30798791
  hyper
cccccgggaacccaggcgtccccaactcacggctctggggtctgggaaaagccggaaggcggaatccagccccaggggacttaaccccttcagtgccctgcctcgggggacggactgggcgccgaggactctggggtccttctcaaggggtgattccaggctgaggacccggggaccagttcagggtgactgggacggagcaggaagtgaccccagcttcccgggcccctctagcctggagtcagagcatcagctctatgggatttaaccctttgcctcccgcagcctggggaaaaaaggggacagcggtgggagcagggaggaggctgggacgacgcccctgtccccgtctccagtgggagcaggcagcgtgggcatctgggagagccccgatgcccgcgagggtccctgggcttctggccgctcttcatttcgcaggggctccgccggccgcgcccggaaagccctatctc

SEQ ID NO: 127086 - DNA, 397 bp, Homo sapiens; identical to SEQ ID NO: 52990
  chr16:30816841-30817238
  hyper

SEQ ID NO: 127087 - DNA, 30 bp, Homo sapiens; identical to SEQ ID NO: 52991
  chr16:30886822-30886852
  hyper

SEQ ID NO: 127088 - DNA, 30 bp, Homo sapiens; identical to SEQ ID NO: 52992
  chr16:30905062-30905092
  hyper

SEQ ID NO: 127089 - DNA, 154 bp, Homo sapiens
  chr16:30905624-30905778
  hyper
agcgggagttgcgaccggacgcgcgaggcagggccgaggccgtgtgttcagaccacgtgggcgcggggtgcgcgacagggtctgtgtcctgcgctgcgtgagccgcggtgggtgtccgcgaaacgctgtgtgtggagtgcgtgcgtgtgtccgc

SEQ ID NO: 127090 - DNA, 30 bp, Homo sapiens
  chr16:30908475-30908505
  hyper
tacattccccagcacgcatcgggcgcgcgc

SEQ ID NO: 127091 - DNA, 30 bp, Homo sapiens; identical to SEQ ID NO: 52993
  chr16:30913341-30913371
  hyper

SEQ ID NO: 127092 - DNA, 135 bp, Homo sapiens
  chr16:30934319-30934454
  hyper
atcccatcgcacctcgtaagatcgactactagtcaggtgtatgtccctcttccgccatcttgcttgtagtcctctttccttttcacctttccattgttcctgacgagtagaaatggcagcgggaaggcagcagat

SEQ ID NO: 127093 - DNA, 61 bp, Homo sapiens
  chr16:30934681-30934742
  hyper
cccgctgtccccagcgtcctattgttcccccgtagcatcagtggccgcaggactacaactc

SEQ ID NO: 127094 - DNA, 101 bp, Homo sapiens; identical to SEQ ID NO: 52995
  chr16:30935542-30935643
  hyper

SEQ ID NO: 127095 - DNA, 30 bp, Homo sapiens; identical to SEQ ID NO: 10633
  chr16:30953481-30953511
  hyper

SEQ ID NO: 127096 - DNA, 30 bp, Homo sapiens
  chr16:30959251-30959281
  hyper
ccgctcttcagctcgcggcccaggggagtg

SEQ ID NO: 127097 - DNA, 30 bp, Homo sapiens
  chr16:30959499-30959529
  hyper
ggcacccgccggacccgcattatggctggg

SEQ ID NO: 127098 - DNA, 557 bp, Homo sapiens
  chr16:30959756-30960313
  hyper
ccccttcctcgagcgcggggtggggcttcgggaccccggggatgagccgggccaggtcccgcccctccgcgcaggcctccggggggccggggcttaccatgtaggggaggggagatctatccacatacctcaggtaacagggaggtgcgcgggtggggggagggctgggcggaccaaaggccggaggggtggggcctggggatagcgagaggcttgagaatggggccgcttgggggagggaagaggcagcccggcgaggggcaagcgggggacccagccgggctgggcccctgggccccgggtctgtacaatacggtttgctataaaactcaaaatcttccagccggggctgcggagttcgtgtgtgtatctgcggggtccctacctacagatgagtgggctcacctctcctggactcattttgggagggatttggaagtgtggacacctggggtgtccagctgtaccttggagggggctggggttggcgtgcacctcggtggggtccgggcgcttggataacgttcttggtgggtaggggtcgcggggaatctctg

SEQ ID NO: 127099 - DNA, 30 bp, Homo sapiens
  chr16:30960849-30960879
  hyper
ggaggggtcacacccggtggggcagagcaa

SEQ ID NO: 127100 - DNA, 31 bp, Homo sapiens; identical to SEQ ID NO: 10635
  chr16:30964524-30964555
  hyper

SEQ ID NO: 127101 - DNA, 268 bp, Homo sapiens; identical to SEQ ID NO: 52999
  chr16:30964612-30964880
  hyper

SEQ ID NO: 127102 - DNA, 30 bp, Homo sapiens
  chr16:30969120-30969150
  hyper
ctctccgggggatgcggccaatctccaagc

SEQ ID NO: 127103 - DNA, 30 bp, Homo sapiens
  chr16:30996468-30996498
  hyper
gggttgtggctgggcgggtctctgttcctg

SEQ ID NO: 127104 - DNA, 30 bp, Homo sapiens; identical to SEQ ID NO: 10637
  chr16:31008559-31008589
  hyper

SEQ ID NO: 127105 - DNA, 30 bp, Homo sapiens; identical to SEQ ID NO: 10638
  chr16:31008945-31008975
  hyper

SEQ ID NO: 127106 - DNA, 217 bp, Homo sapiens
  chr16:31044529-31044746
  hyper
cgtcccagagacggcggtgacagagccgggacacgtgacagtcacagggtcacattctgcggtccacgagtttgggaccgggctggtcacgtgacgcggtgggggcaccatggggtgatgtgagatgcgggtgtctcggattacgtacaaatgacgtattcctaccccttttggcaaccagatttccgttggaagatgcaacggttccggtgacggt

SEQ ID NO: 127107 - DNA, 30 bp, Homo sapiens
  chr16:31045085-31045115
  hyper
cctcccggctctggcgccggggagggagag

SEQ ID NO: 127108 - DNA, 335 bp, Homo sapiens
  chr16:31075205-31075540
  hyper
ccagcgtgagtacgccggtgcttgcggaacactgaagggtcagcaaagctcttgccgcagtcggcgcaggcgtaaggccgctcgcctgtgtggccacgctggtggatcttgagcttggagagcgcgccataggccttcgggcagtgcgcacagcggaagggcagttcgccagcgtgcgaggccaggtgcacgcgcaggcacacgggctgcatgaagcggcggccgcactcggggcacggaaagggcttctcccccgtgtggctgcgcccgtggctgcgcagctcgggtgccgtcttgtaggccttggggcatagcggacacgcatagggcctagg

SEQ ID NO: 127109 - DNA, 30 bp, Homo sapiens; identical to SEQ ID NO: 53004
  chr16:31084649-31084679
  hyper

SEQ ID NO: 127110 - DNA, 30 bp, Homo sapiens
  chr16:31085269-31085299
  hyper
tggggccaggtcaccggcaatgtcttcaag

SEQ ID NO: 127111 - DNA, 213 bp, Homo sapiens
  chr16:31085564-31085777
  hyper
ttagcgtgcaaagacgccgcgttgtgacctacgtgggcggagtcagccgtgcagacctagaacttagcgccggaagtgtgtctgcgtaaaactgcggctcggaggcgggacaggcagtgctcccgaagcggaagtttcgcggggaagcttttgcacctaaggacacttcctgtttcctagtaacaataggaagtgtccgtagagctgggagta

SEQ ID NO: 127112 - DNA, 320 bp, Homo sapiens
  chr16:31117072-31117392
  hyper
acctgtatacagtattctgaaaagggggtcgcgaggtgcatgtccaacctccgccgccgggggcagcagcgagtccaggccgagccggggcctagcgagcggggtcaaatggggtgaggcctgtgccagacctctccacctcggtggcagccgcagcctcctccgcctgcggctcctgtccacgccgcggccacgtgagcgccagattctggcgcacagaccactgccagtcctttgctgctttgcgcagcctgtcctccccgccaggagcacccttcccgctcccttttaccacgggctccagccgtggctgccttggg

SEQ ID NO: 127113 - DNA, 30 bp, Homo sapiens; identical to SEQ ID NO: 53007
  chr16:31119635-31119665
  hyper

SEQ ID NO: 127114 - DNA, 32 bp, Homo sapiens
  chr16:31128843-31128875
  hyper
ccaactcgcggggccgcggggacggccacaga

SEQ ID NO: 127115 - DNA, 272 bp, Homo sapiens; identical to SEQ ID NO: 53009
  chr16:31153836-31154108
  hyper

SEQ ID NO: 127116 - DNA, 30 bp, Homo sapiens
  chr16:31190860-31190890
  hyper
tctttcaggtcaaacgtcataatccccgaa

SEQ ID NO: 127117 - DNA, 189 bp, Homo sapiens
  chr16:31191154-31191343
  hyper
ccgccccctcgccccgcccccagcgggcactcaggccgtaccactgtgccttcatgggggtggagatagatcgtgggctagtcctgccgaggagagaggggttcttcctcaaaaaatatgattatgtatagtattcgcatgattctagttaacttgtttcccttctgcctgctcggaccctctacctgc

SEQ ID NO: 127118 - DNA, 30 bp, Homo sapiens; identical to SEQ ID NO: 53010
  chr16:31191844-31191874
  hyper

SEQ ID NO: 127119 - DNA, 30 bp, Homo sapiens
  chr16:31192620-31192650
  hyper
cgggggaagcgccgcgtttcctgtgctggg

SEQ ID NO: 127120 - DNA, 719 bp, Homo sapiens
  chr16:31213466-31214185
  hyper
cctggcttggctgccgactgaggaggggcctggatcccagctggcgcggctccagagcctggaaggatatgggccaagtgatccccttcccttcccttcccgccgtggggccggggtcccgttggtcggtaggccaagcgtggggagcctcctttccggtagagcagctttgtttaggggtaggaggaacagaaagcggaagagcccgcggggtaagcgctggtgtgggtggaggggaaagacggggtggaggggaacgggggcggctcaccctggtgcgtggccgcctgcagctgcccggccatctcctgcaggcccatgtcgcgcagcacgttagcggtgagctcggcgccgtaggtctccaggtagaagctgaccagcttgtcggtgaggtccaaggcgtccatggacagcagcgcgccccgcgggatgcgcccgtagccctcgcgcagcggcaccgacagcagcttcagcttgaacttcttgagctcctcggcggtcaggttctccagcgcatccaggatggcgtcgcgcgcgcgccccatggctccaggatccccggccgctgccgccgctcaccccgctgcagccgccgaccaggaggaagtcggctccggggcggaacctggactccccgccttcctcccactctggtctcccgactccccgccccggtccgttgccctccagcaaaaggcgcttccttactacacccttgg

SEQ ID NO: 127121 - DNA, 42 bp, Homo sapiens
  chr16:31227396-31227438
  hyper
ctgctgttgtcttacgcgactggtgcgcgcgtggggctggct

SEQ ID NO: 127122 - DNA, 88 bp, Homo sapiens; identical to SEQ ID NO: 10644
  chr16:31228309-31228397
  hyper

SEQ ID NO: 127123 - DNA, 28 bp, Homo sapiens
  chr16:31276465-31276493
  hyper
agcatgagccaccgcgcctggtcctatt

SEQ ID NO: 127124 - DNA, 422 bp, Homo sapiens
  chr16:31453941-31454363
  hyper
ttcgctcgctcttacccggtgaggtcccgtgcccgcgtacctcccgcatgacacttgggcgtgcggccgagccgggagcgcccctgccccgcgagccgcccccgagagacacggcggatcggaacccagccgggcgcgtagctccgggaaggggacgtggcgaggacccggcagccgcggggcctgtggggaaacatggtccccgcaagggaccctgggagctggaggcgtcctggcccggcgtccggagcccacggcccaggactaggatgccgggggtctcgggcgtcctccctaacctcagtcatagggcgctccgtatccagcccgccctgcttgcctctcgcttcccccaaatactgccccgacctgtcccctggccctcaccaagacagggagaaacgaccgagacactgaggact

SEQ ID NO: 127125 - DNA, 30 bp, Homo sapiens; identical to SEQ ID NO: 53016
  chr16:31454581-31454611
  hyper

SEQ ID NO: 127126 - DNA, 294 bp, Homo sapiens
  chr16:31469968-31470262
  hyper
gcctgaccattttccgggcgggcagctgccccgaccacaccaggaagggctgctcaggcggagccacctcgcaatccaggggtgacctgggggctccccgggacgcgaatgtcccgctcccccgccgccccgccccgtccggattctccctcgcctcttctggcgcggccgactgcgctgcgagtgaagaactccccgtttcctagatgccagctcctgagctcacgagcacgtccagagcggaggacactcgggacaccggggtccagctccggaaacggaaaattccacaag

SEQ ID NO: 127127 - DNA, 30 bp, Homo sapiens
  chr16:31471368-31471398
  hyper
ttgctctctagacccgggcagtctggagtt

SEQ ID NO: 127128 - DNA, 44 bp, Homo sapiens; identical to SEQ ID NO: 53017
  chr16:31483757-31483801
  hyper

SEQ ID NO: 127129 - DNA, 185 bp, Homo sapiens
  chr16:31487757-31487942
  hyper
cgaaggcacggaggccgcgctgagtgccctctccctccctgcagaagatggtgaccgccttgggcactcactggcacccagagcatttctgctgcgtcagttgcggggagcccttcggagatgagggtgagagtgaactcgactcccatcttaaaagctgcgggtcccctcgacgtctcgcccca

SEQ ID NO: 127130 - DNA, 1190 bp, Homo sapiens
  chr16:31498606-31499796
  hyper
agctgggctgtcccctgaccccggcctgttgcaggagggctggccgcgctgatgtacacggacacggtacagaccttcgtcattctggggggcgcctgcatcctcatgggttacggtaggggctcgcctaccagggaggggcgcggagggcatggtcgcggagctctcggcctgcgcgcggggccgttgcgcgtctccggtctgagggtcctaaggagggtcccctgacggccttgcccggcagccttccacgaggtgggcgggtattcgggtctcttcgacaaatacctgggagcagcgacttcgctgacggtgtccgaggatccagccgtgggaaacatctccagcttctgctatcgaccccggcccgactcctaccacctgctccggcaccccgtgaccggggatctgccgtggcccgcgctgctcctcggactcacaatcgtctcgggctggtactggtgcagcgaccaggtgcgggtatagggctgcgcctgcagtgaggccggggcggagccgagacgggcggagcctgagtccctccccgccttccccacaacggtctaaggcgcagtctgaggggcgggaacccctcgggttggtgctaaaccagacagaaggctccatctactccaagcgtgcagctgaacttggggcactcacgagccagaggcggggcacagagcggaacggggcgcggggcggggccgaggggaggcccgcaagcgggcagctgaacgcccctcccgtaggtcatcgtgcagcgctgcctggccgggaagagcctgacccacatcaaggcgggctgcatcctgtgtgggtacctgaagctgacgcccatgtttctcatggtcatgccaggcatgatcagccgcattctgtacccaggtaacatccctgccccgcccctttcctgtgccagcaaccgggcgcccgtcgcccagttccgtcaccctcctaagactcggcagtttgggcccggagtcccgcctccctccgggggtcgcacgcctcctctgctaggattcccagtccccacctcctgggattcccagaccaggccccgtcctaacggcgcggtggcctctctctggcagacgaggtggcgtgcgtggtgcctgaggtgtgcaggcgcgtgtgcggcacggaggtgggctgctccaacatcgcctacccgcggctcgtcgtga

SEQ ID NO: 127131 - DNA, 30 bp, Homo sapiens
  chr16:31519516-31519546
  hyper
cttcgcccgcatctcgtccttcaggtttga

SEQ ID NO: 127132 - DNA, 83 bp, Homo sapiens
  chr16:31519858-31519941
  hyper
ggcgctgcttcggacgccccggcaccggcccccgttgctttgtagcattctgcagctgggctgcaggcgccgtgggcctccgc

SEQ ID NO: 127133 - DNA, 272 bp, Homo sapiens
  chr16:31548822-31549094
  hyper
cccggcgtttccccgcggaggtcatgaggtccccacggcccaggccccgtccccggacagccccgggtgccccaggagctccggccgcagctcacctgggaccggcctcccgtggagccaccccttgcccagccgcccccaagttcccgcaggaggaactggcgacagacacgtccagcccgcagccgccggccgcaccggcgctgcactaactgggacgcgccccggggccgcgctggctcggatccgcccagacccccgctcctccattg

SEQ ID NO: 127134 - DNA, 63 bp, Homo sapiens
  chr16:31549116-31549179
  hyper
cgctgccctcccttcctgggttcccggggctgagcttcctgggaggtccgcacacccccaacc

SEQ ID NO: 127135 - DNA, 13 bp, Homo sapiens
  chr16:31580310-31580323
  hyper
cgtaacgactgcc

SEQ ID NO: 127136 - DNA, 158 bp, Homo sapiens
  chr16:31580580-31580738
  hyper
cttcgctgtcggcggcggtggctaaagaggcggcggccgcggtgcccgtggctgcgggggccccgtccccacccgggtttcctgcgacgagggcggcgggcgccggggccgcggcttggggtgcaccgctgcccacccggctcttggtcgcggggtcc

SEQ ID NO: 127137 - DNA, 411 bp, Homo sapiens
  chr16:31712178-31712589
  hyper
cggcagctgggaccccgggcgcctcgtcccgtccctgcgcgacgaccttggtcctgccttgagccctctctgggcagtttcgcgcccgcagccccgtgtctccccgcgttgtgcggtgatgacgggaggggccgtaggggagaaccccggctcggggttcgggcgtgggaggagctgtggtccgtggggtccgtagtcctttctttcttttgttaaaaattaaactgaggtttggttaaaacgttaaagattttatctgagcaaataacgacccgtgaatcaggaagccacaaccatggattgtggtttggggtccaccggaggggcttgaaggaaagggtttaataagatgcatgaggaagcaaagccaattcagtaattgattggctacaattacgtagtccccttatt

SEQ ID NO: 127138 - DNA, 604 bp, Homo sapiens; identical to SEQ ID NO: 53020
  chr16:31885056-31885660
  hyper

SEQ ID NO: 127139 - DNA, 303 bp, Homo sapiens
  chr16:46723138-46723441
  hyper
tctagccccgcccccgggccctacaggcggctcattgattggcctacttctaggaacccgagtctcgcgtgcttattggccctgtcacttaacgctagatggacggacctgagcgccagccaatctcaccacagcgtgcgagagtgggcggagcagtgcagggcagtggggatcgcccggcggcaggcaggagacaacaggagggaaaggcagtgtgtgatgagtttgtcaagaaggaatggaaggagggggagccgacaagtccacgttcaccgcatctgcgttggcgattgcgctattgat

SEQ ID NO: 127140 - DNA, 30 bp, Homo sapiens; identical to SEQ ID NO: 10647
  chr16:46865504-46865534
  hyper

SEQ ID NO: 127141 - DNA, 35 bp, Homo sapiens
  chr16:46917868-46917903
  hyper
tggatgatgaaactcggggcgatgactgcaccatc

SEQ ID NO: 127142 - DNA, 30 bp, Homo sapiens; identical to SEQ ID NO: 53024
  chr16:46918418-46918448
  hyper

SEQ ID NO: 127143 - DNA, 30 bp, Homo sapiens; identical to SEQ ID NO: 53025
  chr16:46918941-46918971
  hyper

SEQ ID NO: 127144 - DNA, 111 bp, Homo sapiens
  chr16:47175827-47175938
  hyper
accattggaggaggcgctaccagcccctaccctatccagctcgattttatcaagttctgcaggtaaagcggtgtgacagatctacgcgatttcatccgggggtgctctcgg

SEQ ID NO: 127145 - DNA, 1115 bp, Homo sapiens
  chr16:47176461-47177576
  hyper
cctcagccgtaccctcgaaatttttaaaaaaagaacatgttacgacattacaaacacgtcagctttcaatttaaatcagcagggggaaaaagggaagtcctttactgagtggtggtgctgttttccctctggaaattgaaaagacgatttattcagtccgagtttcaggagcaactttgtatcccaatcctaattatctatgtatataaattttcatctaaattaccacctcctgggaaatgcaaagccggtggagtaggttttagagctctgtgctctggacaagccaactgttttaattcccagtacaacaaattagtaagaaccgaacaccagcggcggggaattctgagacctctggcggagcgcgaggagcgccgcgtcccgggaagcacccgagcagcagcgctccccgggggccgggacaagccgggtccgcggcgcccgcgcgccgcccccggagcccgcagtggtgccgcagcctccgtggccgcagcaggtgggacccggctggcccagcaggccccgttccccgccgcgaggtgcaggcgccgcggggctattcgaaaaccactgcacgacgtcacggccgcggcttttattgttctcgtggaattactttttgccatcacatctggagaaagagcggcctccgctccacgacaggaatctcacaactttgcaaagggatgcgcggaattctacggaagcggcgcgagggcgcagcccggagggccctgctgggcccaggggcctcctggccgccttcccgacccgatccctcttcccacacgcgccccgcgaacgtcggccggactcgcaggggtcggaagcggcgcgcccggagagccggcggagccgggcagggctcgcgccccgcggtccgctccgagtagccgcgagccccgccagacaaagaggcgcgtcgggtcccgggcgcgggtaagggacgcagaggcgcgggcagggcggcgcgccagcctcggcccgcagggggcgccgtccgtggccccagccccggtccttacctttgaggaccgagcagagccgctccagggccatgttcccgagctgcccggcgcttcgcgaagggctgaggtagcggcggcggtggc

SEQ ID NO: 127146 - DNA, 118 bp, Homo sapiens; identical to SEQ ID NO: 10650
  chr16:47177628-47177746
  hyper

SEQ ID NO: 127147 - DNA, 624 bp, Homo sapiens; identical to SEQ ID NO: 10651
  chr16:47177805-47178429
  hyper

SEQ ID NO: 127148 - DNA, 30 bp, Homo sapiens
  chr16:47426165-47426195
  hyper
aaaccctcaaaacgacgaacgcccacaaaa

SEQ ID NO: 127149 - DNA, 30 bp, Homo sapiens
  chr16:47495098-47495128
  hyper
ggctgcccttccgacgctaaaaaagcagtg

SEQ ID NO: 127150 - DNA, 257 bp, Homo sapiens
  chr16:47495526-47495783
  hyper
ccagctccactctgcgtgtgcccccgactctattccgcttgtgagccccactcggaaagtaggcagcggtccggacttcccttagagtcttctaacttaaaaatcgggcggcggcacattcctgggaaagggaatgtgtcttccctgtgaatgtgtctttcctgtgaatgttctctgcaaaagtcagatagcttaatcagaccaagtcagatgtaactacgatctggctgcagaaagccggcgtctgggctccttgc

SEQ ID NO: 127151 - DNA, 30 bp, Homo sapiens
  chr16:48278187-48278217
  hyper
gccggaagcggaggcgtggaggcgggtctg

SEQ ID NO: 127152 - DNA, 95 bp, Homo sapiens; identical to SEQ ID NO: 53031
  chr16:48399754-48399849
  hyper

SEQ ID NO: 127153 - DNA, 30 bp, Homo sapiens
  chr16:48418418-48418448
  hyper
gagcttccccggcacgccgttcacgcgctc

SEQ ID NO: 127154 - DNA, 30 bp, Homo sapiens; identical to SEQ ID NO: 53032
  chr16:48643290-48643320
  hyper

SEQ ID NO: 127155 - DNA, 30 bp, Homo sapiens
  chr16:48643798-48643828
  hyper
cctcgatacggccgcggctctgctccagca

SEQ ID NO: 127156 - DNA, 30 bp, Homo sapiens
  chr16:48644196-48644226
  hyper
gcgacggaagttgacgtcaccctcagtcgc

SEQ ID NO: 127157 - DNA, 54 bp, Homo sapiens
  chr16:48845119-48845173
  hyper
cggggctctgccctcaccctggcatcgtcctgccgggcccgggtgatgctggcc

SEQ ID NO: 127158 - DNA, 541 bp, Homo sapiens; identical to SEQ ID NO: 53033
  chr16:49308919-49309460
  hyper

SEQ ID NO: 127159 - DNA, 483 bp, Homo sapiens
  chr16:49311506-49311989
  hyper
ttaccggattgcatgcggagaagaaacgggcccgggtttcaacagaggccccgtgctccgtgaatttctaactcgaaccagccgctgggataaatccgagaaacgttgtttattgtgctattattaactttcccttctccccacgcccctagaggaaataaaattcattcctgaatattgggccaggaaaacgtttctctgaaaggaaccacaactgcaggggaccacccggctgcagctcccagctcccggcccttcgccctaggctgcccactcgctccggctcccgacctccccgctgccgaagcaactgggtcagcctttcagacttaaaacgaagtcgtttatttcatttttgctttcacattatgttccgatacaatcaaaactcctggacgaacctcttgaataaagtcctgtgaatgagcggaatcataggtcctgggcgcccgagtatgcggcgggtggactccggattcagag

SEQ ID NO: 127160 - DNA, 525 bp, Homo sapiens; identical to SEQ ID NO: 53036
  chr16:49312032-49312557
  hyper

SEQ ID NO: 127161 - DNA, 300 bp, Homo sapiens
  chr16:49313200-49313500
  hyper
aacatgtaggaagtttcaagtcgtgctgctttctcgccctcttaatttcagcctctttctcactccccttcctgccttcgccctctccctgcctcccttccggctacgagccagtcagagaggaaacaccaggaatccggagaaggtcgagtacttccagccccccatcaagtttccccgctccagcttgaggtatgctcggtcgcctttctccatttggattaggactccgttgctggcggcctcccgggtcacgtcctggtcaccagcgaaggctgaaatcaccggccacccgtttag

SEQ ID NO: 127162 - DNA, 805 bp, Homo sapiens; identical to SEQ ID NO: 53038
  chr16:49314016-49314821
  hyper

SEQ ID NO: 127163 - DNA, 1356 bp, Homo sapiens
  chr16:49314959-49316315
  hyper
cgagacgggaacgaaggggagtgggcaggaatcggtcccggactgtcgtccccgcgcctccgcagagcccttggagaggaccgggcatcggtcttccatccatccctccttcaccagcccaatctgcacgccgcgggaggaaggaacactcacctggtcgaagtagatgatcatggtgcgattactcatctcggacggctcgtggttggtgctcctgatggcagagaaagccaccttggcgctgccagagcgcacagagatgcccagggcagtgcccgtggggtcggacgtggggttggagtcgcacaccaccaggcacttgccctccagcacgatgggctccgtctcattctgcccgcgggccgggcccgccagccacgcagcccccagcagcagcagctccaggacgcccagcatcgcgccgccggcgcccaccccgccccccacccccagggctgctcgcgccagccgccccccccgtcccagtcccgctccgaagccccctcctcagctccgtgcgcagctccgccgccgccgctctggacactacacctcttcctcgcactccgggactagcgtcccctccgcgactagcgtcccctccgcgctgtgttcccggagcccctcccgggcctcaggggtgccgcggctgcccagccgcacttggatgcatagccgctgctgctcggtcccgctgctgccgccgcctcctgcccgcacccgccgctgccgccgccgccgccgctctgaattattgatgcagccggcgctgcagccggagcgggcggagagcgcgcgccgggcacaaaggcgcggacctcggcctggccccgcccccgccgcctcccggcccgcctccctccgaggccctgcccccgccccggccgaggccacgccccccagccaatcctgacgcgccgcgctccccaccgagccaatggcggcgctgtccgcgctcggccacctgaccccgggcgccgttgttattaggcgcggcgaggcgggtggcgcgcggcagcagggttgggctctcgccgtgagtcgacgaagggagcgcgggcgcgcgcccgcgtccgcgcactgagagtcgcctcggccgctcgctttctcgactcccgcctcgcgcctcgatcctgttccgcctccctcggccctcctgcccgcccccactcgtcggccctcaggtaggaggcggcgcgccccggggtcgggagtggaatcgctggaggctgcgagtcgcctgcccgcctgtgggcgcgcccgttgggaggggagcgccccccagcgggcgcgggcgcgagggcagccggcgcgctgggcgagcctggctcagggtcccggcggccggggtgcagg

SEQ ID NO: 127164 - DNA, 267 bp, Homo sapiens; identical to SEQ ID NO: 53041
  chr16:49316508-49316775
  hyper

SEQ ID NO: 127165 - DNA, 509 bp, Homo sapiens
  chr16:49316844-49317353
  hyper
cgatttttcgagaataatttttaccctaagtggattttcgtgccacgcatggacttggaactacacacacgtagtccaaaacgtgaaagtcaaaatgcagctttgccaagtggcagggagaaaggagagctgagaagatgaggagaggaagggcgcgctccaggctttccagcccgggtgcggtagacgtagccctgaaggatgaacccaggctggtagtagggcggcgggagggcggggggacctgtcagtcaagtccaaagcagaaacgcggcgccggatcccagtcagaggccggctggaacgcttcccacaggctcctggcgctccggtccccaccaggcgaccttgatcctggcgtgctcagcggagccagcgcagcgtcgggagctggagagacgcggggcgccggctgagcgctcctgccctctgcctctgggctagcctctggcccggcctcccggcctcccccagggtacgctctcccccaagagcgaacaccagctttg

SEQ ID NO: 127166 - DNA, 30 bp, Homo sapiens; identical to SEQ ID NO: 53043
  chr16:49888929-49888959
  hyper

SEQ ID NO: 127167 - DNA, 9 bp, Homo sapiens
  chr16:49889624-49889633
  hyper
cgccgggcc

SEQ ID NO: 127168 - DNA, 188 bp, Homo sapiens
  chr16:49889658-49889846
  hyper
cggcttcgcctgcttccgcctggacatgtccggggctccgggcgctccgtcgccctccgcagccggctccccccgccgccccccgccgctccgggcagcccttctcccccttctcctccgcctgtctcttggaaacttttttttttgcagcccggttggcggctgtggggagcggaccgcaggtccgg

SEQ ID NO: 127169 - DNA, 880 bp, Homo sapiens
  chr16:49890525-49891405
  hyper
ggggcccctggctcacgcccccttctctggctctcggatcggcccggcgccggccccccggaggaggaaggggcgcgcgggggcgctcaggcggcggccggcaggcgcgcccgtgccccgggcatcgctcagcccgtgcgccgggccgccgctgcctgccctcgggctgcggtgctcagcgcgaggcgcgcagccgatccccaggccggtgccaagtcgccggccccgctagctgcctccatgggccaggggctcggagaggggggaggcggcggccgcggtggcggaagaggaggacgagcaggcggcggcggcggcggccgggctcccgtcctcctgggcagcggcggcggcggctgcgccccggctcctccgcgctccagccggcgccggcccgcccgccagcctccctcgcgctcctgtcttctttgtggtcgctggctctcctcctcccgatccggctgctggggctgcactgcagagacacataataaagccaggcttggctggaaatgtagccgggtcccagcaggaggatgtgaggagcggagtcccggcgggggagcgctctgatcccgtggggcgccccgcactgctccggctcggatcagacggagagagggccaacagcaccgagcgatggacagcgctggaaatacagctccggccgcccgcaaaacccggaccgtggtggcggcggcggcggcggcggcaggcacggcgcgggcgcgggcaccgcaccagcacgcggggccggggctcgggcgctggctgcaccgggggcaggaggagggaacacacttagggcccacgcggctgtcaagctcgccaagacgcatgagcctcacaaactgtaaaaagtgaaagaatgggggagcaa

SEQ ID NO: 127170 - DNA, 192 bp, Homo sapiens
  chr16:49891452-49891644
  hyper
cgcacatgaactatccagggacctggctctgccaggttggcttttgcccaccggtcggtgttcaaagaccacccctgccccacatccaacaaattcttccaccactgggctaaccccgtgcgccccctacacccttatttgtagaattctcgcgcctggtgtgcacttcctctgtccgactgtaaaaggaac

SEQ ID NO: 127171 - DNA, 30 bp, Homo sapiens; identical to SEQ ID NO: 53046
  chr16:49891994-49892024
  hyper

SEQ ID NO: 127172 - DNA, 30 bp, Homo sapiens; identical to SEQ ID NO: 53047
  chr16:49892481-49892511
  hyper

SEQ ID NO: 127173 - DNA, 30 bp, Homo sapiens; identical to SEQ ID NO: 10659
  chr16:49893107-49893137
  hyper

SEQ ID NO: 127174 - DNA, 30 bp, Homo sapiens
  chr16:50059407-50059437
  hyper
ccagacgcggggggcggtgcctcagctccc

SEQ ID NO: 127175 - DNA, 30 bp, Homo sapiens
  chr16:50100518-50100548
  hyper
cagcggtcacccagcgccttctgtgtgcca

SEQ ID NO: 127176 - DNA, 110 bp, Homo sapiens; identical to SEQ ID NO: 53049
  chr16:50188125-50188235
  hyper

SEQ ID NO: 127177 - DNA, 30 bp, Homo sapiens; identical to SEQ ID NO: 53050
  chr16:50279722-50279752
  hyper

SEQ ID NO: 127178 - DNA, 864 bp, Homo sapiens
  chr16:50581389-50582253
  hyper
ggacgagcgtaacacggacccacagtgtccccagaagggggcaggcgttctgagagccacaaaggtggggtggaatcccttgatgtcgaccgccaccatccccctccccccgcgcgacctccccgcagagacctccccagacaaaacaaacaaacccttgggtctggcgaactgcagcggggagcggaaaccaaggaagatcaaagactcagcggttacccccttccgggccgcgcagtttggcagcgcgccccgacccgggcgggcacccacgggcccccggacgaggagatcccagagactggctgataacggggcgctttggacatttgtcgctgcctggagagggctgggctcacactggcccggggtgcgctgggggctcctcctggactccccaaataagaaactagaggagtgcggtggtggggggcgggtcacggggcgggtaatgaacactttctgcagaaggtaggtcgtgggaagactgggaaaaggcagcgctgccgaagcttgcacctgagcagctaaggtctccgctcccgacctcagtttccccacctgtaaattggagccgccgagtcccgccctgcccgtttagagagaacgtggagcggagggaagtgacagtacagttagcgatggccgggctgttctgtcccaatacgcctcctggacaagccgccccgccgggtcgccagccctggagctcggcccccggccccagaccgcggcagggagcgcggactgtgtcccgcccctcccgtcagcgccccgccctcgtccccgccctgccccgcctccggccccgcccccgccgcaaccagccttgcctttgatgcgccgcaccggccaatgggcgcg

SEQ ID NO: 127179 - DNA, 67 bp, Homo sapiens; identical to SEQ ID NO: 10661
  chr16:50773733-50773800
  hyper

SEQ ID NO: 127180 - DNA, 237 bp, Homo sapiens
  chr16:50775656-50775893
  hyper
gcagcgccccgccccggctccagcatcagccaatggtgacgcggcacccacagcctttcgcccaatcagcttgagcttcccgcctccatccgccgctcttctctgccccgccccttcgctttccctttggttccaccgagcttgacagagcggaaagtcccttcggccggcgccgggctggcagccattggaggaaggtctgtcacagggaggcccaatcacggcccgctcaggagc

SEQ ID NO: 127181 - DNA, 45 bp, Homo sapiens
  chr16:50840617-50840662
  hyper
cgccatctactgggcgaatgccgtaaggtcggttgtgaggtcccg

SEQ ID NO: 127182 - DNA, 30 bp, Homo sapiens
  chr16:50875209-50875239
  hyper
gtacctgcattatcgcggcttccttaagct

SEQ ID NO: 127183 - DNA, 30 bp, Homo sapiens
  chr16:51167478-51167508
  hyper
aacaacaaaaaacctcgaataaactacaaa

SEQ ID NO: 127184 - DNA, 153 bp, Homo sapiens
  chr16:51167776-51167929
  hyper
tgaggagggggtgcgcgcccgtcagctgccttcacctcaaccctgttgctttgtaaatgtaaatccagttctgttctgcgggccgagcccaaaggctgagtgtatttttcacactgggaggagaagcagggcagagggcgatttcttattttg

SEQ ID NO: 127185 - DNA, 467 bp, Homo sapiens; identical to SEQ ID NO: 10662
  chr16:51183963-51184430
  hyper

SEQ ID NO: 127186 - DNA, 356 bp, Homo sapiens; identical to SEQ ID NO: 10663
  chr16:51184601-51184957
  hyper

SEQ ID NO: 127187 - DNA, 237 bp, Homo sapiens; identical to SEQ ID NO: 10664
  chr16:51185054-51185291
  hyper

SEQ ID NO: 127188 - DNA, 422 bp, Homo sapiens; identical to SEQ ID NO: 10665
  chr16:51185542-51185964
  hyper

SEQ ID NO: 127189 - DNA, 303 bp, Homo sapiens; identical to SEQ ID NO: 10666
  chr16:51186025-51186328
  hyper

SEQ ID NO: 127190 - DNA, 793 bp, Homo sapiens; identical to SEQ ID NO: 53059
  chr16:51186595-51187388
  hyper

SEQ ID NO: 127191 - DNA, 30 bp, Homo sapiens
  chr16:51187848-51187878
  hyper
gcttttctcctggtgcgcgccgcgtgcgca

SEQ ID NO: 127192 - DNA, 30 bp, Homo sapiens
  chr16:51188099-51188129
  hyper
gtttttttgcgtcctcgacggcgtagaggc

SEQ ID NO: 127193 - DNA, 27 bp, Homo sapiens
  chr16:51188696-51188723
  hyper
cggcagctgcgccggggtcgcgacctc

SEQ ID NO: 127194 - DNA, 124 bp, Homo sapiens
  chr16:51189083-51189207
  hyper
ccagaccctcttttccgttccgttgacggtgcttggccaccctaccccagaaatggaggacgtctccaagtgctctccctgcacccctgtttcctcagtccccagctcaaggccccgctggccc

SEQ ID NO: 127195 - DNA, 150 bp, Homo sapiens; identical to SEQ ID NO: 53061
  chr16:51189282-51189432
  hyper

SEQ ID NO: 127196 - DNA, 358 bp, Homo sapiens
  chr16:51189679-51190037
  hyper
agctctccgtagattcggttatttttccaaaccccgggaccttgcttccccgggagtttcagaaactcctttcctactgaactgctgtcactcaatcctaacctctcttagaacactggagcggcttcgaacccgaagtatggagcaggcttgggtgggtacctcgcccctggccaagtctacactgtgcgccctcggcgcactcgctctccagcagttcaataccagcagcaaaacgcaggtttttgggggaactcccgccgcccgccaccaagggctatctccagacgggcgccgggtgcagcgccgtgaccgggcgccctggcgccggctcgggcgcgaaattcagcggtggcaa

SEQ ID NO: 127197 - DNA, 370 bp, Homo sapiens; identical to SEQ ID NO: 53063
  chr16:51190121-51190491
  hyper

SEQ ID NO: 127198 - DNA, 196 bp, Homo sapiens
  chr16:52579147-52579343
  hyper
ttcggagagcaggaacgctccaaccaccaaagggttaaagcacacggaataaagtcccctcgatctatattttttgggaggcccctctgtgccagacgctgagctgggcgatgatgacacgcgagggcgagcaagagagaccctaatggtcttttacaaacttcagcactagagttgggaacgcagtataaacaaa

SEQ ID NO: 127199 - DNA, 1542 bp, Homo sapiens
  chr16:52579630-52581172
  hyper
tgttttcgacaaattcggcgctgggggcttcagggaggacagaggacaccggatggtgggggggaattccgcgcggcccgggtaccagggctgcgactctcgcccgcctcgctgctccgagcgacgcccgctgcccttctgaggtccacctcgccacctggaacgctcggtcctcgaagttggcgcagggggaggtggagaaggtggagtgaccccagggtgtggtgtggaggtctccaatcccgatctccccgaaatgcaaaacttagcccccccaaaaaaatgagaggaaagaagccacttactctaagcggggaggggcgggcaccccggttccgaggtccaaagtgccctaacgaaagggcagcaaaggccacctgcggggtcccaccacttccccccactcccctgtccaggcatactcaaaagtttgttcctttccgtccgtaagcggccccgaggccggctctggagtaggtgggggaggtaagaaggactgggggtgggggagggcaagatcatcggaccaggagatcagggacccctgcgtagcccccactcagtccaggggggctgcgatcgtgtttactaataacagcaacaaacaatcacacgccagcccttctttcagtcctcgggctctcttcgctttttgggggcagcaaaggagagtctggcggggaggtgggagggagcggaggggctgaggagagcgccggctgggggacaaaaagcggcgtgggatggggcagaaagagaagcggggagagctggacagagacgaaggctcaaaggtagaagagacatgggaggaaagaggccaaagaaaagtgcagcaggcggtgagcccgagcgcggggcgcgcccaggatggggaggtggcccccgccccccggcccaccggcccagcccggtcaccttgctgtagccgtagtaccccaggcactgcgcgaagtccaggctggcagggtccccggccgccgcggggtagaacctcacatccatgccgaagctgggcccggggccgggggccgggactggggttcgccggggccgggacccgcctcctcgccgccgctagatccaccgtcgagggcgcccgggggtggcgcgtgggactcgcggccggaggggcgccgggacccagagcccgaggagctcgggagccgcggccgccgcacacaaaggcgcggccacgcgagccgcgggagagcgggaggcggccggggggacgcgccccgccggggcaccgaggcagcgctgcgcgcgggccgggcgccgggggcgcggggcgcggcgctggggcccgggtcggcgaggcgagttcaggtgcgctgggcgaggctgggacggcggcggcggcggcggctggccccgctcctcctcctcctccccgggcggactgaggagacgagccgcggagacaaggggcccggcccctcccctccttctccccctcctgcctcagccgccggtcccctccccgcgccgccgccgctccgcccctcccaccgcgggcagctggcgcgccgcccgccccgc

SEQ ID NO: 127200 - DNA, 33 bp, Homo sapiens; identical to SEQ ID NO: 53066
  chr16:52581387-52581420
  hyper

SEQ ID NO: 127201 - DNA, 30 bp, Homo sapiens; identical to SEQ ID NO: 53067
  chr16:52586325-52586355
  hyper

SEQ ID NO: 127202 - DNA, 30 bp, Homo sapiens; identical to SEQ ID NO: 53068
  chr16:52599172-52599202
  hyper

SEQ ID NO: 127203 - DNA, 239 bp, Homo sapiens
  chr16:53088450-53088689
  hyper
tctctcattcagggacggtttagggggtggcaggaaaaaatggttgctgataggcgaagggcctccctgggttggagagaaccccagcctcggatggtcccagcacatttaaaagagaagcagtgccaaaggtggggtgcactgaaagctgctggatgaagggaaagatccttgtgctcagcccggaaaaccggaggatggataccaggccgaggggtccctccgtgccccaagagaaa

SEQ ID NO: 127204 - DNA, 30 bp, Homo sapiens
  chr16:53088903-53088933
  hyper
cttcacaggcgcagcgacagcgacagcgac

SEQ ID NO: 127205 - DNA, 30 bp, Homo sapiens
  chr16:53089263-53089293
  hyper
aaagcagccactgtcgcccagagccactcc

SEQ ID NO: 127206 - DNA, 30 bp, Homo sapiens
  chr16:53133717-53133747
  hyper
cgccaggccagctggcgtggtgccctggca

SEQ ID NO: 127207 - DNA, 30 bp, Homo sapiens
  chr16:53134067-53134097
  hyper
cctacatgactcacccggagaatgtgagcc

SEQ ID NO: 127208 - DNA, 30 bp, Homo sapiens
  chr16:53164199-53164229
  hyper
gcgcgaaaggagaacgtgggactaaatcca

SEQ ID NO: 127209 - DNA, 34 bp, Homo sapiens; identical to SEQ ID NO: 53069
  chr16:53468697-53468731
  hyper

SEQ ID NO: 127210 - DNA, 30 bp, Homo sapiens
  chr16:53468945-53468975
  hyper
caaggctgagatcgcgctggggtcccgttg

SEQ ID NO: 127211 - DNA, 30 bp, Homo sapiens
  chr16:53469329-53469359
  hyper
gactgtggctacctcgagggctttttggtc

SEQ ID NO: 127212 - DNA, 30 bp, Homo sapiens
  chr16:53536565-53536595
  hyper
cgcgggcggaaacccgtctctgagcactca

SEQ ID NO: 127213 - DNA, 30 bp, Homo sapiens; identical to SEQ ID NO: 53070
  chr16:53537010-53537040
  hyper

SEQ ID NO: 127214 - DNA, 308 bp, Homo sapiens
  chr16:53537310-53537618
  hyper
gggaagaacacactcggtcctgcaaatcaaatcaccccggtttgggtgggactgcacttgaccctccccttacgtaacagcgcctgggacggcctgtcagtcatggaagtatcggccccccggggagggatggggcagagacaaacaagcgccgggtcacaattggccagggcgtctgccagtcaccacggagaccttcccggaggtttattcgcacagcccacagcgcaaccgccatgcgcaggggctggggcatacgctaacgtctgcaagccaagcttttggggagggccgggccgcgcgactgc

SEQ ID NO: 127215 - DNA, 402 bp, Homo sapiens
  chr16:53737491-53737893
  hyper
aaattggtcctggacgtggggataaagggcggcctgtgattcaggcctgaggatgtggaggtgtcttgggctgggctgctttcacgccagcagaactccagggccaactccagggccttctccaggcggcagagcggaccctaggaccccggcccgcgctgcagtggggagggtcagcaacctccacccaccctcatcctcccccatcctcccgggtactcaccgtgccactggccctgcagctagctaccgttgctatagcgccgacagcgtggcgggcggctggccgagaggagcacgggagaaacatggcaggctcccgtagcctcctgggaaatgtagttctccttggactctagcctgtttgctcgcggggtagcggactacgctcttccagctgtc

SEQ ID NO: 127216 - DNA, 91 bp, Homo sapiens
  chr16:53738158-53738249
  hyper
ggcctggagatcttcgtgcgctgtgagcaaggatcagggaaccggaagggcttggtttgatggcgagcggatgcgcggtgttaaactaagg

SEQ ID NO: 127217 - DNA, 30 bp, Homo sapiens; identical to SEQ ID NO: 53073
  chr16:53813351-53813381
  hyper

SEQ ID NO: 127218 - DNA, 30 bp, Homo sapiens; identical to SEQ ID NO: 53074
  chr16:53855275-53855305
  hyper

SEQ ID NO: 127219 - DNA, 782 bp, Homo sapiens
  chr16:54316061-54316843
  hyper
cgcttcctatacctccccggaacgcgcgagatagtcacacgcgccactttgagggtcaaacaccccgcatctggccacactgtacctttactaacgtggggagggggcaaaaaaatgtgtctctccttcttaccccgaggtgtcactcgcccaaacactccctacaacttcttcaagtcaaacttgggcaaggttggctggctgactgcgagaggaaaaagagggcgcggagggggcgcggcgcgcggccgggtgtagaggccacggaggcgaggcgccgagcgtcccctttgtcctgtagagggagctccagccccaaatttccctgctgcctcccccggcccgcccaccccaggcccgcctggagccggaatcccggctggaaaggtgcggcggtctgacacccccgcaacccccgcgccggggccttagcaggatgcctcttctagggcacgtgggaaaacccaccagggtgccaagacgcacagatgctcccaggacccgggctccccaactctcaactagagctgggcagtcacacatcatctagaggattatgtacccctaggcgaccctcttctccatatccgcctccaccgtcaccccacaccctggcatctataaagagggaaggggggcaaccgggttggaaggaggatggaatctgggcttgcacagcctcttataggtaacagtgagaaagcctcaactgtgtcgatcaaagaatggggacgaagggagtgatgagaacacgaccccgccacccgcgcaggctaaccccg

SEQ ID NO: 127220 - DNA, 156 bp, Homo sapiens
  chr16:54318432-54318588
  hyper
gccgagcgaaggcggcggcggcagccgggtggcccgcggctccgggaagtcccagcaggtgcggaggggcagagcccagcagggagagcgggtgcaggcgggggccgggcggtgggcctggaaacggccggttggtccaagccgggaacttgccca

SEQ ID NO: 127221 - DNA, 143 bp, Homo sapiens
  chr16:54318621-54318764
  hyper
cggcggcggccggagagagctgcagggcggaaggcgcgaccgctgcccccggtggagacccccccgcgccgggaggcgagcggcgcgggttgtccgggcttgtggcagtctccgcgagggaccagatcttgggcttctgcagg

SEQ ID NO: 127222 - DNA, 2623 bp, Homo sapiens; identical to SEQ ID NO: 53076
  chr16:54318853-54321476
  hyper

SEQ ID NO: 127223 - DNA, 30 bp, Homo sapiens
  chr16:54322757-54322787
  hyper
gggactcagtcacgccggcgggtggggggg

SEQ ID NO: 127224 - DNA, 122 bp, Homo sapiens
  chr16:54324470-54324592
  hyper
ggtgggctctttgctcctccgcttcgcccctgcgcctcccgcgacccgtctcacttccctgcgtctctgagcggcccgagaggcgcagcgctcagagtggccttgatggaagaacctggccc

SEQ ID NO: 127225 - DNA, 30 bp, Homo sapiens
  chr16:54325113-54325143
  hyper
tgtcgccttattggacgccgaggccagagc

SEQ ID NO: 127226 - DNA, 62 bp, Homo sapiens
  chr16:54404673-54404735
  hyper
ctgctgtcactcttcccccctcggatcctgagtgacggctcggcctgccacctcctcagccg

SEQ ID NO: 127227 - DNA, 273 bp, Homo sapiens
  chr16:54628743-54629016
  hyper
gtagctgcaggaaaccgggcaagggagaatgcaaatagcagagacctcaaggtgctggaggagttaggaatctcccctccctcactctaacgctgccgccgccgcaccccgccacctccccccctccccacccccgccgcccacccgccctcaggttttaaatttggaagatattgtggaaatggacaaactcgcctttgcctgctgaccagagcccagccccaggcatgaaactgagaaagtgagcagttgcaaggacgtgacgctttcttg

SEQ ID NO: 127228 - DNA, 30 bp, Homo sapiens; identical to SEQ ID NO: 53077
  chr16:54961986-54962016
  hyper

SEQ ID NO: 127229 - DNA, 1801 bp, Homo sapiens
  chr16:54962408-54964209
  hyper
caagggctctactccggaaagccgtgtcccggacgagagccgcggcgacgaagggaacaggcgtggacagaggagccacgcccacgcgcgcccgccccgaaccccgacacccggagaggctcgaccggcgccgacgcggcccgaggcccaggccctagcccacgggacgtctggtcgggcgcggggcaccgccgcgtccgttcggcccacgaggggacacgactagaggggcggacggcgcggccagagggcctggcccgggcgggggctcacctctcctccgccgcgcgggcgcgcgggccgcggacgctccctcgtggctggcgcgagcccccggcgggcggcgcgcgcgggccgttaccgaccgttagcgccaggggctgcggctgcggcgggcggagccgggggcgggcgctgaggggccgtggggccgcaagaggcgggagcgaggggagcagggcggggacgctgctcccaggagctcccggcgacgactcgggcctactgcgagcccgggaagaggccgccggcgaggccgccactggccggctgcgcgctcccccaggctcgggccgcctgggccgctccgcctcgcttagacattggccggctggcagccacctcggccccacggtccccgccgccgctgcagccagcttcccgtctccatgacaatagcgcgatcgagaccccgcccctccccgcccctctggcgccgagactcggaggaaagcggggttacgtcaccagggggcggagcccagggaggccagcgcccaatcataggtgaaggaggtgtcaggcactgggctgggcggacccaggggctctcggagaatgtagtctgaaccgctcaggcctcttggtgggcggtgtctgggggaggggagcagacggaggggaggagccaacgcgcgtgcacgagagcgcagcaccgagcgggtgccggtgcggcgctgggttagtgtgagatcgcgaaataaagtacatctcgcccgtcaaagtcaatgcgagaaactttgtatatagttatgcttcggcttgcgtgtggccccattatgcgaagttcccgatatcccgagcttccgcggcgtgcccaaacctgtgccatcttctgtcctggttcaccagcgcccctgtctgtcccagagttcgagtgcgtccgtggcttgtggtggcgggaggtggagagaagaggagagggtctgttttgtattctaactgtgtggccgtcgtgggcaagggctctgcctctgactcagttgtgtgtgtttgcttcgccagcgcctcgctgaacaaacagtggttgggttgggcactgctctgcccagtgtttgcagtggagcgtgggcggatgcgagagtgcgtgcgaaggggaaggcgacttagttaaacaaaagggaaggggacccgcaccctccaccaccaccgacttggcggtgcgagctgcgtgcggtgggaaaaccgggagaaagaggctgcgaggcgtgggagtggagctggggacggtcccgagatctcctcgggtgtagctgattctctgtctggcagttcttgcccaccacccctactctagaaaaaggctaccccggtagttccaggaaccagtgtcttctccctcgccgtccggcggggggtcggtagaaggaaggcgaggcggagacgtgcagacgtctgaggcctgtctctcgcccacctgctgctgccggcgcagaggggcagtcatcccggacttcctgcgccctgggcgcgggccatccatcggctctcccagagactttcattccggatctccagctgg

SEQ ID NO: 127230 - DNA, 904 bp, Homo sapiens
  chr16:54964662-54965566
  hyper
ggccgggttggctgcggccgcccagaagctcctgccagtcctcccaccgactacaccccgggaaggaggagcttcgggcgcgcacaaggcgtcagaatcctcaatttccaacttagcatcttggcaggacctttgcaaaggcaaaagcagagccccccggtgcaaagagcgaggggaaaaaagagaaagcagcaagggaggggaggggaggggaaaaaaagcccagctggggcgagcgaggcgcgcagaggagcgggcgcggcggtcgcagccggaggcgcgcgggaagccagcgaggaggcgccgcgggccggagccccggagccggggccagaggagcggcggcccagggcagccagaggccaggtgcccgcccgctcgccctcgcagggcgccgcccggctcgttggcggccgcggcgcggcgcgccccatgcccgtgtgtggccatgtcctatccgcagggctacttgtaccagccgtccgcctcgctggcgctctactcgtgcccggcgtacagcaccagcgtcatttcggggccccgcacggatgagctcggccgctcttcttcgggctccgcgttctcgccctacgctggctcgactgccttcacggcgccctcgccgggctacaactcgcacctccagtacggcgccgaccccgcggccgccgccgccgccgccttctcctcgtacgtggtaagtgagcgggatccgcggcgggcgaggggcagcaggggccgggcgggaggacgggggcggagggggacacgggcctaggcgccaacaccgacctcccccgccaagcttcgcggccccttcaaacttgggcgattgtctccgccagcttcgcccaggccttggactcaagagttgctcgcaaaagagagccgcgtcttgctcgga

SEQ ID NO: 127231 - DNA, 393 bp, Homo sapiens; identical to SEQ ID NO: 10681
  chr16:54965775-54966168
  hyper

SEQ ID NO: 127232 - DNA, 605 bp, Homo sapiens; identical to SEQ ID NO: 53083
  chr16:54966659-54967264
  hyper

SEQ ID NO: 127233 - DNA, 15 bp, Homo sapiens
  chr16:54967414-54967429
  hyper
cgtgtcccgggccca

SEQ ID NO: 127234 - DNA, 504 bp, Homo sapiens; identical to SEQ ID NO: 10683
  chr16:55090596-55091100
  hyper

SEQ ID NO: 127235 - DNA, 72 bp, Homo sapiens; identical to SEQ ID NO: 53085
  chr16:55357500-55357572
  hyper

SEQ ID NO: 127236 - DNA, 329 bp, Homo sapiens; identical to SEQ ID NO: 10685
  chr16:55357611-55357940
  hyper

SEQ ID NO: 127237 - DNA, 359 bp, Homo sapiens; identical to SEQ ID NO: 10686
  chr16:55357991-55358350
  hyper

SEQ ID NO: 127238 - DNA, 109 bp, Homo sapiens; identical to SEQ ID NO: 10687
  chr16:55358566-55358675
  hyper

SEQ ID NO: 127239 - DNA, 460 bp, Homo sapiens; identical to SEQ ID NO: 53089
  chr16:55358784-55359244
  hyper

SEQ ID NO: 127240 - DNA, 30 bp, Homo sapiens
  chr16:55359599-55359629
  hyper
taccccttccttgggcgggcccaagctctc

SEQ ID NO: 127241 - DNA, 195 bp, Homo sapiens
  chr16:55362577-55362772
  hyper
ggggcttttctcactcgctcttgatttcctgcagaagttactgctagccaggaggcccgggggctccggctgagtgacctggaagacctggaggaagaggaggaggaggaggaggaagctgaagacgaggaggtagtggccacagctggggacaggctgacggagttccgaaagggcgcgcagtcactgcctggg

SEQ ID NO: 127242 - DNA, 393 bp, Homo sapiens
  chr16:55362962-55363355
  hyper
cgacagccagcgctgttgaaggtgcacccccagcccggcctaggccacgaagtcctgagtgccgtatgattcctggacagcctcctgcctctgcccggcgactctcagtccccagagactccgcgtgcgacgagtcttcctgcatacccaaagcctttggaaaccccaagtttgccctgcagggactaccgctgaactgtgcgccgtgcccgcggaggagcgagcctgtagtgcagtgccagtacccgtctggagcagaaggtagtgggcccccagcggcgctgggagtatctatgcaaaagacacccacctaccgccccgcccggcaattgcacaccctctgccattccagtctgcccaggtctcccacagaactgacgggagattgcttta

SEQ ID NO: 127243 - DNA, 475 bp, Homo sapiens
  chr16:55364743-55365218
  hyper
cttgcgacagcgcggcgtgggctgcatacctcagttcctttagtagctgggaaagaaactgacaaggtaacagacaaggccgtggcgcctgcagctcagcggactaaccgctgcgtaaccaatccgtggagccaagctgaccacctcgcgggtcctgcgcatgggaagtggtgggacttgtcaggatgtttatctggaaactgcatctgtttccgggttcgtatttgggttgtaagtttactgggggaggggtgacgaggaccgcgctcctccgatcgaactgaacctaatggggaggtcaggcagctttcagggtcggtgtgaggcgagagggggcattcttcccgttttatcaaaagtgtcagcaaacacttccggtacaggccaaccaatgggaactgacgggcagggaaggggtctttgtcccccttgctaggagtgtcgagcgaccgggttgggggtaagagatttaaag

SEQ ID NO: 127244 - DNA, 113 bp, Homo sapiens; identical to SEQ ID NO: 53092
  chr16:55365434-55365547
  hyper

SEQ ID NO: 127245 - DNA, 60 bp, Homo sapiens
  chr16:55365832-55365892
  hyper
ccgaacactcgcccgcgcttcctctgggagacccctctttgctttcgttttgttcctggg

SEQ ID NO: 127246 - DNA, 480 bp, Homo sapiens; identical to SEQ ID NO: 53094
  chr16:55404802-55405282
  hyper

SEQ ID NO: 127247 - DNA, 139 bp, Homo sapiens; identical to SEQ ID NO: 10691
  chr16:55499095-55499234
  hyper

SEQ ID NO: 127248 - DNA, 11 bp, Homo sapiens
  chr16:55512751-55512762
  hyper
tcctagccaag

SEQ ID NO: 127249 - DNA, 428 bp, Homo sapiens; identical to SEQ ID NO: 53096
  chr16:55512935-55513363
  hyper

SEQ ID NO: 127250 - DNA, 199 bp, Homo sapiens; identical to SEQ ID NO: 10693
  chr16:55513482-55513681
  hyper

SEQ ID NO: 127251 - DNA, 507 bp, Homo sapiens; identical to SEQ ID NO: 53098
  chr16:55513946-55514453
  hyper

SEQ ID NO: 127252 - DNA, 30 bp, Homo sapiens; identical to SEQ ID NO: 10695
  chr16:55542906-55542936
  hyper

SEQ ID NO: 127253 - DNA, 194 bp, Homo sapiens
  chr16:55689583-55689777
  hyper
tggcctcctttctgacgcgacgcagaccccagttctggagagtctgtcactcgctccccgtggtgggagatcagaggcctggtgtccttgggagcggcgagcggtgctcggcgcaggatagaaagggagtgcgcgcccgagtcccccagatccctgggaacccgcgccaccctcccgcccctgcccatccccgg

SEQ ID NO: 127254 - DNA, 527 bp, Homo sapiens; identical to SEQ ID NO: 53101
  chr16:55689852-55690379
  hyper

SEQ ID NO: 127255 - DNA, 123 bp, Homo sapiens; identical to SEQ ID NO: 10697
  chr16:55690453-55690576
  hyper

SEQ ID NO: 127256 - DNA, 132 bp, Homo sapiens
  chr16:55690761-55690893
  hyper
cgcgcagccccgggagacctggggcaagaagatcgacttcctgctgtccgtagtcggcttcgcagtggacctggccaacgtgtggcgcttcccctacctctgctacaagaacggcggcggtgagcgtggggt

SEQ ID NO: 127257 - DNA, 350 bp, Homo sapiens; identical to SEQ ID NO: 10698
  chr16:56224482-56224832
  hyper

SEQ ID NO: 127258 - DNA, 1491 bp, Homo sapiens; identical to SEQ ID NO: 53105
  chr16:56224880-56226371
  hyper

SEQ ID NO: 127259 - DNA, 56 bp, Homo sapiens; identical to SEQ ID NO: 53106
  chr16:56227983-56228039
  hyper

SEQ ID NO: 127260 - DNA, 137 bp, Homo sapiens; identical to SEQ ID NO: 53107
  chr16:56228279-56228416
  hyper

SEQ ID NO: 127261 - DNA, 85 bp, Homo sapiens
  chr16:56228577-56228662
  hyper
gggggaggggagtgcgcaggaggggaaggaggagggggagaggccagagtctgcaaattaactttgcatccgccaaagcaactgc

SEQ ID NO: 127262 - DNA, 578 bp, Homo sapiens
  chr16:56390318-56390896
  hyper
gcccccgtcccacctcgcggcgcagcccctggagctcctgctggggggcagggcccatctgccgcctggggctccggtgcggtgcactggtccgaggagtgtgctcaggccgggctttccagaaggccacaggccactgcaaaccctgctgcctgccggccgcccagacaccacagacgccacctggcggccctaagccactcccgccacacgctcactccaggttcgtatagaaaaagcacagctctcactggccagtagctgccaaaaagaacacccatcgtataaggaaatccagccccatagaaaacaatctgcccaccgaccccctttctaaggatagcctttgtaggggttttttggttccttttttttttttttcagtttttgtttttacttttgtcccgccgagtactatgtattaccagccccccaccccacagatcagttttcctagtctttgggaaacgggttgtgttttttttcctttgccgtgttggatttccggtcccggctgacacctcccttcgtgtgtgcgcccctccccacccctgcctttgtttcggtgccctgtgtcc

SEQ ID NO: 127263 - DNA, 30 bp, Homo sapiens
  chr16:56458613-56458643
  hyper
cagaaaacccagcccgttcctccccactgc

SEQ ID NO: 127264 - DNA, 30 bp, Homo sapiens; identical to SEQ ID NO: 53109
  chr16:56459202-56459232
  hyper

SEQ ID NO: 127265 - DNA, 30 bp, Homo sapiens; identical to SEQ ID NO: 53110
  chr16:56459705-56459735
  hyper

SEQ ID NO: 127266 - DNA, 30 bp, Homo sapiens; identical to SEQ ID NO: 53111
  chr16:56485039-56485069
  hyper

SEQ ID NO: 127267 - DNA, 30 bp, Homo sapiens
  chr16:56485376-56485406
  hyper
ccgggtataggttccgccttctcttacttt

SEQ ID NO: 127268 - DNA, 30 bp, Homo sapiens; identical to SEQ ID NO: 53112
  chr16:56553515-56553545
  hyper

SEQ ID NO: 127269 - DNA, 30 bp, Homo sapiens; identical to SEQ ID NO: 10703
  chr16:56553765-56553795
  hyper

SEQ ID NO: 127270 - DNA, 557 bp, Homo sapiens
  chr16:56623200-56623757
  hyper
gagtgggtcgtgcacgcggatgcggggtgggagtgggggcgcacgcgcgggcgtgggcgagcgggccccggcagtgcacacacacggcaggggcgggcgacagatgcagtgcgtgcgccggagcccaagcgcacaaacggaaagagcgggcgcggtgcgcaggggcgggcgcccagcgggcttggcatgcgcgcccccgcccgaggctataaaagcatcgccacctgctgccactagccaagccgcgcgtccagttgcttggagaagcccgttcaccgcctccagctgctgctctcctcgacatggaccctgagacctgcccctgcccttctggtgagcccccgcccccgctcgcatcctgcgcactgcgcgcccttgtacctgcaaagaaacccacgccctgcgccttcgctcaaggacacttgggggaagggcccctgattccctattcttcacctcgtgaagggcgggcatgcctgtgtcgcggagaacagggagacttggcaccccatctcctcgtgacaggcgtggggacccgagttcgtccacattaaccc

SEQ ID NO: 127271 - DNA, 218 bp, Homo sapiens; identical to SEQ ID NO: 53115
  chr16:56642230-56642448
  hyper

SEQ ID NO: 127272 - DNA, 30 bp, Homo sapiens
  chr16:56642746-56642776
  hyper
agccccctttttaccgttaaggagatctga

SEQ ID NO: 127273 - DNA, 30 bp, Homo sapiens
  chr16:56651479-56651509
  hyper
ccccaactgctcctgcgccactggtaaggg

SEQ ID NO: 127274 - DNA, 652 bp, Homo sapiens
  chr16:56659227-56659879
  hyper
tgaacacaactcgctcgctaccgcacgttccccgctccgcactcagcggatcccgggacggcagcaggtgggctgcacacggactctgggacaagtcgagctgaaaaccgcggagctaggggtggggtggagacgcccgcgacgccaaggctggggtcccggaacacgctgggaggagggtggaaggcaacctcggggaaactgggaaaggcggcctggacttcgggaacaccgcgtacctgcgggggcacagccccacccgagcgaacgggctccaaaggggaggtcccgcggtgcccaccgcgcagagctcagggggtggtgcgcccggcccttctgcggcgcacagcccagcccaggaacgcgggcggtgcggactcagcgggccgggtgcaggcgcggagctgggcctctgcgcccggcccgacctccgtctataaatagagcagccagttgcagggctccattctgctttccaactgcctgactgcttgttcgtctcactggtgtgagctccagcatcccctttgctcgaaatggaccccaactgctcttgcgccactggtaagggaagctctgcgccctggaatccccatttcccagccctattacagagggtctctgggtttcaggaagtcgcattttaagttct

SEQ ID NO: 127275 - DNA, 634 bp, Homo sapiens; identical to SEQ ID NO: 53117
  chr16:56666027-56666661
  hyper

SEQ ID NO: 127276 - DNA, 224 bp, Homo sapiens; identical to SEQ ID NO: 10706
  chr16:56671948-56672172
  hyper

SEQ ID NO: 127277 - DNA, 164 bp, Homo sapiens; identical to SEQ ID NO: 10707
  chr16:56672221-56672385
  hyper

SEQ ID NO: 127278 - DNA, 103 bp, Homo sapiens; identical to SEQ ID NO: 10708
  chr16:56672513-56672616
  hyper

SEQ ID NO: 127279 - DNA, 378 bp, Homo sapiens
  chr16:56677222-56677600
  hyper
cgggggtggggataccgcgaccacctgaggctgggttcccggaccgcccaagggcaggaatggagtgcaatctccgggaaattcgggagggccgggattatagcagggacgccgcgtaccgccaggagcacagcccctccaaagcgagcgtgagccaaagggccgcccccagggtgcgcaacagccacgttaaggaggatcctgcgcccggcccgcctggtgcgcacagccccgccctgaaccctgggcagcgctgacactgagctgggctggtgcgagacctggggcggggccactgcacccagcaccctgccctgactgtaaagtcaggcggcctgctcctgttccgcctcctaccggcccgcctgttttttcgcc

SEQ ID NO: 127280 - DNA, 224 bp, Homo sapiens
  chr16:56691535-56691759
  hyper
ctgttgacgaaggaccggggcggggccggggggcggggcgaaggccaggatctccaggtacccggaaccccaaggggcgggtgtagcaggcaatcttggcgaaactgggaagggcgggcaggagggcagggaagccgctcacccaggcacaaagcgcctcccgcttgagcggactccaaagggacggtccgcggtgtgcagcgagctgcgctcaggggaccttg

SEQ ID NO: 127281 - DNA, 101 bp, Homo sapiens
  chr16:56691991-56692092
  hyper
gccgctggtaaggaacgccgggttccgtgcctggggatgctcgattcccagacaccatagagagtgttcctgggtttgagaaggtcgtattttgagatctc

SEQ ID NO: 127282 - DNA, 450 bp, Homo sapiens
  chr16:56701842-56702292
  hyper
ggcatcccaaggcacagaacccgggcgtcccttaccagcggcacaggagcagttggggtccattgcaacccgaggcgagactagagttcccaagcgagaagggaagaggcagtgggtgcacgtggaaggcggagtggagcccaacagccagcggctgtttttatagtcaggagacggggccgggcgcagacgccccgccccgcccttgcacccagcccgctgagtccgcaccgcccgcggtcccggcctgggctgtgcgcaggagatgggccaagtgcaaggtcccttgagcgcagctgggcgcacaccgcaggacggcccctttcgcaccggctcgcgagggaggcgctgtgccccccgtgtgcggcttctctcaccctgccaggccttcccagcttccctgaggttgcctgctacacccgccccttggcgttccgcctaccccagtat

SEQ ID NO: 127283 - DNA, 32 bp, Homo sapiens; identical to SEQ ID NO: 10709
  chr16:56703366-56703398
  hyper

SEQ ID NO: 127284 - DNA, 121 bp, Homo sapiens; identical to SEQ ID NO: 10710
  chr16:56703438-56703559
  hyper

SEQ ID NO: 127285 - DNA, 237 bp, Homo sapiens; identical to SEQ ID NO: 10711
  chr16:56703621-56703858
  hyper

SEQ ID NO: 127286 - DNA, 151 bp, Homo sapiens
  chr16:56709741-56709892
  hyper
ggggtggggacagcgcgaccacctgggaatgggaaatggccctcagggtggcaggggcggcgcgtacctctggcagcatagcccctcccgcacgagcgggccccaaaagggcggtccccgggagcccaccaggctgcactcaggggatggt

SEQ ID NO: 127287 - DNA, 107 bp, Homo sapiens; identical to SEQ ID NO: 10713
  chr16:56709949-56710056
  hyper

SEQ ID NO: 127288 - DNA, 30 bp, Homo sapiens
  chr16:56716212-56716242
  hyper
aaaggggcaggccccgcggtgcgcccggcg

SEQ ID NO: 127289 - DNA, 98 bp, Homo sapiens
  chr16:56763914-56764012
  hyper
caaggccccacctccgccccgcccccggccccgcccctgttcttgtcctcccccacgggtctccataaagttcatttggcgtcgcaccgcgcgagggc

SEQ ID NO: 127290 - DNA, 30 bp, Homo sapiens
  chr16:56965643-56965673
  hyper
aaagggtgggggtgcggctttgtgaggaaa

SEQ ID NO: 127291 - DNA, 7 bp, Homo sapiens
  chr16:56966460-56966467
  hyper
cccgccg

SEQ ID NO: 127292 - DNA, 68 bp, Homo sapiens
  chr16:57023302-57023370
  hyper
tgccagggtgtgggcgcagcagggagcgggtgtgttaggcccccgcccatcccgcgcccgagccccat

SEQ ID NO: 127293 - DNA, 361 bp, Homo sapiens; identical to SEQ ID NO: 53132
  chr16:57126698-57127059
  hyper

SEQ ID NO: 127294 - DNA, 31 bp, Homo sapiens; identical to SEQ ID NO: 10715
  chr16:57127432-57127463
  hyper

SEQ ID NO: 127295 - DNA, 30 bp, Homo sapiens
  chr16:57219786-57219816
  hyper
cgccaccgcagagccgctcgctcttaaaaa

SEQ ID NO: 127296 - DNA, 96 bp, Homo sapiens
  chr16:57220054-57220150
  hyper
gattgggccattcacgcctcaggatgaggactggccagtctgcgcctggagggcgggccggtcccgctgatcacgtgacacgatttttgaaaggtg

SEQ ID NO: 127297 - DNA, 30 bp, Homo sapiens
  chr16:57220558-57220588
  hyper
gagaggttttccaccgaggcccgcgcttga

SEQ ID NO: 127298 - DNA, 6 bp, Homo sapiens
  chr16:57278842-57278848
  hyper
cggagt

SEQ ID NO: 127299 - DNA, 30 bp, Homo sapiens
  chr16:57279270-57279300
  hyper
gcgactgcgatggacgccttagaaggagag

SEQ ID NO: 127300 - DNA, 470 bp, Homo sapiens
  chr16:57318148-57318618
  hyper
cgtccgtgcgggaagcgccctaggggtacgcgcagcgcgtcggtgacagtgtgagcccgggtggggagcgcaaggttcgcgaaaaatgaacgcagcgccggagtccctcacccatcctggccggaccgggagcccccggccaaccccgtgggcccgcgcgtgctctcaccagctgcagcagcatgagcgccccgaggcgggagcgcacgaagcccaggtccgggcgcagcgccgacaccgaggcttcggcgccctgcgcaggactgctggtccgcgtgctaactttcgacgggaactcggccatggcggctccgcttgcctcccgaggtcgctacggccgccgtcgccgcccctccagcggtgggtgccggctcccgcgccgcttttcccccaggctccggatccctgtgtggctccaggcgctgcaggaggcgtcggggctgggagcctggggcgccaggtgcggccga

SEQ ID NO: 127301 - DNA, 30 bp, Homo sapiens
  chr16:57481052-57481082
  hyper
agggaggttagggccggccctggcccctca

SEQ ID NO: 127302 - DNA, 274 bp, Homo sapiens
  chr16:57481494-57481768
  hyper
gggggctgccaagccggggagaggcggggagcgcggagggggcgcgaggccggcttcagctgggttcgacggtggggggaagaggccgttggggcggcccacgagcaaggtgaggtgaagggcatcggcgcgggctcgggcgagccgcctggctagcttcggccctgctccgctgtctgtgaggggcagatgcagcggggcagggcctgtcacccccatttcatggagttggcagagcctcagagagggctcggggtacgaaagtcacgcagcc

SEQ ID NO: 127303 - DNA, 30 bp, Homo sapiens
  chr16:57496396-57496426
  hyper
tgttaagtgaaggacgtatgcgtgttttgc

SEQ ID NO: 127304 - DNA, 337 bp, Homo sapiens
  chr16:57496649-57496986
  hyper
accagcctaccgtgcggatcacggagctcactgacgagaatgtcaagttcatcatcgagaacaccgacctggcgtaaggctaccgagggaagaggctggcggctctggggcgccgggaggcccaagccggggccccggggcagggggcgggggtgtagtggggtggggtgggggcgatgtccttccagagctgcccccctgcaccagggctttagctttgggagcctgcggcgcgggcccagcctgtcgaggctgcagcgccttcacgccccttggcttttgatctttcagggtggccaattcgattcggagggtcttcatcgctgaggttcccata

SEQ ID NO: 127305 - DNA, 312 bp, Homo sapiens; identical to SEQ ID NO: 10719
  chr16:57519802-57520114
  hyper

SEQ ID NO: 127306 - DNA, 146 bp, Homo sapiens
  chr16:57570646-57570792
  hyper
cggggcgaggggtgcgggccggggcggtgggctctgctgcagagcgggccgtaccccaacggaggccccacccccgtgaggggccgagagttgcgggggggctcggctttcttggttcaggtttcctcagcgccaactacgtacta

SEQ ID NO: 127307 - DNA, 617 bp, Homo sapiens
  chr16:57769283-57769900
  hyper
gttttccaataatgcggacgctgattggtcaatccaggacggttgctcaagccattggcgcagccgccattggagggcggctctcaaaagttttcagacacaaattaggttcgagggaggaaacggagaggaaagggaaaacttgagacggaggcgggactaaggaaacggcagcttgcattggtttattagaggccaaggggcggctcttgaacgttccttcctcttgattagtcctatttaggaaaagagggcgggtactgaggaaaagcggcagaagcgcctgcttccattggtcagtcctggcaggaggcggagcacccgcggcagctgattggtgcgggaggcaaggtgggcggggctctgagccggaggttttgttgtgagggtcggttgtcaagcagcggccaatcaaggcaggggatggaggcaagtgggggtcgcgcctggagcggagcctcggcctccggagccgcagctgcaggtggagtgggcaaggggacgaggtggcgaggggacggtgggccctgggctgggccgagccaggcggggctggctgggcttgcgggcagagagctctgagcgtggggaggctagagcccgtactccgcaagcag

SEQ ID NO: 127308 - DNA, 30 bp, Homo sapiens; identical to SEQ ID NO: 53140
  chr16:58018865-58018895
  hyper

SEQ ID NO: 127309 - DNA, 30 bp, Homo sapiens; identical to SEQ ID NO: 53141
  chr16:58019108-58019138
  hyper

SEQ ID NO: 127310 - DNA, 30 bp, Homo sapiens; identical to SEQ ID NO: 53142
  chr16:58033695-58033725
  hyper

SEQ ID NO: 127311 - DNA, 242 bp, Homo sapiens
  chr16:58035171-58035413
  hyper
caggtgaccagatccgcgtgcgcagccggcagacagcttggagtcggtgggctgaatcttcaccactgtcctgccgggttccgcccctcccggctccgccccgaggcggtgccagcccaggccccgcccctgggagggcgcttccggcacagcggaactccgggtgccggttgaggttgctggtggacctgctctggtggtcttggatgaggccccatgagcgcggcgcccctggtgggcta

SEQ ID NO: 127312 - DNA, 207 bp, Homo sapiens
  chr16:58059306-58059513
  hyper
acctccttcccgtccgcctaggcctcggtatcccccaccaggtatgagaaggaggagtcttcattcttcccaggcggggagaccacgccttccctgcctcctccctccgcggggggtcgcgttggaggtcacccccgccccctaggcgctgggttgggagtgacgcggggtgggctggagaggtttcctgccgtctgggaagcgtaa

SEQ ID NO: 127313 - DNA, 749 bp, Homo sapiens; identical to SEQ ID NO: 53143
  chr16:58059828-58060577
  hyper

SEQ ID NO: 127314 - DNA, 662 bp, Homo sapiens; identical to SEQ ID NO: 53144
  chr16:58060638-58061300
  hyper

SEQ ID NO: 127315 - DNA, 30 bp, Homo sapiens
  chr16:58163188-58163218
  hyper
caacgctaagtccgcgatcttcagctccta

SEQ ID NO: 127316 - DNA, 145 bp, Homo sapiens
  chr16:58283894-58284039
  hyper
ggcaggggccgcttcggcagagtgatgactgatgatgagtccgagagcgtcctctccgactcccatgaagggtcggagctggagctgcctgttatccagctgtgcgggctggtggaggagctcaggtaccgccgcccgcgcctgg

SEQ ID NO: 127317 - DNA, 30 bp, Homo sapiens; identical to SEQ ID NO: 53146
  chr16:58284259-58284289
  hyper

SEQ ID NO: 127318 - DNA, 30 bp, Homo sapiens
  chr16:58370751-58370781
  hyper
gcaatcttgctcgccgcattctatattgac

SEQ ID NO: 127319 - DNA, 125 bp, Homo sapiens
  chr16:58426259-58426384
  hyper
taccgctccccagccgtgtcccgctgctctaaatctgcagacttgatcgattgcttctgcctgggcggtaccgcccgaattgactgctcctgtctgatgcgtccccgggcgcgggaaacgagttt

SEQ ID NO: 127320 - DNA, 122 bp, Homo sapiens; identical to SEQ ID NO: 53148
  chr16:58497213-58497335
  hyper

SEQ ID NO: 127321 - DNA, 1300 bp, Homo sapiens; identical to SEQ ID NO: 53149
  chr16:58497469-58498769
  hyper

SEQ ID NO: 127322 - DNA, 1175 bp, Homo sapiens
  chr16:58548938-58550113
  hyper
atccaggagccctctaggccacgccactctgaaacacacacgaaaactgctctgaacgaataccaccagtaaaagggttccatggccatcggcaacaaggggtcgagatcaggaggtcgctcgccgcccagttgcgtcgctcaccaccggccggccaccagaccctcggcttccgatccagaaaccgtattttgttcttgcacccagaccgcaagaagcctcagccctcggggacagaccgaaggccagggctgtacctggctcagaaccaggcgccaagcggcacgggactctccttctgcactcgcagcgcgtgagtgcaattggagatcctggactcaagatgttttcatgaggaacgattccagcccgcggtaactccggccagtctgcagcgtggacgacaaaacaggcaccacgtggttccggcgccggggcggggccagagacgccggaagtgaccgcgcggtgcgccggcccgcgaggaaacgcgctcttagaccatggcgacccaggcgaagcgtccacgggtgagtggcgggcgcggggtccagccttttcctccgcgcctcaccccttctccgttcgcagaaccgtccgcctgcgccccctccgctccctcccgcgggtcccgcgcccctctccgctcgtcccctcctccacccaaagcccgttctgcgctcgcgccgcggtctcctgcagttcccagcggcctctctgggggtcggacctggtcactgcgcgcacttatctcaggtggcggggcccgtggacggcggcgacctggatcctgtggcctgcttcctgagctggtgccggcgggtggggctggagctgagtcccaaggtgagcgagcgagccggcgggcggaggacccgcggcggggcgcgggctgccctgaccagccctcctgctcaggtggcggtcagccggcagggcacggtggccggctacggcatggtggcccgggagagcgtgcaggccggagagctgttgttcgtggtgccgcgggccgcgctcctgtcgcagcacacctgctccatcggcggcctgctggagcgaggtgggcacggcggcgggctagggccctggggcggggcggggcggggcggggcgggcccggcccgcgaggccgcgccggggcgctcacacctgtgtcttcctcagagcgagtt

SEQ ID NO: 127323 - DNA, 30 bp, Homo sapiens
  chr16:58664435-58664465
  hyper
ttcgttcgtcgctgcgccctagaaggagca

SEQ ID NO: 127324 - DNA, 30 bp, Homo sapiens
  chr16:58718319-58718349
  hyper
ccaggaggccggggcggggcgattcccagg

SEQ ID NO: 127325 - DNA, 30 bp, Homo sapiens
  chr16:58718752-58718782
  hyper
ctgaatcctcagcccgacagcactgccctg

SEQ ID NO: 127326 - DNA, 30 bp, Homo sapiens; identical to SEQ ID NO: 53151
  chr16:58767848-58767878
  hyper

SEQ ID NO: 127327 - DNA, 31 bp, Homo sapiens; identical to SEQ ID NO: 10725
  chr16:61445875-61445906
  hyper

SEQ ID NO: 127328 - DNA, 697 bp, Homo sapiens
  chr16:62068386-62069083
  hyper
gagtgttgtaaagagaacaggcgcttcaaaagccagcccccatccctcggatctgctttgcgatggtaccggatgcgagaggacagtactctcgcttaccttccctagcgtcccctcgttcccattgtcagcccccagatatcatgacgccaggtgaaagaaagcagctgatctgattagcagctcgggcgcgctaagggattgtcgaatcatgcctcctaaggaggaaactcttgtggaatcttcaggaaagggtggtaaagttgaaaggacctttcctccctcccgctgtcttggtgataagctctatcgtttaattggtgctgaagtgagcagctgccagcccgattttccattacggactaatattgtgcgtttgcaacaataaacaattaatgtggtttgatttcttacatttagcaacccaagcaaacagctgccatctccgctggtggaggcaaacggctagtccttgacatgccgccggctccgtgcctgcgggggaagggtcaaccgcaaggaaactttgaggattctgccagactgggtgggggaaggctctggtgtttgggaggaataagcggaggaaattgtggatacctgttggcatcagcgttggcggcagcacgtttttttaccgtttcccagccttggctggatcctgggagaaccggagtaggtcccttatgaacctctt

SEQ ID NO: 127329 - DNA, 137 bp, Homo sapiens; identical to SEQ ID NO: 10728
  chr16:62069136-62069273
  hyper

SEQ ID NO: 127330 - DNA, 776 bp, Homo sapiens; identical to SEQ ID NO: 53155
  chr16:62069336-62070112
  hyper

SEQ ID NO: 127331 - DNA, 458 bp, Homo sapiens
  chr16:62070245-62070703
  hyper
cggagcttggaggaggcagggagattccaaataaatccactaattctgggctgagcgctccggcgtgcgagcccgcctgcctgccaaatgtaactgtgaagtgatgtggaaaagtgagccgggtgcctcccctgacggatctcattgggcagagcgcagaggcaggtctaccacttggaaattcatgtaagcagtcccccctccccgccccctccccgccttcccccttcgctctcccgcgctggctcgatcgctctctttccccctacccaagtgggcgcacaacttttcgctcctcgctcccgagcaagccccgcgcgtctctgccgccagagccacgaggtgaagatgcgcccttccgcgcggtgcgcgcagcccgctgaggaccgagctcctggataagtgggctggcagataataacagcatgcggatgaggtacctgcgagctttctctcta

SEQ ID NO: 127332 - DNA, 2252 bp, Homo sapiens
  chr16:65154642-65156894
  hyper
gaaaacctttcacccgggagaggcaggcgcggcgagccccgggcgaaagcagggcctcggcaaaaaaacggacaaggaagccggacccgcaagcctcccccgaccccactttctctggggactccgcttcacagcgtgaggcgggccctcctacagttcctctgggttggggaggggggagaagggagctctcctcgccgtcctccccatctggccagcttctcagtgcttcccacctcccggctcgcgttccggggcagagcgcagggagggaggccgtgcgtgccgggagctagagaggcttggcgcgctccgagaagcggcgcaggtttcgggaaggtgtggttctcaaagttaacgttgaccctggcagctttcgccaatcccaagccagaggcgagcccgagtctgggccgctcatggacctactcctgcgctggtgggagcttacaaacgggcgccagagctcccgcagagactcgggctggagggctgtagcgcaccgcagcctgctgccccagaaccacagtcggcggccccaaacccacgctattaaagtgcgggcaatctccttccggagctggggtctttccgttttcccgggcttacccggcagtctcgactgcagggactaagccccggggagctttcggcagggatccgggaggatggagtaagaaccccgcagagcgcggtcatgtcgccgctttggggaagcggcgcagggctggcgggcaccgcgccgtgggcgactttccccagagatatgaccggggacagtcggcgtgtccggaggtctgctctgcagtctcttgccccagccaggtacaaaccccctctgctgtggcctcggcgcagaccccacaggaggccggagccagggagagtcgtggagcgcacatctgaagcctccgtcccctgctttgcccgcgcccacagctggctcccttctccctttctgatttttaaacaaatctctccctcccttttgctttgcgttagtgaagccttctcgactcagataccaccgtccccctcaccaccccgccccgccaagacattctcttcctgagaaaatcctgccccccattccaagaagccccaaccaggcgagaggaagggactggcggcgcacctcacctggggcccttgagggtggacgcaacctccgagccgccagtccctggcgcagggcaagcgctgcggtgtcagtcccggccccagtcccggtcccattcacaagtcagcggcggctgcgagcggcccccgcggcatctgctcctcggcccgcgacgctcccctcagctggcggcggccgcggaatgagccgccgagcgcgctagtggcaggaatgagaaaccggggggaggtggcgggcgggcaggcgggtgcggggcggggggggcgggaggagggaggctgccgctgtgagggaaggaaagggcgggggctgagagaagccgaggctgcgagaggcagcgagatgggcctcgcagaggctgcgggggccgaccccgtccgcgcccctccccccaggggcccagagatgctaacccctggattcgtggccgcccctcccgccccgtggcgcggcgctccgactccctcagggctcagatggagtctggagcgactgaagttgggctccagggacgcacagccaatcagggagggcggcggagggaagctggagaggggttgggagcccccattttcctccttcccccaaatccgctccagctggccaggctgggctctcgcctggcgggccgggatggtggttgggggaaggtatcgtccaagtgagggaagcaattgggaattcgggagcgcgttctattctttctcactccaccaccccaccttccaaaaatccctcaacgttggcggctcctgcccagcccccacccctctcaatctcccatcccttgcaaactcttctggtggctctggtggtgaagtcgggcggggagggagacttaggacttgggaagagcccagtctccgttctctctcagctctcctctcgtctagtgccccccacgcaacgcctcggagaggggtgcgcggggagcgcttcgccggggtcggcctcgctccagcttttgggagggtgccttggcccctaccccagccaggtatcagtggcccccgccggtagtgtcacttgttgccactccctcgctacagacccgccagggcccggtggagtgtgcgtttctacgggagaaagggcctaatggggcgcagcg

SEQ ID NO: 127333 - DNA, 739 bp, Homo sapiens
  chr16:65156939-65157678
  hyper
cgctaccgtgagggttccccgggcctgcttcctgccctccctccccgagtcgccgggagaaagggctggcagggccggggcttaggaatcacgccaaggactgggcggggcgctcgcggtaccgggaacggcgtggggatccgcacacccagcagggaacaaccatgcctgtgtggggacccctggcttgaacaagtttgcagggtgggaggtggaggcaagagaggaggcggaggaaggtggagacgccagtgggtgaaggctaaaaaggaaccgcctagggggacggggatgaggctgggaaaggagaagagatggacccgcgaaaaagacggggaaggaggctgcggagggaaagctgggcgccacagccaagcagtttgaaagggctagaggggaggagacgggcccaggagttaacggaaaaagaggccgaaaacggaagagaaagcttgggatcctgagcgcatggggaaggaaccccagtgcggggctaaggcaagagcggccgagccctgccctccagctcctggtcaccagcccgcgggtcccgagcgcccgcagccgcccgggtttccacacggcttggggagacgcccgcgggggcgggtgccggcgaggctgccccgggacctaccctcttcggcctgcgcgcccgcgtttttcttgacgactccaggatccgggtggcgctgcgtgcctgcccccagtccgcgtcctgcgcggagaggatgcctct

SEQ ID NO: 127334 - DNA, 30 bp, Homo sapiens
  chr16:66161640-66161670
  hyper
atcaagagagtgccacgggactgcattgct

SEQ ID NO: 127335 - DNA, 186 bp, Homo sapiens
  chr16:66440408-66440594
  hyper
agaccaccctcaaccgttgcctcctgggtcccaggacaatgcgaatctacagacttcccagacctggggggctagaggctgaaccaaggagcatcgtccgcggctgttgggttggtaatgggaaatgaccactagggggcgcgctgtgtcaataaatgctcagccagggccggtgtctgcgagctc

SEQ ID NO: 127336 - DNA, 764 bp, Homo sapiens
  chr16:66460619-66461383
  hyper
tgcccagcctagcctcggtccaacctgtctggctgtccttccctgacacctcgtttgtctacccttctctgcacgtgtcagtggctccccgctcgcgtccgtgtgtcattccctacacacgcctgtgtgtcctcttcacacgtctgactggagcgtcggcctcccgcatttcccggcctcctcgccgccctgccccgcctgctgctgtgtgggtgtcgggctggctgtgcgcaaaggggcgcggctcggccctcccccgcacccgcgccccccgccccgcatctcggagtgacccgggccgcggcgccgcggtgctgaggcccgggagccgcgccgccgccgaggggggccggggccggtgacggtggcgtgggcggcggcgcggggacgacgggcggccgggcggggctgcggcagggcagggccagggccagggccggggcctgggaagccgccgccgccgctgcctcggcccgggatcgcgggcggctggtcggcccggctcgcctggccccgcctggcccgccccgccccgcccctgcgcgcccagcaggccgaagcgtagcggcgcgccccccgcgacgcccgagcccgagcgcagtggcctccgagcgggaaccggactgggagccggagccggggcgggaaccggagctggagccgaagctggagccggcactgcggcgcacggagcggagcgctgcagccaagccgagtaaggggcgtggggctgggcggcgcgggggaggggcgggcggggggtc

SEQ ID NO: 127337 - DNA, 605 bp, Homo sapiens
  chr16:66461511-66462116
  hyper
cggagcgggatcccgggtctcccgcggaccctcgaccccgggctggccactgggatctgcgcgagccgaggctgaccctgatcgcgccctcgggcctcggggaaggggaggtatccaggttttctgcctgactcgagtccccgacgagcatcaaccgcatttggggaacccaagacagcctccccagcagcttgccctcggtttcggggacccctgaacaacccaaccaagaagggaaaactagggcgcactctcggtcggggtgggagaggaaaggggctggggcttcacggagtttggagtttgaacccacccgcacccctttgagctaggaagtttgacccttcgacgagcaggtcgcctggggtatgcccctgtctccgtgcctctgtctcagcaccgagcgtcggagagagagcgcgccctccgcaccttctcccactttgggacagactttcccttgcgctgtcagagggacccgaggctgagtacgaggcgaggcggcaggcagctcaggctggctgcgcagcgctgagtggcaccgccgccgctccccaggggcagggcccaccccacacccggctgactctcgctgcccttcctcc

SEQ ID NO: 127338 - DNA, 30 bp, Homo sapiens
  chr16:66584213-66584243
  hyper
gcaaataataccagcgactgaagggttaat

SEQ ID NO: 127339 - DNA, 30 bp, Homo sapiens; identical to SEQ ID NO: 53162
  chr16:66586322-66586352
  hyper

SEQ ID NO: 127340 - DNA, 30 bp, Homo sapiens
  chr16:66586730-66586760
  hyper
aagctgctggggggcgggagatgtgggtgt

SEQ ID NO: 127341 - DNA, 342 bp, Homo sapiens
  chr16:66612753-66613095
  hyper
aatcgtgtgttgcatcgatgcgtttgtggtcaccacgaagatgaggaccaacttgaaaagattcctgggagtcgaagttgaaaggaagctttcccccgccaaggacgcctaccccgaaaccggccccgacgccccgcagaggcccgcctgaagccagcccggcgccctagcagatgcacgtgtctgtcgaatcgctgcctccgagcccacccccgagctcgcatgctgtcacccattccagcctaaatgtgaccataaaattagggctgctgcttttatcgagaacacctgcttcctctcgttgccttgtgtgaaagtcgcgttgtattttcctgcgcttgg

SEQ ID NO: 127342 - DNA, 196 bp, Homo sapiens
  chr16:66638025-66638221
  hyper
gtttgcgcgcgcgcgcgcgtgtgtgtgtgtctgtgtgtgtgcctggagctgcgcttgcaggtctgagagtcctctgagaatgggttgggggaggcgggtgcaggaccgaggcctggaacagccaacaaagaggccctggaggagggtggggctggccggggacaggaggggtggccaagaaagtcgcaagaaaact

SEQ ID NO: 127343 - DNA, 753 bp, Homo sapiens
  chr16:66638268-66639021
  hyper
cggccggggtctttgctgtttagacgcctgggttcccggatcccagacacgcgcacgggcaggaagttagaccggagacagcgagtatagacagcccttctggataggggcagacgggtgggagctccgaaggggtgccggggcggtgatcgggaggtctccagcggcccgaaccagggtgaagaagaaggtggagtctgcggaggccccaggccggggagggggcgggtcgggcccagcatcccccgcagccggggtccgagggggaggggcgggctggaggagcgggtgggggcggggcggggcgtggcggcgggggatgcgcccctgcgcgagccagtgtcgcctgccctccttccgcacagcccgggtttccgcttccctccgggcgcgagaagaggggagccaggccgagccccggccctaccgccgccgccgccatgtggcccccagaccccgaccccgacccggaccccgagcctgccggcggctcccgtcccggccccgcggtccccgggctccgcgccctgctgccggcgcgggctttcctctgctctctcaaaggccgcctcctgctggccgagtcggtgagtgcggcgggaccctcggccgccccgctaggactgcgcggctcctttcggaggaggacgtcggggcgcgggtggggtccgggggcggccgccgtgctccgataccccctctccgcgccgcctcggccgacttctctcgggcgcctggcgaagttgggtcgag

SEQ ID NO: 127344 - DNA, 317 bp, Homo sapiens
  chr16:66730082-66730399
  hyper
ggctgcagagtggtcccgggaccccacgagggagagggggcgcgaggagcgggctccggcctgggcaagcgggtacgcggcggaggccccgcagcggggcggggagggaggcgtgcggctaggccgccctcgggcacctggggccccgcccggcacctaccacttgggcgaccttgaggcggccgagcgcgccgcgcaggtagtcggggtcgcagcgcaggccggccagcccgcggcgctggctcaccggctcggtggtgggctggtacgggctgctggcgcccgagatcatggaggtgctcgaggcctcgccctcg

SEQ ID NO: 127345 - DNA, 30 bp, Homo sapiens; identical to SEQ ID NO: 10735
  chr16:66878795-66878825
  hyper

SEQ ID NO: 127346 - DNA, 130 bp, Homo sapiens
  chr16:66914359-66914489
  hyper
gtccatcaagggcccgcctccgcaattgagccaaccagggctggcgggagggcgcttccttctggagctgggtcctgactagggaccgcctgggtgaggtgaggacctggtggccgcagttgtggcactg

SEQ ID NO: 127347 - DNA, 51 bp, Homo sapiens
  chr16:66914766-66914817
  hyper
gcccgcgggctcgccgaggacccttggctgcctaccggggcaccccactag

SEQ ID NO: 127348 - DNA, 674 bp, Homo sapiens
  chr16:66958743-66959417
  hyper
accgccgaagatgcgcgccagggcgctcttgcccacgccgggcgcccccagcagcagcaccttgtaaacgctctcgtctgagtcgctgccccctgagctgagcgagtcctcggagtcctcgggccagtccagcctgggaccctgggtccccgtcccggccgcggccgccgtcagggcacccggggtcagcgccgcctgcaggtcgcgctcgtccaccggcatgctgcggcggtgcagcggcggggcggggccccagggtgtgctgccccgacggcgctcgcgctcctggcccccaccgcggctcccgcccgctccgctgccgccgccgttcagggtcatcgcgtccgggaccgtctaggggatcaggaacccgagtggccgtgtaagccgcgagggaggcgggacccggggcgcacctgcccaacccggagtcaggcgggatgctccggccgaggtcccgccgcagccctcccccagcccccaggtcgcggcgccctcacccgggacccctccggacctggcgcatccatctgcagccgccccgaccccgctccgccaggacactcacccactcgcacacagacacgctcaggactaggatccggattaggaggccacgcactcgtagtccggactcggactttagggtttccgccgccgctgctgctgcagcc

SEQ ID NO: 127349 - DNA, 181 bp, Homo sapiens
  chr16:66968461-66968642
  hyper
gctggagcagaaggcgctgagaagggaccacggcggcgctgggtcgtgcgagccagtagcgggctgaaacgtagaggccagaaccaggtctcagggggcactaaaggcggtcggaggtaatccccacaccgcttcctcctggaagtcaggctggccgggagctcccgtatccaggacggtt

SEQ ID NO: 127350 - DNA, 30 bp, Homo sapiens
  chr16:67047605-67047635
  hyper
cgcgtggatcggtgcgcagaacagactgga

SEQ ID NO: 127351 - DNA, 30 bp, Homo sapiens; identical to SEQ ID NO: 53170
  chr16:67062672-67062702
  hyper

SEQ ID NO: 127352 - DNA, 30 bp, Homo sapiens; identical to SEQ ID NO: 53171
  chr16:67144404-67144434
  hyper

SEQ ID NO: 127353 - DNA, 203 bp, Homo sapiens
  chr16:67183853-67184056
  hyper
gccagtgggttcgcgcgccctccccaacttcgtcggccccgcccgagcctgcgcccctgggcacgcccagcaagaacacgcggcgcaccagcgccccctgcacgcgaccctccgcgccccacgtctggcgcacggcttggcgccgctcgaagtcctctgccaccgacttgacagcaataagcaggtccgggcggccaccgggt

SEQ ID NO: 127354 - DNA, 187 bp, Homo sapiens
  chr16:67184120-67184307
  hyper
cgcgcaaatagcgggcgaagtcaaagggtcccgtaggcgtgggcggcgccggtgtgtccccttcgtaggccggcggggctgcacccgcgtcgggtaactggaacgcgcggggtccgggggtgggcctcggtgccgccctccctcgccctcgcggcgcgctcgccgtcggggccgcgccgtcgcgctg

SEQ ID NO: 127355 - DNA, 131 bp, Homo sapiens
  chr16:67184511-67184642
  hyper
acggttgagccccttgcgttgttctcctcctcccggccgtgtcgcaccgccgggaccggcagcctgaagggacaagaagttcacccatgtagccaactcccccgcggcctcagctccggcccaggactgcg

SEQ ID NO: 127356 - DNA, 30 bp, Homo sapiens
  chr16:67188746-67188776
  hyper
cgccgggtcccgcagcgcccggcagcctcg

SEQ ID NO: 127357 - DNA, 633 bp, Homo sapiens; identical to SEQ ID NO: 10737
  chr16:67189017-67189650
  hyper

SEQ ID NO: 127358 - DNA, 233 bp, Homo sapiens
  chr16:67193000-67193233
  hyper
agtttcgcatccgccgactggcagctcttcttacgtgttctttcacggaagcccctccttgggaagccccgcgccccacccaccaggagtcgtccctttttgggcggggctgaggcttccaggctgggtcctgagaaagtttggtggccggagactgtggggcgcttaggtaccgacctaacaacttctgcgcctgtttccagggacgagccacgcacggtgccccctgaaca

SEQ ID NO: 127359 - DNA, 30 bp, Homo sapiens
  chr16:67193882-67193912
  hyper
cggtggctgcttcccgtccgctgtcctctg

SEQ ID NO: 127360 - DNA, 421 bp, Homo sapiens
  chr16:67194620-67195041
  hyper
aacaaaacaaaaacaaacaggattggcaacttcaaagaggacgcacactttccagtaacccatccccctctaaaggctgcgctccagggtgggtctgcggagttccagccgaacccaaattgctcagcgggagccagggctgctcaggggtcggaacttaaatcttgagcccctcaggccccagaaccgtcaggtcccagagacccaagttttttttcatccagtggggctgtcttaggaagcacccgggacatctccccggcgaggcggaggcggggaaggagcctcccctccaggggtggatccagctttgccccgcccacgcctcgcttcctgattggctcatggtccctgacaaagaaaagcctacattaacgctcccgccttattaaccctgtagtcactttctactaaccggcgg

SEQ ID NO: 127361 - DNA, 30 bp, Homo sapiens
  chr16:67196936-67196966
  hyper
aaaaccgctcttcgacgcgggccgcgacgt

SEQ ID NO: 127362 - DNA, 1775 bp, Homo sapiens
  chr16:67197289-67199064
  hyper
atgcacgcgcgtccccgctgcccaacgaagcctgggtcgcgttgcgccgccgccaccctgggctggcagtggagctggagctggagcccgcgctgcccgctgagagcgtgacgcgcgtcctgcagccagccgtccccgtggctgcgctgcgcctcaacctctcaggcgacaccgtaggcccagtgcgcttcgcagcacaccactacgccgcaaccctgtgcgcgctcgaggtgcgcgcagccgcttcggccgagctgaacgccgcgctggaggagctggcggcgcgctgcgcggccctgcgcgaggtgcattgtttctgcgtggtgagccactcggtgctggacgccttccgcgcgcactgcccgcgcctgcgcacctataccctcaagctcacgcgcgagccgcatccctggaggcctacgctcgtggcgtgattgggcgacttctctcccccgtccccgtggacgtaagcgctctgagagggaacggggggggtgtccaggcgcgccccgagtgctagtgccttcttttgggattgttgccccccgggtctttaccgagttgggaactgtgatggcatcgggaccagtcctgggcgccctgagaccactcgctgctctcaccctctgcagacgccccacccgctcggtcctggacacactgcccccctctcttgcctccacccctctgcggactctgcagctccgcggccccggcgcagggagagggagggcacgggcgcgggccgggcctcaagggtgagtgtgaaataaacaaatcctgcagtgtttctgcgtcctattaaaggcggggtcggatctgaaagggaaggacagggaacgcgcggggtaccggaggagccatcccggcagaggttgggtttcctcaagagcctctggacgacacagctgcggggggtcagggtcggggcactcacacccttggaatgactacgtcccggggttcggcgggagggggcgtgcttccctgcccccccttcctatctgcttgccctgcctggggcttcactgtgcctctggccattaccttctaggacttgcccagcccacaccaggtcgcgcaccggcgatttctcctgtagaacaaagaaggaaatagagggaccgagaggggtgggactcgaacccaagtctcccactcatctcaccccaccccaccccactccaccccaccccacccctccactccactccactccacacatcccatccagccagccttttctgcctgctggtgcctcggccgctgtccgagccccgccccgcgggcttgcacgtggcccccgcctgacccggcgccccggggcggagtagggcggagcgggcggcaaacgcagcactttccgcggctttgacgagcccgcagcggccgggcccgagcgcagagccgggccgagactgcaccatgcaggaagcgccagctgcgctgcccacggagccaggccccagccccgtgcctgccttcctcggcaagctatgggcgctggtgggggacccaggcacagaccacctgatccgctggagcccggtgagggccggggcccctcgattccccctgtggtcccggggtccctccacgtcagtgaacacccatgcccgcccaaccccctcctgagactgggccgtggatccccggatttggccattcagagaagttcaccttggagggggtgtgcgagaggggggtttcctctgcggccgaagaagggttaggagcctgccttctgaagacctagagtccgagggaccttcgag

SEQ ID NO: 127363 - DNA, 271 bp, Homo sapiens
  chr16:67199319-67199590
  hyper
gagcatgagtgtgtgcgcgcgctggagcgcaggactggccgtgagcgggcaccgctcaccctcctggtctccgcccgcacggtgggcgggcggcgttcttggtagagcgggaccagtttcctcgtaagcgaccagagccgtttcgccaaggaagtgctgccccagtatttcaagcatagcaacatggcgagcttcgtgcgccaactcaacatgtgtgagtccctacggccgggcggggagcggggatgggggactcggtgccggggatggg

SEQ ID NO: 127364 - DNA, 2 bp, Homo sapiens
  chr16:67199959-67199961
  hyper
cg

SEQ ID NO: 127365 - DNA, 31 bp, Homo sapiens; identical to SEQ ID NO: 10739
  chr16:67203649-67203680
  hyper

SEQ ID NO: 127366 - DNA, 30 bp, Homo sapiens
  chr16:67203747-67203777
  hyper
cctggcgccccctatcgggggtgagcgaag

SEQ ID NO: 127367 - DNA, 804 bp, Homo sapiens; identical to SEQ ID NO: 53179
  chr16:67204017-67204821
  hyper

SEQ ID NO: 127368 - DNA, 30 bp, Homo sapiens
  chr16:67207849-67207879
  hyper
gagacaggacagagcgtctggagaggcagg

SEQ ID NO: 127369 - DNA, 30 bp, Homo sapiens; identical to SEQ ID NO: 10741
  chr16:67208232-67208262
  hyper

SEQ ID NO: 127370 - DNA, 30 bp, Homo sapiens; identical to SEQ ID NO: 53181
  chr16:67212442-67212472
  hyper

SEQ ID NO: 127371 - DNA, 30 bp, Homo sapiens; identical to SEQ ID NO: 10742
  chr16:67217709-67217739
  hyper

SEQ ID NO: 127372 - DNA, 153 bp, Homo sapiens
  chr16:67218040-67218193
  hyper
ccaggcggccagggcggcggagactcttgctcacggcctgggcgcggagacgtgggggcgtagcccgcggcctcgggaacgcagtctgcacagagggcagatgcctgcataggcggggcgcagcccgtgtaccaggacgggagccaggatact

SEQ ID NO: 127373 - DNA, 30 bp, Homo sapiens; identical to SEQ ID NO: 53184
  chr16:67218569-67218599
  hyper

SEQ ID NO: 127374 - DNA, 102 bp, Homo sapiens; identical to SEQ ID NO: 53185
  chr16:67225900-67226002
  hyper

SEQ ID NO: 127375 - DNA, 30 bp, Homo sapiens
  chr16:67260812-67260842
  hyper
ccaaagctcaggaccgcgagggcggggcct

SEQ ID NO: 127376 - DNA, 106 bp, Homo sapiens
  chr16:67261056-67261162
  hyper
gtgcttagtgattgcggtttcggtcgctctcccgtgtttcccgggctgggtatttgcctcgcaccatggcggtaaggaggatggatagggcggggtccgcaccagc

SEQ ID NO: 127377 - DNA, 216 bp, Homo sapiens; identical to SEQ ID NO: 10744
  chr16:67280007-67280223
  hyper

SEQ ID NO: 127378 - DNA, 75 bp, Homo sapiens; identical to SEQ ID NO: 10745
  chr16:67280818-67280893
  hyper

SEQ ID NO: 127379 - DNA, 458 bp, Homo sapiens; identical to SEQ ID NO: 10746
  chr16:67281139-67281597
  hyper

SEQ ID NO: 127380 - DNA, 30 bp, Homo sapiens
  chr16:67283039-67283069
  hyper
gcacgaggtggaggcgccctacctggtggc

SEQ ID NO: 127381 - DNA, 30 bp, Homo sapiens; identical to SEQ ID NO: 10747
  chr16:67360790-67360820
  hyper

SEQ ID NO: 127382 - DNA, 297 bp, Homo sapiens; identical to SEQ ID NO: 53191
  chr16:67427324-67427621
  hyper

SEQ ID NO: 127383 - DNA, 200 bp, Homo sapiens
  chr16:67433367-67433567
  hyper
agagggggcacagcgcgattggccggctcattccccgctctgcggcccggccggtcggggtggttgagtggggtctgtggagggaccaagcgccaggcctgagacagccccgagcgaggcgacgaggagcgcgcgcgccctctgcaggcgctgcggggtgggtcccctggaggaggcagcgctcccgaagagctggggga

SEQ ID NO: 127384 - DNA, 30 bp, Homo sapiens
  chr16:67449922-67449952
  hyper
ctaaaaggaagccccgcgctctgccggggc

SEQ ID NO: 127385 - DNA, 131 bp, Homo sapiens
  chr16:67464692-67464823
  hyper
tgtgctcacctgagcgcggcggcttggcggccccgggcgtgtgggtgggggcgcggcggagagctgaggccgggcacccgggctggaccgacgggccctctcccaagcaccgcccgcagccaggcggctcc

SEQ ID NO: 127386 - DNA, 8 bp, Homo sapiens
  chr16:67464885-67464893
  hyper
cggggcgg

SEQ ID NO: 127387 - DNA, 346 bp, Homo sapiens; identical to SEQ ID NO: 53194
  chr16:67465266-67465612
  hyper

SEQ ID NO: 127388 - DNA, 30 bp, Homo sapiens; identical to SEQ ID NO: 53195
  chr16:67515329-67515359
  hyper

SEQ ID NO: 127389 - DNA, 202 bp, Homo sapiens
  chr16:67563141-67563343
  hyper
gggccctggcacgcgcgctccctgggagcccttgctgccttcgccgcaggggaggctgggctggaaatggggagggggcgacgaagggtgcgggccggcctaggagctgagctaatcctcctagctctaggggccggcctaagcggctttgtggccggccccgaggtgaccgagcctgggctggagccgggctctccgccca

SEQ ID NO: 127390 - DNA, 66 bp, Homo sapiens
  chr16:67563575-67563641
  hyper
cccagccagttctaacgtgtgtccaggctggccgccccagcacctactgtgcgcagcctcgtgtaa

SEQ ID NO: 127391 - DNA, 146 bp, Homo sapiens; identical to SEQ ID NO: 53196
  chr16:67564102-67564248
  hyper

SEQ ID NO: 127392 - DNA, 30 bp, Homo sapiens; identical to SEQ ID NO: 53197
  chr16:67564457-67564487
  hyper

SEQ ID NO: 127393 - DNA, 725 bp, Homo sapiens
  chr16:67571278-67572003
  hyper
gggaaccccagtcaccggtcccgccccatccaggcgggctgagtcaggcggcaggaactgggcggggggcggcgccgggaggagccgaagccgagccagagccgctgggagcgagcccggagcccagccgggcggctcgaagtggccagggccggaaggtccgcggggggcgagcgcgggtcgggggccgtcccggacccaccatgaacaccaagaagagaggtaggacccagctcggggctgcgaaagctcagggactggccccaggggaagcaggccgggtttgggggccaggagtgtgtgtttcgccgaagcggggtgggggtctgccgaggagctctccccgccgatgccggggtggaggcgcacgtccgtgactcagtttccaggtgggagcctcaggaaagaggagggggcggggcccttctcggcatcgcgcccagctctgggaatccccctgcctggagggcgccgggacgcccgggccggtgggggctgggggcagcaggtcacgctggcaggcggggggcgggcgacaaacccgcaccggctgggcctgtcgggcagctccgcagggctccgagcgtggccccgccccgccccgtgacctccttgggctcccggggtggggggccccgagctccgggtgccctggggggggaaatcgggggcagggctggggaggctgccccgcccccgggtaaacaggcgcttccgcacattct

SEQ ID NO: 127394 - DNA, 30 bp, Homo sapiens
  chr16:67595854-67595884
  hyper
acagcccttccagtcgtcgctcgcgggcac

SEQ ID NO: 127395 - DNA, 418 bp, Homo sapiens
  chr16:67678708-67679126
  hyper
tggaggggaccagccccggtgggccgcggggatccccaggcaggcagcgtcccctggtgttcgcggcagggactgcggggcggggtggaagccgggggcaaggacccgctggaggcccgccacacccgcgaccctcccggccacgccactgcccaccccgacgtctaccctggcggagaagctcctgggcgacggggcgggcgggcaggtgggactcggcccccctcccacaaccccgctcccgggcaagctctcgagccgcgaggccggggcggggaggggccgggccgggggcggcctggcaggaagcggcgcgcaccttccgccgccggaggagcaggtggctgccgtgcgggtctgggccccaggcttcctgtgtgcgcgctcgtcctctgctgtttcccgccggagctcgttg

SEQ ID NO: 127396 - DNA, 30 bp, Homo sapiens
  chr16:67693604-67693634
  hyper
cgcgccgccctcagcgacctggacatgaac

SEQ ID NO: 127397 - DNA, 650 bp, Homo sapiens
  chr16:67700712-67701362
  hyper
gcttgtagtttcggccgagggtgggctccgcggtcgccggtttctcttcccagctctgccctcgcttgctggccggtctccggggtcagcgcggggccaccatccagccccttggggcccgccccaagcagctgtcgaggacgcactcagcctgcgcagccatggcctcggcaggggcggagaggcggccgggggtccaggaggcgacggtcgtggggcagggacagctcacggaggagcccggcagcgctcagacctccgaggtgaccgtcaggctgtttaaccttcaaacacagggccgcagcgctctgagaggtggaactgagcgccccgacccgctaactgccaggctgggccctccaggcggggaggggcacaggctggtgtccttattcccgtttcggtgtctaacgttaggtgttcagtgacggatccctatgtcctttgcccggccatggtgaccgatggcctgtgtgtcatctctagtgtccagtggcgggagaccagttcctggtgcctgcccatgaggcccgcggaacccagagtgaagaccagcgcccagcaggcgcagcttcggagtcggagctccaggaggaaggacccaagctgggggaggagcggcccaagccgcatgccggggcgctagagga

SEQ ID NO: 127398 - DNA, 31 bp, Homo sapiens; identical to SEQ ID NO: 10754
  chr16:67707950-67707981
  hyper

SEQ ID NO: 127399 - DNA, 165 bp, Homo sapiens
  chr16:67753295-67753460
  hyper
gcgctgggaggggccgtagccgggagctgcgcatgctcgctttttgggggcggagcttaagcagcctggctaggaggctcaggttattcatttccggcggcggaggcggcagtttcctaagcttggcttctctccggtccgctgaccggcgtcagggaccaggtt

SEQ ID NO: 127400 - DNA, 13 bp, Homo sapiens
  chr16:67840663-67840676
  hyper
agatgtagtataa

SEQ ID NO: 127401 - DNA, 30 bp, Homo sapiens; identical to SEQ ID NO: 53204
  chr16:67867209-67867239
  hyper

SEQ ID NO: 127402 - DNA, 85 bp, Homo sapiens
  chr16:67867773-67867858
  hyper
cgggccctcctaaccgcccagccagctgcaggctccgccttcccgccgccacagttaatgtaactctcgcgatgctcccgcacag

SEQ ID NO: 127403 - DNA, 40 bp, Homo sapiens; identical to SEQ ID NO: 53206
  chr16:67876116-67876156
  hyper

SEQ ID NO: 127404 - DNA, 30 bp, Homo sapiens; identical to SEQ ID NO: 53207
  chr16:67880239-67880269
  hyper

SEQ ID NO: 127405 - DNA, 379 bp, Homo sapiens
  chr16:67881197-67881576
  hyper
gggccttagggccccgccccgtctagcctggcccggcctgcgcgagccccgcaagctctgcaggctggctagcgggcagaccccagccccacgtcctgctacccacctacgaaggatccggggatgggcagcgccacccggcccgctccagagtcagcatgggtaagggcgcccgcctgccgcagccggggcttgggcccctcaccctgttcccgaccatagcccggccggggtgtaggtgaacgccccctccttgtctgcccctcggaagtgtacgtttcttaccgcgccctttgtggagcccggactggagttctcgcagggagggcagggtcagggaatatgaggcgggaggggattccacgggagactttatccc

SEQ ID NO: 127406 - DNA, 93 bp, Homo sapiens
  chr16:67907295-67907388
  hyper
gcgcgcgtctgaaccgccattggggcccacagctcccttaggactagctctggatcctcccggcgggtaagggtggacggggattgactgtgc

SEQ ID NO: 127407 - DNA, 30 bp, Homo sapiens
  chr16:67926947-67926977
  hyper
cgtctcgcaggcagcggtcaagttactttg

SEQ ID NO: 127408 - DNA, 206 bp, Homo sapiens; identical to SEQ ID NO: 53209
  chr16:67969395-67969601
  hyper

SEQ ID NO: 127409 - DNA, 30 bp, Homo sapiens
  chr16:67969808-67969838
  hyper
aatggccccaaccccgtaactacccctgcc

SEQ ID NO: 127410 - DNA, 30 bp, Homo sapiens
  chr16:67970381-67970411
  hyper
tgcatttctggaaacggaggagggcgccca

SEQ ID NO: 127411 - DNA, 36 bp, Homo sapiens
  chr16:67970753-67970789
  hyper
gtacttcctgctttcgctttcgcctttacccttcct

SEQ ID NO: 127412 - DNA, 30 bp, Homo sapiens; identical to SEQ ID NO: 53211
  chr16:68002894-68002924
  hyper

SEQ ID NO: 127413 - DNA, 77 bp, Homo sapiens
  chr16:68057150-68057227
  hyper
gcgccgcgacctcgcgtacggtggctggcgaggctcagtacggtgtgtggagctggagcaccgtgaggaagaagcga

SEQ ID NO: 127414 - DNA, 8 bp, Homo sapiens
  chr16:68057764-68057772
  hyper
ctactccc

SEQ ID NO: 127415 - DNA, 30 bp, Homo sapiens
  chr16:68113728-68113758
  hyper
tgagaagcaaacaaacggctaccgcatctc

SEQ ID NO: 127416 - DNA, 30 bp, Homo sapiens
  chr16:68114106-68114136
  hyper
tgcagataaggataccgcactacccactgc

SEQ ID NO: 127417 - DNA, 342 bp, Homo sapiens; identical to SEQ ID NO: 53214
  chr16:68118297-68118639
  hyper

SEQ ID NO: 127418 - DNA, 311 bp, Homo sapiens; identical to SEQ ID NO: 10758
  chr16:68118759-68119070
  hyper

SEQ ID NO: 127419 - DNA, 72 bp, Homo sapiens; identical to SEQ ID NO: 10759
  chr16:68269812-68269884
  hyper

SEQ ID NO: 127420 - DNA, 111 bp, Homo sapiens; identical to SEQ ID NO: 10760
  chr16:68269896-68270007
  hyper

SEQ ID NO: 127421 - DNA, 281 bp, Homo sapiens; identical to SEQ ID NO: 10761
  chr16:68270022-68270303
  hyper

SEQ ID NO: 127422 - DNA, 30 bp, Homo sapiens
  chr16:68270562-68270592
  hyper
cggcgggaacatcagcgttgttagagctgt

SEQ ID NO: 127423 - DNA, 638 bp, Homo sapiens
  chr16:68270866-68271504
  hyper
tgcgagcgctctggccgatggggggctagcgttgagcgtgtgtgcgcgcatgcgggctgcagatcctcccttttccatcccgcacctacaacccaattgacagccccgcatttggggctcccattcctccctttgcccagtggagcttggtgaggctcctttatggcgcgtttcccggccgttccttactttcccaaactctcccagggaggtgactgagaaactgaataagtgactgagaaactgaataatccagcaggaaggagggggctccagcgtggcgggaactgagtcacgcggttgcctagcccgactcgagactgagacgggagccgcaccacgcgctttcggacaaggagggtgctgcggcccggcccctggacaatggagagagcggggcacccgggcgcatcaccagagctcatgcccgggaaaggggcgaggcccggggggagagagctcagcgtagctccacttggcagctaaagaaacaggcgcccgggacggaaatgactcgcgcccggacacggcgacagggagagcatgggaagtgcttccttcgcccggcgggttcgagcgagtagcactttactttccctacaggtggaggcgggccttggtgcgcggctgtccatctc

SEQ ID NO: 127424 - DNA, 30 bp, Homo sapiens
  chr16:68278954-68278984
  hyper
ccaagtgagagctgcgcagcgtggatttcg

SEQ ID NO: 127425 - DNA, 30 bp, Homo sapiens
  chr16:68279209-68279239
  hyper
tggccggggggatgcgggggatgcgggcgg

SEQ ID NO: 127426 - DNA, 30 bp, Homo sapiens
  chr16:68298243-68298273
  hyper
tgggggctgtctggcgtccacgctcacgtt

SEQ ID NO: 127427 - DNA, 58 bp, Homo sapiens; identical to SEQ ID NO: 10763
  chr16:68298828-68298886
  hyper

SEQ ID NO: 127428 - DNA, 567 bp, Homo sapiens
  chr16:68344574-68345141
  hyper
atcgggtttcgtaccggctgcacccgaagatgccctccacaccagctgcaccacgcccaatacctgggagcacacagtggccaccaagtggaagacattattctccgccgctctctccaaaccctccgacgtcttctgtgccgctgactcgaccgcgtcgctccggaggcgtttacaagcgagcacaagagcctccgccggctccgcactgcgcttccgcttcacccggagtacagcggtcctggcggcctccatagtggctgccgctgagcactgtgggagctcgcggggtgtgatgggatagctttccagttctgctttaggacccgccccccagcacgctcctcgacgctgcgaggtcccgccccgcgtgctggccgcggtaaaagtggtagcagcggaggcgagcggagggtttcccgcggcgggtgaggcgctgggtatgctgggaaggtggggtcgctttggggttctgtgtgcagcgagcatggtgtccttggcaccagggtttcggcagaggagcctagcgtgggcctacttggactcctccgcgtggggcagctcggg

SEQ ID NO: 127429 - DNA, 810 bp, Homo sapiens; identical to SEQ ID NO: 53222
  chr16:68481955-68482765
  hyper

SEQ ID NO: 127430 - DNA, 409 bp, Homo sapiens
  chr16:68503999-68504408
  hyper
ctaaaactttccaaaatgctgcgttctgtgcagttagtggtagcgtttgccagaaaaaaataatagattgtaaaggaagcaacacggaacaaccacgtttttgttattcgaaatgcagctacacgtgtttacagtccttaaccatttcatctgacagcctggggagacagacttctaatttgtgttttgataaactgagagtgacagagcggttgttggccctgcttggaggtggagtgatggtgtggtcagaagggaagccggagggaagttacactcgtggggtgtgtgttatgtgacctttgtttaatacacgttcttatttgatcttcacaaccatgccacttggcaggtggggaaactgaggtgcagggcagggtagtcatttggccatcgccacaaaggggag

SEQ ID NO: 127431 - DNA, 270 bp, Homo sapiens
  chr16:68544136-68544406
  hyper
gtaagggagagggaggaggctcgtggaccaagaggacgcactcggatctggagttctccggcccggacacccacgggccaccgcgtcgaggcagcgcgagccccgggcgccccctgcaggttgtacgggcctcagctgcgcagcgcagacggaggagggcgctggcggttaagaactcctacttgtcaaccggaaaaacatcccccataaaaaaacggtcaaagggccgggacagaagcatttgaaatgaaacacaagggccgggcgcgg

SEQ ID NO: 127432 - DNA, 92 bp, Homo sapiens; identical to SEQ ID NO: 53224
  chr16:68564223-68564315
  hyper

SEQ ID NO: 127433 - DNA, 219 bp, Homo sapiens; identical to SEQ ID NO: 53225
  chr16:68573157-68573376
  hyper

SEQ ID NO: 127434 - DNA, 21 bp, Homo sapiens
  chr16:68631269-68631290
  hyper
ttttttttttttgagacggag

SEQ ID NO: 127435 - DNA, 202 bp, Homo sapiens; identical to SEQ ID NO: 10767
  chr16:68676402-68676604
  hyper

SEQ ID NO: 127436 - DNA, 84 bp, Homo sapiens
  chr16:68676841-68676925
  hyper
cgtggtccacccccagcctcagtcccagccccagctgctgggctcacccgccggctaagggaatgctcccgagataccagatgc

SEQ ID NO: 127437 - DNA, 396 bp, Homo sapiens
  chr16:68678666-68679062
  hyper
agttgtatccaattcagaaacgcggtccttcgggacctgctagttttataccccggaggatcctccccggcgggctggcacgggaggtggagaaagaggcttgggcggccccgctgtagccgcgtgtgggaggacgcacgggcctgcttcaaagctttgggataacagcgcctccgggggataatgaatgcggagcctccgttttcagtcgacttcagatgtgtctccacttttttccgctgtagccgcaaggcaaggaaacatttctcttcccgtactgaggaggctgaggagtgcactgggtgttcttttctcctctaacccagaactgcgagacagaggctgagtccctgtaaagaacagctccagaaaagccaggagagcgcaggagggcat

SEQ ID NO: 127438 - DNA, 177 bp, Homo sapiens
  chr16:68679166-68679343
  hyper
cgctcacctggcctcctcccgctggctcccgggggctgcggtgctcaaaggggcaagagctgagcggaacaccggcccgccgtcgcggcagctgcttcacccctctctctgcagccatggggctccctcgtggacctctcgcgtctctcctccttctccaggtactccacagcctcg

SEQ ID NO: 127439 - DNA, 903 bp, Homo sapiens; identical to SEQ ID NO: 53231
  chr16:68679362-68680265
  hyper

SEQ ID NO: 127440 - DNA, 1019 bp, Homo sapiens
  chr16:68771019-68772038
  hyper
aggctagagggtcaccgcgtctatgcgaggccgggtgggcgggccgtcagctccgccctggggaggggtccgcgctgctgattggctgtggccggcaggtgaaccctcagccaatcagcggtacggggggcggtgcctccggggctcacctggctgcagccacgcaccccctctcagtggcgtcggaactgcaaagcacctgtgagcttgcggaagtcagttcagactccagcccgctccagcccggcccgacccgaccgcacccggcgcctgccctcgctcggcgtccccggccagccatgggcccttggagccgcagcctctcggcgctgctgctgctgctgcaggtaccccggatcccctgacttgcgagggacgcattcgggccgcaagctccgcgccccagccctgcgccccttcctctcccgtcgtcaccgcttcccttcttccaagaaagttcgggtcctgaggagcggagcggcctggaagcctcgcgcgctccggaccccccagtgatgggagtggggggtgggtggtgaggggcgagcgcggctttcctgccccctccagcgcagaccgaggcgggggcgtctggccgcggagtccgcggggtgggctcgcgcgggcggtgggggcgtgaagcggggtgtagggggtggggtgtggagaaggggtgccctggtgcaagtcgagggggagccaggagtcgtggggacgatcttcgagggaaggagaggggcatccgtagaaataaaggcacctgccatgccaagaaaggtcgtaaataggagtgagggtcccggggataagaaagtgaggtcggaggaggtgggagcgcccctcgctctgaggagtggtgcattcccggtctaaggaaagtggggtactggagaataaagacatctccaataaaatgagaaaggagactgaaagggaacggtgggctaggtcttgagggggtgactcggcggccccctcccgggagttcctgggggctcggcggccgtaggtttcggggt

SEQ ID NO: 127441 - DNA, 30 bp, Homo sapiens; identical to SEQ ID NO: 53233
  chr16:68820930-68820960
  hyper

SEQ ID NO: 127442 - DNA, 30 bp, Homo sapiens
  chr16:68877402-68877432
  hyper
gatcgatttggccccgccccatagtgtgcc

SEQ ID NO: 127443 - DNA, 30 bp, Homo sapiens
  chr16:68877863-68877893
  hyper
tgggctctgtcaggcggggccgttatttca

SEQ ID NO: 127444 - DNA, 1079 bp, Homo sapiens; identical to SEQ ID NO: 53234
  chr16:69139466-69140545
  hyper

SEQ ID NO: 127445 - DNA, 87 bp, Homo sapiens
  chr16:69166892-69166979
  hyper
gggcgtcggggggacggggtagggtaagtgacagacgtcagaccaggcagccagattaagtcaaaccctgtcgtttcttcctcaaga

SEQ ID NO: 127446 - DNA, 30 bp, Homo sapiens
  chr16:69345684-69345714
  hyper
cgccccggtaccgccgtggggatcagcctc

SEQ ID NO: 127447 - DNA, 90 bp, Homo sapiens; identical to SEQ ID NO: 53235
  chr16:69373054-69373144
  hyper

SEQ ID NO: 127448 - DNA, 206 bp, Homo sapiens
  chr16:69373483-69373689
  hyper
cggaccacaaggggcgctgactccgaacttaggacaggaagaaacaggcacatttccggtctctatgctttctcatccggccggcttgctttcccctgcggtcgtccagactattgggcgctagcgagacgaactattggtacggggctagagaggaaggctttgggattgccggggagcagcgagcgaccgacttccgtttccag

SEQ ID NO: 127449 - DNA, 30 bp, Homo sapiens
  chr16:69373925-69373955
  hyper
aactgctggtggaccggcccgatggcacct

SEQ ID NO: 127450 - DNA, 30 bp, Homo sapiens; identical to SEQ ID NO: 53237
  chr16:69419542-69419572
  hyper

SEQ ID NO: 127451 - DNA, 256 bp, Homo sapiens
  chr16:69458314-69458570
  hyper
tggagggggctgaacgaccctaattggttagttggacctcgaaccagactttcatctggaggatcgggcgaggagtgggcgggatttcgaactgagccactcccttcattggtgaaaagaaaacgaaccaggaactattcggaagtgtgattggctgttgctaggaaccgtctcaaggccttatgggccctggttacggaagccgaggaaggctgagcgcgggctctcaaggaaagtagtcgcggaatctcagtta

SEQ ID NO: 127452 - DNA, 30 bp, Homo sapiens
  chr16:69600017-69600047
  hyper
ctccacctcgccatcgtttcctcggtcctc

SEQ ID NO: 127453 - DNA, 30 bp, Homo sapiens
  chr16:69600776-69600806
  hyper
tgtttttgcgccgtcgttccaccccctctc

SEQ ID NO: 127454 - DNA, 118 bp, Homo sapiens
  chr16:69760285-69760403
  hyper
ccagtgctcgagagacgaccgccaagcaccccgccctttgcagcactcaccgaccatggctctggtgcagtccggggcgctgattggctgggctcgtggttgccggggcgaccctggc

SEQ ID NO: 127455 - DNA, 30 bp, Homo sapiens
  chr16:69788550-69788580
  hyper
cagcgagccgcctgcgtgtggccttgtccc

SEQ ID NO: 127456 - DNA, 30 bp, Homo sapiens
  chr16:69796150-69796180
  hyper
aggcctaggtggcccgcacctgcgagcctg

SEQ ID NO: 127457 - DNA, 30 bp, Homo sapiens
  chr16:69796775-69796805
  hyper
cgagactttgatgacggtcccattcagttt

SEQ ID NO: 127458 - DNA, 30 bp, Homo sapiens
  chr16:70284878-70284908
  hyper
cttccaggaattctcgacgcaaactggagg

SEQ ID NO: 127459 - DNA, 30 bp, Homo sapiens
  chr16:70285940-70285970
  hyper
gagggagaacggcccggtcccagttgtgca

SEQ ID NO: 127460 - DNA, 30 bp, Homo sapiens; identical to SEQ ID NO: 53239
  chr16:70323034-70323064
  hyper

SEQ ID NO: 127461 - DNA, 30 bp, Homo sapiens
  chr16:70323473-70323503
  hyper
aaagtgccccgccgcgccttacctcatgag

SEQ ID NO: 127462 - DNA, 95 bp, Homo sapiens
  chr16:70333387-70333482
  hyper
accctgagctggctttgtttacgcagccgcctccgcgttacgtaagcgcaggtgagtgctcctatcggtaaagcgctcagctgcctgtctgtctt

SEQ ID NO: 127463 - DNA, 65 bp, Homo sapiens
  chr16:70380543-70380608
  hyper
taaaataaaataaacgttggcttatttcagtgtgaagtaaggcaataaacggagggctaacagtt

SEQ ID NO: 127464 - DNA, 30 bp, Homo sapiens; identical to SEQ ID NO: 10775
  chr16:70414252-70414282
  hyper

SEQ ID NO: 127465 - DNA, 30 bp, Homo sapiens; identical to SEQ ID NO: 53242
  chr16:70414801-70414831
  hyper

SEQ ID NO: 127466 - DNA, 458 bp, Homo sapiens
  chr16:70415350-70415808
  hyper
actggacacagcgccggaagttttccttgagtcacatgattggctgggagaaacagaagctccgcccgaccgcagcgcagattggtgccaggcccggccggtcccccagtctcgtgattggcggggcacagcagacgcccctgggctgcagcatgattggtcgcgggttgctggtcctgggtcccgggccggagccccggtgcccgatagatgggccggaagggtcgcggcgaggcccggctcagttgccccggtagacttcgatcttgctggccttggccagcatgtcgatgatgtgggcctcgaagtccgcgtcgtgcacgccagtcttccggaactcgcccgcgtaccggttgttctcccagtagtggtgccagttgccccggctgtcggccccgaacccgtacacgttcacctgcggggaagcgcagcggagcgtcaccccaggcggggacctg

SEQ ID NO: 127467 - DNA, 377 bp, Homo sapiens; identical to SEQ ID NO: 10776
  chr16:70472226-70472603
  hyper

SEQ ID NO: 127468 - DNA, 362 bp, Homo sapiens
  chr16:70473301-70473663
  hyper
ctcagggggtccgccgtgcaggaggggagacggagggggatgggaagtcttcattctcagaaggccgggctccagcggctggagcagacggccccgagccgggttggatacgtgggttcctagggaggtgcacactagccgaggacgcctctcagatgctgctgtggccagctgctgacgagcccggccggagggcactgttcccactcgcgctctcaaagagccgcgacctgaggccagcttggcttcacgcccgggctctgaaagcccgagctgcggtggggccgctgcgccctggcctgaggggagagagaccccatcagcggtgcgagcgggggtttggcctcgctggactttgtgtt

SEQ ID NO: 127469 - DNA, 30 bp, Homo sapiens
  chr16:70488047-70488077
  hyper
atggcagctgcttccgcttgggcaaagcgt

SEQ ID NO: 127470 - DNA, 30 bp, Homo sapiens
  chr16:70557269-70557299
  hyper
ccgcacctcctcgccgcagagccgttcgta

SEQ ID NO: 127471 - DNA, 1199 bp, Homo sapiens
  chr16:70719171-70720370
  hyper
gagttaacggttctccgctttattattttttcctgctttggcggtgacagcattgtctgggctccggggccgtgggggaacatggtggtggaagggggcggaggccggtaagaccccggactcgttaaagggccctagagtcggtcctggatccaaaccccattcatggtttggcggtctggggcgcagggagcctgcgtgtgcacaggctcgggtcaggaccccacggggccaccgcgggcaccgcacggacaccccgacacacgagcacccacacccccagacgggcacccggagacacgggcgcccagcagacgcaggcaggacgcgctcagacaaggacacacagacaccgcggcgcgcggccacacgaggctcggccacccgccgccacgcgtccccggggggtcccgcacccgtcgccgcgcgcccggccccgccgcgccccggttaccttcatgtcgttgactatggcctggaagagcccgcccagggcgccgcactccttctccgccgtctccatgctctggctgggccgggccgcggcggcggctaggcgcacggagcgcggggagcagcgcaagggagggggccaggccgcgcgggcgctcgctccgaggccgggccgggcctcccgcctccaggctgcgctcagcggccggccgcgccgcgctccggggtcgcgggcctccggcgggcggcgcgggccatgtcgcagcggggctggcgggcggcgcggggggcgcggcgcgggcagctcgcggcgcagcctcggcgcggggactgacggcggcggtaatccgagccgccgaggatcgggcgtcacgtgggcgcggcggaggggggaccgcgaggagggagggaaggagggcgggccgcgcgggagggggctgtgggaacggccgcgcgggcgcaggcccattcacggccagaaaccagggctttgaaatccgagcccgggcgctgccagactggtccggcgagcggggccgacgggcgcgggcgccaccgagggtcggggggcggcgctgggcggggcccgccctgcccacgcaggagcgggactggcggttgggcctcggcccccgggcaggggctccacgatatcttctggcctttggtctggggcggggggcttctcgcgcttctaaagacaggcagtgggtacagtggcgggatggggtcggtgcatgggctgg

SEQ ID NO: 127472 - DNA, 120 bp, Homo sapiens
  chr16:70834930-70835050
  hyper
ctgccacgctccgccgcctcgccctggaacccgggcccggaccccgctccagcacacctgaccctggccgcttaacaactcccgcccggcactagcgggactcacgagacagcggccatg

SEQ ID NO: 127473 - DNA, 34 bp, Homo sapiens; identical to SEQ ID NO: 53248
  chr16:70835270-70835304
  hyper

SEQ ID NO: 127474 - DNA, 122 bp, Homo sapiens
  chr16:71264523-71264645
  hyper
ccaactcacagaccccgccgccgctgaggggctccatacccagcttgaagccgcccgcactctccatgcgccgcccgagctgttgccgtccgttgccacggtaaccacggagccgcacagcc

SEQ ID NO: 127475 - DNA, 30 bp, Homo sapiens
  chr16:71322930-71322960
  hyper
ccactccagaggcccggtccctgacctgga

SEQ ID NO: 127476 - DNA, 131 bp, Homo sapiens
  chr16:71323302-71323433
  hyper
ctcaagtcccactgcgcacgcgccctgtaggccgggccggagtcacgtgcgccaacgttacgcacgccggcgactctcgcctcgcctaggcctcagctccctaggttttgcttcgcggagtacagaagctg

SEQ ID NO: 127477 - DNA, 30 bp, Homo sapiens; identical to SEQ ID NO: 53250
  chr16:71392733-71392763
  hyper

SEQ ID NO: 127478 - DNA, 132 bp, Homo sapiens; identical to SEQ ID NO: 10779
  chr16:71459956-71460088
  hyper

SEQ ID NO: 127479 - DNA, 231 bp, Homo sapiens; identical to SEQ ID NO: 53252
  chr16:71460270-71460501
  hyper

SEQ ID NO: 127480 - DNA, 30 bp, Homo sapiens
  chr16:71460736-71460766
  hyper
atggtaaggtcaactcgcgaatgaatcacc

SEQ ID NO: 127481 - DNA, 30 bp, Homo sapiens
  chr16:71495683-71495713
  hyper
agcctgggagcacacggtccatactcggga

SEQ ID NO: 127482 - DNA, 32 bp, Homo sapiens; identical to SEQ ID NO: 53253
  chr16:71496368-71496400
  hyper

SEQ ID NO: 127483 - DNA, 30 bp, Homo sapiens
  chr16:71518217-71518247
  hyper
tggggtttgggcggcgtcgagaacagaggc

SEQ ID NO: 127484 - DNA, 30 bp, Homo sapiens
  chr16:71518603-71518633
  hyper
tgtggttttactcccgggaggagtttccac

SEQ ID NO: 127485 - DNA, 30 bp, Homo sapiens
  chr16:71650218-71650248
  hyper
agcaggatatgtccccgctttcatgcagcc

SEQ ID NO: 127486 - DNA, 930 bp, Homo sapiens; identical to SEQ ID NO: 53254
  chr16:71659877-71660807
  hyper

SEQ ID NO: 127487 - DNA, 31 bp, Homo sapiens; identical to SEQ ID NO: 10783
  chr16:71668363-71668394
  hyper

SEQ ID NO: 127488 - DNA, 30 bp, Homo sapiens
  chr16:71758023-71758053
  hyper
cctccactgcccgccgccctaggcttggag

SEQ ID NO: 127489 - DNA, 142 bp, Homo sapiens
  chr16:71841909-71842051
  hyper
aacattaccctgagcgagtggttcgatggatctcctacaccgagtcctaaccgggaaacacaatcaaccgaaccgtcccgactctttcaggcaatcaggaagaccgggagaattattagacgctgacgtccgcagggccagg

SEQ ID NO: 127490 - DNA, 30 bp, Homo sapiens
  chr16:71842278-71842308
  hyper
caagaacgctgatacgtggctcagagaaga

SEQ ID NO: 127491 - DNA, 142 bp, Homo sapiens
  chr16:71842651-71842793
  hyper
ggagtgacactcaccggcccgaaacctcgaatgaaaccagcagctccgggggcggcggcagcagtggcagcaggaaccgaacatccaaaatggcggctccctcggcctcaccaccgctaccgcaggcggagggatcctgagg

SEQ ID NO: 127492 - DNA, 30 bp, Homo sapiens
  chr16:71843053-71843083
  hyper
gagcgagaaagatccggcctaccccgtagc

SEQ ID NO: 127493 - DNA, 30 bp, Homo sapiens
  chr16:71879591-71879621
  hyper
aaatggggggtcgccgatgaccacgccccg

SEQ ID NO: 127494 - DNA, 30 bp, Homo sapiens; identical to SEQ ID NO: 10784
  chr16:71880017-71880047
  hyper

SEQ ID NO: 127495 - DNA, 188 bp, Homo sapiens
  chr16:71880266-71880454
  hyper
aaacaaggaagcgtcgcctgcagggcctcgcccctgcccccttggtgaagggtggaccccctactctctaaacgcagaattcccaatttcgagccctacccttgttggatcaaggattgcgggaccactgggagccataaccgtagtctctgacaagcttctccctttctgtcgggcgcacctctcgc

SEQ ID NO: 127496 - DNA, 30 bp, Homo sapiens
  chr16:71917138-71917168
  hyper
gagcaaagcaaactcgactgaatccaagtg

SEQ ID NO: 127497 - DNA, 30 bp, Homo sapiens
  chr16:71917981-71918011
  hyper
gagccgaggggcggcgctgcagacggacaa

SEQ ID NO: 127498 - DNA, 30 bp, Homo sapiens; identical to SEQ ID NO: 10785
  chr16:71918391-71918421
  hyper

SEQ ID NO: 127499 - DNA, 30 bp, Homo sapiens; identical to SEQ ID NO: 53258
  chr16:71928796-71928826
  hyper

SEQ ID NO: 127500 - DNA, 30 bp, Homo sapiens; identical to SEQ ID NO: 53259
  chr16:71929894-71929924
  hyper

SEQ ID NO: 127501 - DNA, 30 bp, Homo sapiens
  chr16:72127115-72127145
  hyper
agtggtcatctctgcgtgtgaacgcatggg

SEQ ID NO: 127502 - DNA, 250 bp, Homo sapiens
  chr16:72127404-72127654
  hyper
tgcctagcaaccctcgtggccccgctagcgggaaggaaaccgaacagaaaacgcacaagcgcagaaaagaaactcctggccgtcggtcggcccccgctcaacagcccaataaacggaagagcttctagtcaccgcccaccttgctcggctctgaccggaagctaggcgtcacctccgcccgtattaaagatggtcgacctttttcccctccttttcctgcccccagactagaggcgggatgtagtctctt

SEQ ID NO: 127503 - DNA, 209 bp, Homo sapiens
  chr16:72127869-72128078
  hyper
tgagcctgtctgagcgaggggtggcagcgccggcgccccagaatccgggacagaagggtcccaagagtcgcgcttggtgaggtgagagtcccttcttccttcctggcctgcccttctgtaatcatggcggctctaggcggcggatattggtcccctgctcaggtccgggccccagtttggggagttcctctgtcgtccctgtcacccac

SEQ ID NO: 127504 - DNA, 209 bp, Homo sapiens; identical to SEQ ID NO: 53261
  chr16:72699009-72699218
  hyper

SEQ ID NO: 127505 - DNA, 334 bp, Homo sapiens
  chr16:73091550-73091884
  hyper
cagcggcgcagccccgagcccccgggagcccctagtgtccagggcagagtcccctctgggcgctcgcggcgctgccagtggggcagggcggagagcgcacaggtagaggatcgcgcggccgcctcgccccctccgggaccccgtggctccgaacgggctcccgcgtcgccggcaagtcgagccccagcgcggaaggcgctcgcccggccagcggtggcggccgcggcagcagcagtggctgcgaccgcggcgactgctccgggccgggtgcgcgccccgcgcggctgctcagcccggggccccggcgcctctcggggtggggcaaagttggggg

SEQ ID NO: 127506 - DNA, 217 bp, Homo sapiens; identical to SEQ ID NO: 53263
  chr16:73091900-73092117
  hyper

SEQ ID NO: 127507 - DNA, 167 bp, Homo sapiens
  chr16:73092379-73092546
  hyper
ggcggcggcggcggcgggaaaaaaaaaagagggaaaagttgccacttacgcggttgcttctccggcggcggcggctgcagcggcgctgctggcgacggcggcggcggcgggagctggcggcgcttttaatcccgaaaagaggcgctcgggccgcggagcccatcaag

SEQ ID NO: 127508 - DNA, 30 bp, Homo sapiens
  chr16:73092808-73092838
  hyper
tgcaaagcaggcggcggcggcggctgcggc

SEQ ID NO: 127509 - DNA, 30 bp, Homo sapiens
  chr16:73093294-73093324
  hyper
acgcacacacacaccgagaagtggaatgca

SEQ ID NO: 127510 - DNA, 23 bp, Homo sapiens
  chr16:73099947-73099970
  hyper
ggggctctggctagccgggctac

SEQ ID NO: 127511 - DNA, 27 bp, Homo sapiens
  chr16:73100271-73100298
  hyper
cggagccagcgtgcgcgtccctaatgc

SEQ ID NO: 127512 - DNA, 64 bp, Homo sapiens; identical to SEQ ID NO: 53267
  chr16:73100575-73100639
  hyper

SEQ ID NO: 127513 - DNA, 30 bp, Homo sapiens; identical to SEQ ID NO: 10790
  chr16:73104801-73104831
  hyper

SEQ ID NO: 127514 - DNA, 30 bp, Homo sapiens; identical to SEQ ID NO: 10791
  chr16:74330522-74330552
  hyper

SEQ ID NO: 127515 - DNA, 98 bp, Homo sapiens; identical to SEQ ID NO: 10792
  chr16:74352095-74352193
  hyper

SEQ ID NO: 127516 - DNA, 30 bp, Homo sapiens
  chr16:74640467-74640497
  hyper
ccgaccggcgtcagcggcttccaaggccgg

SEQ ID NO: 127517 - DNA, 162 bp, Homo sapiens
  chr16:74640801-74640963
  hyper
ggcagctgctgacccgccgggccgccgcctccggcctgccctacgaaggacacaaagttggccccgggaccctggccctggctgtggacgccctggccggggagtttctcggccccggccgcgaatagcagcagcagatgcagcgccgccgacaagcggaac

SEQ ID NO: 127518 - DNA, 214 bp, Homo sapiens; identical to SEQ ID NO: 10793
  chr16:74659411-74659625
  hyper

SEQ ID NO: 127519 - DNA, 167 bp, Homo sapiens; identical to SEQ ID NO: 53272
  chr16:74700793-74700960
  hyper

SEQ ID NO: 127520 - DNA, 30 bp, Homo sapiens; identical to SEQ ID NO: 53273
  chr16:74808663-74808693
  hyper

SEQ ID NO: 127521 - DNA, 80 bp, Homo sapiens
  chr16:74808948-74809028
  hyper
ggtggttgtctgggcggacatcctcggtggcctgatcgctgctggaataacttcaactgcttccacggaggagctggccg

SEQ ID NO: 127522 - DNA, 232 bp, Homo sapiens
  chr16:74847107-74847339
  hyper
gctgggcctgggcctgggcctcgccaaggctgcggagcgcagcgccgcgcttcaccactaggtggtggacgtacgctcccagtatgagcggcgctgaccccgggagcagcatggccctttgcagcccgagctgctggaacaggctgggacacgcctgccctctcgcggccccctgcccgaggggccctgcacacccggagccgggcttggcgaagtcagtctcagaccccct

SEQ ID NO: 127523 - DNA, 41 bp, Homo sapiens; identical to SEQ ID NO: 10795
  chr16:75018962-75019003
  hyper

SEQ ID NO: 127524 - DNA, 30 bp, Homo sapiens; identical to SEQ ID NO: 53275
  chr16:75019006-75019036
  hyper

SEQ ID NO: 127525 - DNA, 46 bp, Homo sapiens
  chr16:75032743-75032789
  hyper
gtttctgtggctaacgcccagtggtcaggccgcccaggtcacaggc

SEQ ID NO: 127526 - DNA, 30 bp, Homo sapiens; identical to SEQ ID NO: 10797
  chr16:75033369-75033399
  hyper

SEQ ID NO: 127527 - DNA, 364 bp, Homo sapiens
  chr16:75033798-75034162
  hyper
ggggcaccggcgactccgagagggcgcccggcggcggagggtctgcgtccgactccacctatgcccatggcaatggttaccaggagacgggcggcggtcaccatagagacgggatgctgtacctgggctcccgagcctcgctggcggatgctctacctctgcacatcgcacccaggtggttcagctcgcatagtggtgagtccgcgggtggtggaggcctcggagggagggcgcgccggggcgccccaagccttcgcgtgcgtgccaaggtttgggaatgtagtgcacgaccgggatctgtctgcattccctttggttcccgatgccaagggataaatgggatacctaccgtctggaaactagg

SEQ ID NO: 127528 - DNA, 91 bp, Homo sapiens
  chr16:75267941-75268032
  hyper
tgtgcgcgcacacacacgcacacgtggacgcacacacacactagcacacgtggacacacacacacacacaagcacacgtgaacacacacac

SEQ ID NO: 127529 - DNA, 51 bp, Homo sapiens; identical to SEQ ID NO: 53280
  chr16:75284494-75284545
  hyper

SEQ ID NO: 127530 - DNA, 66 bp, Homo sapiens; identical to SEQ ID NO: 53281
  chr16:75284629-75284695
  hyper

SEQ ID NO: 127531 - DNA, 42 bp, Homo sapiens; identical to SEQ ID NO: 10799
  chr16:75285012-75285054
  hyper

SEQ ID NO: 127532 - DNA, 110 bp, Homo sapiens; identical to SEQ ID NO: 53283
  chr16:75285278-75285388
  hyper

SEQ ID NO: 127533 - DNA, 306 bp, Homo sapiens; identical to SEQ ID NO: 53284
  chr16:75285434-75285740
  hyper

SEQ ID NO: 127534 - DNA, 245 bp, Homo sapiens; identical to SEQ ID NO: 53285
  chr16:75299144-75299389
  hyper

SEQ ID NO: 127535 - DNA, 308 bp, Homo sapiens
  chr16:75299750-75300058
  hyper
ggggcctggcgggcagcggcgccagcgggctgggggctcgggtccgcccgcgccgctcagaggccccgcgaggggtcccggcgctttccggctcctccggctcctgagcgttcccggacgccggactgtccggccgctccagccgcgccgcgcatgcgccgcccgcgccgccccccccaccgtctccgcggccagggacgcgttaaaggtgaggaccccggacctaggcctttttctgtcggcccaacgcggcggggaggcgcggtctcctccgctcctcgccgatccctcgcgggccacctccagtc

SEQ ID NO: 127536 - DNA, 30 bp, Homo sapiens
  chr16:75467359-75467389
  hyper
gcggcccccgacagcgctttgcacatgcgc

SEQ ID NO: 127537 - DNA, 30 bp, Homo sapiens; identical to SEQ ID NO: 10802
  chr16:75497814-75497844
  hyper

SEQ ID NO: 127538 - DNA, 30 bp, Homo sapiens
  chr16:75498393-75498423
  hyper
ggggcacagggtcccgttgcccacccgcgg

SEQ ID NO: 127539 - DNA, 70 bp, Homo sapiens; identical to SEQ ID NO: 10803
  chr16:75528798-75528868
  hyper

SEQ ID NO: 127540 - DNA, 112 bp, Homo sapiens; identical to SEQ ID NO: 10804
  chr16:75528922-75529034
  hyper

SEQ ID NO: 127541 - DNA, 96 bp, Homo sapiens; identical to SEQ ID NO: 53290
  chr16:75529238-75529334
  hyper

SEQ ID NO: 127542 - DNA, 177 bp, Homo sapiens; identical to SEQ ID NO: 53291
  chr16:75529726-75529903
  hyper

SEQ ID NO: 127543 - DNA, 30 bp, Homo sapiens; identical to SEQ ID NO: 53292
  chr16:75589452-75589482
  hyper

SEQ ID NO: 127544 - DNA, 30 bp, Homo sapiens; identical to SEQ ID NO: 53293
  chr16:75590230-75590260
  hyper

SEQ ID NO: 127545 - DNA, 85 bp, Homo sapiens; identical to SEQ ID NO: 53294
  chr16:75599999-75600084
  hyper

SEQ ID NO: 127546 - DNA, 30 bp, Homo sapiens
  chr16:75656636-75656666
  hyper
tttgcccacaagaccgcatctctgaacagt

SEQ ID NO: 127547 - DNA, 30 bp, Homo sapiens
  chr16:75657380-75657410
  hyper
ttcaactagaatgacgtatcttgcagcact

SEQ ID NO: 127548 - DNA, 69 bp, Homo sapiens
  chr16:75681562-75681631
  hyper
taaggaggatagtacgttaatttccaggtcaaggtgcgaagccccacctcttccgggggagagggggcg

SEQ ID NO: 127549 - DNA, 246 bp, Homo sapiens
  chr16:76311035-76311281
  hyper
tcagaaggctccaccgccttgtcccttcccccactcacacctccagctgggagaaaagggttaaggattattggaaaatagaagagaagggagggagccccaaggaggcccacgaacgggaggccgcgcctctgggtgcagcggagctcgagcgctgttgtgtgtttggaaggaaggatgctgctgccaatttgtgggaccgctgctgcgaggagtgggcgtggcctcggcggtgtggatgcttgt

SEQ ID NO: 127550 - DNA, 31 bp, Homo sapiens; identical to SEQ ID NO: 10808
  chr16:76507679-76507710
  hyper

SEQ ID NO: 127551 - DNA, 123 bp, Homo sapiens
  chr16:77224183-77224306
  hyper
cggtccggaagcagcgtcggggcgggaattcgaaccctgggttcccacactggcccgtggcagggcccccaagccttttcccaaactgatcacagaaagtgacgacccgttcgcccggcggac

SEQ ID NO: 127552 - DNA, 30 bp, Homo sapiens
  chr16:77225189-77225219
  hyper
gagtctcctcttttcggaaagtgttggagg

SEQ ID NO: 127553 - DNA, 1029 bp, Homo sapiens; identical to SEQ ID NO: 53298
  chr16:77245983-77247012
  hyper

SEQ ID NO: 127554 - DNA, 413 bp, Homo sapiens; identical to SEQ ID NO: 10810
  chr16:77247376-77247789
  hyper

SEQ ID NO: 127555 - DNA, 202 bp, Homo sapiens; identical to SEQ ID NO: 10811
  chr16:77468255-77468457
  hyper

SEQ ID NO: 127556 - DNA, 187 bp, Homo sapiens
  chr16:77469028-77469215
  hyper
gggctcgtccgagcccccgggctggtgcaagggcgtgggattcccggctccagctctgagggagggggcgaagggggcggggaggctgggtgggagtgatagggagggagggaccgaccgccatgagaaggaggggagcgcccagggtcaggcttggaaaacgtaatttaagcgcactgggagatga

SEQ ID NO: 127557 - DNA, 30 bp, Homo sapiens; identical to SEQ ID NO: 53302
  chr16:77547051-77547081
  hyper

SEQ ID NO: 127558 - DNA, 30 bp, Homo sapiens; identical to SEQ ID NO: 53303
  chr16:77579671-77579701
  hyper

SEQ ID NO: 127559 - DNA, 30 bp, Homo sapiens; identical to SEQ ID NO: 53304
  chr16:77586643-77586673
  hyper

SEQ ID NO: 127560 - DNA, 30 bp, Homo sapiens; identical to SEQ ID NO: 53305
  chr16:77587954-77587984
  hyper

SEQ ID NO: 127561 - DNA, 30 bp, Homo sapiens; identical to SEQ ID NO: 53306
  chr16:77602331-77602361
  hyper

SEQ ID NO: 127562 - DNA, 30 bp, Homo sapiens; identical to SEQ ID NO: 53307
  chr16:77616137-77616167
  hyper

SEQ ID NO: 127563 - DNA, 30 bp, Homo sapiens; identical to SEQ ID NO: 53308
  chr16:77648978-77649008
  hyper

SEQ ID NO: 127564 - DNA, 30 bp, Homo sapiens; identical to SEQ ID NO: 53309
  chr16:77671843-77671873
  hyper

SEQ ID NO: 127565 - DNA, 30 bp, Homo sapiens; identical to SEQ ID NO: 53310
  chr16:77724574-77724604
  hyper

SEQ ID NO: 127566 - DNA, 256 bp, Homo sapiens; identical to SEQ ID NO: 53311
  chr16:77747178-77747434
  hyper

SEQ ID NO: 127567 - DNA, 745 bp, Homo sapiens; identical to SEQ ID NO: 53312
  chr16:77756210-77756955
  hyper

SEQ ID NO: 127568 - DNA, 30 bp, Homo sapiens; identical to SEQ ID NO: 53313
  chr16:77762427-77762457
  hyper

SEQ ID NO: 127569 - DNA, 30 bp, Homo sapiens; identical to SEQ ID NO: 53314
  chr16:77763011-77763041
  hyper

SEQ ID NO: 127570 - DNA, 1260 bp, Homo sapiens
  chr16:77822067-77823327
  hyper
aacgacccaatttcccgactatcccgcccagcctcgaagatgggagggagagagggcaaccttgtcgcggtaaggcatcctccaggcccagacattagtctcggtccatttcaaggcacccgagcctgtgccgtatataaccaagtactgggcccacaggaagggggatgacagggtggtctctctaggctcgttttagtcacagatcttcggcaaatttgggtttagggccgcgatcccgaccctaacttgggactatttcaggaactggagttgaggcttcgttgggacaggaaagaagggtggggcgggggtgaagcgcttagggcacggctcttgtgaggattacggcggaggctgtggaccgcggcggcgctcgcagaggctgcagccattgcacagccgagcatcccacattcaacaggaggaacccgcgggagaggagccccactcccccagcgccgcagccaccgcagccaccgcagcccgtgcgccccgcgccctcgagcgccatggccaaggaaggcgtggagaaggcggaggagacggagcaaatgatcgagaaggaggcaggcaaggagccggcggagggcggcggcggcgacggctcgcaccgcctcggggacgcccaggagatgcgcgcggtggtgctggctggcttcggggggctcaacaagctgcggctcttcaggaaggccatgcccgagcctcaggacggcgagctcaagatccgcgtcaaagcctggtccagtatccgcgcctttctcgctttctctctttttgcgcgctgggcgctggggagggggtgggaaagctgcggctgggatgctgcccgggtagaaccgccgcgcgcaccccctccgcgccctcacccgggtctcagagcctccccgggccaaagctggggaggatgcagaggggcggcctccccaagccagatctaggggtgacgggaggagaatgtgagctcctgggcgcggggagaatgctggcgcccaggcaccccgggtctggaagattgcgctacgggagttctccgtctgagaggacaactcagctttcgcacgggagggttgatgcttaacagaattaaaaatatatgtattaagaaccgcaagcccactgtgtgccagccgccgttggtagttttacacgtgcgatcttatttaatacttcctgggacctaatgagtcaggtgccatcatgatccgtttacaggtaagaaagccgccgctcagcgagaatgagtgatttgcccaa

SEQ ID NO: 127571 - DNA, 30 bp, Homo sapiens; identical to SEQ ID NO: 53316
  chr16:77823708-77823738
  hyper

SEQ ID NO: 127572 - DNA, 30 bp, Homo sapiens; identical to SEQ ID NO: 53317
  chr16:77899998-77900028
  hyper

SEQ ID NO: 127573 - DNA, 30 bp, Homo sapiens; identical to SEQ ID NO: 53318
  chr16:77927454-77927484
  hyper

SEQ ID NO: 127574 - DNA, 30 bp, Homo sapiens; identical to SEQ ID NO: 53319
  chr16:77962994-77963024
  hyper

SEQ ID NO: 127575 - DNA, 30 bp, Homo sapiens; identical to SEQ ID NO: 53320
  chr16:77971144-77971174
  hyper

SEQ ID NO: 127576 - DNA, 359 bp, Homo sapiens; identical to SEQ ID NO: 10815
  chr16:78079827-78080186
  hyper

SEQ ID NO: 127577 - DNA, 30 bp, Homo sapiens; identical to SEQ ID NO: 53322
  chr16:78105624-78105654
  hyper

SEQ ID NO: 127578 - DNA, 30 bp, Homo sapiens
  chr16:78133196-78133226
  hyper
gctttttggtcaggcgccacctggactaca

SEQ ID NO: 127579 - DNA, 30 bp, Homo sapiens; identical to SEQ ID NO: 53323
  chr16:78136813-78136843
  hyper

SEQ ID NO: 127580 - DNA, 30 bp, Homo sapiens; identical to SEQ ID NO: 53324
  chr16:78139042-78139072
  hyper

SEQ ID NO: 127581 - DNA, 45 bp, Homo sapiens
  chr16:78139957-78140002
  hyper
caaagtgctgggattacaggcgtgagccaccgtaccccgccactc

SEQ ID NO: 127582 - DNA, 30 bp, Homo sapiens; identical to SEQ ID NO: 53326
  chr16:78162151-78162181
  hyper

SEQ ID NO: 127583 - DNA, 30 bp, Homo sapiens; identical to SEQ ID NO: 53327
  chr16:78190461-78190491
  hyper

SEQ ID NO: 127584 - DNA, 30 bp, Homo sapiens; identical to SEQ ID NO: 53328
  chr16:78211269-78211299
  hyper

SEQ ID NO: 127585 - DNA, 30 bp, Homo sapiens; identical to SEQ ID NO: 53329
  chr16:78224740-78224770
  hyper

SEQ ID NO: 127586 - DNA, 30 bp, Homo sapiens; identical to SEQ ID NO: 53330
  chr16:78232227-78232257
  hyper

SEQ ID NO: 127587 - DNA, 17 bp, Homo sapiens
  chr16:78244367-78244384
  hyper
cctgacacacacacgcg

SEQ ID NO: 127588 - DNA, 30 bp, Homo sapiens; identical to SEQ ID NO: 53332
  chr16:78279709-78279739
  hyper

SEQ ID NO: 127589 - DNA, 30 bp, Homo sapiens; identical to SEQ ID NO: 53333
  chr16:78305114-78305144
  hyper

SEQ ID NO: 127590 - DNA, 30 bp, Homo sapiens; identical to SEQ ID NO: 53334
  chr16:78315504-78315534
  hyper

SEQ ID NO: 127591 - DNA, 344 bp, Homo sapiens
  chr16:78322867-78323211
  hyper
caagcaaaactaacacgcagtgggaaggttctgcttttctcacaaattctcggttaacacaaggcgtgccaacagctggtagagcgagagtcagggtgccaggctgaaatggagtggaaggcagccctggctggaagtcttgctgggaacctggagcgctgggaggtaaaactttacttggtgctggcagcgtcactatgccagtctgtttcttcccgagcttcaggccatgctgatgttcaagttgaataaatgagagctaatgattttttaaggcgtttttagtgaattgccgtgggaatgctaagttggcaagaataaaacctaggcgaggagagttgatt

SEQ ID NO: 127592 - DNA, 30 bp, Homo sapiens; identical to SEQ ID NO: 53336
  chr16:78353748-78353778
  hyper

SEQ ID NO: 127593 - DNA, 30 bp, Homo sapiens; identical to SEQ ID NO: 53337
  chr16:78389209-78389239
  hyper

SEQ ID NO: 127594 - DNA, 33 bp, Homo sapiens; identical to SEQ ID NO: 53338
  chr16:78425002-78425035
  hyper

SEQ ID NO: 127595 - DNA, 30 bp, Homo sapiens; identical to SEQ ID NO: 53339
  chr16:78426875-78426905
  hyper

SEQ ID NO: 127596 - DNA, 30 bp, Homo sapiens; identical to SEQ ID NO: 53340
  chr16:78427365-78427395
  hyper

SEQ ID NO: 127597 - DNA, 30 bp, Homo sapiens; identical to SEQ ID NO: 53341
  chr16:78440058-78440088
  hyper

SEQ ID NO: 127598 - DNA, 30 bp, Homo sapiens; identical to SEQ ID NO: 53342
  chr16:78469105-78469135
  hyper

SEQ ID NO: 127599 - DNA, 30 bp, Homo sapiens; identical to SEQ ID NO: 53343
  chr16:78472794-78472824
  hyper

SEQ ID NO: 127600 - DNA, 30 bp, Homo sapiens; identical to SEQ ID NO: 53344
  chr16:78498424-78498454
  hyper

SEQ ID NO: 127601 - DNA, 30 bp, Homo sapiens; identical to SEQ ID NO: 53345
  chr16:78536379-78536409
  hyper

SEQ ID NO: 127602 - DNA, 30 bp, Homo sapiens; identical to SEQ ID NO: 53346
  chr16:78553779-78553809
  hyper

SEQ ID NO: 127603 - DNA, 31 bp, Homo sapiens; identical to SEQ ID NO: 53347
  chr16:78601896-78601927
  hyper

SEQ ID NO: 127604 - DNA, 30 bp, Homo sapiens; identical to SEQ ID NO: 53348
  chr16:78623286-78623316
  hyper

SEQ ID NO: 127605 - DNA, 30 bp, Homo sapiens; identical to SEQ ID NO: 53349
  chr16:78630606-78630636
  hyper

SEQ ID NO: 127606 - DNA, 30 bp, Homo sapiens; identical to SEQ ID NO: 53350
  chr16:78642781-78642811
  hyper

SEQ ID NO: 127607 - DNA, 30 bp, Homo sapiens; identical to SEQ ID NO: 53351
  chr16:78654270-78654300
  hyper

SEQ ID NO: 127608 - DNA, 30 bp, Homo sapiens; identical to SEQ ID NO: 53352
  chr16:78669362-78669392
  hyper

SEQ ID NO: 127609 - DNA, 30 bp, Homo sapiens; identical to SEQ ID NO: 53353
  chr16:78765279-78765309
  hyper

SEQ ID NO: 127610 - DNA, 30 bp, Homo sapiens; identical to SEQ ID NO: 53354
  chr16:78769948-78769978
  hyper

SEQ ID NO: 127611 - DNA, 30 bp, Homo sapiens; identical to SEQ ID NO: 53355
  chr16:78781892-78781922
  hyper

SEQ ID NO: 127612 - DNA, 30 bp, Homo sapiens; identical to SEQ ID NO: 53356
  chr16:78791482-78791512
  hyper

SEQ ID NO: 127613 - DNA, 109 bp, Homo sapiens
  chr16:78804564-78804673
  hyper
ctccccgaagtgaaccgcccacagggagatgcccctatgggagcttcgcaccagaacccgtctgcgccagtgtccctgcagcgccctctactggcgaagctggacatgg

SEQ ID NO: 127614 - DNA, 30 bp, Homo sapiens; identical to SEQ ID NO: 53357
  chr16:78859167-78859197
  hyper

SEQ ID NO: 127615 - DNA, 30 bp, Homo sapiens; identical to SEQ ID NO: 53358
  chr16:78923314-78923344
  hyper

SEQ ID NO: 127616 - DNA, 30 bp, Homo sapiens; identical to SEQ ID NO: 53359
  chr16:78949111-78949141
  hyper

SEQ ID NO: 127617 - DNA, 30 bp, Homo sapiens; identical to SEQ ID NO: 53360
  chr16:78974715-78974745
  hyper

SEQ ID NO: 127618 - DNA, 30 bp, Homo sapiens; identical to SEQ ID NO: 10816
  chr16:79048507-79048537
  hyper

SEQ ID NO: 127619 - DNA, 30 bp, Homo sapiens
  chr16:79117548-79117578
  hyper
acaaagacaattgcacggcacagagggaat

SEQ ID NO: 127620 - DNA, 30 bp, Homo sapiens; identical to SEQ ID NO: 53362
  chr16:79125383-79125413
  hyper

SEQ ID NO: 127621 - DNA, 30 bp, Homo sapiens; identical to SEQ ID NO: 53363
  chr16:79128792-79128822
  hyper

SEQ ID NO: 127622 - DNA, 140 bp, Homo sapiens
  chr16:79623476-79623616
  hyper
gagggttcctggggccgcgatcgggtggagtgagggggtctcaaggtgaagggcggagccttgcgggaccgagtcttgctccctccctccaggcgcccgcccacccaggagagcggcgcaccggggagttttgatatccc

SEQ ID NO: 127623 - DNA, 206 bp, Homo sapiens; identical to SEQ ID NO: 53364
  chr16:79632610-79632816
  hyper

SEQ ID NO: 127624 - DNA, 320 bp, Homo sapiens; identical to SEQ ID NO: 10818
  chr16:79633073-79633393
  hyper

SEQ ID NO: 127625 - DNA, 2174 bp, Homo sapiens
  chr16:79633613-79635787
  hyper
cgtgctcatgggggtggaggacagcgagcccccggcgatgagacggccgcactggctgatgatgcggtcggtctccaccggttcctttttcacttcaaacttcatcagatcgaagtcattaacatattccatggccaggggactggtgggcaggtcggagttgctcattgccagttctgatgccattctcctgccgccgccgccgccgccgccgccgctccgccagatgggctgcaggagaggggccagcgggctgtgctgggtggccagcgggtgagccagcttgccgggctggggcgcttctagcttgcgcggcggtggctggcccgaaacctccgagcgcgctcacacacacacccccccgccctgcccgcgccccccgcgcccgccctccctcccccctgctcacgccaatgtgctccctcgctcgccccggcccctccttgctcgctcgcctccttgcgcgccgagccggcggcttcaggctcgggaagatcctccgcgagctgcggtggcggcggtggtggctgcggcggcgaagctggaggagcccggcccggtgcgcggcgtcccccgctcgccgctccgctgcgcgctttgcataaggaagggctcgcctcgccggcccgggctgcaggcagggcgcgcgcggcgtccgctcggggctggaggcgcggcgggcgtctgtccgggcggcgcgggccttggcacgggggagttaacacttcatgcttctcgcctcctcttctgcttggctctctttattattttttttctttcctctctctccctcgcgcgctctctacctctgtgcaaagtgcaaggcagaggtgcagcccgactggaggagagggaggggggagtttagttctttcttgcctttttttaaaaaagcaaaatagcgaagtcctggggaaagacgaggcagagagcaaaggggggagggggaggccaagccgacaagcagcccgagctacagctagaagatgaaaaaagattttaaagcctctgatccagcaagaagagtttaaagcaattgctgagttttatagcactcgtgacgtcaggtccaaatgagaaattgactggcactccgggccaatgggaggcggcgagagcggccgcgattagcataatagtatagaaacaaggaaacttttcggagctgtcaatcagggcccaatcagctgactgtcagctgggacgggctggcttaacccttcctgcgccgctgcctacccgggagggaacgaggcccggcgcaaagtttggtgtaagaggggaaggagtttttccagaggggcttcggcaatccgggcggacctgggagggcggtttgcttttctttggagcgcgagacaggcctcccatccggagccccagctcgctgggggctcactcggctgggattggcctgattcccctcccctgcctgccctccacccccaggattgtgaattcgcctcccagcttttcctcctcgcaccaactctggtacccaggtgtctgccggggaccttccttccctgagcctggccgtgcccggcgctcaaacttggccccaactctttgtccgtctctcgggcgcccgtgcggggaagggaccgggaagggagggatgcagtggggtgtccggatcggggctgcgggctgggcgccgcccggccatgcgcctgcccagaaggctgggcatccgtggagagggaaagcccattttatccctctctttacaacgaggtaaaataagttgtttagaggccattcttcacggagaccggctgcccgctggcgtcgcgtgcccttggacagagcgagcgcctatgcgagataactccggggaagctcaaagtcaggtcagccgggctcagccttccggctcctgactggccggagtttggcctttgagactcatattgcgcgctcgctctctctctctcttacacacacacacacaaacacacacacactcacactcacccgtccccttacgaaatctgacctctgtttatcagggtcaggcgcgccctttgcacttttacgtttcctttaattatttcggacttgatcgtggcagggagcaagggggaaaaacaataccccagccctcaccagctaccctcgaagggttaaattttaaaccgcggtttctggaactagtccggaaacgcagagtg

SEQ ID NO: 127626 - DNA, 30 bp, Homo sapiens
  chr16:79635990-79636020
  hyper
gaaagctcctgaaaccgacccagcctttgg

SEQ ID NO: 127627 - DNA, 104 bp, Homo sapiens; identical to SEQ ID NO: 10822
  chr16:79636190-79636294
  hyper

SEQ ID NO: 127628 - DNA, 407 bp, Homo sapiens
  chr16:79804150-79804557
  hyper
agctcagcgtgtgtgcgtgtgtgcgtgtgttcaagggctgggggctcaattgtgagaggtggcccaggggccggttagagactgggaaggacgacagaggcaagacacgcagcgagtgctctcgcgagagttcaccgagttgataaaattattaaaacacaaaatacacatttgcgtgagggggaaaaaatacccgcttgtccgtcctgtcccttcaggctgcgcaacgctggagggcgatgggagctccacacaggtgggacgagcctagcaggtaaaccttccaccggcccgagctccgcgacgccgcgcccccagccccgccccgccttaaaaaaaaaaaaaaaaaagaagaagagaaagagccgccgggagaagcgcggacgccgccgcttcccgggctccag

SEQ ID NO: 127629 - DNA, 257 bp, Homo sapiens
  chr16:79804596-79804853
  hyper
cgccattggtccatccgcctagcaacagccgcggccggaccaatgggagccgcgaagcggccggccccgctccagaaacttggctgcggagaagttcgctgtcccagccaggaaaacaaaccaagagacccttcacaccccagccctaagttttctttcttaccctgcctaccctccccctttccctttgcaacttgtcaccattcccagctcatgcatgctttagtcgccaaattctgacgcggacggagggcctt

SEQ ID NO: 127630 - DNA, 30 bp, Homo sapiens; identical to SEQ ID NO: 53372
  chr16:80471689-80471719
  hyper

SEQ ID NO: 127631 - DNA, 608 bp, Homo sapiens; identical to SEQ ID NO: 53373
  chr16:80574537-80575145
  hyper

SEQ ID NO: 127632 - DNA, 30 bp, Homo sapiens; identical to SEQ ID NO: 53374
  chr16:80650789-80650819
  hyper

SEQ ID NO: 127633 - DNA, 29 bp, Homo sapiens
  chr16:80837324-80837353
  hyper
cgcagcgccccctttcgcccccagggagc

SEQ ID NO: 127634 - DNA, 1574 bp, Homo sapiens
  chr16:80837395-80838969
  hyper
cgtccgagctggtgcgggggcagcaggtggggggtgagggaggtggcccggggaccccggggagcggtttggcggttgtccccccgaacccccacccagcctcccccttcgcagccccccgggaccccgcctcgccccggccaggctccgctccgatcgcccgcccccctcctcccccgcgcccccggcccagccgggccgcgcaacccccgccccacacccccgccggccgcggcgcgcccccccgcattcccagcacgtccggcgccgacttttacctgtactttctgtactcgaggcggctcgtcgggcgagaaacacctccccgggaccgctacctcccccgccccggctccgcccggcttcctccttcccctccaaggccgcaaagtagatggagtaagagagtgtgtgtgcgagagaaagagaaagagggagcgggcgcgggcgccgcgggaggcggcgggcggcgggcggcgggcgggaggcgcgcccggcccccgccaccctccggccgccgccgccgccgccgcgggctcggcaactccggattgcgcccggccccggccccggcccggtccccgccgcccgccgccgccgcccgccgccgcccgctgactggggccggcccgcgcccccgcgtccccgtacctcgtaaaggtccccagaagccatgccaggctgcggaacttggctcgccggtgtgcgcgtctgctcgctcgcgccctccgtgcgtgtgcgcgcggggtccggtgtgcgcgtgtgtgtgcgcgcgtgtgtgtgcgagtgtgtgtggtgtgttgagtaaactgtgtttttgcagaatgacaggcttgggggctgcctatgcgcagaatcagagcgggcggcggcggggctggcgtaaccggcagcagcggcggcggcggcggcggcggcacgagcgcgggcagcagcgacggccgcgcagcgcgcccgggaggcacggacgcggcccgagcgccgcggcccccgcgacccggcgacccggcggcggtggctgcagccggcaacggctcgccccggcgccgcctgcaggaagccgcccggcgcccgccgccggcccggacgctgctgccactgggcgagtccccgccccccgggagcccggcccggcccccggggcggggaggcgggggctgctgcccggccgcgccccgggggaccggtcccagagtcgactagcgctcgggcccgccccgccaccccgggccggcttcgggagcagctggcggggcccccggggggcggcgggccaggtgcccgccgggtgcgcccgatctggggccgcgaaggggcggccggggagccaggtagagggctgcggctgcagacctcagggaaggggccccagccgagccccgccggcccggggtccccacctacctcctccaccctcgaggggagtggacgccgcctgggagacctggcccctcggggctgcgcggcccctccctccaggctgggttgtaagatgtggaggccacagggaggaaggatgaaatggcccatccagaggcaccatggggatccaggacaggcgtggccaccccata

SEQ ID NO: 127635 - DNA, 503 bp, Homo sapiens
  chr16:80966002-80966505
  hyper
tgggggccaggggagcgggggagtcggcagcgccgcctgggacagagcttgccgcacgctgacctactttctggggccgatgtgtttgcagccagaggtaccgcggagccaagcccggagcctcggggagccgccagcgagcgcagactgggagggagccggccgggctccccgccaccccttcctccgcgcgccaagacctgtcagtttcacccagcccggcttccctggaaaggcgggatccctctgcagatttccaggctcttggaagaggaccggcgcgtctattaaacccgagtcgctccacgggctctccgcccagagcacaagctgccttcccccgggaactggacctcggcagcggcctgcgcagagccgggctccggggccctggccgctctcgggaaggccccgcgggttcccaccaggccagagggagaaccaccaggaggccgcgcgcgcgcacacgccgggcgccctcctcgtgccgaggtggaaagagc

SEQ ID NO: 127636 - DNA, 302 bp, Homo sapiens
  chr16:81039730-81040032
  hyper
gactctacgtaaaacgcctgatctttaaacgcaagaaaagcaagatgaatgtattactttcctggaaaaaaaaagcattaaaggagaaaaaagagtaaagtgtactgatggggctcttggtgggttctcacatcacagggcactgcagctgagacttgcttgaacggcccccgttttctacccgcaaattctcaattgctagataaacaacaataacaacactttattgggcgctcatcgtgtcaaaccctgtgttgagggctccattcctcaaggtccattttaccggcgaggaagccccg

SEQ ID NO: 127637 - DNA, 133 bp, Homo sapiens
  chr16:81040579-81040712
  hyper
agtccactggggcacggcagcgtctaagccacaagccgagcacataagccaggtcctaacggagcctatgtgtaagtccactactggtgcaaggttgcacacttctaagaagagcggcgtggggggctcggcg

SEQ ID NO: 127638 - DNA, 30 bp, Homo sapiens
  chr16:81069733-81069763
  hyper
accgtgcgcggctgcggcaagatcctgccc

SEQ ID NO: 127639 - DNA, 446 bp, Homo sapiens; identical to SEQ ID NO: 53381
  chr16:81110795-81111241
  hyper

SEQ ID NO: 127640 - DNA, 127 bp, Homo sapiens
  chr16:81130105-81130232
  hyper
actccagggcctggcgcgacctcggatacggcgacgcgaaagaggggcgtgggcatggggaagaacctgaggcccggaagaggcagcaccgagaggcggagactagcgcggcgggcctgggtatgat

SEQ ID NO: 127641 - DNA, 36 bp, Homo sapiens
  chr16:81348357-81348393
  hyper
acatccctccatcgcgggagcgacctatctcatccg

SEQ ID NO: 127642 - DNA, 215 bp, Homo sapiens
  chr16:81348861-81349076
  hyper
ggcggcggccagcccgtacatcaggtggggagggggctacggcgggcgggcgcggcggtgctgcccggagccggaggcggggcggccgggccgggcgtggcccccagaccctgtcccctgtccccggcgccggggtccccgcgtcaccgttggcgcggcgtccctcccggcaagcgccggaacccggccccgctgaccgcgtcccccaggcggcc

SEQ ID NO: 127643 - DNA, 30 bp, Homo sapiens; identical to SEQ ID NO: 10829
  chr16:81437109-81437139
  hyper

SEQ ID NO: 127644 - DNA, 30 bp, Homo sapiens; identical to SEQ ID NO: 53384
  chr16:81477849-81477879
  hyper

SEQ ID NO: 127645 - DNA, 30 bp, Homo sapiens
  chr16:81479257-81479287
  hyper
gggtgccgggggaacggggagaaccagggc

SEQ ID NO: 127646 - DNA, 31 bp, Homo sapiens; identical to SEQ ID NO: 53385
  chr16:81625940-81625971
  hyper

SEQ ID NO: 127647 - DNA, 375 bp, Homo sapiens
  chr16:81779772-81780147
  hyper
gtggcacaaacaaggccggcctgctggataaagggaggtagaaacgctttcagccctccccggtgcttcccggtttataacttcatctactcgtgacacgtgggggtccgccgccgccactggcagggtgccttgagtgcttgagttttcgcccccagcacaggtggagaacccaactcccagaaaacatctggggcggaaacggaagcatggccgcagcggtgaacgcactgcattctgggaaatgtagtcgaaacggccgctggggcagagtgagcacccacagtggtgccttctggggagggtcgttttcacgtagtccaagagccaggggtgggaaccgcggggctctcaccccagcgccgggaggggatg

SEQ ID NO: 127648 - DNA, 162 bp, Homo sapiens; identical to SEQ ID NO: 53387
  chr16:81812591-81812753
  hyper

SEQ ID NO: 127649 - DNA, 97 bp, Homo sapiens
  chr16:81813401-81813498
  hyper
ttgtgcccagagctcgcggacgctcggagccacacttccctgtctcacttcggtggttgcgggtggcgggtgggagcgataccgcgggaggcgcagt

SEQ ID NO: 127650 - DNA, 156 bp, Homo sapiens
  chr16:82204031-82204187
  hyper
tggcttccccgagccgcgggtcgccttcccgggacgtcggcctggccccctcggaggcccatcctccctcggggactcccttcctcagggaccccctccacactcagtagtcctcgccagcctcagagaggtttccgccacgcctgccacccgcct

SEQ ID NO: 127651 - DNA, 1057 bp, Homo sapiens
  chr16:82660354-82661411
  hyper
gaatcagctggcattgcccagcgtgatttgtgaggctgagccccaacagtccaaagaagcaaatgggatgccacctccgcggggctcgctcctcgcgaggtgctcaccccgtatctgccatgcaaaacgagggagcgttaggaaggaatccgtcttgtaaagccattggtcctggtcatcagcctctacccaatgctttcgtgatgctgctgctgatctatttgggaagttggctggctggcgaggcagagcctctcctcaaagcctggctcccacggaaaatatgctcagtgcagccgcgtgcatgaatgaaaacgccgccgggcgcttctagtcggacaaaatgcagccgagaactccgctcgttctgtgcgttctcctgtcccaggtagggaagaggggctgccgggcgcgctctgcgccccgtttctgcattcggatcgcccggcacgggcagggtgagggggctttcggggggtcggggcctccggtcgcggcggcgaagacagatcggggctcggtagggaggtcattccgagcccagagatcctaggcaccccccacacacaggctcccactctggcgtgcgtgtgtgtgtgtgtgtgtgtgtgtgtgtgtgtgtgtgtgtgtgtacgttcgttaacgggaggaggagagagctcccagtccttttttgctagcaggggcgacattctcgcccacatcaagtggggtaactttggttccctcctccggaggctcggtgcattggagaaagactcagttagaggcgactccaacgagccgcggttttccccagcccaacgcccagcggccgaagcgctgctcgggtccggattgcgggatgcggggctggagaggccgagcaggcaccaccgacttcccagggcgcccgggccccctggtacagcccggctgcccgctggaaggcgcctcggggcagcagagagcctcagcccggctgctgctgtcgctcaaaggcgccggcgccggccgcacccgcatcggggtccttttgctcccagaccccgggcccgaaagggccggagcgtgtccc

SEQ ID NO: 127652 - DNA, 365 bp, Homo sapiens; identical to SEQ ID NO: 10833
  chr16:82661468-82661833
  hyper

SEQ ID NO: 127653 - DNA, 30 bp, Homo sapiens
  chr16:83841498-83841528
  hyper
ggaacggaagcgcgcggcctcgaggccctt

SEQ ID NO: 127654 - DNA, 30 bp, Homo sapiens; identical to SEQ ID NO: 53391
  chr16:83841740-83841770
  hyper

SEQ ID NO: 127655 - DNA, 123 bp, Homo sapiens
  chr16:83986687-83986810
  hyper
catgaggcaggcagcgtgacacccgcccagtgtgcaagttcattcatcacgggcccctgctgactcacgcttatgaaagtgattttcctggccccgcccactgcctgcgccgcctcctccctc

SEQ ID NO: 127656 - DNA, 30 bp, Homo sapiens
  chr16:84150054-84150084
  hyper
gggccagagcagggcgtattgtttcactcg

SEQ ID NO: 127657 - DNA, 30 bp, Homo sapiens
  chr16:84150385-84150415
  hyper
ctccgcggcgaacacgcctgggcactccat

SEQ ID NO: 127658 - DNA, 51 bp, Homo sapiens
  chr16:84151073-84151124
  hyper
cggtgcgtgcgaaacggaggacctttgtaacgccacgtgtttgctcttttt

SEQ ID NO: 127659 - DNA, 30 bp, Homo sapiens; identical to SEQ ID NO: 53394
  chr16:84178198-84178228
  hyper

SEQ ID NO: 127660 - DNA, 178 bp, Homo sapiens; identical to SEQ ID NO: 53395
  chr16:84179010-84179188
  hyper

SEQ ID NO: 127661 - DNA, 174 bp, Homo sapiens; identical to SEQ ID NO: 53396
  chr16:84328193-84328367
  hyper

SEQ ID NO: 127662 - DNA, 675 bp, Homo sapiens; identical to SEQ ID NO: 53397
  chr16:84401740-84402415
  hyper

SEQ ID NO: 127663 - DNA, 30 bp, Homo sapiens; identical to SEQ ID NO: 53398
  chr16:84538316-84538346
  hyper

SEQ ID NO: 127664 - DNA, 856 bp, Homo sapiens; identical to SEQ ID NO: 53399
  chr16:84650975-84651831
  hyper

SEQ ID NO: 127665 - DNA, 31 bp, Homo sapiens; identical to SEQ ID NO: 10837
  chr16:84652627-84652658
  hyper

SEQ ID NO: 127666 - DNA, 30 bp, Homo sapiens; identical to SEQ ID NO: 10838
  chr16:84682716-84682746
  hyper

SEQ ID NO: 127667 - DNA, 62 bp, Homo sapiens; identical to SEQ ID NO: 53402
  chr16:84733967-84734029
  hyper

SEQ ID NO: 127668 - DNA, 30 bp, Homo sapiens
  chr16:84764173-84764203
  hyper
ttgagggtgtttgccgctgactcatgctga

SEQ ID NO: 127669 - DNA, 519 bp, Homo sapiens
  chr16:84853346-84853865
  hyper
ggcgagggagctgagcgtctccttgtccctagccggccctggaggccagcggccccgccttcctcgcccacccggcgcccgcgcctcagctgccccccgcctccttcagcccgctgagcctgcggggcggggccgggggcggggccggtgatgctcggtcctaccagcgccgccagcgatctgggggcgtggcctccgggctccggggagcctacaagaggcggtacgctgagccccggcacccactcgcatcccagggcgtctccggctgctcctattgagctgtctgctcgctgtgcccgctgtgcctgctgtgcccgcgctgtcgccgctgctaccgcgtctgctggacgcgggagacgccagcgagctggtgattggagccctgcggaggtaagtgtgatttccatgcttctcccttttgcaaactgttacccccccgagaagctggaataactaggacagatgccacctcgcagggctgactgtgtgctggcaccacaccgagtgctctgcttg

SEQ ID NO: 127670 - DNA, 30 bp, Homo sapiens; identical to SEQ ID NO: 53404
  chr16:85045103-85045133
  hyper

SEQ ID NO: 127671 - DNA, 92 bp, Homo sapiens
  chr16:85045409-85045501
  hyper
gcggagtgtgtacccgcgcccgcggcggtgtctcagaggcagctccagtggcctgtactatatgcggggatgtgaccgaaggaaatgggaaa

SEQ ID NO: 127672 - DNA, 30 bp, Homo sapiens
  chr16:85061046-85061076
  hyper
tagctccctgatggcgcttcccatgccccc

SEQ ID NO: 127673 - DNA, 98 bp, Homo sapiens
  chr16:85143893-85143991
  hyper
gcagctcggggttctcggagttggcaaagtcgatgagctgcttgaccagctggtccgccttgtcccgcagccgggccgtcttgcgcgtgtaggcggcc

SEQ ID NO: 127674 - DNA, 1158 bp, Homo sapiens
  chr16:85202554-85203712
  hyper
atgaatcatcgcgcgcggctccggctggacacaaaatagatagaggagccggccgctattgtgcgcagtttgggacgcggggggaggcggcggcgggcgggagggaggcaggcttggaggaggagggcggggggagggagcgcgcggggagggattcccccgcccgccgcgcgcccgccctccgcccctccccgcccctcccgcccgccgccgccccgccccctcctccccaattaaatgaccccacgccttggcaggcgccggagctcgcacatgcggctgccgctccagccgcccgggccccgccgccgccgccgccgccgccgccgccgccgccgcgttccgggcgcgctcgccgcggcgccgcctcggcccgcgccgccgccggggggtgctcggcaggcccgggggggcgccgctgcgaggggccgtgcgcccgcgcccgcgccggccgcccgccgccaaactttgcggcgcgcacacatgctccaagttgggcgcggcggcggcggcctgggcgggagctgagggcggcccggggcgcgcgggggcccgggcgggcggcgcggcgcggccatgagcgggcggccggccccggtctcccgcaagcagcggctcatggcagccgtgggcgagcgggctgcgggcggcgcgccgctctcctgcttcatctgcggcggcggcatcgggcgcggcaaggagctgaagctgcaggtgaagcagccggcggcgggcgcggggaccccggcgcagcccttcttcccgttcctgcagcagcaggagccggcgcccggcgcgcgcgagctgtccccggccgacggctgcgtgttggtgtgcgccgtgtgccgctgcttcctgggcgagcagtgggccgccttcgagcgcgcccgcacgccggtggacaagcgcatgtactggctcaagcggccccaccagtgcgacgcgggcgcaggcggccgccgtggcggcgccggggccccccgcgagtggaacgtcgcctacgcgctgggcagcgccaccggcgacgacgacgaggacgacggtggcggcccccggctgcgcggggccgcggaggagacgcgagactccgacctgtcggagctgtcggacaccgaccccctttccgagcccgacccgcccgcgcgggacgccgccagc

SEQ ID NO: 127675 - DNA, 152 bp, Homo sapiens; identical to SEQ ID NO: 53407
  chr16:85205737-85205889
  hyper

SEQ ID NO: 127676 - DNA, 30 bp, Homo sapiens
  chr16:85206224-85206254
  hyper
tggcagtcaccaacccggccaccggggcat

SEQ ID NO: 127677 - DNA, 110 bp, Homo sapiens; identical to SEQ ID NO: 10840
  chr16:85482268-85482378
  hyper

SEQ ID NO: 127678 - DNA, 30 bp, Homo sapiens; identical to SEQ ID NO: 53409
  chr16:85496157-85496187
  hyper

SEQ ID NO: 127679 - DNA, 30 bp, Homo sapiens
  chr16:85587404-85587434
  hyper
tccaatttgccctccgtagcttttctctag

SEQ ID NO: 127680 - DNA, 1061 bp, Homo sapiens
  chr16:85589832-85590893
  hyper
agcgccgtggcttgaacggtgctttttgttcattcctgggttttaatattattttccttcttcatccctctctggccactatggaattctaatttgaaccatgtttggattgaagccgcctctgtattacttaccaggtaagcgagccgtgcgcctccctgggtcccgcgcggcgccggcgcgcccgggaccctccctcacccgacccccctccgccagacccccgagccagggtcggggcattgggtccgccggtgccccccgcagacgcgcgcggcctcggatcctcccgctgcggtcaagcccgcggtgtgcgcggctacgtgcggcggggagcgcccacctggcccgccgcccccatcgcgccgccgccgggggttgcgcgtctcgctccttttgtctgccgggagccggctccgccgcggcggcggagcgagcggccgaggcacttaaaccttccaaggtgaagtaagcgccgagtgtgaagttactttcctgcaggccgccccgatcgggtagcatgccccccccccccccagtcctggggtttatttccctctccctccagccaacccccttgcgcggtctcggcgcgagcgtggctcgccggcccccccgccgccccccttcctgcctgggattccctggaaggttttgttccgccgaggtcggaggagggggccggggaagctcaggagggtatttggcgtggcttcctgtttccttaaccttcctgcgcggtgacagccgcttgccctgtaactttctgtttcggggcaagtcgcgctttcagcctggaggggaggggaggggagggggttgacagctggaggtttggggagcccctcctgaattcaccttatttggatttctaaaccttaaaaaaaattaagtgtaggctacatggaagctggtgatccaggaattcaggcgagggagccctgggtggtgaaccccagggttcttccccaccgcgcgccgtcacccccactcctgtgccccctggggtcggggagaaacgcacaggcctgccccaggtggggccacgtgacgcaggtcag

SEQ ID NO: 127681 - DNA, 112 bp, Homo sapiens
  chr16:85645213-85645325
  hyper
gcaaggcggggggccggcccgcgtgcgcccccacctccgggccccggcgcgcgctcggtcggaggtcgagcggggagcgtggggcctgagggagcccgccagaccctgcccc

SEQ ID NO: 127682 - DNA, 30 bp, Homo sapiens; identical to SEQ ID NO: 53411
  chr16:85646174-85646204
  hyper

SEQ ID NO: 127683 - DNA, 30 bp, Homo sapiens
  chr16:85646817-85646847
  hyper
tgtgtcctcggcggcgacagcagcaggtgt

SEQ ID NO: 127684 - DNA, 445 bp, Homo sapiens
  chr16:85722384-85722829
  hyper
tcccctccccacggcgggcccaggcctcaccccgatgaggtagatcttgtccagactgaagttggggataatggtaaccagctccttctcggcgaggaattcgacctcggcagcgtccatggcggcgcgagctgcaggccagagcctcacggtctcctcgggcccctcagcgtcccggaggagacgccgcggccgccgttttcccgccacggcgagagcccgccccggccggaagacggcctgcgccagcctataggaaggcggtagacagcctataggcgctgtctgcgggcgggggggcggagaccgcgctcgcgaagagcccgcggattggcaaggccgagggaggctgcgcgccggccccgccccggcccgcggacaggccccgcccccaccccggccccgccccgcccgtgggcgtgcacctggcgctgtcaggatctcc

SEQ ID NO: 127685 - DNA, 30 bp, Homo sapiens
  chr16:85784359-85784389
  hyper
agaagttggggggacgcccgggcccgcgtg

SEQ ID NO: 127686 - DNA, 30 bp, Homo sapiens
  chr16:85833813-85833843
  hyper
aagctagacgcgggcgttcagccctgacgt

SEQ ID NO: 127687 - DNA, 861 bp, Homo sapiens; identical to SEQ ID NO: 10843
  chr16:85932119-85932980
  hyper

SEQ ID NO: 127688 - DNA, 209 bp, Homo sapiens
  chr16:86273133-86273342
  hyper
gctggcctcaccggacgtggagggaagcagcgtttcccctgtgaaagcagccgagtcactgggcagagacgaatccagctctctcttcccttctctcaggaaggtgctggaaggagattttcctttccagcagttaagtggatgcggcttgggatggtcaatccgtccccaggcctggggacagctgtcctcaccggaagacagcctgc

SEQ ID NO: 127689 - DNA, 948 bp, Homo sapiens
  chr16:86320169-86321117
  hyper
accccacgcgccccccgccccttcgcgcaccgaggtcgtcctgcgtctccgggatcccaggccagcgggaggaggggccgcaggggcgctgcgggcaaggggagcccagtgcgcagggctccagaaaccccgaccctcgcaggggagagccagccgaaccagacgtgtgggggcagcagccgccgcggcggtctgggacgcgggtgtcgccttccacgggacttgggtccagggacccaagacggggatctgggaggagggggatgcccttggggcctgagacccgggcggtttccgaagcgaagtagttacccagaaccgctccctaccttctccccgcctccctgtctttctgcccctctgtcccctgcagctgctcggccctccctcctctgaaacccaccgcccgcccaaggctcactccttcctgctgttcccgcccgcgaagctgttgcagggacggtgcgcccttgggctgcactcaccaccgcccctcgcccgcgacgtcctggccccctaaccccagctttcccgccgccgctcactcccgcgctccgctgcagctcagcccggtctgcaactctccctctgttttctgccccgctcctcagttctgcgctctcctcttctccaggcttccctctcctcctccttctgcctctcccctgtccccgttccattctcctgcgcccctcgccagcgcgctcgcagcccatcggctcctgccggggcccctctggtgccagccgccttcaggctgtgggtccgtccgctggtggaggggaaggtcggggctggccccgggccccgcgctgctgggccccatggtcagtggagacgcctcctggtctcccttcagagctcctcgtcgtcgtcggagtcatcggaggaccaggaaggaggaccccccaccagctgccgcagcctctgctgcgaatccccccacac

SEQ ID NO: 127690 - DNA, 484 bp, Homo sapiens; identical to SEQ ID NO: 53415
  chr16:86334430-86334914
  hyper

SEQ ID NO: 127691 - DNA, 30 bp, Homo sapiens; identical to SEQ ID NO: 53416
  chr16:86478175-86478205
  hyper

SEQ ID NO: 127692 - DNA, 121 bp, Homo sapiens
  chr16:86530871-86530992
  hyper
gaacaaaaatatacacggccacctacttcgtcgggaaagacagtccagcgcccaccggcccgtgctcgcccgcctgccgagccccgagtcccggcaacgcgccccgggtgctccggtccac

SEQ ID NO: 127693 - DNA, 272 bp, Homo sapiens; identical to SEQ ID NO: 53418
  chr16:86531016-86531288
  hyper

SEQ ID NO: 127694 - DNA, 106 bp, Homo sapiens; identical to SEQ ID NO: 53419
  chr16:86531374-86531480
  hyper

SEQ ID NO: 127695 - DNA, 128 bp, Homo sapiens; identical to SEQ ID NO: 53420
  chr16:86531527-86531655
  hyper

SEQ ID NO: 127696 - DNA, 243 bp, Homo sapiens; identical to SEQ ID NO: 53421
  chr16:86531701-86531944
  hyper

SEQ ID NO: 127697 - DNA, 5 bp, Homo sapiens
  chr16:86532207-86532212
  hyper
tcccg

SEQ ID NO: 127698 - DNA, 562 bp, Homo sapiens
  chr16:86532408-86532970
  hyper
cgttgcagctctggcgttcctggaccccgggcgctcaggcgcgcacccctcccctgggctggtgaaggtataataaacacggcgttcacgccggcaggacccatcattagcccaaaccgcggtggaaaggagcgctcggttgcagagctagaacagcagttaccagccggggctgcctggcaccctcccgccgccgccggcgccttcctggccgccgagctgcctcgcagccaggtcccaatgccgaccccaaggcgtgccgcccctggaacccgcgggggtcccaggtccacgccaaaagaaacgcgctctgcttctcccgggcgtcagatgcaccgcctcggccggacgccagccctggacaaatttttccgggaaggcgacgtaaagaatgtcagacttgcaaaaccagagtgcgcctcggttgcttaaaatggagagagagagagagagagagaagtcaggggcaggtgggcagcggtggaggggcggctgccctggagtcacggacttcagcagaggcggcttagcaaaaaacgcagaaaaacgtgggggcggcagc

SEQ ID NO: 127699 - DNA, 30 bp, Homo sapiens; identical to SEQ ID NO: 53424
  chr16:86539007-86539037
  hyper

SEQ ID NO: 127700 - DNA, 63 bp, Homo sapiens; identical to SEQ ID NO: 53425
  chr16:86539363-86539426
  hyper

SEQ ID NO: 127701 - DNA, 43 bp, Homo sapiens; identical to SEQ ID NO: 53426
  chr16:86539463-86539506
  hyper

SEQ ID NO: 127702 - DNA, 294 bp, Homo sapiens
  chr16:86541649-86541943
  hyper
gtgggcggtgcggagcgtgtctgtgtgcgcggaggctgagctggttgtgtgaagtggtagcgggtctgccagagagcgtttacctgcgtgaatgcacaaccacacactacgggtcacgtcccacactcattctttccctaggcgggccaggctgtctgcacgcggagacccagagaggccagcggaagggcagcgcgggaaggcggctctcttctcccgcgagcgcagatctggcggaggaggcggcgactgcccggcaggctgcgccggcgagccccccagctcctctcaccg

SEQ ID NO: 127703 - DNA, 56 bp, Homo sapiens
  chr16:86542182-86542238
  hyper
cgcccccctcttctcaactcggaaccctggagggagaggccgcgcccggccagcag

SEQ ID NO: 127704 - DNA, 684 bp, Homo sapiens
  chr16:86542273-86542957
  hyper
cgccgcgatgcgccggggctcctgcgctgtcctgcgctccgctctcggcaccacctttcgtggctccaccgcccccagcccgcacccgagcgctgaggtggcaagggcaggtctgcgtgcgagccccctgcgggctggcagccaggtgcgcgagggccgcccttgccggcgctcccagcccgcgctgtctgctctcaggaacctggcctggcgcgcagtgtcagaggccccgcggcggcggcaggccgagcccacaggggcattaggccaactcccccctcccgccctgcgcacgcggaattctctattattattattaaagaatcccccagaacttgtttacgttaaaccctgtaaacttcctgccagggcctttgccatctctcgggaaatcggaacctgcgctttgaaaacggggccgcggggccaaataggcgggttttcagtgtgtgttgggggtgggggagggcaactgaactacgtgtgagttcagatccgagcgtggcgtgtgtacgcgtgagtgggagtgagtgcgaacttaagctcctgtgggccttaagcttccgtgtcaacgagtgcattagtgggtgcgcacatgcctgagcgccctctgcatatgagtgtgcacacacgcatgggtgtgtttacacgtctgtttgcgtaatttaccgggtttgcatgtgc

SEQ ID NO: 127705 - DNA, 1194 bp, Homo sapiens
  chr16:86543363-86544557
  hyper
tgctacagggctgtgcgcgtcggggaaggccccggcccagggagcgtttcccgccgcgccgcccgggcggggaaggcggggtccagcgcgcaccggggctgaaccgcgggcggagggcgcattaacacttgctcgccaggttggtggaggcggggcggattctgctggcggccgcggggcggcgagagtgggggctctttaagcgcccaccaacgcgggggcccgaggggggcagggacggagggagggaactccgggagggtcttaggccgacccgcgagacgcagccgagcggagatggagtgaaggctgcctcgcccggaatctcggagccgagcgccgcgggcggcggggactcagggctgctcccggctggggcgcacggccgtaagacctggaggtggtgcctccccccaaaaaataccggcgggggtagcttcctcacggccttcgcccgggctgccctcggcctcagctcggctcctttccttgtgggagggcgagaaagaaagagggaggagagaggtgggggaggcgggagttggagagagaggggctctgagccaaccgccggcggatccagcagctcctcggggagggcgggcgggagcgcgggggcgggcgcgccgcggctcgctcgggagaagtggccgccgatgacggcagaggtgcagccagccccgcgcgcgcagccccctccccttcgccctcctcccccccgtcgtcctcttcctcctcctcctcctcctcctcccggcccgtccgcggcgcagagcagcggcggcagcggcggcggcggcagcagccacccgatgtcttcggcgcccgagaagcagcagccaccgcacggcggcggcggcggcggcggcgggggaggcggcgcggccatggaccccgcgtcgtccggcccgtccaaggccaagaagaccaacgccggcatccggcgcccggagaagccgccctattcctacatcgcgctcatcgtcatggccatccagagttcacccaccaagcgcctgacgctgagcgagatctaccagttcctgcagagccgcttccccttcttccggggctcctaccagggctggaagaactccgtgcgccacaacctctcgctcaacgagtgcttcatcaagctacccaagggccttgggcggcccggcaagggccactactggaccatcgacccggcca

SEQ ID NO: 127706 - DNA, 53 bp, Homo sapiens; identical to SEQ ID NO: 53432
  chr16:86549502-86549555
  hyper

SEQ ID NO: 127707 - DNA, 88 bp, Homo sapiens; identical to SEQ ID NO: 53433
  chr16:86549624-86549712
  hyper

SEQ ID NO: 127708 - DNA, 30 bp, Homo sapiens
  chr16:86553789-86553819
  hyper
cagggtccttcctgcggggcagcctctgac

SEQ ID NO: 127709 - DNA, 30 bp, Homo sapiens; identical to SEQ ID NO: 10847
  chr16:86567476-86567506
  hyper

SEQ ID NO: 127710 - DNA, 30 bp, Homo sapiens
  chr16:86589048-86589078
  hyper
agtccctggtctctcgggacccattgccgg

SEQ ID NO: 127711 - DNA, 113 bp, Homo sapiens
  chr16:86597560-86597673
  hyper
catgataagcagggcgggccgggcggtctttttctttttccttttctcgtagtagttccctggttggcctcaagatgacgccaacacccacggagtccgcccagccgctccag

SEQ ID NO: 127712 - DNA, 78 bp, Homo sapiens; identical to SEQ ID NO: 53435
  chr16:86599306-86599384
  hyper

SEQ ID NO: 127713 - DNA, 433 bp, Homo sapiens; identical to SEQ ID NO: 53436
  chr16:86599480-86599913
  hyper

SEQ ID NO: 127714 - DNA, 1526 bp, Homo sapiens
  chr16:86600290-86601816
  hyper
gcggggtcttagagccgacggattcctgcgctcctcgccccgattggcgccgactcctctcagctgccgggtgattggctcaaagttccgggagggggcgtggcccgaggaaagtaaaaactcgctttcagcaagaagacttttgaaacttttcccaatccctaaaagggacttggcctctttttctgggctcagcggggcagccgctcggaccccggcgcgctgaccctcggggctgccgattcgctgggggcttggagagcctcctgcgcccctcctcgcgcgggccgagggtccacctgggtccccaggccgcggcgtctccgctgggtccgcggccgcccgcctgcccgcgctgccgccgccgggtcctggagccagcgaggagcggggccggcgctgcgcttgcccggggcgcgccctccaggatgccgatccgcccggtccgctgaaagcgcgcgcccctgctcggcccgagcgccgccgcccgcgcaccctcgccccggaggctgccaggagcccggggccgcccctcccgctcccctcctctccccctctggctctctcgcgctctctcgctctcagggcccccctcgctcccccggccgcagtccgtgcgcgagggcgccggcgagccgtctcggaagcagcatgcaggcgcgctactccgtgtccgaccccaacgccctgggagtggtgccctacctgagcgagcagaattactaccgggctgcgggcagctacggcggcatggccagccccatgggcgtctattccggccacccggagcagtacagcgcggggatgggccgctcctacgcgccctaccaccaccaccagcccgcggcgcctaaggacctggtgaagccgccctacagctacatcgcgctcatcaccatggccatccagaacgcgcccgagaagaagatcaccttgaacggcatctaccagttcatcatggaccgcttccccttctaccgggagaacaagcagggctggcagaacagcatccgccacaacctctcgctcaacgagtgcttcgtcaaggtgccccgcgacgacaagaagcccggcaagggcagttactggaccctggacccggactcctacaacatgttcgagaacggcagcttcctgcggcgccggcggcgcttcaaaaagaaggacgtgtccaaggagaaggaggagcgggcccacctcaaggagccgcccccggcggcgtccaagggcgccccggccaccccccacctagcggacgcccccaaggaggccgagaagaaggtggtgatcaagagcgaggcggcgtccccggcgctgccggtcatcaccaaggtggagacgctgagccccgagagcgcgctgcagggcagcccgcgcagcgcggcctccacgcccgccggctcccccgacggctcgctgccggagcaccacgccgcggcgcccaacgggctgcctggcttcagcgtggagaacatcatgaccctgcgaacgtcgccgccgggcggagagctgagcccgggggccgg

SEQ ID NO: 127715 - DNA, 554 bp, Homo sapiens
  chr16:86602037-86602591
  hyper
cgtcgcccctgagcgctctcaacctcgccgccggccaggagggcgcgctcgccgccacgggccaccaccaccagcaccacggccaccaccacccgcaggcgccgccgcccccgccggctccccagccccagccgacgccgcagcccggggccgccgcggcgcaggcggcctcctggtatctcaaccacagcggggacctgaaccacctccccggccacacgttcgcggcccagcagcaaactttccccaacgtgcgggagatgttcaactcccaccggctggggattgagaactcgaccctcggggagtcccaggtgagtggcaatgccagctgccagctgccctacagatccacgccgcctctctatcgccacgcagccccctactcctacgactgcacgaaatactgacgtgtcccgggacctcccctccccggcccgctccggcttcgcttcccagccccgacccaaccagacaattaaggggctgcagagacgcaaaaaagaaacaaaacatgtccaccaaccttttctcagacccgggagcagagagcg

SEQ ID NO: 127716 - DNA, 414 bp, Homo sapiens
  chr16:86609632-86610046
  hyper
ggagcggggctggggcgcaaagccggagttctacagctgaaacctcccggagactttgcacacttctgcaaacgcgcggggctgggtgtgcgtctccaaaccgcgactagagcgtgggcatttgttttttgttttttggtttttctctctctctcctaatctctctctgtctctttctcgctctcttttttttttttttttttttgctttactatcggtgccccgcccaccagcctcccgtgtctccgcccacgtcccgcccattaccaaatcgggcagtatttatcaccgtacaaattcaagctcggatttgccttagagtttagaagacgcgccgggacggcgggagtttcggtagaggcagggatgtgcgtgctggacttcgggtgccgcgtggggagctccaggaggggc

SEQ ID NO: 127717 - DNA, 30 bp, Homo sapiens
  chr16:86610268-86610298
  hyper
gtacgcgggtgagagcgagtggtaacgaaa

SEQ ID NO: 127718 - DNA, 30 bp, Homo sapiens; identical to SEQ ID NO: 10851
  chr16:86775107-86775137
  hyper

SEQ ID NO: 127719 - DNA, 30 bp, Homo sapiens; identical to SEQ ID NO: 53442
  chr16:87312450-87312480
  hyper

SEQ ID NO: 127720 - DNA, 238 bp, Homo sapiens
  chr16:87350810-87351048
  hyper
caacgccgcggggacggtggggaccggctcgcacgcatatggcttcttatggctgacgcgccctttcacacacacatcgtccgcaggccctgacgccctggctcccgcctttccctcctgccccaggaggaacccaacccgagctcaaccccagccccaacctcaaccgctcagaggagcccaacaacgcccgcgcgcccgcccgtcccgctgactagcccgcgcccagccaatcaaa

SEQ ID NO: 127721 - DNA, 30 bp, Homo sapiens
  chr16:87417311-87417341
  hyper
cgacgggcccacgccgcaaaggcgagcaca

SEQ ID NO: 127722 - DNA, 24 bp, Homo sapiens
  chr16:87417617-87417641
  hyper
aacgttagactgccccgtgtgagg

SEQ ID NO: 127723 - DNA, 564 bp, Homo sapiens
  chr16:87417700-87418264
  hyper
tgctcggcgaccacttcgcgccgcggcttttgtggagataggggtcgcccctcgcgcccgtgcgtcccgcttccggcgcccgaaactgtgccgcgccggccggtgagtagaaagatgcgccttacagcctccaaatacagaggcagcagccagaaccccaaagggcgcctagaagcccttttgtccattgaaacaacgcgcgttccatcgtctccgccttatggtaaccaaaaggcccgagctgcggagctctgcagggaccttcggggatcccgagctccctgcggaagccccggggagggcttggaggggcggcggccggcgcggcccaagagatccggggatgcgcgcccggtctggaaagggaggccctgccatgcggcgccgcccaaagggcgcctgttcctgcagctgctgggagccgcgcacgcctgctccagctgggctccgccgaggccgctgagcggggtcgtctcccaggtccgcgggtggtgaccgcgaaggcgtcctctcacctgagcagccgcgcacgtcgccgtgggctcgcctcggaccccatctctt

SEQ ID NO: 127724 - DNA, 30 bp, Homo sapiens
  chr16:87425762-87425792
  hyper
tcgcccatcgcgcacgcgcacacacctgct

SEQ ID NO: 127725 - DNA, 1467 bp, Homo sapiens
  chr16:87525617-87527084
  hyper
gtgaggctgcccaggtcggccgggttgttggccttgatctccgagtcgcgcagcgagtggtagtccttgcgggccaggtcctccaggcacgagccgaggaagcgaagctcgagcgggatgcacaggtccagcaggccgcacaggaactccacgcgctgcggcgacggcagctccgagaaccagcggtacacgccgtccctctgcagcgggcagcgcttctccaccatgctgccgcccgcgccgcgccgcgacccggggccggggaccgcgcgggggcggccggggggcgccgggggccgcggccggggcgcgccgggaccggggacgcgcgggccggggccgggtccgggcgagggcgcgcgggcgccgcgggccgggcgggcgccggggcgggggcggggaccggggccgggcaaggctcccgtcaggggccggcgggcgggcgcgcgcggggcgccgggggggcccggggcggccggggcggccgggggcggcgagcggcctcgggccccccgctcacggggaggcgccttccccgcgcccgtgcccagcggcggccggtgcgcggcggcggcggcggctgctcctcgtcgtcgtcgtcgtcgtcgcccgggaggcggccgcccccatctccccccgcgccgcagggtctgtcactgcgggccgccccccgacggagccgccccggccatgccgtcgccgccgcccgcgcctccgcccaggccggccgttaccccgggccgcgggcgcggcgtcgccgcctggggagcgctgggggccgcggccgcgaaacggacgctggagggggagggacgcgcggcgggaggcgcggagggatccggccgggacttgccggccttgctgctcccgcgcggcggacggatccgggcccgagcgcggcggcggcggcgacggcgacggcgacggcgacggcgacggcggaggaggcgccggccgaggagcggagggatcgtcgcgctcgcggctgacgggcggccgggatcagcagaagtgggcggggtggccgcctctcgcgacagcccgggcctgccgggcccgtcccccccccactgattggctcaggcggcccgttctcggcccgtgattgtgccgggtccccaatcccattcgcccgttccgcggccacgcctccctgggggctgtcgatcatgttggggccaccgcctcccgtccctcggcggccgtcaagacgcgattggtccgcggaatcggagaggcggaaaacccgggctggatttctggttgcttttgttcccgcaaatttgcgtggagcattgtttttcggcgaaaacggggcgttcggccttcctgctttatttttgagcggtgtaagagggaggtagtgggtatcttcgagaaacggccgccgcggggtccggagccccgggttccaatcccgggtcggccactgcaaagctgtgtgaccttgggcgagtcacttggcct

SEQ ID NO: 127726 - DNA, 184 bp, Homo sapiens
  chr16:87577566-87577750
  hyper
cccacgtagggctgccgcgtgtggtccgaaaatcatcctaaaaatggaaccttccactcaggcaggcaccgcatgggtctgtgtgagccgcatgtttctcagccaagacgcggctgtgtaggaagttccttataaggatttcctactctttgtgggccacccgttcatgcggtgaccaacctca

SEQ ID NO: 127727 - DNA, 30 bp, Homo sapiens; identical to SEQ ID NO: 53447
  chr16:87622463-87622493
  hyper

SEQ ID NO: 127728 - DNA, 898 bp, Homo sapiens
  chr16:87635072-87635970
  hyper
gtttctggctcaccgcgctgcggtcaccggcccacactcccaggagcgaggaccctgggcagcctccacacccccatcagcccactgcaccggtctgctgccatttcccgcacgcatttcaggagggctggggacgccggcttctgcctgaggatttatggtccaggaaatgcattttaaatggatcccaggatgctcggatccaagaatcagactctctcttgtgcgtgggaagaggggcggagggtgagagtatgtctggagagagacctagaaacgcccgaatggcggtcccactttgctccccaaaagcgcgaccgttccccgagtgggggggcgctacctgttggccagggcgcagggcgcacggaattcgggtgactttgctccaagatacacgcgtgtgtcccgactctcactcaatttataggggagagggactcgccaaatccctgttttctggggtaagcccccctccccccactcttggacccaagctgcccggaaggaagaaggaagcattgtttgtcaccggagaaaaccacctgtggtttgcaaagggcctcagtcgagtcaggggcaggcggggcagatccgagcccggcgggaggggcgaggcgcgggggcgggcaggggcgagggtaggggcgctcagctggcaggtcctgctctgcaggcctcaccgcccagctcccgggagggggccgagggcgccctgagtgctgcgcgccttcccatgacgcagttcctgtgcctttaaatcccactcccggagggggcgggggcgccccggctggaccccggtttccagtccggcgggggccccggggaagcccagggcggggagcgcggggctgggggcgcggagggcggggcgcccggggtccccgcccgcgcg

SEQ ID NO: 127729 - DNA, 482 bp, Homo sapiens
  chr16:87636008-87636490
  hyper
cgccgcgctccgggggcgggggcgggggcgggggcggggggcggggggcggggggcgggcgggggcgcgcgggcgggcggggtgcgggcgcgcgccgcgcggcccgagcgcgcgagccgggcccggagcgcacgccgccgccgccaccgccgccgccgccgcccgagccgccgcattgctgctgctgctgccgccgccgccccgcgcccggcccgcggcccccaatatggtgcagccgccagcgccgccgcccgtgccgccgccgccgcccgcgggccccgccgccgccctcgggcgcccgcagcgcggcagccgcaggtggggggccgcggcccgggcctgagctgccccccgcccggcctcggcgcggcgccctccccgcggggctgccggcgaggggccctctcgccgctgaggtggagccgcgggccccgccgccgccgctcctgccccctccctccctcctcccctccccctcccct

SEQ ID NO: 127730 - DNA, 1102 bp, Homo sapiens
  chr16:87636626-87637728
  hyper
ggggccgcgtcctcctctcctccggaaaacgctcgcgacccagggccgccggcggccgcgactctgctgtgtcgatcgcctgagtccgttttcaccgtttgcgggatctggaaccgagttacatgcatgtccagtgggggcaggtttaattttgacgacggagggtcctactgtggaggctgggaggacggcaaggcgcacggccatggcgtctgcaccggccccaagggccaaggcgaatacaccggctcgtggagccacggcttcgaggtgctgggcgtctacacctggcccagcggcaacacgtaccagggcacctgggcgcagggcaagcgccacggcatcggcctggagagcaaggggaagtgggtgtacaagggcgagtggacgcacggattcaaggggcgctacggggtgcgggagtgcgcgggcaacggggccaaatacgaagggacctggagcaacgggctgcaggacggctacgggaccgagacctactcggacggaggtaggtgccgcgggccgggccgggccggggcgggagggacgtgcttccgatcgcgccccttctgtggatctctggggaagttgagctgcgtcctccggttgggccgtgggcaccaggggcctttcccgggcttccctggaagccacggcggctcctggctacaggttgccccgctgcctggtggggacagtgcccctgtgccagctgaagggtgttgggggctttccaggggcagagccaggcggggcccagcagagcctccgtgcgtcggacacagcaggccggagacctgcgggaagggccaggctgggcccgcggccctggggaacccagcaagggcagagggggctgggagaagggcccctccccttgttggctttgccccccaccctggaggccgcccttcgatcaggccccagcttcgcttctggtgttcctgcggcgcccgagggccttcctcagccccgaatctgcccaagccgagagaaagggagtgatggggagcgctaggggcgggggatgccaacccgaaccaaaacagccaggcagtacacttctaggtggttggacgcggactagcgctgtcgaagcagg

SEQ ID NO: 127731 - DNA, 84 bp, Homo sapiens
  chr16:87695287-87695371
  hyper
ccaagagcaaagacccgtccaagagcagggtcagcacctcggagagttccccgcaggccgccacggggcggggagagaattcat

SEQ ID NO: 127732 - DNA, 1051 bp, Homo sapiens
  chr16:87723112-87724163
  hyper
cttgcctgcagcctttcggtgagtgggaagcgcctctgctgccctgaggttccctctggcgccctggcccggggaccgcggcctcgctgtggaatgtgctgggtaacgccgtctggcgtcgtcttgtgtccccatacagggctggagtaccagaggccgaagcgtcagacctcctgtgacgacatcgaggtgctgtccaccgggacacccctgcagcaggagagccccgagctgtaccgcaagggcaccactccctccgacctgacccccgacgacagccccctgcagagcttccccaccagccccgcggccaccccgccgcccgcgcccgccgccaggaacaaggtcgcccacttctcgaggcaggtgtcggtggacgaggagcggggcggggacatccagatgctcctggagggccgggccggggactgcgcccgcagcagctggggcgaggagcaggccgggggctccaggggtgtccgcagcggtgccctgcgcggcggcctgctcgtggatgacttccgcacccgaggttcgggccgcaagcagcccgggaaccccaagccgcgggagcggcggacggagtcaccccccgtgttcacgtggacttcccaccaccgggccagcaaccacagccccggaggctccaggctgctggagctgcaggaggagaagctgagcaactaccggatggagatgaaacccttgctgaggatggagacgcatccccagaaaagacgctacagcaagggcggcgcctgccggggcttgggggacgaccaccgccccgaggaccggggcttcggggtgcagagactgcggtccaaggcccagaacaaggagaacttcaggccggcctcctccgcggagcccgccgtgcagaaactggcgagcctgcggctgggcggggccgagccccggttgctgcgttgggacttgaccttctccccgccccagaaatccttgcctgtcgctctagagtccgacgaggagaatggggatgagctcaagtccagtacggtgagtgggcggccaccaggctggtcccagt

SEQ ID NO: 127733 - DNA, 30 bp, Homo sapiens; identical to SEQ ID NO: 53455
  chr16:87799119-87799149
  hyper

SEQ ID NO: 127734 - DNA, 30 bp, Homo sapiens; identical to SEQ ID NO: 53456
  chr16:87811640-87811670
  hyper

SEQ ID NO: 127735 - DNA, 30 bp, Homo sapiens; identical to SEQ ID NO: 53457
  chr16:87813006-87813036
  hyper

SEQ ID NO: 127736 - DNA, 491 bp, Homo sapiens
  chr16:87902835-87903326
  hyper
cgataatggtccccacgatgatggccacgccgttgagcagcgtgatgttccgctgcagggtcacgccctcgccctcgcctgccggcgccgagccgtccgcgctcttggcggccagcatcttctcccgcgcctcttccttctcctcggccgccggcgccgctagcgcgcgccgcttcgggcccgcacccgccatgctctgcgcaccggccgggcctgggacacccgggagccgcggcccagcgagcagtgtgcgcgccgcccgccgcccgcagctgcgtcaggaaccccgcccgcgccgccttttaggccccggcccgccggccccgcccaccgtccgcggctcctccccgccccgtggcccggccccgtccctcagccccgccccctcggcccagctcggagcacgtgcgtcgtccggcccagcctggcgggctattcccaggcccgcgtggtcctcgaaggccccagtcctcctgcgccatggagacccc

SEQ ID NO: 127737 - DNA, 134 bp, Homo sapiens
  chr16:87984527-87984661
  hyper
cagcaggtaggacccgctgggggcgcacagcccacctgagacatcgtaactacaagtcccagcaacccttggtgcggggacaggacgggccaccggagtccggagagactacaagtcccggcaggcatggccca

SEQ ID NO: 127738 - DNA, 131 bp, Homo sapiens; identical to SEQ ID NO: 53458
  chr16:88031993-88032124
  hyper

SEQ ID NO: 127739 - DNA, 281 bp, Homo sapiens
  chr16:88060795-88061076
  hyper
gcacctggtgtgggccgaccgagtcagagggatcgagaagttaagtaaatggaaagagtgtgtcatgacaccttagtgagcatttatatctcgtggggagccccgcctgtgggccagctaagcaccttctgtgcagtgggcctttccagacccttgcaggaagacggggccggcctggcgggctggggtgcctgggtgaggcctcttcagcgggccccggccctgcagccaggcagctcctggtggctgtcccgaacaggcctcaccgcttctccttggat

SEQ ID NO: 127740 - DNA, 102 bp, Homo sapiens
  chr16:88292853-88292955
  hyper
caccccccgcccccccgaagcgggccagagaggtgtcctcggtgggtcaggaagggtcgacgccccctccttccctcagccgcatcccgcgcccccatccct

SEQ ID NO: 127741 - DNA, 1139 bp, Homo sapiens
  chr16:88449363-88450502
  hyper
ggcagaccccgcggccgccggccggcgtccggccttcccagcacccggcccagggctggagctggctgcagggctggcccgcggcgacctgggcagggtggcggctgctccctctcctcccaccccgccccgaggcgcagcgcgcggcagagcggctcggtgcccggcgggcgggcggcccgggcgggcctgcggtcgggatgaggacggcgcctccgctgcagagcgctggggcggcgcgggccgggagctcgttggcggcggccggcgtggcgggcggagcgggcctcggagcggaggtgagtgcggatgcgccgcctgggcgcgcgcggtgcctggggaccccgggctggaacgcggggcgggggtgtcaccgggctgcgcgggggtctccggcccggctcccgctcctgcgccctcgggggccgctccccggcggggccggaccctcccagcgctcgcggcgcccggcccggctcccccgacctcctcctcccgggcccggacgtgcggggcagcgagcgccggggcccggcgggggccgcagccttgcccggagcggagcgttggcagcgcggggtccggctccgtgggcagtttgggaagcgcccgggcaacgtactggcgagggccgcggagcgaggggctcggggagcgggacctccgggcggggctgcggggagcggggcccgggccgccccattcatcgcggatcggagccgggggtgccccagccgtgccgccgcctcctccgggccgcccgcccgggcgtgctggccccgcggcgctccgagcgcggcataggcttgcgagtcggcggtgtcagcgccccggacgggggtgggagctttggagcccaccctgggggagaccacgccgcacccccgcccagccccgcgcacccccagaggcttttgcagagccgggaagttggctggacgtctagacccgtggggacgcggcgccccgcgtggcggcggccggaagggaaggccaatggggctcgggggactcccgcggccacccagtccttgtccctgcaccctgggccgagggcagagggacaggtccccggcgggggcgggggggcagctcagctgccaagtccgctcctgcagcggaggcggttaactgcttca

SEQ ID NO: 127742 - DNA, 30 bp, Homo sapiens; identical to SEQ ID NO: 53463
  chr16:88509561-88509591
  hyper

SEQ ID NO: 127743 - DNA, 272 bp, Homo sapiens
  chr16:88519037-88519309
  hyper
tgggcgtcaaggcctcgggcttcctgagccggttgtcactgcccccaccgcgcacgtggagcgtgcggcagagcccaggggtctagggagggaccaagggctgggggcggagttacagtgcgggggcggagcctcggcgtctcaggacccaaccaggtcgggtcaggtttggaggcggagctggcgccgagaggcggggcgcaggatgcggtgccgcggggcagcagaacagaaccgaataggtctcagactcccagcgcggcctggggaca

SEQ ID NO: 127744 - DNA, 30 bp, Homo sapiens
  chr16:88520452-88520482
  hyper
cattctgcaagtcccgtcctgataagatcg

SEQ ID NO: 127745 - DNA, 30 bp, Homo sapiens
  chr16:88520897-88520927
  hyper
agggcctcccaggacgcagccccgggccgg

SEQ ID NO: 127746 - DNA, 175 bp, Homo sapiens
  chr16:88522424-88522599
  hyper
gggttggagaacagcgcgggggcgccgcgactggggcgagtgggggcttggaacggcccgggttggggccggggagccggcgtccctgcgctggtctgtctgggggagttttctccccaaacacacttaattgccaagaagttgatcctcccctgtggccggtggtacagtccgt

SEQ ID NO: 127747 - DNA, 108 bp, Homo sapiens
  chr16:88636351-88636459
  hyper
cgcgttgaaccgcgcggggagccaggcagcccacgggaaaggtaagaattgttaggcttttaatctaaagtcgatacctcaaaaaataattccggaggtaagcattta

SEQ ID NO: 127748 - DNA, 30 bp, Homo sapiens; identical to SEQ ID NO: 53467
  chr16:88637208-88637238
  hyper

SEQ ID NO: 127749 - DNA, 92 bp, Homo sapiens
  chr16:88721557-88721649
  hyper
acacgcgctacagcgcgagcgcagcctctgccctcccggcccgcgtcaccttggtgtccccgtggtgggcgttgaagcggtgcaccaggtgg

SEQ ID NO: 127750 - DNA, 527 bp, Homo sapiens
  chr16:88729456-88729983
  hyper
gtgactgccgccagcggcttctccgaggccatggtcccaccgcgcagtgaccccagctccacagccacttacggcccgcgatcccaccccagaggcctctgcctcctcacgcgctaccacaggattggcccgtgcgagcccggctgctcgcgcgccgaccaatcagcggcgagtcgggcgcacgcattacctctcagccaatggacgggatcggacgatgggttgctgacgtaggtccgccccacccgcagggtgcgctcgccaggcctggggcgtggtgttgtctgcgcaggcgccgtgtgcccaggcgcctggcgtccgcgtcggcgatccggggtctgggcgcggcgaggtgggcgctgttgcctgtgggggctacctgtctgctggtgctgtgcgggcttgtgcggggctgtgcggcagctgtgtggggcccgtgaggagctgtgcggggggctgtgcgaagggctgtgtgaggcgctgtgctgggggctgtgcggagaccttgaggcgctgtgcggggtccg

SEQ ID NO: 127751 - DNA, 30 bp, Homo sapiens; identical to SEQ ID NO: 53470
  chr16:88730479-88730509
  hyper

SEQ ID NO: 127752 - DNA, 182 bp, Homo sapiens
  chr16:88752792-88752974
  hyper
tcaccaggaaggagcgcggcatgttcccctcccgggcggcaggccggggtgggctggggcgggaggggcgcgcctgggtccggactgctgcgtccgccggcgcttgaaggggtcaggctcattagcatagcgcgccgcctccgccaaccagcgcccggcgcgagtggggcggggccacgggg

SEQ ID NO: 127753 - DNA, 25 bp, Homo sapiens
  chr16:88753000-88753025
  hyper
cgggcaacacgcccaggacaggtgc

SEQ ID NO: 127754 - DNA, 134 bp, Homo sapiens
  chr16:88764922-88765056
  hyper
taggagaacttgtgtcggtgaagcaggtgctgcaggaagttggcgctcttgtagctggggtccccccagggcattgccgagcagatggggcacacctggaacaggcactggggtcaagccgagccggaccgcgg

SEQ ID NO: 127755 - DNA, 30 bp, Homo sapiens
  chr16:88765279-88765309
  hyper
gggcacccccggactcgccgcgagcaggct

SEQ ID NO: 127756 - DNA, 106 bp, Homo sapiens
  chr16:88817838-88817944
  hyper
gacacgaaagaatcgcgctcggcgctgctacgggctcaaggcggcctcggcttagcgcacacatcgcggagtgccgggctccggggggcaccgcccgccctgctgg

SEQ ID NO: 127757 - DNA, 30 bp, Homo sapiens
  chr16:88818547-88818577
  hyper
tgcgaacatgcttaccgctgctgacctgtg

SEQ ID NO: 127758 - DNA, 30 bp, Homo sapiens; identical to SEQ ID NO: 10862
  chr16:88839824-88839854
  hyper

SEQ ID NO: 127759 - DNA, 33 bp, Homo sapiens; identical to SEQ ID NO: 10863
  chr16:88840132-88840165
  hyper

SEQ ID NO: 127760 - DNA, 30 bp, Homo sapiens; identical to SEQ ID NO: 10864
  chr16:88840445-88840475
  hyper

SEQ ID NO: 127761 - DNA, 30 bp, Homo sapiens; identical to SEQ ID NO: 10865
  chr16:88850740-88850770
  hyper

SEQ ID NO: 127762 - DNA, 115 bp, Homo sapiens; identical to SEQ ID NO: 10866
  chr16:88851817-88851932
  hyper

SEQ ID NO: 127763 - DNA, 30 bp, Homo sapiens
  chr16:88869870-88869900
  hyper
ttttgtcaggcgcgcgctgctgtttgcctg

SEQ ID NO: 127764 - DNA, 30 bp, Homo sapiens
  chr16:88878075-88878105
  hyper
gacaggcctggtgacgccggggccgaagga

SEQ ID NO: 127765 - DNA, 508 bp, Homo sapiens; identical to SEQ ID NO: 53477
  chr16:88878526-88879034
  hyper

SEQ ID NO: 127766 - DNA, 30 bp, Homo sapiens
  chr16:88923694-88923724
  hyper
ctggaggaggccttcgccgagctccagcgg

SEQ ID NO: 127767 - DNA, 31 bp, Homo sapiens; identical to SEQ ID NO: 10868
  chr16:88938185-88938216
  hyper

SEQ ID NO: 127768 - DNA, 382 bp, Homo sapiens; identical to SEQ ID NO: 53479
  chr16:88950010-88950392
  hyper

SEQ ID NO: 127769 - DNA, 1716 bp, Homo sapiens
  chr16:89006897-89008613
  hyper
ctgtgccgaggcccgcggccgtcaggaccccagggaccgcatgccaggcagggtccaggacccccagcgcggaccacctttagcctgcggggcagcgccggggacccgggcaggagggagaggagcaggagggagctctggacccccctccccagaccggccgccgccacctctgcctctcccagggccgccctcggcctccccactcccgggtctccgtcacgcgggccgcggggcctttgttaggaaaaccgggcggccccaggggagcccgcgagactcccagcgcccgggcgcgtcgttcccctcgaagtttcgccgcagcccccgcaggtcaggctctgctcacggggggctgcgctcagcccggatgggtgggcgctgggcgggttggctccaccctgccgtgggcaccaactttgaaaacggcccgtgcgctcggcgcggctgcggcgcagatccgggaacggcagccgcgggcggagtcggggtagagcggcggcggcgcgcggggcggacacggcacttacggtcggggggtccgggggatccggcgggcggcggacggcgcacactcgcgactcggtccgggagtcgctgctccttccagcttggtccccgcctccacgactcaggggcggctgcgcgctgtcttctggcgccgcaccgggctcaggcgcgcggcggggctggggcgcgcggggcggccgcctgggccatgccggggactcggctccggccaccccgcgcgggaacaaagcgcgcaccccgcccggggcggtctccggcctccgcggcccgcgccgggtccagccgccgcgcctgtggctccaacgccgcgcgctcgcccgagagtctcacggggccccgcggcccccgccccgcgcgctccgcctccgcctcctgccccccgccgccgccgctgcgccacctgcctcccgcccggcgcccatggcgctcagctccgccccggggcgccggcctggagaggggctccccgccgccgagagccgcccccaacgcctccgccaccggggcggcgccctaagaactggccgtgggggccggggctgtgcggagcgccgggagcagggagaggggagaggggcgcggggagggggcgacgggcgcgccgcctcctgcggggggcggcgcggggaggcgcaggcgggggcgagcgaagaggttgaggggtgcgggcgccgtggagggggcgcggctctggggggcggcccccgcctgcgcccaccctctccccctccgcaggccgcgcacacccacctcgcagcagtcggcggccgcgggcctcgcagctttagaaccgcggcttctggcggccgcgcgggaggctgaacgggagttggggggtgtggggggggtggggaggtggggagttgggggggaggtcgctccttcggccgccgcccccgccccctgccccgcgctcgcccccagcgcggcgcctggcccggcccggggccacctccgtgcgtggccggcaggggtcgcgctccccccgctcagcctcccgggcgggtccgatgcgaagccctcgcttcccgcgggtcccggggccaggtcatttgcatacactttgcattcatttgcatatcgtgcgtttcatgtccacctgcagaaacgccccgagccgctgctctgccctctccgcactttctctgccggcaggccccctcccccgcccgctttgcctttccc

SEQ ID NO: 127770 - DNA, 30 bp, Homo sapiens
  chr16:89104161-89104191
  hyper
gaggtgctgaaatggcgtccggcgtctgcc

SEQ ID NO: 127771 - DNA, 30 bp, Homo sapiens
  chr16:89160026-89160056
  hyper
ggcccagcaatccgcgttgggagtggtccc

SEQ ID NO: 127772 - DNA, 30 bp, Homo sapiens
  chr16:89160664-89160694
  hyper
gagccggcggggtccgtgttcaggcatcct

SEQ ID NO: 127773 - DNA, 30 bp, Homo sapiens; identical to SEQ ID NO: 53481
  chr16:89189064-89189094
  hyper

SEQ ID NO: 127774 - DNA, 506 bp, Homo sapiens; identical to SEQ ID NO: 53482
  chr16:89189484-89189990
  hyper

SEQ ID NO: 127775 - DNA, 30 bp, Homo sapiens; identical to SEQ ID NO: 53483
  chr16:89190315-89190345
  hyper

SEQ ID NO: 127776 - DNA, 41 bp, Homo sapiens; identical to SEQ ID NO: 10872
  chr16:89266728-89266769
  hyper

SEQ ID NO: 127777 - DNA, 439 bp, Homo sapiens
  chr16:89267385-89267824
  hyper
ccccaccggcgccttcggctccaatcctccagcgccccaggccgccccgcgcctggcagctcccaggcccagattcagcccccgcccggcccctctccgcgggtccggcccgtgcgcgcccgtctgcggcaccgtcgggccggcggccgccccggagcaggaagcccaggaggacggccggggggcccgggtcagaggcgccaggtaggatggagaaaggacacccagggcctcggcgggctgggggcggggagggctgcggggcagcagggacgggggcgcacctgggtgaccgggctttgcaggaggccggcgccgggcagcgcgtagagccagccgcgtgtgcagggccgggtgccgttgcgtgcgggcgcggggcgcgggcccggggcgggtgcagggcgcgggatcggggtagcgcaggagcaggcaggggctc

SEQ ID NO: 127778 - DNA, 157 bp, Homo sapiens
  chr16:89267957-89268114
  hyper
cggagctcagcaccagccccagcactatgcagggtacccacgaggcggaggccagcaggcgccgggcccggccaaagccgcccgcagctctcagcacccgcgcctcctgctccatcggtcgcaggctgcgctcgggacggggcggggcctggaccag

SEQ ID NO: 127779 - DNA, 103 bp, Homo sapiens
  chr16:89268345-89268448
  hyper
ggggcgtggcaggggcgtggccgggagcgctcaggtgccctcgcggcgcaggtgcactcaggttgcccgggggcgcgcgggctccggccggcgtcccggggtg

SEQ ID NO: 127780 - DNA, 160 bp, Homo sapiens
  chr16:89268831-89268991
  hyper
atgggcacgtttctgcgtttcagaacgctgttcgcttcctcacacttagattgaggtggaactcacgtcacataaaccgggtcgcaaggctcagctcagcggggcccccccaacagtgttgcgggaccagcaccttctcgggctccggaacagcttctac

SEQ ID NO: 127781 - DNA, 30 bp, Homo sapiens; identical to SEQ ID NO: 53487
  chr16:89284368-89284398
  hyper

SEQ ID NO: 127782 - DNA, 602 bp, Homo sapiens
  chr16:89323408-89324010
  hyper
tccgaaagcgcattccgtcgtcaaaatacaccacgaggtcccgggtgccctcaccgccctccccttcctcgccctctcgtcgttgctgttgggacgggctctcgtcgcccgcgctggggcgcagtgactcagtgtgactcaggcctcgcccgcgctcgggctcacggagcagctgggacgacgggcgtgagcgcagaagccgcagagcccctcgcgcgcctcgcgggggtgtggtggggggtggccgcctccggggacgggcgggctgcggggctccgaccccgcggcagcgtctcgcggcgcctgaggccccggtgggcgtgggttccaggctgcacggctggtttgccgtctgggggtggtttgtgctgggacccccgcctcgccgcaaggaccgacgctttccgtatcccgggttcctgcttcggtgtaccggcagaatctgatcacgcgtggcctggagaatgcgcccagggtcgtattgcctggaaggagctctcagccgctgggggagccggaagggagacggttctgccctggacgcgggctgctcggcggccccggctctcctccaaccggccaaaccccgcctggtcccgccg

SEQ ID NO: 127783 - DNA, 30 bp, Homo sapiens
  chr16:89509220-89509250
  hyper
ggcctggtgagcctccggcgctcctgcccc

SEQ ID NO: 127784 - DNA, 30 bp, Homo sapiens
  chr16:89558009-89558039
  hyper
tttcttgggcaacacgcattatggtcgaga

SEQ ID NO: 127785 - DNA, 264 bp, Homo sapiens
  chr16:89614906-89615170
  hyper
gggctgctgccgcccgtggctgtggagggacagccgtgctttcagcgcagcaggggctctgcggagaggtgtggatctgcagcaccacctctggtgaaactcatggtcccgaccgtcagtaggaacgggagatgagttttggtgacgggtgaccggtgggctgaccgcctctgactgccgttccgtggctgctcagtgtggggtctgcgacgtctgtgaggagagaggaccaaactgggaatcggagctgctggaggtttccat

SEQ ID NO: 127786 - DNA, 76 bp, Homo sapiens
  chr16:89626700-89626776
  hyper
tttttctgcctttgcgctgcaaacgtgtctcacaaatgtgaacaaacagaattcctcgggcgtcgcccgttcgccg

SEQ ID NO: 127787 - DNA, 154 bp, Homo sapiens; identical to SEQ ID NO: 53491
  chr16:89627716-89627870
  hyper

SEQ ID NO: 127788 - DNA, 113 bp, Homo sapiens; identical to SEQ ID NO: 53492
  chr16:89641241-89641354
  hyper

SEQ ID NO: 127789 - DNA, 417 bp, Homo sapiens
  chr16:89641413-89641830
  hyper
cgtggcttttggcgaggtccgtgccctatttttaggcagaaatcggcaaaaagagtggactgcgaggtggtttctgtccccgccgacgcctcctcttccgctgctccctcccccgggaccggtgatggggaaggtgggggagtgagttcagggcggagcgggcccaccccccacggaacccaggcctgccccgccccgccccggcctcgggggactggtgtggaccgtgccccgcggacccctcggaatcagaccgcgattcagccctcggccccccgggacggtccttccagccccagacgagcgcggcgcctgcacacaacaggcgcccactaaatgcttgttgatggaggtggcgagtacccgaaaccagcggagcctggaaatgggatcctagagatccgggaagggcgcggg

SEQ ID NO: 127790 - DNA, 30 bp, Homo sapiens
  chr16:89642283-89642313
  hyper
cgggcccccgaacgccgggagcatgagcgc

SEQ ID NO: 127791 - DNA, 30 bp, Homo sapiens; identical to SEQ ID NO: 53494
  chr16:89723964-89723994
  hyper

SEQ ID NO: 127792 - DNA, 30 bp, Homo sapiens; identical to SEQ ID NO: 10876
  chr16:89724282-89724312
  hyper

SEQ ID NO: 127793 - DNA, 30 bp, Homo sapiens
  chr16:89753108-89753138
  hyper
agcgctcggcatggcggagccagatctgga

SEQ ID NO: 127794 - DNA, 30 bp, Homo sapiens
  chr16:89766452-89766482
  hyper
gaactggactgttcccgtgtcgctgtctca

SEQ ID NO: 127795 - DNA, 30 bp, Homo sapiens; identical to SEQ ID NO: 10877
  chr16:89768615-89768645
  hyper

SEQ ID NO: 127796 - DNA, 552 bp, Homo sapiens
  chr16:89778232-89778784
  hyper
gaccccgcccccctcgctgggctcctcctacaaagcctgggcccgtgggggacgcacatggtcctgttcgtactccaggatggcggcgtaaagggcccgctgctcccgttcctccggggtcagggcgacttggctgcaaaacctcctggggagaaaggcacgcggtgggtgccggggccaggccctccccgcagcggccccaggggcgggcaggagtcccacctgttggcggcctcctggagccgcagccggcgctcctccatctttctctggagctgggtgcagagtcaaggggccgagcgtgggatctgagcgggccctcggttcccaaccccgtcccacacccggagaggccgggacgtcccagggacctcctctcggtgaggggctgtccccaggtaaggcttctggggcagaaggcagcctgcgctcaagccaggagggccgggccagagaacatgggggacggcggccgggccttcccctgagaccctgcctctgcaaagcggggagcccctcggccctgtaccccgaccccggaacctccgctcc

SEQ ID NO: 127797 - DNA, 30 bp, Homo sapiens; identical to SEQ ID NO: 10878
  chr16:89786954-89786984
  hyper

SEQ ID NO: 127798 - DNA, 33 bp, Homo sapiens
  chr16:89787465-89787498
  hyper
cgggtgggttgtcgcgacggagccgggcctctt

SEQ ID NO: 127799 - DNA, 201 bp, Homo sapiens
  chr16:89788694-89788895
  hyper
tcttgaagttgcttcgctggagaggccttagaggcctttgaaatttgaaagatttcttggaccagcggccacatcccccacagggcggcttgtcccgccgagagccgcgcgcccgagccgcttgctgtgtccgggagccgcgcgaagggcgctgcaggcgctgccctcggacctggagtccgggacgccctgtgctcagga

SEQ ID NO: 127800 - DNA, 95 bp, Homo sapiens
  chr16:89882313-89882408
  hyper
ggcttcgcaggaggcgcacagctgattcctttaatttctgtgccctttcaggattatatttttccctcttgacccttcccgctacggagagaagt

SEQ ID NO: 127801 - DNA, 30 bp, Homo sapiens
  chr16:89882919-89882949
  hyper
cccgcggcctgccgcgcccacctacccagc

SEQ ID NO: 127802 - DNA, 238 bp, Homo sapiens; identical to SEQ ID NO: 53501
  chr16:89894334-89894572
  hyper

SEQ ID NO: 127803 - DNA, 30 bp, Homo sapiens
  chr16:89895293-89895323
  hyper
gaccggttctggagcgggagatccccttct

SEQ ID NO: 127804 - DNA, 46 bp, Homo sapiens
  chr16:89927370-89927416
  hyper
gctgctggtctggggccgtggtctctgctgccgcctgctggggccg

SEQ ID NO: 127805 - DNA, 30 bp, Homo sapiens; identical to SEQ ID NO: 10881
  chr16:89939433-89939463
  hyper

SEQ ID NO: 127806 - DNA, 51 bp, Homo sapiens
  chr16:89984232-89984283
  hyper
agctgtaaatgggacgagtaattccatccccctcccgcttccacccttcag

SEQ ID NO: 127807 - DNA, 85 bp, Homo sapiens
  chr16:89984502-89984587
  hyper
cagcggaaatggcgcgccgcccggggagggcgggagcagcgtcccgggtgcccctgtgaggatgagcgacgagatgactggaggg

SEQ ID NO: 127808 - DNA, 30 bp, Homo sapiens; identical to SEQ ID NO: 53505
  chr16:89985147-89985177
  hyper

SEQ ID NO: 127809 - DNA, 30 bp, Homo sapiens; identical to SEQ ID NO: 53506
  chr16:89988237-89988267
  hyper

SEQ ID NO: 127810 - DNA, 203 bp, Homo sapiens
  chr16:89989100-89989303
  hyper
ttggtggaggaggtcgggtgcccaccccctccccgcccactgcggaagccggcgacccacggagctcgctctcggccgccgccacccctctgtgttcgcgcccttccgagctctgatccgacgctttgtttcttctcagtgggttcagggcctgggccagcctttacctacctcccccacccaaaaccggcaaaagctcagag

SEQ ID NO: 127811 - DNA, 254 bp, Homo sapiens
  chr16:89990061-89990315
  hyper
ggtgacctcgggctgtcgaggcgcagctcacgtcagtcgcgaagcctcagccccctccacacctgcgccccctccacacctgcaccccctccaccgggcctccgcaggtgcagctgggagccctgtctgggcgtggccctcttttttggggccgcggcatagccttgagtgagacgggtggggtaggcaggtttgggtggggtggggggttctcctcacagccgtgatttcctcggcccgaaccccccactgga

SEQ ID NO: 127812 - DNA, 258 bp, Homo sapiens; identical to SEQ ID NO: 53509
  chr16:89992767-89993025
  hyper

SEQ ID NO: 127813 - DNA, 30 bp, Homo sapiens
  chr16:90039110-90039140
  hyper
ggtggcccaggaggcggcaggacggccaag

SEQ ID NO: 127814 - DNA, 124 bp, Homo sapiens; identical to SEQ ID NO: 53510
  chr16:90085455-90085579
  hyper

SEQ ID NO: 127815 - DNA, 72 bp, Homo sapiens; identical to SEQ ID NO: 53511
  chr16:90086126-90086198
  hyper

SEQ ID NO: 127816 - DNA, 46 bp, Homo sapiens
  chr16:90087049-90087095
  hyper
cgcagtgggccctgtcgggatcccagggagccgcaattcagggctc

SEQ ID NO: 127817 - DNA, 529 bp, Homo sapiens; identical to SEQ ID NO: 53512
  chr16:90088769-90089298
  hyper

SEQ ID NO: 127818 - DNA, 384 bp, Homo sapiens; identical to SEQ ID NO: 53513
  chr17:523543-523927
  hyper

SEQ ID NO: 127819 - DNA, 492 bp, Homo sapiens
  chr17:576351-576843
  hyper
aaaaaaaaaacaaaaacaaaaacaaaaaaaaaacaacggcagcatcatttcgaaagccaggaggtcctccagagagcagaaacatggatgagtgctaccacatctgataagccctacacggaagccctcaccacatccactgagggtggacaccaagggtcaagtcgcctctctttagagaaagtctcttcttttgttactgctgaccaccccggcatcactgagagctgttgctatggaaacgaggtatccccagctgaaacagaggtgcttcagccagcctcagcaatgctaacaatgcagcccgctctccacgacggtgctcaacagcagcagaggctgcgggactctcacacacccagcctcagcaatgccaacaacgcagcccactccccatgatggtgctcaacagcagcagaggctgtcggactctcacagccacagatggctgcacgtctacagctctttgcttccctacgtgtccgagaactc

SEQ ID NO: 127820 - DNA, 18 bp, Homo sapiens
  chr17:617979-617997
  hyper
cgcgagcccaactcaggc

SEQ ID NO: 127821 - DNA, 30 bp, Homo sapiens
  chr17:618303-618333
  hyper
ggcctccagcaggacgcccggatgaaagtc

SEQ ID NO: 127822 - DNA, 79 bp, Homo sapiens; identical to SEQ ID NO: 53515
  chr17:635475-635554
  hyper

SEQ ID NO: 127823 - DNA, 138 bp, Homo sapiens; identical to SEQ ID NO: 53516
  chr17:635797-635935
  hyper

SEQ ID NO: 127824 - DNA, 299 bp, Homo sapiens; identical to SEQ ID NO: 53517
  chr17:635959-636258
  hyper

SEQ ID NO: 127825 - DNA, 30 bp, Homo sapiens
  chr17:655093-655123
  hyper
gcgcgagccccgggcgcttccaagggctct

SEQ ID NO: 127826 - DNA, 91 bp, Homo sapiens
  chr17:655678-655769
  hyper
gggtcccagcgggtcgggctcatgattccccggccccgcattcaccctcacccggtaaccccgggcgtgccccgcacacagttcaccccca

SEQ ID NO: 127827 - DNA, 90 bp, Homo sapiens
  chr17:655880-655970
  hyper
cgccgccccctccagacagcagcgttccggatcctagacgctttttgacggctggtcctccccagaaaatgcgccgtgtgagcccaaaca

SEQ ID NO: 127828 - DNA, 30 bp, Homo sapiens
  chr17:685088-685118
  hyper
aacattttatttaccgtcttttccggtaga

SEQ ID NO: 127829 - DNA, 59 bp, Homo sapiens
  chr17:685405-685464
  hyper
cttcatccccaggacgtcccgatagaaacgcgccgtctggaagcggtttcccactttga

SEQ ID NO: 127830 - DNA, 30 bp, Homo sapiens; identical to SEQ ID NO: 53519
  chr17:800577-800607
  hyper

SEQ ID NO: 127831 - DNA, 30 bp, Homo sapiens
  chr17:849941-849971
  hyper
gacgaccccccgcagcgggcgactgtaccg

SEQ ID NO: 127832 - DNA, 152 bp, Homo sapiens
  chr17:850230-850382
  hyper
agccagtcggccccacggtgcgtcctccaggggccgcatgaggagagacgatacacgccagcactcagggcccagcacgggccccccactcagtgaaaagcatcctctcactcttaggcttgtcatgatcatgcaccggcagcgtccccctc

SEQ ID NO: 127833 - DNA, 30 bp, Homo sapiens; identical to SEQ ID NO: 10889
  chr17:873368-873398
  hyper

SEQ ID NO: 127834 - DNA, 30 bp, Homo sapiens; identical to SEQ ID NO: 53521
  chr17:881934-881964
  hyper

SEQ ID NO: 127835 - DNA, 30 bp, Homo sapiens
  chr17:882816-882846
  hyper
cagcagcgagatgccgcgggcgcccagcga

SEQ ID NO: 127836 - DNA, 85 bp, Homo sapiens; identical to SEQ ID NO: 53522
  chr17:883201-883286
  hyper

SEQ ID NO: 127837 - DNA, 30 bp, Homo sapiens; identical to SEQ ID NO: 10890
  chr17:899767-899797
  hyper

SEQ ID NO: 127838 - DNA, 237 bp, Homo sapiens
  chr17:900016-900253
  hyper
gaggcgcgagagcacgcgcaacgcttcctgggaaatgtagttgggtgtcggattagaactacaaatcccggtactcaccgcgctgcagccccgaccgtgagggcgctttctggtgaatctgaatctcgtttgtctgtgacatggggaaagctgtccaagcccaattccattttcacaagaggctttctttttggaaacatgatagcggtctcgctggtgtgcgcaccaggagcgttg

SEQ ID NO: 127839 - DNA, 30 bp, Homo sapiens; identical to SEQ ID NO: 53525
  chr17:900476-900506
  hyper

SEQ ID NO: 127840 - DNA, 30 bp, Homo sapiens
  chr17:900804-900834
  hyper
ttgggttagagaatcggtgctgtggttggg

SEQ ID NO: 127841 - DNA, 31 bp, Homo sapiens; identical to SEQ ID NO: 10892
  chr17:914942-914973
  hyper

SEQ ID NO: 127842 - DNA, 213 bp, Homo sapiens; identical to SEQ ID NO: 10893
  chr17:1011775-1011988
  hyper

SEQ ID NO: 127843 - DNA, 30 bp, Homo sapiens; identical to SEQ ID NO: 53528
  chr17:1012273-1012303
  hyper

SEQ ID NO: 127844 - DNA, 30 bp, Homo sapiens
  chr17:1012952-1012982
  hyper
ccgcgtcccgccgccgctggaggagtcagg

SEQ ID NO: 127845 - DNA, 30 bp, Homo sapiens; identical to SEQ ID NO: 53529
  chr17:1026524-1026554
  hyper

SEQ ID NO: 127846 - DNA, 30 bp, Homo sapiens
  chr17:1082511-1082541
  hyper
aactcgggtgccaacgactgctcccaaaac

SEQ ID NO: 127847 - DNA, 147 bp, Homo sapiens; identical to SEQ ID NO: 53530
  chr17:1082870-1083017
  hyper

SEQ ID NO: 127848 - DNA, 16 bp, Homo sapiens
  chr17:1083490-1083506
  hyper
cgcagacccaggtccc

SEQ ID NO: 127849 - DNA, 30 bp, Homo sapiens; identical to SEQ ID NO: 53532
  chr17:1131863-1131893
  hyper

SEQ ID NO: 127850 - DNA, 74 bp, Homo sapiens
  chr17:1132221-1132295
  hyper
gcccgggggtctcctccgcggcgaggggcgagcccgggcggcccttggcctcggcctcccgctgctccaggtcg

SEQ ID NO: 127851 - DNA, 31 bp, Homo sapiens; identical to SEQ ID NO: 10894
  chr17:1133188-1133219
  hyper

SEQ ID NO: 127852 - DNA, 30 bp, Homo sapiens; identical to SEQ ID NO: 53534
  chr17:1163330-1163360
  hyper

SEQ ID NO: 127853 - DNA, 88 bp, Homo sapiens
  chr17:1174273-1174361
  hyper
ggccgcgcgcggggacaccggggacacaggcgccagccccccgccgcctgcagggcccagcctcgcgcgcccagacgccgcccgcccc

SEQ ID NO: 127854 - DNA, 29 bp, Homo sapiens
  chr17:1174384-1174413
  hyper
cgcctcgtgccccccgcacgcgcccctgg

SEQ ID NO: 127855 - DNA, 92 bp, Homo sapiens; identical to SEQ ID NO: 10895
  chr17:1390868-1390960
  hyper

SEQ ID NO: 127856 - DNA, 31 bp, Homo sapiens; identical to SEQ ID NO: 10896
  chr17:1391199-1391230
  hyper

SEQ ID NO: 127857 - DNA, 183 bp, Homo sapiens
  chr17:1420194-1420377
  hyper
gggccgtcttccggcggaagttgtctcttcgccgccgccgcagcctctgccccactcgtgagggatccgagggctccgtccttgtgctgtcttcgccccggctcccaggggtcaaacgagggtcgggggtggggacacgcagcctagccactgtcctgcctgggatccggtctcccccgcccc

SEQ ID NO: 127858 - DNA, 30 bp, Homo sapiens
  chr17:1531564-1531594
  hyper
gggccagcatggaacgcagcgtgaggtggg

SEQ ID NO: 127859 - DNA, 30 bp, Homo sapiens
  chr17:1532202-1532232
  hyper
gggctggaaacaggcgtcgaccaatcagca

SEQ ID NO: 127860 - DNA, 30 bp, Homo sapiens; identical to SEQ ID NO: 53538
  chr17:1552955-1552985
  hyper

SEQ ID NO: 127861 - DNA, 30 bp, Homo sapiens; identical to SEQ ID NO: 10898
  chr17:1553187-1553217
  hyper

SEQ ID NO: 127862 - DNA, 30 bp, Homo sapiens; identical to SEQ ID NO: 53540
  chr17:1561598-1561628
  hyper

SEQ ID NO: 127863 - DNA, 184 bp, Homo sapiens; identical to SEQ ID NO: 10899
  chr17:1588081-1588265
  hyper

SEQ ID NO: 127864 - DNA, 803 bp, Homo sapiens
  chr17:1613224-1614027
  hyper
ctcgaggccccggccgcagtctccctgtgcgcacccccaccccagtctcagctctggagacgcccggcgggtctcccggcctcagcctcccacccctcgccctcgccccgtgcgcctcgagcccccaagcccgcacccgagcagcgccccggtccccgagagcaggctgtgcgccagggagacgcagaggttccaccactgccagcggtcccgagcggccgattccggcgtgggcagccgccgcaacccccagtgcagcccccggaacgcgaggaaggaggcgccggccaccaggagccccgtgggcgccatggcctggcggttggggggttgcggggagtccgggtcggtcccctcggcgcccgcgctctcggccgggactgggaacccgtttcccggcagggctggggccccggctcccctccccgccgcgcctttgggatcagcaggaacttttccccgttcgtccacgcccagtccctcgcctgggcggtgattggagcagccgcggggccgccgcccccggagccttggccaccgattgcgtcttgctccagccgggggagcggttcgggggctccgggcagtagaccatgccctggagctcggggggcctccgggatgttcgccaataggggtcctccccagctccaagcgtcctgaagcgctggagttgcagacctgggtctccagtctaacctcaactgacactcccgggccccacccacgaaccttgacctcttcccggctcccgcgactttcacctgctgagcgtcatcaccacccaccgccacaccctgcaa

SEQ ID NO: 127865 - DNA, 30 bp, Homo sapiens
  chr17:1619007-1619037
  hyper
cttccctgccagggcgctgaactggccctg

SEQ ID NO: 127866 - DNA, 404 bp, Homo sapiens
  chr17:1619655-1620059
  hyper
cccgcctctccgggcgccctggctctgattggcaaggaggccacccttttgccgggcggaattgcacgaagccacgcccacccactgaggagccggccaatagacggacaggtgtggcccagccctccgcgtcagcgacccgcttagaaaagcgctacgtcaaacgagagtcctaaagagcaggcgaaagccacggcgtctgcgtttgcaatgcatgctggtccgtgtagttctcagcctgacaccgtcgttcccagaacccagcgcgctctgtgagttggcatttttaaactgagctcggaatccagcccggggaagtccttaaagggcgacagcccctccttgttggagtcgtgagtgcttcttttagacattccccaaactgactcgccggcctctgcggg

SEQ ID NO: 127867 - DNA, 232 bp, Homo sapiens
  chr17:1667770-1668002
  hyper
atgtcagggcagccacgtgcaagagcagctggctgggaacgcagaggtctgcggctcgaggcggggtttagaaagaaaaccaggctgcttcctgctgcccgtcctgccttaagctgagtaaactcaaaggcaatcttctttcatgcctcacgatattgtccagtggattatctgatttaatttgaaggacgagagccaacaatcacacaacgtcctcccaaattttctgatc

SEQ ID NO: 127868 - DNA, 30 bp, Homo sapiens; identical to SEQ ID NO: 53543
  chr17:1811610-1811640
  hyper

SEQ ID NO: 127869 - DNA, 30 bp, Homo sapiens; identical to SEQ ID NO: 53544
  chr17:1812081-1812111
  hyper

SEQ ID NO: 127870 - DNA, 252 bp, Homo sapiens
  chr17:1881119-1881371
  hyper
gccaaccagcggccgcgggccgcccgggtgggagccggggtcgggggcgcatcctgcatcctgcaccccgcatcccgcacctgcatcggagccccgcgtcccgcaccccgcaccctgcaccctggatcctgcatcctgcaccccgcacccctcatcccgcatcttgcaccccggatcccgcaccccgcatcctgcaccccgcatctctcactccgcatccggcaccccgcagctgcacgcaccgcaaccctc

SEQ ID NO: 127871 - DNA, 450 bp, Homo sapiens
  chr17:1901338-1901788
  hyper
ctccgccccaggccgcgatcgatcccggcctctcccggcctcattaccgagggagagctgccggggctggcaggggagccagacggcggcggagggggcggggaggcctccttggctccctggcccggattaaatatttactatgttttgtttggcctttgggggaggggcggggagggctgtcgcattgatccggagctgcagggcgagggcggtgcccagacccggcgccccaaggcctcccgcaggccgacccgagccgagcgcgccctttgggcaccggccccgcccgggagggtcttctcgctctagagccgggggcccgcgctgagagatcggggttaccgcgcggggagccgcggccgcgctgggatccgttccctctcgcgggagccgccggccggggatctgcgcaccccacgcgccccgctcgggtcgggcctcccctcc

SEQ ID NO: 127872 - DNA, 271 bp, Homo sapiens
  chr17:1901813-1902084
  hyper
cgctgcccagcgcgcaggtccctgccggatccccggcggctttcctgcccccactttacagacgtgaacgctgaggcggagggtgggggacgtggggccggctcgcctcctcctgggctcgccgggatgtggcctccgaggtcgccgcggcgctttcctgcccaagctggcgctgccggagcgcccgggccccgctcccctcacgggcctcgcagcacagacggggacaggggcggcctcgcgcgcacggggaccccggggtgggggtggg

SEQ ID NO: 127873 - DNA, 1253 bp, Homo sapiens
  chr17:1927171-1928424
  hyper
gccagccgcaggcgccgcggcttctcagcctcctggccgggccaggcgcgggggggatcccggcggggcgccacagcctgctcgggcctgggaggggagaggcagacgcagaggctggaacagctggtggcggggcccgtgggctcccggcgtgatcacctgccctcccagggcccgggggacggcgccccgcgtggcaaccacgtgggggcgcggcgggacttccccggtgcccgcaccaactttgccgcgctccgtaccgggccgggctgctggggcgtctagctacggtggtcgcgaagccagctgtcctcaagttgagctgtgcaccggtcgcgcacactggcggcacggctttcgcgtccctccgctcccagcataatgaaagtttgaggaactggacatcaggcgctggccgctccccaccctcagccgctgggtgcccagagcccatccctagcgatcagagcagaactgcagagaagacgtccgcgtccgggccccgtctggggagctagggcgcgcggggagcgcccgggccgcgcggtcactgaccgctggctgcacgggggcgccgtgcggactcggcctccacaaagcggcagaagcaagggcgtgtgcccgcgcagggaatggaggctgcaagtgcaaaactttatcccagcaaagcaaaggtcccaggaggccggctccccttccaccaccggccgctcactctggtctccgactgacccctccgggccggatctctaggcctggccactcgatccatggagaaaaccccgtgtctcacaactggccgctgacgggagctgagccccagcagcagcccctcggcgggtgcgcccggcaaaacccaccagcccgccgggggctacttcccagaccgggagccccggcgccgggcggcgcccgggctcgcggctctttccggagcgcattcaacttcaacttgcccctgcggctccaactcacctttgcgaagcatgttggccacggggccgccgctccgaggtcggcctaggcgcactccctcccggggtccagattcaaatccctgggcgccagctgcagctaatccgagcgcgtcgaggcgggggcaagccggggatccgctcgtgcccggtggcccggccccgcaggggcatggtgagctccagccccgcgccgagggcaccggcgcccgcaagcaaccgtggtgctgcccggcagccccgcgcgcttgctcagccccggggcgagcggcttgctcc

SEQ ID NO: 127874 - DNA, 296 bp, Homo sapiens; identical to SEQ ID NO: 53548
  chr17:1929077-1929373
  hyper

SEQ ID NO: 127875 - DNA, 83 bp, Homo sapiens
  chr17:1933403-1933486
  hyper
gtctgcgctctccgcgttcttccagcgctgtctttttagtaccacatgcgcaggcaggtgatggcggcgctggtcgtatccgg

SEQ ID NO: 127876 - DNA, 31 bp, Homo sapiens; identical to SEQ ID NO: 53550
  chr17:1945164-1945195
  hyper

SEQ ID NO: 127877 - DNA, 30 bp, Homo sapiens
  chr17:1954393-1954423
  hyper
cctccgcggctggtccgtcccgcttacctg

SEQ ID NO: 127878 - DNA, 329 bp, Homo sapiens
  chr17:1954661-1954990
  hyper
cggggtagggggagccgcgcccctgcccagccgacaaggggttaactttccggaaccgcgggcctggggccggggaggcggcgcggaggggcgcggcgggcccttcgagcttattcacgctctccttccggagccccgcggctcctgggggtcttcacgtggcagccccttccccctcctcagttcctggacctgacgtttctgccgtcacaccccgcaaggccactgcggtgtcgccaccctctcgtcctgcagggtgggcaggagaggaagctggactcccgtgggggcctggggcgcagcgagggctgtggcgtcgggggccggga

SEQ ID NO: 127879 - DNA, 31 bp, Homo sapiens
  chr17:1957013-1957044
  hyper
cagcaaagggagcctccggggggcgcccgag

SEQ ID NO: 127880 - DNA, 363 bp, Homo sapiens
  chr17:1957350-1957713
  hyper
gtgcggggcggaggcggagcgtgggccgcggagatccggcgttcgcaggaggcttggtgcgcggcggggctgcacggggccacttccggagtagtactgcgagcagcggcgcgacagtgcggggtcccctttctcccagaagagacgtcacccacacaaacctgaccttcacgtggggcgcgggaccttgcggggtcccagccgcaggcgcccctgttgtttccttcgggcgggtgggttggagaagaagtccacgcgggattcttcaaaacggcgtacagggggattctagggccccatggttacttctttggaccccccggaggcgctgtccagccacttccagtcgccctgatgactcgt

SEQ ID NO: 127881 - DNA, 30 bp, Homo sapiens; identical to SEQ ID NO: 53552
  chr17:1958075-1958105
  hyper

SEQ ID NO: 127882 - DNA, 131 bp, Homo sapiens
  chr17:1959132-1959263
  hyper
gggggagaaggggccgggggagccgcggagggaggcgccgggcccgcgcgtgtagggcccaggccgaggccgggacgcgggtggggcgcaggcccgggtcagggccgcagccggctgtgcgccgtgcccgc

SEQ ID NO: 127883 - DNA, 198 bp, Homo sapiens
  chr17:1959436-1959634
  hyper
gggccccgaccgagggttgacagcccccggccagggcggcgccagggcgggcaccgcgctcccctcctccgtatcacttcccccaactggggcaacttctcccgaggcgggaggcgctggttcctcggctccctttctccctacttgggtaaagttctccgccctgaatgacttttcctgaagcggacattttactta

SEQ ID NO: 127884 - DNA, 665 bp, Homo sapiens
  chr17:1961433-1962098
  hyper
ctgctgcggccctaccgctgcgcgtcgtgcgacaagagctacaaggacccggccacgctgcggcagcacgagaagacgcactggctgacccggccctacccatgcaccatctgcgggaagaagttcacgcagcgtgggaccatgacgcgccacatgcgcagccacctgggcctcaagcccttcgcgtgcgacgcgtgcggcatgcggttcacgcgccagtaccgcctcacggagcacatgcgcatccactcgggcgagaagccctacgagtgccaggtgtgcggcggcaagttcgcacagcaacgcaacctcatcagccacatgaagatgcacgccgtggggggcgcggccggcgcggccggggcgctggcgggcttgggggggctccccggcgtccccggccccgacggcaagggcaagctcgacttccccgagggcgtctttgctgtggctcgcctcacggccgagcagctgagcctgaagcagcaggacaaggcggccgcggccgagctgctggcgcagaccacgcacttcctgcacgaccccaaggtggcgctggagagcctctacccgctggccaagttcacggccgagctgggcctcagccccgacaaggcggccgaggtgctgagccagggcgctcacctggcggccgggcccgacgg

SEQ ID NO: 127885 - DNA, 61 bp, Homo sapiens; identical to SEQ ID NO: 53554
  chr17:2014967-2015028
  hyper

SEQ ID NO: 127886 - DNA, 192 bp, Homo sapiens
  chr17:2156672-2156864
  hyper
ctgatccgcccgcctcggtctcccaaagtagcctaaaatatttactatccagatcgttacagaaaaaaaatgtctgctgatacctgggctaaataatctacaacgctggtgtctcaaaagatgtttcttcctgcaccgcacttcagagctaccacacacgtgtactggaaacagtcacgattctcatgagct

SEQ ID NO: 127887 - DNA, 30 bp, Homo sapiens
  chr17:2206200-2206230
  hyper
tttcacagactggccgcaaacctagagaag

SEQ ID NO: 127888 - DNA, 92 bp, Homo sapiens
  chr17:2206902-2206994
  hyper
caggagctgggcggcgcgactcacctctgctcccggcctgcggggccagagtagccaggatcccgcgcagctccgacgcggagatccgcaca

SEQ ID NO: 127889 - DNA, 30 bp, Homo sapiens; identical to SEQ ID NO: 53556
  chr17:2240952-2240982
  hyper

SEQ ID NO: 127890 - DNA, 30 bp, Homo sapiens
  chr17:2296534-2296564
  hyper
cgcggaagccccgccggtttccagggaaac

SEQ ID NO: 127891 - DNA, 30 bp, Homo sapiens
  chr17:2296882-2296912
  hyper
gtggacggggaccacgcccaaccctccccg

SEQ ID NO: 127892 - DNA, 51 bp, Homo sapiens; identical to SEQ ID NO: 53557
  chr17:2302238-2302289
  hyper

SEQ ID NO: 127893 - DNA, 249 bp, Homo sapiens
  chr17:2303773-2304022
  hyper
cacccctccccaggcggcggctctcgcggggagccgtgcgctgccaggctccgcaggccgcccgggagggggccctgtccgcggtttcgcgtgggttcggggaccggggtcactcgcttccccttccccagtgccccaggggcccagcccggccgctcaccacgtgctctctgttgttgctgcgcttgccattccaggaagcgggccgcctccagtagcgtctctatgctcatcgcgccgagagctgcc

SEQ ID NO: 127894 - DNA, 30 bp, Homo sapiens; identical to SEQ ID NO: 53558
  chr17:2415344-2415374
  hyper

SEQ ID NO: 127895 - DNA, 21 bp, Homo sapiens
  chr17:2415605-2415626
  hyper
gatccggccggacgcggcggc

SEQ ID NO: 127896 - DNA, 20 bp, Homo sapiens
  chr17:2415865-2415885
  hyper
ctgagcgaaagagcaagact

SEQ ID NO: 127897 - DNA, 30 bp, Homo sapiens; identical to SEQ ID NO: 53560
  chr17:2496638-2496668
  hyper

SEQ ID NO: 127898 - DNA, 30 bp, Homo sapiens
  chr17:2498007-2498037
  hyper
accggctcctcggtcgggagttgccttttg

SEQ ID NO: 127899 - DNA, 30 bp, Homo sapiens
  chr17:2614425-2614455
  hyper
gatgcctgggaggccgccgcggagcaggtg

SEQ ID NO: 127900 - DNA, 16 bp, Homo sapiens
  chr17:2615185-2615201
  hyper
cgcggtgactttccag

SEQ ID NO: 127901 - DNA, 222 bp, Homo sapiens; identical to SEQ ID NO: 53561
  chr17:2627361-2627583
  hyper

SEQ ID NO: 127902 - DNA, 538 bp, Homo sapiens; identical to SEQ ID NO: 53562
  chr17:2627798-2628336
  hyper

SEQ ID NO: 127903 - DNA, 30 bp, Homo sapiens; identical to SEQ ID NO: 53563
  chr17:2653173-2653203
  hyper

SEQ ID NO: 127904 - DNA, 497 bp, Homo sapiens
  chr17:2658618-2659115
  hyper
agtagtttacttctttaggcatcacttcctgggtagaacgggtttcctaagggagtaaggcacagaacgaggcaatgggccgcctggtctctccgcgcgtcagtaggactcggggaaccagactccgcccagtgctccccagaaacccggctcctcggcgcggcggggagagacccggacggggagaggccgctgtcccgcccgttctgcggggccggcgctgacccggctccagccgcctccaggggcggggtctgagcgccgcgccctccccgcgccctccccgcgccctccccgcgccctccccgcgagcgcgccccggacacccgcctgcggcagccgagcctcctccaccgtgcggcccgcggagggcagggagcggccgggcgaggcatggcgggccgccgggcgccgggggagaagcgctggcagctggtgcgctggtgagtgggcgccgggcggcgcggggcctaatgcgggagcgaaccccgaggccc

SEQ ID NO: 127905 - DNA, 30 bp, Homo sapiens
  chr17:2659321-2659351
  hyper
accccgtccccctcccgcgggggcgccctt

SEQ ID NO: 127906 - DNA, 88 bp, Homo sapiens
  chr17:2679492-2679580
  hyper
tcccaggcagcggggagtttcaggggtctgagcagccctggagactcgcagcatagcgttctgtaccccgtcccgggtcccgcgcaac

SEQ ID NO: 127907 - DNA, 30 bp, Homo sapiens; identical to SEQ ID NO: 10910
  chr17:2680268-2680298
  hyper

SEQ ID NO: 127908 - DNA, 1499 bp, Homo sapiens
  chr17:2756326-2757825
  hyper
ggaagcggggtcgccgtgaagttggttattgaacccatgtggagtcaaactcccagggccgggagagccagtgttcgcggggagccgaccccagcccactctgcatcccagctcggcgatccttgcgccgactctgcggggaggcgggggcagaattccgcctcgttcctcccatccgcaagctcccacccggggacccgggcccgggagctgcgagccggggcgggcgccgggctcaggtgccccctgtaagcgctgggcggccgggaggggacggggaccgcgcgcgggcagtttcgtttggacggaggaggacgcgcgtttcctcttggtgcctgttttctctccctctgttttaaaagcagtgacagcatcggggaagtatccggggccgggccggggagggcggcagccgcctctgcctggggagggagctcggggccgccggcgggagtgcgggcggggaccagaaggagcgggcgaggggaggcagggccggggccggggagggcgcctgggagccgggcaggggggtcccgggagcgctgtccgcctcctcctgcgcttcgcccgctccctgtgccccgcgtcctccaccatccgggcggccgaggccggggcgcgggaggcggggccggggcgggtcccggcgcgggcggcgcgtctgagcgggagccgggagccgccggcccgggccgcgccccgagcgagcctcggaaatgcccgcgccgggggagcggacggcggctgccccgcgggccccgaggagacgctgaaggtcgccgggagggaggggagagcgcgcggtcacctgacccccggggcgcacctaggcggggcggggcccatgcgaggcggaggccgggggccggggcgcgggctcaggggccgggtgcggagcgcgcggagccggggctgcggggacgcgggcgggcgaggtcgggcaccgcgggcggcctcgccatgtcccagcccgcggggaggaggcattgccgaaaggcggggatccgcgccgccgtggtgctcatcggactcctgcacaaatcccggaggcagaataaagagaaaaggtaaacccctgcagcgccggccgcttccctccgctctcctgctgcatgccagttttctttggggtggacttttccgatgggtgtttggttccgtgttggttagaaaaaagcctcctctccaggtaccgtcgtgcgaaccgagttcggagcttcgccccggaccctggctggtgcgaggagcctgggcaggaccttggcggaatcggagggccgctgggagggcgcatcggggtggatccctgacggagggaccccaagtccgtcgcccccagaccctttgcagaccgcgaccccgttccccaagcctgcagccgcggatgccattgatccagcccaggcggctccatgcgccggtgttgccatttgcttcctgcaacttggctgagccctcgaggtgcctgcctggccgagatccgcttgctctgcgct

SEQ ID NO: 127909 - DNA, 577 bp, Homo sapiens
  chr17:2951982-2952559
  hyper
ggtaggaaagaaggacgctttcaggaaggatggagggcccaggacgatttcgctccccggtggacgtggagggcgggcagggtcatcctttctcctgaaactggggagccctacgaaggggttccggagaagacgcacggatctcgaatacctccccgcccggctgccactggatggcgcgcgcaacctgcggaaccacagggcgacatccagctgcgggcggcgaagggaattggagcgtggacctctccaggcttttcattcgctggttctgccggtgtcccgccttttccatctcctcattggctgtcgcctccgggcctgcgactttgctcagcccctccggggagtggaatcgggtgtgcaacaggccgtgaggtccggctttgcgaggaactcccattggtcagtcaaacaggagtcccaccctcctgggcttcccattggttgctgtcccaccgctgctctcagtttcccagcggctggggatctgggttttctgggggtggaggggtgcagtacgctgctggaagctcgtttctctttccaccgttgtgtgcctcgggctcgcggtcaa

SEQ ID NO: 127910 - DNA, 259 bp, Homo sapiens
  chr17:3539484-3539743
  hyper
atgccgagggtgatcggccgcgcagccattatctccctgacccgcgcagctccagtctgcagccagcggccccacaagtccgcgctcttcgcccaggggggcggggcaggggcggggagtcgcctgccaatctttcagccacacccaacatggaggcttctcgtcttcccactggccggggaaggcgagcttccacgcaacctctcggcgggccccggctataggcggagaggcggcggaaggcgggacctaaaggggg

SEQ ID NO: 127911 - DNA, 31 bp, Homo sapiens; identical to SEQ ID NO: 53570
  chr17:3554659-3554690
  hyper

SEQ ID NO: 127912 - DNA, 70 bp, Homo sapiens
  chr17:3571906-3571976
  hyper
cgccccgctcggcccgccccctcatgaatagttaacaaacctccagccaatcactggccggagcgccact

SEQ ID NO: 127913 - DNA, 48 bp, Homo sapiens
  chr17:3572001-3572049
  hyper
cgcagaaaagcgggcagagggcggagcgtgtccggggcgcccacggcg

SEQ ID NO: 127914 - DNA, 55 bp, Homo sapiens
  chr17:3572296-3572351
  hyper
ctggtgccaggtctcggaagctccagggggagggggcggcgtgaacccaactcac

SEQ ID NO: 127915 - DNA, 141 bp, Homo sapiens; identical to SEQ ID NO: 53573
  chr17:3599031-3599172
  hyper

SEQ ID NO: 127916 - DNA, 429 bp, Homo sapiens; identical to SEQ ID NO: 53574
  chr17:3599244-3599673
  hyper

SEQ ID NO: 127917 - DNA, 30 bp, Homo sapiens
  chr17:3626745-3626775
  hyper
cggacacagagcatcgtaaggtcccagaat

SEQ ID NO: 127918 - DNA, 30 bp, Homo sapiens
  chr17:3626992-3627022
  hyper
tgtacgcacaagcgcgctcctgactccagg

SEQ ID NO: 127919 - DNA, 156 bp, Homo sapiens; identical to SEQ ID NO: 53575
  chr17:3778890-3779046
  hyper

SEQ ID NO: 127920 - DNA, 668 bp, Homo sapiens
  chr17:3866999-3867667
  hyper
ggcaccttcctgggcgttttctggagccctcaggggagaccctggggccagctgggaggccgagcctgagtctccggccgtccctcgcccgccggtgtctgcgctgcacctgcaggatgccagcgggagcggcgcggcgttggggtggaatacggtccaggatggggtggaataacgcttccagggtggacggggccggagtggaggtgggaagtccgggaggaccgcgcagagggtgccaggcgtccggtctccccagctggaacccgctcccagcccccagcccccagccccggcgccggcgaaggtggccgcgcagccccgccgggtgccccaggagcatccgaagaggtttccggagccctcgcttcctgcccgcccagagccgggtggggaggcaggaggggaaactgagactgcggcgcgcgcggcccccgctccccggcccggcccggcccgcgcgctcaccgttggggccgtagcgctcccgcgcgccggtcacctgcgccgggctcaggccgccctcggctgtcaccgagaagtggcgcagcacgtcggcggccgggagcagatgcgccgcctccatgccgcccgcccggccgtctgcgccgtccgcaccgtcgaggccgcctctccgccggggggctacaaagcggggcgcgggggac

SEQ ID NO: 127921 - DNA, 230 bp, Homo sapiens
  chr17:3867878-3868108
  hyper
aggggaaactgagaccgcccgcggggcgcgtgctgggcctgtcgggagccgggggcgcgtggcccgggggtcctcggtcccggtccgcggagctgctaggggtgggatctggccgagagctggggcggtctgcggagcacccggctctgggctgcgcgtcgcctcctctgggctctcctgggcccggggcgtcctgcttcccagctcgaattctgcgaagtgactccaga

SEQ ID NO: 127922 - DNA, 115 bp, Homo sapiens
  chr17:3868442-3868557
  hyper
gagcctccgcctcagcgctcccgagctccacccgccccaggagggccaggagaagtggcagcgggtcagaggaggaagtcgcaggaaggcagaaaccactcgccccgccaaaagg

SEQ ID NO: 127923 - DNA, 81 bp, Homo sapiens; identical to SEQ ID NO: 10918
  chr17:3908048-3908129
  hyper

SEQ ID NO: 127924 - DNA, 291 bp, Homo sapiens
  chr17:4046208-4046499
  hyper
cctggctctgcagccgccgccgccgcctccccgcctcgacctgtcaacctccgacagcagctggcgggcggggacgcggaggagacgacggcggcccctgcggcttccggcttcctggccgtcaagcgacgaccgctgtcgcaaaggcgccgtcacgtagataggcggcctctaccaactcacgacagctaggcggggagcgccgcctcaaagggtgcaaccttgatttcccagaggacgagtctgtctcagtatctacgtcattccgtagcctccgctgccgccatcttt

SEQ ID NO: 127925 - DNA, 30 bp, Homo sapiens; identical to SEQ ID NO: 53579
  chr17:4046848-4046878
  hyper

SEQ ID NO: 127926 - DNA, 30 bp, Homo sapiens
  chr17:4047304-4047334
  hyper
agcgaggctgctcacgcctttctctccgct

SEQ ID NO: 127927 - DNA, 30 bp, Homo sapiens
  chr17:4047559-4047589
  hyper
ccattacccagcgtcggaagccctaggata

SEQ ID NO: 127928 - DNA, 30 bp, Homo sapiens; identical to SEQ ID NO: 10919
  chr17:4167301-4167331
  hyper

SEQ ID NO: 127929 - DNA, 30 bp, Homo sapiens
  chr17:4268643-4268673
  hyper
ctgcgcatgctccgcgcacacagtcctagc

SEQ ID NO: 127930 - DNA, 149 bp, Homo sapiens
  chr17:4402639-4402788
  hyper
gggcggggggcagccgccgccatcctcagcttgggcaacgtgctcaactacctggacaggtacaccgtggcaggtgagcgagtgccccacccagcccgaggaccaagaccccaccccatcccaccacccgcctcgagggaggtacccca

SEQ ID NO: 127931 - DNA, 30 bp, Homo sapiens
  chr17:4458954-4458984
  hyper
gactcgtcccagagcggcccctgcgctccg

SEQ ID NO: 127932 - DNA, 30 bp, Homo sapiens
  chr17:4487591-4487621
  hyper
tcttcgggtgggcccgccgcccctcccgca

SEQ ID NO: 127933 - DNA, 30 bp, Homo sapiens; identical to SEQ ID NO: 53582
  chr17:4544272-4544302
  hyper

SEQ ID NO: 127934 - DNA, 720 bp, Homo sapiens
  chr17:4544583-4545303
  hyper
caattccaaggagatcgggtagcggcaacatttattgagcgcttactgtgtgccaccgactgccctaaagccccccacccccgtggcctccgcgcgctttgagcccaatgcgcgggcccttggcaaagagaatcggccagaggccaacgggggcgcatgtcctccccggtatttgactgactcggagccaggggcgcagcccaccccgcccggctctggggagctcaccttgccccgtgcgggccacagtcgcttcccgagcgccgcctccccgtgctggccgaccagccacagctgcacctggttgttggaaccggcatagagcgaggccccagtggacacgcggatgcggtagagacccatcttgctcaaagatgtttcgctccttctggtggagaagggtggacgagctaaataacccagcctgagaccccgccctctcggaggtcgcttggggtcggaatgtgggtggcaggtctccaatcaactccgcctaccgctggggcccccagctccaaggagcagagcttcaaggggcagaattcagccccagtccaaaaggcggtgtcctggcgagagcagggagtggaaaccactatcttgacgggagggagaaaaagaaaaggatttggaccgaaaacacgcaggaagagggaatcaacgcctggtacagcaggcaggcgaggtgggggtaggagttatgcacgtgtgtaccacgga

SEQ ID NO: 127935 - DNA, 99 bp, Homo sapiens
  chr17:4607656-4607755
  hyper
atgttaaaggtacacgtggtccggacaaaaggcgccaaagtcggaacgatttccatttagcggacggagtcttgggacatcttcgctgtaggaatcaat

SEQ ID NO: 127936 - DNA, 30 bp, Homo sapiens
  chr17:4613313-4613343
  hyper
aaaagggaaccctgcgaagatcaaatgcaa

SEQ ID NO: 127937 - DNA, 140 bp, Homo sapiens
  chr17:4614297-4614437
  hyper
ctactgggctctcccgtgcaggctgcgatgcagggatggaggaaggaggagcaggtggctggccccgaggggtcgtgtacggggaggctggatgccgggacgggggggatccactccagactcgcgccaagccaatggaa

SEQ ID NO: 127938 - DNA, 119 bp, Homo sapiens
  chr17:4634530-4634649
  hyper
ggtctgaatggcctcgggctaggggatattccactgtcgcctctgactacgggtggtcctgtggctgaggcgcagcgggccctgggagttgtagttcatcaagcggaccgaggaggcga

SEQ ID NO: 127939 - DNA, 30 bp, Homo sapiens
  chr17:4635214-4635244
  hyper
gggggttctgcgagcgaaccccagctctgg

SEQ ID NO: 127940 - DNA, 31 bp, Homo sapiens; identical to SEQ ID NO: 10922
  chr17:4642753-4642784
  hyper

SEQ ID NO: 127941 - DNA, 30 bp, Homo sapiens; identical to SEQ ID NO: 53588
  chr17:4643242-4643272
  hyper

SEQ ID NO: 127942 - DNA, 43 bp, Homo sapiens; identical to SEQ ID NO: 53589
  chr17:4647511-4647554
  hyper

SEQ ID NO: 127943 - DNA, 30 bp, Homo sapiens
  chr17:4699412-4699442
  hyper
aaggcctcaaagcgcgaccaaagagcgtga

SEQ ID NO: 127944 - DNA, 30 bp, Homo sapiens; identical to SEQ ID NO: 10923
  chr17:4710005-4710035
  hyper

SEQ ID NO: 127945 - DNA, 30 bp, Homo sapiens; identical to SEQ ID NO: 53591
  chr17:4736688-4736718
  hyper

SEQ ID NO: 127946 - DNA, 30 bp, Homo sapiens
  chr17:4812434-4812464
  hyper
actcccgtcgcctgccggcttctggctagc

SEQ ID NO: 127947 - DNA, 30 bp, Homo sapiens
  chr17:4813247-4813277
  hyper
agaatgcagctgagacgcagacgagcagag

SEQ ID NO: 127948 - DNA, 30 bp, Homo sapiens; identical to SEQ ID NO: 53592
  chr17:4842904-4842934
  hyper

SEQ ID NO: 127949 - DNA, 173 bp, Homo sapiens
  chr17:4843518-4843691
  hyper
agatcgagtgagtacggctcgccaagttggagcgctctcgcgatagacacagcaactattcagctgcgaggggacgggagaggtggtgagcactctcgcgagatttgaaggagcggcggaggccagagggaggagaggtttgtaaactaggaggctccgggtttccgggcact

SEQ ID NO: 127950 - DNA, 30 bp, Homo sapiens; identical to SEQ ID NO: 53593
  chr17:4850275-4850305
  hyper

SEQ ID NO: 127951 - DNA, 30 bp, Homo sapiens; identical to SEQ ID NO: 53594
  chr17:4850695-4850725
  hyper

SEQ ID NO: 127952 - DNA, 30 bp, Homo sapiens
  chr17:4851415-4851445
  hyper
gccgccattcgcgccgcttccagggcaagc

SEQ ID NO: 127953 - DNA, 30 bp, Homo sapiens; identical to SEQ ID NO: 53595
  chr17:4852095-4852125
  hyper

SEQ ID NO: 127954 - DNA, 518 bp, Homo sapiens
  chr17:4853392-4853910
  hyper
ggcgggggtgagtcaccgggcgcgcgctgccccggcgccgacgggaagggcctccgagtcgggccgaggcgccgtgtgtcccccgccggtcggctggtatggctgcagaggagctcggggcagaccccgcactggccccagagccggcaaagtggagatctctaccgagggcagagacctacctccccgcagtgctacaagtggggcgccggaagagccccaggcgtgcagaagctcacaaaaggccacccgtcctcggtccattcatttttgttcactgttgattcagccccattcattgatgggctggggccgtgcgctgagcgcccacagtcgatggggaaaggggctctgaccgacagtccccacgccgggcgacaagtgctgtcccagcgttatcagtcgggcgccttgccagccgaaagggcctgtctaaattcgtttcctgtcccctaactcatcccggcgctggctggcctggagagggtaggatggggcggcgccgagaatggccgtta

SEQ ID NO: 127955 - DNA, 106 bp, Homo sapiens
  chr17:4871285-4871391
  hyper
gctggctggtgcagcgatgtttaatggcaattcgtataaaccaagcccatgcacaagtagaaagtgcccgtggagccggcaggaggcccccgccgcgctagagaac

SEQ ID NO: 127956 - DNA, 359 bp, Homo sapiens; identical to SEQ ID NO: 53598
  chr17:4890352-4890711
  hyper

SEQ ID NO: 127957 - DNA, 30 bp, Homo sapiens
  chr17:4891276-4891306
  hyper
agcaggacccttctcgcctcggacaagact

SEQ ID NO: 127958 - DNA, 31 bp, Homo sapiens; identical to SEQ ID NO: 10926
  chr17:4900808-4900839
  hyper

SEQ ID NO: 127959 - DNA, 30 bp, Homo sapiens; identical to SEQ ID NO: 53600
  chr17:4901066-4901096
  hyper

SEQ ID NO: 127960 - DNA, 119 bp, Homo sapiens; identical to SEQ ID NO: 10927
  chr17:4901560-4901679
  hyper

SEQ ID NO: 127961 - DNA, 282 bp, Homo sapiens
  chr17:4938732-4939014
  hyper
cttgctgaggcaggtcgagttggagaggggagtggctggggcgggctctgcccggaggggcgtctccgtgctgccctcccgcctgcctcaggggggcatcccgggagccgccaggtgcgcaggggtccccgcacctccggatccggcagtccccggacccagcggctggcggtctgcctgagagggagccccctccgccggggaggcggcccagcccagagcccacacagctggggttttgttgtttgttgttttaattaattaattaattttgagacgggg

SEQ ID NO: 127962 - DNA, 178 bp, Homo sapiens
  chr17:4981370-4981548
  hyper
gagagttaaaagggtcgcgcaaacggtccccgcgggaatgcgaagcggattctcgagttcttgagcctagagcaatgcttggggagcgacacgagggcgcagagcggcagatcgcggagcggaagttcatccccggagccgttctaggaaacccggaggactcaggtcgtcaatgatt

SEQ ID NO: 127963 - DNA, 89 bp, Homo sapiens; identical to SEQ ID NO: 10929
  chr17:4981951-4982040
  hyper

SEQ ID NO: 127964 - DNA, 534 bp, Homo sapiens; identical to SEQ ID NO: 53604
  chr17:5000401-5000935
  hyper

SEQ ID NO: 127965 - DNA, 48 bp, Homo sapiens
  chr17:5001149-5001197
  hyper
gggcgggctctggggcgtccgcggaggctcccgcgtgcgtgtgcgggg

SEQ ID NO: 127966 - DNA, 30 bp, Homo sapiens; identical to SEQ ID NO: 53605
  chr17:5015067-5015097
  hyper

SEQ ID NO: 127967 - DNA, 31 bp, Homo sapiens; identical to SEQ ID NO: 10931
  chr17:5019613-5019644
  hyper

SEQ ID NO: 127968 - DNA, 257 bp, Homo sapiens
  chr17:5094997-5095254
  hyper
gcaggcgccgcggccgccagctctgtgaacgcagcggggtctcacctccaggctacccccaacctcccgctcggtcgggggcccctccacggccgctatcactgggtcgcggctcctagcgccaccatcttggaccccgcgcctgggccaggcgagaacttccggtgcgctccccgggactgcggtcccccagtccgcgccccgcccagccgtcccccgtcggctccagccaatccgcgcgcgctcccctggccgtc

SEQ ID NO: 127969 - DNA, 30 bp, Homo sapiens
  chr17:5185720-5185750
  hyper
gcgggagcccaggacgccgcttccccgccc

SEQ ID NO: 127970 - DNA, 395 bp, Homo sapiens
  chr17:5322760-5323155
  hyper
caggaaaagctctccgccgaggccaaagaccacgtttctcgtcagcaactgcggcggcggcgacgaaggcaacgacgaagaagctggtttctcagcttcggttggactctggtttttcagtccctcccggagccgcaagaacacgacgtggttaggaagccaggtctgccacagctcgccgtcgcccaccggtccctcggcggccgccatcttggcccaactgctcccctcactccagttgctcagcccgccgctgagcacagccaatccgcggccgtccactcactgtttcggccaatcaccgagcagacggcccggaagctcgagaggctcgtgccaggtcggggggcgaaggcgaggccagcccaccaagcaggggcgtcaccaagggaaag

SEQ ID NO: 127971 - DNA, 30 bp, Homo sapiens; identical to SEQ ID NO: 53608
  chr17:5323790-5323820
  hyper

SEQ ID NO: 127972 - DNA, 30 bp, Homo sapiens; identical to SEQ ID NO: 53609
  chr17:5342013-5342043
  hyper

SEQ ID NO: 127973 - DNA, 30 bp, Homo sapiens
  chr17:5342431-5342461
  hyper
aacccaggcctaggcgccccgcgacctgag

SEQ ID NO: 127974 - DNA, 107 bp, Homo sapiens
  chr17:5389577-5389684
  hyper
ctttagttttcccgcgactgcccaatcaacgccaagcaaccgcaatccgtagagacctaaggaacgcacatccgccaatcacgagttgcgtcgccaccgcccccccc

SEQ ID NO: 127975 - DNA, 30 bp, Homo sapiens
  chr17:5389943-5389973
  hyper
tttaaaggaggtggcgggaagcctgtgtgt

SEQ ID NO: 127976 - DNA, 35 bp, Homo sapiens; identical to SEQ ID NO: 53611
  chr17:5390232-5390267
  hyper

SEQ ID NO: 127977 - DNA, 197 bp, Homo sapiens
  chr17:5972266-5972463
  hyper
agcgagtctcttcccgctctgggcgccacctgactgacccgcgtaaggagggactgtgactggtccccaggcaaacgctttccctgccacctgcacctgttgcaagccagctcctcggagccaggccaagcagctctgcccctagcgggagtcggaggcatgaaactcccttttaggaagacggagtaagaggcacc

SEQ ID NO: 127978 - DNA, 757 bp, Homo sapiens
  chr17:5973336-5974093
  hyper
atgggagagtggcggcgtgctctcctctgcgcggcagtgccccgtgtgtttgtgggtctgtgtctgggtgtgagcgtcatggtgcgtgtgttagagcccgtggggccccggtgaaaggctgtggctctgggtgactggtgtgtgtgtgtgtgtgtgtgtgtatcagagtgggtggcggcgtctctgctcggcagtggcgcgtgtggcccgccccgcgcgcgtgttctcgcgggccggggcagggcgtgggccccctccggcggagccgcgacccctcccccgggcggcgggaggtgcgcaccggcgcctctaggacccggcggcggccggccgctgtccccgggccgcgcgagtgagcatgtgcagagcccggcgcccgctcgcccgcccgctgcccgccccggctccgcgcccgcccgcccgccccgccgttcagcccggacgccagcagccccggggagccaggcggcggcgccctgtgcccgggcgcgtgggtccgcttgccgcgggcggccggagacgtgcgggcgccggggcttctgggctccgggcactgcggggggctgcgggctcggcgcccggggaaggcgggccatgggcgcgggtgcgggcgccccagccggccgcgatcgcggggtgagtcctgtctctcggcgctccagccggacccccgcgcgggctgcgagcagggtgttccccttgccgcgggcaaacaagtttgtgcagacgcggttgggagcgcggcggggctgcacct

SEQ ID NO: 127979 - DNA, 205 bp, Homo sapiens
  chr17:5974392-5974597
  hyper
agctccctctcgttccgctaccaagagaggcttccggtcagcggagggtttgctccgtctcttggtgaacttgaacagaggcagaggcaaaagcaaaacgtatgtattttgtccagaaaattacctagtgtagagctttgcgtcttcgtaggtgtggacggagactcacgactgaaggttgctaaattgcgtttttcttggctac

SEQ ID NO: 127980 - DNA, 135 bp, Homo sapiens
  chr17:6347034-6347169
  hyper
agagaggcaggcattccgctggagagagggagggatgcgtggggcaaggcgggggcggggagccggtgtagacgggtggagggcagaccggtactctggtctatccccgcttccgggacgcgttttctagggagg

SEQ ID NO: 127981 - DNA, 582 bp, Homo sapiens
  chr17:6347452-6348034
  hyper
cctgaaccctgtgcgcgctccagggaggggacccggtgtgcgatgcgcgggggctgggctagcaagggcagtggcgcgagcgggacgcaggatacaaagcccggagccacgaggctggcggcggggcgggggccggagcgatgaatgggcacggccgggccaatccaagcgcagcatttgcagccgcgagagagggagccaatcggatccccggggcggtggcggtggcgggggcggggacggaaccaatcagctgtgaggacggggccgggggcggagccgcgcagagtttcaaatcggctgcggtgggcgaggagcagctgtgctgcggctgtgctcggccttagtggtgtcgggtgagtgcgggctgggcacaagtttcgcccttgttgcccaggctggagtgcaatggcgcgatctggactcaaaacaatttttttgttcggaggggagggcatcaggttctgttcacaggggagggcatcaggttcggacacgcacggcctgtggggtcgtctgggtaccacaagaagtcggatcgaaatcggggcgtctggtgggaaggccggggtctgggcgggt

SEQ ID NO: 127982 - DNA, 71 bp, Homo sapiens; identical to SEQ ID NO: 53618
  chr17:6399732-6399803
  hyper

SEQ ID NO: 127983 - DNA, 30 bp, Homo sapiens; identical to SEQ ID NO: 53619
  chr17:6458737-6458767
  hyper

SEQ ID NO: 127984 - DNA, 603 bp, Homo sapiens; identical to SEQ ID NO: 53620
  chr17:6459171-6459774
  hyper

SEQ ID NO: 127985 - DNA, 31 bp, Homo sapiens; identical to SEQ ID NO: 53621
  chr17:6459791-6459822
  hyper

SEQ ID NO: 127986 - DNA, 193 bp, Homo sapiens; identical to SEQ ID NO: 53622
  chr17:6460088-6460281
  hyper

SEQ ID NO: 127987 - DNA, 242 bp, Homo sapiens
  chr17:6544039-6544281
  hyper
gccatagcaacaggcgcagggcggcttgggagcctttgaggccctgaactatttaaggatccaggtgttgcaaggcggtaagttttgcagccagtgtccatgaggtcggggctgggactagattagggtagatctaagcctgggcttgggagtgcagctagcgcagaaagatctgaggaactagagcaaaaagccatgcggatggattgtggtcgtcagaggctcccgtagtctttagcggc

SEQ ID NO: 127988 - DNA, 30 bp, Homo sapiens
  chr17:6544495-6544525
  hyper
acgggttctaaggacgccggggggaaaagc

SEQ ID NO: 127989 - DNA, 30 bp, Homo sapiens
  chr17:6544888-6544918
  hyper
gtccttacccttaacgtggctctaagacca

SEQ ID NO: 127990 - DNA, 390 bp, Homo sapiens
  chr17:6554827-6555217
  hyper
catagcgacagcagcggccataacaaacgaagacaccaaaacgccaccagcctgacagagcaaaagcccagagacgcgggcgaagttccggaaaccacggctccctcttccggtcccggggcactgtgggatatggggcggggcggctccgcccatccccgaccagccctgggatggctccacccgcgctggctccaaaatagcgagggggcggggcccgggccgtgggagcgcctgaggggcaggagtccagtgttttagccttcgaaggaccatggtgcttccacgtcatcgtgttgtggcgctcccggctatggcagtaccgtagttttcctctcttctgcctgcggtgaccattgggctgtagggtgccccgaggcctccctggcc

SEQ ID NO: 127991 - DNA, 804 bp, Homo sapiens
  chr17:6616335-6617139
  hyper
accccaagggtggtgcgccctggggtcgccatgcccctcagattctttacagggcacctcccatccggcacctggagctcctgagtgcgcgcgccccgggagagctgtgctccccgcgaaatccgtgcgctccagctcagggctcccgggatcggtgcccgttagtgggcacaggacgccgggtgtccgaagggctgcctggagatgcaactgaccttggcgggcatcagaatgacgagtggcagcagcaggagcggggtgacgaacaagatcacgaaggacttgaacttggagacatagctcagcgccgaggccatcgcgcgggagggagactggcgggcgagacgagtgaggggcagctagaggcgccgcgggcttaagaaggggccacagtccccggggattggggagggggcggtgacaactccgccccgcacgggggcgcctccccgcggccctggggcggggccacccctcggggtctgtgggacgcgcctgcccccaattctgccacccggcggcggtgggaggcgtctttggactccaacgcttcgggccagccctctaggggcagcctgggccctagcatctcgcgctgtccaagcctctcctgcgctgccgaggcagaggtgcgtcccggggctgccaagcggggcgtgttttggtcactggtgctgcccgctttggcgtaaggcgccctcccgcgtccgcatctgctctttcctgggctctgaagggtcccggatgaaactctctgcaggcctctgggtctctcaggtctatctccccgatctccctctcctt

SEQ ID NO: 127992 - DNA, 498 bp, Homo sapiens
  chr17:6679232-6679730
  hyper
gggtcaggatgggaaaggcagcgaactgaaccgttttgagccccaagttcggggccgaatgtcttccctgtgcgcagaagcaagggcgggggcgtgccatcctcacccggagcgccggccgagcctcccgcctcccaacgcctggccagggccccgtctcgccctctgcacatgggatccactgaccaggcaactgcaggtttggggctctgcgacccgggggcaggaacagagccttgcaggcggcagcgcgtcacaaaggcggccggagcttggcatttagcttgggccagagcaaggcgcagacccggggcgcccatggagttggcgtcggagcaacagctgcgcgggcggagcaggtaggcgcgctccagtccctgcagcccgagcggggttcagcgaacgggtaacgggagaatgcgggccggagcaggctggggtggcggtgggatgccccgaggcccgcggcggggaggcgggctgctctcatcaccccct

SEQ ID NO: 127993 - DNA, 491 bp, Homo sapiens
  chr17:6734925-6735416
  hyper
ttgcgggtaggggtcggtggggtggggtcatggtttacttacctcagcgccacacagaaccactacgcaagctcgggatgggagcctccttaccccaactggagcttccagctcttgcagaacagagaggtaaacaacgcggtctccatgacaacaagtgacgcgttgccagggcaaagagggctggttccgccactgagcagcctggccaaaggcttagcgcaggcgcaaattctgcggaccccagagccagagacccaggagtgtggcgtgtgggaagggtagggccagatgctccggccacctcaacctaccgcgaagacgcggggcaccaagcagaagacagcggccaaagccccgagctgggagtcaggagacctgcgtctagtccgagccctcccgcgggcgggatcatctcgggtcgcgctgtaccccggctctcagacttcccggctgtacagtggggttgggctgggcgatgcctccaggac

SEQ ID NO: 127994 - DNA, 274 bp, Homo sapiens
  chr17:6915579-6915853
  hyper
tactaagagcccatcgccccagttcccaggagttccgccagttagactttttcccccatggcctcgctaaggctagttcctcgtcacgtgacgtgacaggcttggtcacgtgacataccagctccttccattcccgtgtgcggggggagggggaccaacaaaccggaggccctcgctcttccaatactcacgccctagctacagaggtcaaggaaggtttccccaggagcagttttggtttcagacggcgccgtctcccgcgaaagtcctgaga

SEQ ID NO: 127995 - DNA, 30 bp, Homo sapiens; identical to SEQ ID NO: 53629
  chr17:6916080-6916110
  hyper

SEQ ID NO: 127996 - DNA, 30 bp, Homo sapiens
  chr17:6918683-6918713
  hyper
agttctccctgctgcgaacgggtcgaccac

SEQ ID NO: 127997 - DNA, 45 bp, Homo sapiens
  chr17:6926238-6926283
  hyper
gaccccgccctggactcgccatctggagagcgagggaggaaggaa

SEQ ID NO: 127998 - DNA, 28 bp, Homo sapiens
  chr17:6939269-6939297
  hyper
cgtcctcattggcgagctccagggtggc

SEQ ID NO: 127999 - DNA, 435 bp, Homo sapiens
  chr17:6939628-6940063
  hyper
tgtgcagaggtgcggcgtccagaacccggctcctgcagaggctctgggtggcagcagccctgttaccgcttagatggcgcgcaggacagagccccccgacgggggctggggatgggtggtggtgctctcagcgttcttccagtcggcgcttgtgtttggggtgctccgctcctttggggtcttcttcgtggagtttgtggcggcgtttgaggagcaggcagcgcgcgtctcctggatcgcctccataggaatcgcggtgcagcagtttgggagtgagtgcggcgcctggatctggcggactgcgaccctcggaagggagagggaatgcggcgactgggaagtggaagggcgaggggcgggagatgctgggggggagacccctgagatcttctcgcagcgccccttccacttcctcaggcccggtaggcagtgccc

SEQ ID NO: 128000 - DNA, 282 bp, Homo sapiens; identical to SEQ ID NO: 53631
  chr17:6945870-6946152
  hyper

SEQ ID NO: 128001 - DNA, 236 bp, Homo sapiens
  chr17:6946175-6946411
  hyper
cgctaccccagatcccaacaagctcctgtcacctccttcaccctgaatgacccgggcatcccacttccctcaccagcgaggaggcccaggccgaggtagagatgcagcagatcgctggcgaaagccgagaagacgaagcccagcgaggcgaggacgcccccaaccatcaccacggggcgggccccccagcgcgtgctcagggcgctgcccacggggcctgaaagggggcggagtca

SEQ ID NO: 128002 - DNA, 66 bp, Homo sapiens
  chr17:6946476-6946542
  hyper
cgaactaatggttcttctccttgacctcaagatgcactcttttctagagccggttgccctttctca

SEQ ID NO: 128003 - DNA, 32 bp, Homo sapiens; identical to SEQ ID NO: 53634
  chr17:6947308-6947340
  hyper

SEQ ID NO: 128004 - DNA, 30 bp, Homo sapiens
  chr17:7118415-7118445
  hyper
acaactcccaacagcgccatgggcagcaac

SEQ ID NO: 128005 - DNA, 30 bp, Homo sapiens; identical to SEQ ID NO: 53635
  chr17:7120469-7120499
  hyper

SEQ ID NO: 128006 - DNA, 30 bp, Homo sapiens
  chr17:7122831-7122861
  hyper
ccttttgtgttggccgagatagatttcatc

SEQ ID NO: 128007 - DNA, 30 bp, Homo sapiens; identical to SEQ ID NO: 53636
  chr17:7137318-7137348
  hyper

SEQ ID NO: 128008 - DNA, 166 bp, Homo sapiens; identical to SEQ ID NO: 53637
  chr17:7137842-7138008
  hyper

SEQ ID NO: 128009 - DNA, 30 bp, Homo sapiens; identical to SEQ ID NO: 10941
  chr17:7142931-7142961
  hyper

SEQ ID NO: 128010 - DNA, 30 bp, Homo sapiens
  chr17:7143238-7143268
  hyper
gcgataatggctcccgctcccagtcttctc

SEQ ID NO: 128011 - DNA, 106 bp, Homo sapiens
  chr17:7145848-7145954
  hyper
gctaacgctgctagcgtagcaccaccaactgaccggccccctcacgccattagcgtaatcgctttggaatcaatttgtgggctacgcaggcgacgtagcaaagacg

SEQ ID NO: 128012 - DNA, 190 bp, Homo sapiens; identical to SEQ ID NO: 53640
  chr17:7146324-7146514
  hyper

SEQ ID NO: 128013 - DNA, 15 bp, Homo sapiens
  chr17:7146549-7146564
  hyper
cgaagcccggtttct

SEQ ID NO: 128014 - DNA, 109 bp, Homo sapiens
  chr17:7146587-7146696
  hyper
ccaggtttctcctttcgtgcttccatagccggtttctcctttcgtgcttccatagcctgcttctccgaaggtgtccttccactccccaccagcgcgcccatcctgtcac

SEQ ID NO: 128015 - DNA, 30 bp, Homo sapiens; identical to SEQ ID NO: 53642
  chr17:7154230-7154260
  hyper

SEQ ID NO: 128016 - DNA, 259 bp, Homo sapiens
  chr17:7155206-7155465
  hyper
gggggtcctttagccgctggggaccggggctgcagcctctgcagctgggtttcccactctgacaggcgccattttaccgtccaaaggactccctcttcctgtctttccccctcctcttcccctttgacactacttccggtggtgacgtgtattcgcttcaccgggactaagttcctcctgcgcggtctatggcgggtaggtataaggaaagccaaaagcactccaagcgaggctgcagtattgcgcacgcgcagaaggt

SEQ ID NO: 128017 - DNA, 106 bp, Homo sapiens
  chr17:7155682-7155788
  hyper
aggggcgccctccgcgtgagcgcccccctgggaatattgaacataatcacctctcattccagactatgttaggtcttaatggtgggaggacgcccgagtgctcggc

SEQ ID NO: 128018 - DNA, 564 bp, Homo sapiens; identical to SEQ ID NO: 53644
  chr17:7165741-7166305
  hyper

SEQ ID NO: 128019 - DNA, 369 bp, Homo sapiens
  chr17:7166376-7166745
  hyper
cggcttagcgtggctccccaacagccccaccttcctgtgcccccattccaacccaacatgacttacagcctgaaccctttgcactcaacctccccacctaccactgtcccctccggcatcaaggctcctaactggaggaagaaaccactgggacctaaagccggccgagggtggggagcagggtgagggctaggtcagagtcttggccacacccatcgttcccctcccttagagtcttttcagacctatcctccacctttcccacccctcccccacactcgcccgtttctctttccctcccgggcctgggcttggactgccaattgctgtgcactctgtcacgcctcactgttccgtcctccctataat

SEQ ID NO: 128020 - DNA, 134 bp, Homo sapiens
  chr17:7184884-7185018
  hyper
tggcctcattggcccgccccaccaactccagccaaactctaaaccccaggcggagggggcgtggccttctggggtgtgcgggctcctggccaatgggtgctgtgaagggcgtggcccgcgggggcaggagcgag

SEQ ID NO: 128021 - DNA, 88 bp, Homo sapiens
  chr17:7198332-7198420
  hyper
gcagtgagtagcaccgctcgcctccaccctcgagaccgaccttgcccgtatgctgccaggtgcagacgccttccggccaccaccgccc

SEQ ID NO: 128022 - DNA, 294 bp, Homo sapiens
  chr17:7199729-7200023
  hyper
tttagccagggcagcgcgccccggggcagcacacgtgcccccaggcgctgctgggcaagccccacgtgcgcttcccaagggctggcgtcctccgcgtctccttcgccgccagctgcccgcagcagccgcagtcgcctctcccggtcccggcgcgccctctgccggccgctcccggaggccgccggattccgcttcctcgctgaccctccacttgctatctatcgcccgccgcacccctccggccctttcagagttgaagattcggatttccggggcatcgggcacagtggacag

SEQ ID NO: 128023 - DNA, 30 bp, Homo sapiens; identical to SEQ ID NO: 53649
  chr17:7210181-7210211
  hyper

SEQ ID NO: 128024 - DNA, 30 bp, Homo sapiens
  chr17:7217954-7217984
  hyper
gaaaacaattccaacgttacagattgaaga

SEQ ID NO: 128025 - DNA, 100 bp, Homo sapiens
  chr17:7218860-7218960
  hyper
gctctctttaatttcgcgggcccacctggtggcaccccaggggacgcgggctccggagaggggcgcgcgagagagaggccgaggcggaggctctgagacg

SEQ ID NO: 128026 - DNA, 131 bp, Homo sapiens
  chr17:7232754-7232885
  hyper
gcaatgaagcagcccgcgctaggagctggggacgaccacgatgagaacagaaggacacggggtcgggagcctcgctttacggcatagcgaggtgacggagcggctccgagggggacgaagacctgggcagg

SEQ ID NO: 128027 - DNA, 30 bp, Homo sapiens; identical to SEQ ID NO: 53651
  chr17:7233838-7233868
  hyper

SEQ ID NO: 128028 - DNA, 1358 bp, Homo sapiens; identical to SEQ ID NO: 53652
  chr17:7254484-7255842
  hyper

SEQ ID NO: 128029 - DNA, 492 bp, Homo sapiens; identical to SEQ ID NO: 53653
  chr17:7284207-7284699
  hyper

SEQ ID NO: 128030 - DNA, 30 bp, Homo sapiens
  chr17:7297748-7297778
  hyper
ccccaccccaagggcggtctccctgacccc

SEQ ID NO: 128031 - DNA, 31 bp, Homo sapiens; identical to SEQ ID NO: 10948
  chr17:7307051-7307082
  hyper

SEQ ID NO: 128032 - DNA, 103 bp, Homo sapiens
  chr17:7307382-7307485
  hyper
agctgcagctggcccggccatagctgtagaacaggacgcaccggaccaacgccgcccaggccacccaagaggccagccaatcccgaccgcccatgcaaataag

SEQ ID NO: 128033 - DNA, 30 bp, Homo sapiens; identical to SEQ ID NO: 10949
  chr17:7308564-7308594
  hyper

SEQ ID NO: 128034 - DNA, 30 bp, Homo sapiens; identical to SEQ ID NO: 10950
  chr17:7338603-7338633
  hyper

SEQ ID NO: 128035 - DNA, 30 bp, Homo sapiens; identical to SEQ ID NO: 53658
  chr17:7338875-7338905
  hyper

SEQ ID NO: 128036 - DNA, 30 bp, Homo sapiens; identical to SEQ ID NO: 53659
  chr17:7339935-7339965
  hyper

SEQ ID NO: 128037 - DNA, 630 bp, Homo sapiens
  chr17:7340251-7340881
  hyper
gatcccagtggtgtccgtggcgggctggcccgagggggctcggagccactcgtgggccggtccgctggcctctgagtcggcttccttctacctggtgcccggtggcggcaccgagcggccgtgcgcctccgcctggcagctctgttttgcccgccaggagctggcgctcaaagcgcgcataccagcgccgctgctgcaggcgcacgcggcggcccaggcgctactgcgcccgctggtggccgggacccgggcggcggcgccctacctcctgcggacgctgctgtactgggcgtgcgagcggctgcctgcgctctacctggcgcggccagaaaatgcgggcgcctgctgcctcgggctgctagacgagctcggccgagtgctcgaggccgggacgttgcctcactattttctgaacggccgacagctccgtacgggggacgactccgctgcgctgctcggagaattggcccggctccgcggggacccggcccgggccctccgtgccgcggtggaggaggccaaagtggcccgcaaggggggcggtttggcgggcgtggggggcggggcccattaaagacgctgttcctaccagtggaaagtgcctctgtgggcgagcgggacgtggggggc

SEQ ID NO: 128038 - DNA, 30 bp, Homo sapiens; identical to SEQ ID NO: 10951
  chr17:7343090-7343120
  hyper

SEQ ID NO: 128039 - DNA, 798 bp, Homo sapiens
  chr17:7348517-7349315
  hyper
ccgaaggggcagtgacggggccagcggtcgtggccaggcaccagggctgcacttattctctcctcccccaggcgtccgcggctcggaggcggagggtcgactccgggagaaacttttctctggctatgatagctccgtgcggccagcgcgggaggtgggagaccgtgtcagggtcagcgttggtctcatcctggcgcaactcatcagcctggtgagggcgcgcggggggtggaggtcaggccagccgaccggccgggggcgtggctttaggcaaggccggaccagggacaggctgggggcggggcctgggacgagaccaggctgagatggaccagcctttggtgaagattggatcgaaatcagaccaatggacaagctctggccgtgggtggtggacgggcctggagtagaactgggtagggtgaaggacggacctgtgatcggaccttaaagtggggctggggacgaggcaggggctgggggacggacctcgacgtagggccacatgagtcctgagtgcccagggtggggcggagcttggtgctcaggggtcaataaatggcagcgggtggaggttcggggctgggtggattatgagctgaaggcagggccggggacagagctaggcggagggctaggcaggggcgggtctggtaggttgataggctgggagtgtagacggcaggaagaggtgtttctgagatagaggcaggtcttaaactaacgccgcttctgggaggtggacttggacccgagaggatggggctcagaaaaagggggcggcgttcccaggagaga

SEQ ID NO: 128040 - DNA, 30 bp, Homo sapiens
  chr17:7382593-7382623
  hyper
tgcgcgcccgggggcggggccaggctcagc

SEQ ID NO: 128041 - DNA, 370 bp, Homo sapiens
  chr17:7387160-7387530
  hyper
tgcccacccgtctccgggggccgtttgacaaacatcggctacttccggacaagccactggtcctgccatcttggtttgttcatgcatattcagcaagagaactgcatattcatgagcaaccgcccttccccgggaggacccgccccgccccgccgccattaccgattcgcagagcagaccattttccagctggggggggctacgaatgagaggcttttgctgaagatgaaaccgttgtccaaactagaatgaaagcggcccaattttaccctcgagtcttcaaaccttaagcctcagtgcaaaagggagcagcgaggagaggcggtgggattaaagaaaaaaattcttctctccctgtcacttcaaaagg

SEQ ID NO: 128042 - DNA, 30 bp, Homo sapiens
  chr17:7388167-7388197
  hyper
gatgaactggtaagcggctctgtcctcccc

SEQ ID NO: 128043 - DNA, 31 bp, Homo sapiens; identical to SEQ ID NO: 10953
  chr17:7461585-7461616
  hyper

SEQ ID NO: 128044 - DNA, 202 bp, Homo sapiens
  chr17:7475776-7475978
  hyper
ggaggctgagacctcgccccccttgcgtgatagggcctacggagccacatgaccaaggcactgtcgcctccgcacgtgtgagagtgcagggccccaagatggctgccaggcctcgaggcctgactcttctatgtcacttccgtaccggcgagaaaggcgggccctccagccaatgaggctgcggggcgggccttcaccttga

SEQ ID NO: 128045 - DNA, 386 bp, Homo sapiens
  chr17:7486278-7486664
  hyper
tccacagcggaatgacgcacgggtgggcaccgtgggttggcgtcccggcggtcggtaacgaagcacaacgcccccaccaggtagtccaaggtgccctttcccaagcagcgctgcagggtccactcggcctcgccgaagtctctgcccagcacgtggtgcgccctcgggccagcggggagggggcgaatcccgggactgcctcgccaggcctcggctccccggagactcttgggggtctgggccccaagggtgattcaggtgctgcccttccccgacctgggctcgcctcccccacctcctcctctgcttcactgtcccgggcccagcagttgccggcgcactcatgctccgaggcctgagccaaccggaggcgagacaagcacagg

SEQ ID NO: 128046 - DNA, 318 bp, Homo sapiens
  chr17:7486946-7487264
  hyper
caggcgtgcagcttcggcaagctttacaattccaacagcgcgtccaaaacgtggtccctgactgagacttattttacgccactagagtgagggtgggtagcgtcagaaagagcggggcacggggcgggccagcttcgccgcgggaaaagaacgggaggcggagtgtccgcagcgcgcacgcgcaacgaaagtcaatggcggtctggagagactggcggaagctagctttgcaatatggcggccgaggcggacggaccgcttaaacggctgctcgtgccgattcttttacctgagaaatgctacgaccaacttttcgtt

SEQ ID NO: 128047 - DNA, 30 bp, Homo sapiens
  chr17:7517676-7517706
  hyper
cagctccagaagctcgatcccgccccacgc

SEQ ID NO: 128048 - DNA, 30 bp, Homo sapiens; identical to SEQ ID NO: 53667
  chr17:7530983-7531013
  hyper

SEQ ID NO: 128049 - DNA, 30 bp, Homo sapiens
  chr17:7531362-7531392
  hyper
gtcgagataccccgcggttcaaaggctccc

SEQ ID NO: 128050 - DNA, 30 bp, Homo sapiens; identical to SEQ ID NO: 53668
  chr17:7554125-7554155
  hyper

SEQ ID NO: 128051 - DNA, 344 bp, Homo sapiens; identical to SEQ ID NO: 53669
  chr17:7554498-7554842
  hyper

SEQ ID NO: 128052 - DNA, 54 bp, Homo sapiens; identical to SEQ ID NO: 53670
  chr17:7555283-7555337
  hyper

SEQ ID NO: 128053 - DNA, 166 bp, Homo sapiens; identical to SEQ ID NO: 10956
  chr17:7571718-7571884
  hyper

SEQ ID NO: 128054 - DNA, 825 bp, Homo sapiens; identical to SEQ ID NO: 10957
  chr17:7572183-7573008
  hyper

SEQ ID NO: 128055 - DNA, 112 bp, Homo sapiens; identical to SEQ ID NO: 10958
  chr17:7573921-7574033
  hyper

SEQ ID NO: 128056 - DNA, 622 bp, Homo sapiens; identical to SEQ ID NO: 10959
  chr17:7576545-7577167
  hyper

SEQ ID NO: 128057 - DNA, 122 bp, Homo sapiens; identical to SEQ ID NO: 10960
  chr17:7577495-7577617
  hyper

SEQ ID NO: 128058 - DNA, 559 bp, Homo sapiens; identical to SEQ ID NO: 10961
  chr17:7578174-7578733
  hyper

SEQ ID NO: 128059 - DNA, 692 bp, Homo sapiens; identical to SEQ ID NO: 10962
  chr17:7579248-7579940
  hyper

SEQ ID NO: 128060 - DNA, 30 bp, Homo sapiens
  chr17:7590037-7590067
  hyper
ggcctctcagattgcgacggtcctcctcgg

SEQ ID NO: 128061 - DNA, 330 bp, Homo sapiens
  chr17:7590624-7590954
  hyper
gagctgaaaatacacggagccgagagcccgtgactcagagaggactcatcaagttcagtcaggagcttacccaatccagggaagcgtgtcaccgtcgtggaaagcacgctcccagcccgaacgcaaagtgtccccggagcccagcagctacctgctccctggacggtggctctagacttttgagaagctcaaaacttttagcgccagtcttgagcacatgggaggggaaaaccccaatcccatcaacccctgcgaggctcctggcacaaagctggacagtcgccatgacaagtaagggcaagtaatccgcctgccggaggaagcaaagga

SEQ ID NO: 128062 - DNA, 36 bp, Homo sapiens; identical to SEQ ID NO: 53679
  chr17:7591549-7591585
  hyper

SEQ ID NO: 128063 - DNA, 139 bp, Homo sapiens; identical to SEQ ID NO: 53680
  chr17:7591823-7591962
  hyper

SEQ ID NO: 128064 - DNA, 30 bp, Homo sapiens; identical to SEQ ID NO: 53681
  chr17:7608732-7608762
  hyper

SEQ ID NO: 128065 - DNA, 30 bp, Homo sapiens
  chr17:7620933-7620963
  hyper
ggggtagacctgggcggggtggggccgcga

SEQ ID NO: 128066 - DNA, 54 bp, Homo sapiens
  chr17:7621506-7621560
  hyper
tgcggtgtgggatcgcgtggtgaaccccacggtgcatgcgcctcaggctctagt

SEQ ID NO: 128067 - DNA, 49 bp, Homo sapiens; identical to SEQ ID NO: 10964
  chr17:7739846-7739895
  hyper

SEQ ID NO: 128068 - DNA, 50 bp, Homo sapiens; identical to SEQ ID NO: 10965
  chr17:7744963-7745013
  hyper

SEQ ID NO: 128069 - DNA, 30 bp, Homo sapiens; identical to SEQ ID NO: 53685
  chr17:7747076-7747106
  hyper

SEQ ID NO: 128070 - DNA, 67 bp, Homo sapiens
  chr17:7748392-7748459
  hyper
cagcgcagccaccccgtccctctgaccggccttttggttccctgccacacacgtcctgactcccagc

SEQ ID NO: 128071 - DNA, 30 bp, Homo sapiens
  chr17:7760132-7760162
  hyper
cacacggggctccccggcagagaaggaatc

SEQ ID NO: 128072 - DNA, 657 bp, Homo sapiens
  chr17:7760504-7761161
  hyper
tccgtccgaatcctgcgcggggtgtaacaagcgctcagaccgcgcagcccaggctgcccgcccgcggaaccacagctcccggcagcccgcggggcactcacacaaagcccagaggctgccgggagctgcagttccccaccccctccatcttgctgcttgactgcccctcagtcccagaaccagagcccgtgctaaccccagcactggagctgctctgacgccgactgcaacagccattctcttctcgtagcagcatggtcggtccagctccggccatttgcccggaggcctcctctgggcctttcaacttcctaagcacctttcaggttgggtggtccgagatctcgcgagcgctcccgacctctttcctttcgcgagatcccctctcctccccctcctagtctcctcggcaacggcacagatctcgcgagcttctcctacttctctagcgctgtggctcactgaagcgtactacgccggatgtcttaagatatcgcgagacctttacctctggtttcttacacatcctttagaaactggaatttagcgagaatacattctttcatactgcctcctcccttgtttttctgtctcagagagatagtctgtcctaaatatcccatgtagcccaggccactgaattaaaacggagcgtat

SEQ ID NO: 128073 - DNA, 406 bp, Homo sapiens
  chr17:7761197-7761603
  hyper
cgcaactcaattacttgatccttatatgccccacgcgggactcatactacgtttcccgtgaacacgtgcagtccaaaccccgcccctgatatttatctcagtggacggtggccggaaaaggacaatggtttccatgtcagcggataaacgctctcccctcggctcccggacgcgacggaggtcgtagtagtagtgagtacgtgctgaggagcaaaggagtaaccaagagatccagtgaccgacagagcaagagccatgccgcgccggggcctggtggctgggccagacttggagtattttcagcgtcgctatttcacgccggcggaggtggcccaacataacaggcccgaagacctctgggtatcttacctgggacgcgtgtacgacctaacgtcattggcacagg

SEQ ID NO: 128074 - DNA, 30 bp, Homo sapiens
  chr17:7789013-7789043
  hyper
gggacggtgtccatcggacccccctccacc

SEQ ID NO: 128075 - DNA, 30 bp, Homo sapiens; identical to SEQ ID NO: 10967
  chr17:7790164-7790194
  hyper

SEQ ID NO: 128076 - DNA, 42 bp, Homo sapiens; identical to SEQ ID NO: 53689
  chr17:7791234-7791276
  hyper

SEQ ID NO: 128077 - DNA, 30 bp, Homo sapiens
  chr17:7819456-7819486
  hyper
gttgcagtccagctcgccccgctccggaag

SEQ ID NO: 128078 - DNA, 30 bp, Homo sapiens
  chr17:7835157-7835187
  hyper
gggagtgtgagcctcgctccggggccgccc

SEQ ID NO: 128079 - DNA, 56 bp, Homo sapiens
  chr17:7835478-7835534
  hyper
tcgcgggcgggtgacgtcatcgaggcgagagaggcggagccgtggacagtgggcgg

SEQ ID NO: 128080 - DNA, 200 bp, Homo sapiens; identical to SEQ ID NO: 53690
  chr17:7905913-7906113
  hyper

SEQ ID NO: 128081 - DNA, 30 bp, Homo sapiens; identical to SEQ ID NO: 53691
  chr17:7919392-7919422
  hyper

SEQ ID NO: 128082 - DNA, 803 bp, Homo sapiens
  chr17:7975835-7976638
  hyper
cgcagagaacggaatcgcggtgagagcgcgcggcacagcctgcacctgcaccccgcggcgccagccctgccgccagcgccccagtaacttgccgcgcgcattcacagccagacccagggaaaggaaggttttttgtttttttgtttgtttggtgttttggtctctgaggtttttgtgttttttgcttgtttgttttgttttgttgaaaatagtagggcacagaatggggagaggagagacgggaagcgcgctcctaaatagaaatgctgttctcaatcagcaccgggtccaggtagtagtaggggatgggaaggcacttgttgcgctggcggatgtcgtgtgagatctggttcaggcgctggcggaacgcctctatgctcctccgcggggcctcctccacgaagtgaatgtccgggaagtgtcccaggggccgctgcgggcagagagctcgacagctgggaccagggccggccagcaccccctcctcctgccggtggccctggcccctccaccctttggtttcagtggcctctcactccctgctcccctcttgacgccgctagttatcctcccccatccccggcttctggtcccctccctgtgctcagagtcccccatcccgtctcgcaccctgtcgtcaggctctcggctgagggtccagagcaccagcagcgtgatgcacgtggtcttcacatccggcaacgtgtccatgaaggtctccagagtggtcagccccttagtctgaatcggtggattccgcatggacgctgggaagttgggcatccaggcggtgaactccatct

SEQ ID NO: 128083 - DNA, 53 bp, Homo sapiens
  chr17:7982655-7982708
  hyper
cggaggagcattcgcgcacacagaggctcagcggcagcgccgcctgcagccca

SEQ ID NO: 128084 - DNA, 30 bp, Homo sapiens
  chr17:8013602-8013632
  hyper
gtctggctgagctgcgtccgaaaggaacga

SEQ ID NO: 128085 - DNA, 57 bp, Homo sapiens
  chr17:8021861-8021918
  hyper
ggtcataaatcacacgtgactgcagccacacgcaggtgagtcgcacacgcattccag

SEQ ID NO: 128086 - DNA, 101 bp, Homo sapiens
  chr17:8022389-8022490
  hyper
ataaaatcctctgtcggttctacaagcctggcttttcctatagagaaccctcttataagcaaaaagtaaagctctcgtgaagagcccggatagctcagtcg

SEQ ID NO: 128087 - DNA, 41 bp, Homo sapiens
  chr17:8022549-8022590
  hyper
gtctttgcttttgggtaccgcacttcgcataaaatggtaac

SEQ ID NO: 128088 - DNA, 30 bp, Homo sapiens; identical to SEQ ID NO: 10969
  chr17:8023623-8023653
  hyper

SEQ ID NO: 128089 - DNA, 30 bp, Homo sapiens; identical to SEQ ID NO: 10970
  chr17:8023946-8023976
  hyper

SEQ ID NO: 128090 - DNA, 212 bp, Homo sapiens
  chr17:8026216-8026428
  hyper
ccaaaggcgggactcgggtgaggatgccttggggccagggttgccaaccaagcttgtgtccccaccccagtgggaagccctgggacgcggaaacgggaagcttggggacctagggctagcggagggactgacctggtcccgggtccgctccagcagcagcagcctcagctcttccaggctgcggttgatgcggtcccggcgccgcttctcca

SEQ ID NO: 128091 - DNA, 241 bp, Homo sapiens
  chr17:8027808-8028049
  hyper
ctgaattttatacatcatctccgaagttcgcttcctagtcgagacagggagcaacccgagtgcgctgggtgaatctgtccgactcaaccgaagctctgccgggaggttggagaggcgctctcttctatctaagccagttacattcaagtccgcgaacatctgcgcgcccactctgcggacagggcacttgtctaggctcgggcgagtcatagtgagatacgcaggagagacccagcttatc

SEQ ID NO: 128092 - DNA, 778 bp, Homo sapiens; identical to SEQ ID NO: 53698
  chr17:8055128-8055906
  hyper

SEQ ID NO: 128093 - DNA, 30 bp, Homo sapiens; identical to SEQ ID NO: 53699
  chr17:8062189-8062219
  hyper

SEQ ID NO: 128094 - DNA, 30 bp, Homo sapiens
  chr17:8079297-8079327
  hyper
tcctcgggggtgaacgtgagaggcaggcag

SEQ ID NO: 128095 - DNA, 30 bp, Homo sapiens
  chr17:8090091-8090121
  hyper
cttcacgacgtaggcgagccccacctgcag

SEQ ID NO: 128096 - DNA, 30 bp, Homo sapiens
  chr17:8090681-8090711
  hyper
gggtttttgctcttcgtgcacatggtactt

SEQ ID NO: 128097 - DNA, 30 bp, Homo sapiens; identical to SEQ ID NO: 10972
  chr17:8093365-8093395
  hyper

SEQ ID NO: 128098 - DNA, 92 bp, Homo sapiens
  chr17:8093690-8093782
  hyper
tgctcccgtcgccccgccctttctgaaagctgatggggcagatcttaaagaccaaggtcctcaaattcctgagtcccgaggggtggggctca

SEQ ID NO: 128099 - DNA, 19 bp, Homo sapiens
  chr17:8113699-8113718
  hyper
ggcgctggtctcaccgccc

SEQ ID NO: 128100 - DNA, 30 bp, Homo sapiens
  chr17:8151205-8151235
  hyper
ccatgggccggacgcggccagcgagcccag

SEQ ID NO: 128101 - DNA, 30 bp, Homo sapiens; identical to SEQ ID NO: 10974
  chr17:8152395-8152425
  hyper

SEQ ID NO: 128102 - DNA, 30 bp, Homo sapiens
  chr17:8152796-8152826
  hyper
tggaggcgtccattcgtcctatcttgcgtg

SEQ ID NO: 128103 - DNA, 36 bp, Homo sapiens
  chr17:8191799-8191835
  hyper
atgctcgtgaccaccgggggcgacatagaccctaac

SEQ ID NO: 128104 - DNA, 30 bp, Homo sapiens
  chr17:8192266-8192296
  hyper
actccagcgacctccgaccggtcccggaca

SEQ ID NO: 128105 - DNA, 30 bp, Homo sapiens
  chr17:8198997-8199027
  hyper
tggggtgctgggaccgcccctcgggtgggc

SEQ ID NO: 128106 - DNA, 814 bp, Homo sapiens
  chr17:8229942-8230756
  hyper
gaaagagaggagcctcgccctcttccccccacgccccggcccccaagcctgctcactagctctctcctcctccttccacccgcaaggaaccctccagcccacttcctgtgatcctttccggagcccttcagcctggctggctctccagccatctcggaaagcttctctttcctaaaccctccatactcgcaggttcagctacagaggtaactgcaggctcaggttctccagggtggccagcccaccagcccaccgtcccggtgcagcagtgcctctccagcgacagctccaccgcgagcctggcgggctcccgaccttgctccccagcacgtcgtctccaagccacggtctcaccaccctccatcagcctcgggcgacaccaaggggaacagagcgctggagctcctcgaagtcctcccgaccttagcggggctccgttcatcctcccggacgtggccaggccccgctctggccccgcgcccgcccctcccgcggggctgcccctgtctctctgccggagacccggactcagtgagtgagcgcagcgcggccatagggcttcctgcagcggggtctcagcacgtcttctggctggactctggggtctcctggcctggctgtgtctcctggttctcagcgctcgcctcccacgcggggcggagtatgggagtgggctgctcccgcggaagaatcctggggaagttgaggcactggctcccgctgttcagaacactgcccgacgtccccagagctagccactcctccttcccacccacccgcagcactctcgaggtcgcaacggcagtcaccaggt

SEQ ID NO: 128107 - DNA, 44 bp, Homo sapiens; identical to SEQ ID NO: 53705
  chr17:8280079-8280123
  hyper

SEQ ID NO: 128108 - DNA, 35 bp, Homo sapiens
  chr17:8286557-8286592
  hyper
agacctatgtctctcggagcgagaggggcgcggag

SEQ ID NO: 128109 - DNA, 150 bp, Homo sapiens
  chr17:8287111-8287261
  hyper
ggtgaggggccttgcgaggaccagggccaccgatcgccgcctgcccccgcggaaataggtccaaggccgcgtttccaaggcgcccccagtgctgtgggaggtgctggtccagaccacgcttcgaaggagccaggcgagaggaagcctctc

SEQ ID NO: 128110 - DNA, 30 bp, Homo sapiens
  chr17:8339064-8339094
  hyper
tggcgtcagcgcgccgggctctggcccgcc

SEQ ID NO: 128111 - DNA, 30 bp, Homo sapiens
  chr17:8339361-8339391
  hyper
aggtgagcctgcagcgcggggccgctccct

SEQ ID NO: 128112 - DNA, 642 bp, Homo sapiens
  chr17:8532918-8533560
  hyper
gcttcaacttccctccgaaccaattccagtccgattttatgggatcagggtgtgacccccaactgcagaaggcaatgaagagactgcggcgagccattcccagctcgcttacacaataaagggatcccgaggcgagtgctgaccctccccccggccgtcctgctgcagcgcgccccgccacatttcccgcctcgccccctcaaaccgcctgggcctcgcagggcgtccacccccggcctaggcgctccacggagggcgcggcaggacgccctcctcccgcgctccttccccggcgccggcggagtccgaccctccccacgcccgcggccggctccggagcccctcacccgccgcgcgcttccccggccgcgcagagccaatgccctcctgtccctccacccacgggtcgggcgcgcgccgcccgccttccaagcccatggtgaacccctctggtgctgcgggggaccggtcgcgccaggcctaacccacccagcaacccacgcaggggcccttcctgcccagcgcccccccaccctaccgccgggactgcgctttccagccccgcttagaatcccctctcttcctgggaggcagacactggctcgcggggcacgccgagacctccgccgggacactagcccc

SEQ ID NO: 128113 - DNA, 1107 bp, Homo sapiens
  chr17:8533840-8534947
  hyper
cccgcttcggtcccccgttcctgtcctccagagccgcccgggacccctcagcccaggagccattcctccctccacaaactgtcccccagccctgggccgtgcactcggacccgggtagccgcacctctcaccttcagccgaagatggtggcgcgggcgcacgtccccagccgcgaccacagatccagcgcctcagtcccaaacccaccgctgcctccgccgggctcctttagcactgctgctcggggctgccccacccacccctaccctcattgggccagctccacgcccatcaccgccgcccccagacccactggttggtttgcgcgcccatctccaagggaagacgttagcaacccgaacgaagctaccttcccgagtccggctccctccacccacctggaatgacgctcattggctcccgctcccagcccaggccacagaggccccaatctcatgggctggctcttacgcccgtcataggctccgggaggtgcggccggggcagtggcgcgggattggctggctcgtgcgtagatggacagctgaggctggctgaacgcccggcgatcccgcgaggctgcgggtgcgggccccgcggcggccggcgcgctgcgctgacattggctgtgcgggccgcggggcaggtgggccgcggcaggaggctggcgctctgactgcagactcctcgtcctagcgtcaggcagccgccgcagccgcagcacattcgagcgcccggtcgccccctgtgcttgcggcagccggcatgtaccgcagcgggacggggttccaccgcggagtcgcgggccctcagcgttgcctgcaggggcggggcggagcgcggtccagagtcctgacgtcacccccggggctgcgcggggttggggccgcggcgctgcgactcacctgcagtgggggaaggaacgcgggggagggcgctgctccgcccatgcgcacagggtttggcccgggacccggctgcgctccacgctgcggccactgtcccgaccccggccccaggcggactctgccgggatcggccgagcgccaggcgcaggacacggtcctccaaggtcgcagttttggtgttagcggggtgagaggctct

SEQ ID NO: 128114 - DNA, 91 bp, Homo sapiens; identical to SEQ ID NO: 10980
  chr17:8649034-8649125
  hyper

SEQ ID NO: 128115 - DNA, 34 bp, Homo sapiens; identical to SEQ ID NO: 53710
  chr17:8759639-8759673
  hyper

SEQ ID NO: 128116 - DNA, 85 bp, Homo sapiens
  chr17:8868582-8868667
  hyper
ccctacgacacagggcgtcctgtgtcagaggcaggaggctgaggacacagctgcgcagagccgcccagcagaggttacccggata

SEQ ID NO: 128117 - DNA, 694 bp, Homo sapiens
  chr17:8868814-8869508
  hyper
cggagcccactctccccgacggtccccagcttgctccagctctgcctggagctcccatgcgtgccctccgcatccgccctggccgcccagtcacacacctgcagtccccgccgggcgccgagcccctctccagcggcgactccctgcgattcgggtgaccgtcgggaccaccgcgccccagctggagccgcgcggcgagccgcagcatctgcccagcctgggctcctccggcgggcggggcggagcctgtcagggggcggggcctaatggggcggggctgaccgcggagccggcctctccagccacctggcggcccggcagcgtcagccaggtgcgcgcccggccccacatcctctgggtcacgcccccgaggccgcaaggcgtctgagaagcagccccggctctgacccgccagccctcggaagaagcagaccctggccggtccatggcagtggcccgaggggcaccagcgcggagcaccagcgacccccaaggagtaaggggaggttaggcccccgcgtcggaagcgcggctttggccccgcaggagggctgggcggagcaggggggcaggtctggggtaggggcttaggggaaagacgagaaagaggaagctccgacgagctgcttccttctctcactgcgacccacttcctcttcctacttctattttctttcttttttttttttttttt

SEQ ID NO: 128118 - DNA, 144 bp, Homo sapiens
  chr17:8901425-8901569
  hyper
agcaaactatttgtatcgtttctccaagcccagcatttactgtgcgagccacctgggggccatttttgttgcccgaggtggtgcgcctgcgccacctggtggactacgggaaagtagcagatcggtgagatgggttgaggcacc

SEQ ID NO: 128119 - DNA, 1545 bp, Homo sapiens; identical to SEQ ID NO: 53713
  chr17:8906182-8907727
  hyper

SEQ ID NO: 128120 - DNA, 280 bp, Homo sapiens
  chr17:8907776-8908056
  hyper
cgggtgacggaggctttatcctttgatcccttctggatccggtgacgcgctaagtgttgggcacgtacggcctacggagtttgaatgctggggccttcctgttgcggcacccccagcccactggtgcagcgggatcgtgcgctcccgccgcagccctaatccagaggaccgcgccgcgccagcgccttcagccaggctgtggcgcctccagtgggtagggctggctcggctctagccaggtgaagctccagactctggattttcccgtcttcggggttca

SEQ ID NO: 128121 - DNA, 30 bp, Homo sapiens
  chr17:8924742-8924772
  hyper
agctggcggcagctcgcggacgttattggc

SEQ ID NO: 128122 - DNA, 1113 bp, Homo sapiens
  chr17:8925059-8926172
  hyper
gagctggcaagcccgcgctgaggcgggacgcgcctgctagcagcgagcgagaggctctccggcgaccggcgcgcgggctccccggaggggccaggcaaacttttctttctcttttgccccctccagaggtaaagtcccgaacgcggactttccggcggggacgcgatcggggggcatctgagagggaccccgggctgcgagacgaaggggcgcgggccgtgcagagtcggggtcccccagctctcctgcgcccgaaacttggggtgcgaggggggctggtcgcggacggggagaccggctcaggcatgcccctcgggcggcgtgggggcggcggtggcggggaagcagagcgttctcccgccgggcggggaagaaggggcgcgagcggtgcggacttggagggccccggcttcgccgcccgcgggactttgggggagagaggcgggcagtcggctgcggggtgggtgcccaggaagccgggcgttctcccgcatctccgctcgccaccccgccgagagctggagggcgcggggcgggctggctgagcgcagctcccttctctccgcaggcgccttctgcggcaggcggacagatcctcggcgcggcagggccggggcaagctggacgcagcatgatgcgcgcagtgtgggaggcgctggcggcgctggcggcggtggcgtgcctggtgggcgcggtgcgcggcgggcccgggctcagcatgttcgcgggccaggcggcgcagcccgatccctgctcggacgagaacggccacccgcgccgctgcatcccggactttgtcaatgcggccttcggcaaggacgtgcgcgtgtccagcacctgcggccggcccccggcgcgctactgcgtggtgagcgagcgcggcgaggagcggctgcgctcgtgccacctctgcaacgcgtccgaccccaagaaggcgcacccgcccgccttcctcaccgacctcaacaacccgcacaacctgacgtgctggcagtccgagaactacctgcagttcccgcacaacgtcacgctcacactgtccctcggcaagaagttcgaagtgacctacgtgagcctgcagttctgctcgccgcggcccgagtccatggccat

SEQ ID NO: 128123 - DNA, 284 bp, Homo sapiens
  chr17:9143011-9143295
  hyper
ggtgaacatcatctccgtgtataagcagggcacgagccgcatccgccgcggtgaccagagcctgtggatccgctcgcgggacatcgcctgcaagtgtcccaaaatcaagcccctcaagaagtacctgctgctgggcaacgcggaggactctccggaccagagcggcatcgtggccgataaaagcagcctggtgatccagtggcgggacacgtgggcgcggcggctgcgcaagttccagcagcgtgagaagaagggcaagtgcaagaaggcctagcgccgaggca

SEQ ID NO: 128124 - DNA, 160 bp, Homo sapiens
  chr17:9143376-9143536
  hyper
cgagggctttcccaggtggggggagggagggggcggggccgcacggcgcggggggcgggaccctcggcggcccctccccctacccccaccctgcgcgctctgggcgggagccgcgtgcacgcggggcggggtgcgccgccggccgggccctggagaaatg

SEQ ID NO: 128125 - DNA, 182 bp, Homo sapiens
  chr17:9143607-9143789
  hyper
cgtggaggggctgggggcagcctgccctggggcccgggggcgggcgcagaatcgcacaactggggccccaggcgcggggcgtggatggcgcggagacgtggacgggaggagaactgtgaattctcaagcccgtagtgtgggcggggcgcggagcacccaccaaaccaccacccgacacgcag

SEQ ID NO: 128126 - DNA, 30 bp, Homo sapiens
  chr17:9478935-9478965
  hyper
aggaccaagtgtggcgggatgtggctgagc

SEQ ID NO: 128127 - DNA, 1494 bp, Homo sapiens
  chr17:9548017-9549511
  hyper
ccgcgtagggggcgcgcctgagagcctgaaaacttcctggttagcaaatactgaggctggaaagggcctgaacttggcagtccatagatccaggtcgagttccggtttccctgcttacggatcgggcggcctccctacgttgcgataacctctctgagcccccttccttgccgattaaagcaagggtgatcaagtcttgcaagtttttggaaaatgattctaacccaatctgtggtgtaaaaaagcaaaccacaaccactcgggggcttttttcacagggcaacacgtggctcccagttcaggtcccgggttggcgggtgcaggcacagactctgcctccccccaaggggcagacggtctggaaggaggtggcgacacctgtccgcacacacctgagcctgcggaggaaccagcggtgcacaaaagcgctccccacccccacacagcgcccagcgcgcgcctctcaccacgcccgaggctgtgctctggagatgcctgccttgcccttttcttcctgcagtagccaggcctttaccatttactaggcgctttcagaatgttcatttctccgtaatttccactgcttgaaggctgctcgaggaacaggagcagcggcgaaacccaggtctgtcggtttacgaggtaaggaagggtggggaatccgaccacgaagactcccagtcagcgcagcgggggcggcaccaggcaggggtaggggtggcccggcgctgccctggagggggctggtcgtgccgccggattcccgcgcggggcggggctgccccgcccttggctccgcctccgccccgtccccgcacacctggcccgcaggtagccggcaccaggagccttagagaagctgtagggcctgctggccgctcgtccgcctcgcgcccgggggctccgcgcctggagctgcgccggcggcagccatggacctgggccccggggacgcggcaggagggggaccgctcgcgccccggccccgccgccgccgctccctgcgccgcctgttcagccgcttcctgctggcgctgggcagccgctcacgccccggggactcaccgccccggccccagccgggacactgtgatggcgacggtgaggggggcttcgcctgcgccccgggcccagttccagcggcccccgggagccccggggaggaacgcccgcccggaccccagccccagctccagctccccgccggcgatggggcgcggccgccgggcgctcagggcttgaagaaccacggcaacacctgtttcatgaacgcggtggtgcagtgtctcagcaacaccgacctgctggccgagttcctggcgctggggcgctaccgggcggctccgggccgcgccgaggtcaccgagcagctggcggcgctggtgcgcgcgctctggactcgcgaatacacgccccaactttccgcggagttcaaggtaggcagcgctgcgccgccgaccgccctgtccccctggtttcgcctcttgaaaagtg

SEQ ID NO: 128128 - DNA, 150 bp, Homo sapiens
  chr17:9862884-9863034
  hyper
ctggtgaacgttccgcgtgccgcttgctgcctgaagccgcggaatccactggggagaagagagttaaggccaccacctcctggcactgaggaatcagcacacgacattttattctgaaaccccccgggtccaaaacgtcaaacctaaata

SEQ ID NO: 128129 - DNA, 30 bp, Homo sapiens
  chr17:10008491-10008521
  hyper
cgtattcctacccgacgccgttggtaaggc

SEQ ID NO: 128130 - DNA, 4 bp, Homo sapiens
  chr17:10101105-10101109
  hyper
ggag

SEQ ID NO: 128131 - DNA, 316 bp, Homo sapiens
  chr17:10101131-10101447
  hyper
cggtgccactttctcgcacccctgatcctccgtgcctcttcccaagaccgccagacccttcaccggcccctgccactgccgggaacgctcccgcctgctccttaactcacacaggcaacaagttctcgcttcctcagagcagccacggtgtgctccggaggcccggcgcaaggtggaagctccccgcgagtccgcgttgcccacgccccgaggggcgcccgctgccgtcgctgccccccaggagcgtggagctacaggtagcgccggcaagggctgccccccggggcgcccctccgaccgggacgctgcggcatcc

SEQ ID NO: 128132 - DNA, 342 bp, Homo sapiens; identical to SEQ ID NO: 53719
  chr17:10102264-10102606
  hyper

SEQ ID NO: 128133 - DNA, 42 bp, Homo sapiens; identical to SEQ ID NO: 53720
  chr17:10600736-10600778
  hyper

SEQ ID NO: 128134 - DNA, 946 bp, Homo sapiens
  chr17:10632699-10633645
  hyper
agggggtccccaagccgactaaaaagtttaatgatgctataaagggttttggtcggcttcgtctcctaggccctgagatatgttcagtgtcgtccgcgggccggacgttaacgcaggagccagggccgcttcttctgaggtcccctgggaagttccacgcgcggaaccagccccttccagggtgtgagccctggtatgggactcgcttccatgaacacatccgcgtctcttagacgggggagaaagtgggggctccccaagcagaaagcccaagtcccgtcctccccactaactgtgcgcccctgcgactctgcccgctagtcagttacacggcccgctaggccagggggcggagctgggagccgggcgggtccccctcccaccgcggccgcctgacctgcaccaaggccgccagcgcgaagaaggcggccatgagtccgttgcaggcccgccacagcgctggcgccatggctcggagaacacggcgcggggcggtgagtcctgccacgtgcggggcggtgagtcctgccacgtacggtccgccttcctccttgcgcggagggaccgagacccccgcctcggtttcggtgccttggggacactgccgtggccgtcgctccgcccgggggcggggagcgaagggcgtgggtgtagcccccactcagcgacccattcagcccgccccgaacgccgcggggtgtaggcggcgccgtcctggtttcgcggatgggaaagcgagtccctcagggagcgcaggtctcggtggtggacggaagtcgaatttgaacccgtataggttcaactccaaaccctgttttcactaaagctaccttcctcacaaaaaaaaaaaaaaagaagaaagaaaaaaaagaaggaaaaaaggaaggaaggcaggcgggaggggagagaggaagaaagagaaagaaagaaaaagaaagaaggaaag

SEQ ID NO: 128135 - DNA, 525 bp, Homo sapiens
  chr17:11501655-11502180
  hyper
acagcgacgcgaccccgccccttcccgcgtacacctcctaccttattagcctggaaggggcgggaccaggggtccgtgcccaataggaagggagcagaggagtgagtcctggccgcgtccccgtcgctagggaaaccgatgcagctggaggccgcgcgcgatgcggctcgcggaggagcgggccgcgctcgcggcggagaacgcggatggggaacccggcgccgaccgacgactgcgactcctggggacctacgtggccatgagcctgcggccggctgcgggcgcctgggagcgttgcgcggggagtgctgaggcggagcagctgctccaggccttcctgggccgcgatgctgccgaggggccgcggccgctgctggtggtgcggcccgggcccaggggcctggcaatacgccccgggctggaggtgggacctgagtcgggcctggctggcgctaaggcgctttttttccttcgcaccgggcccgagcctccagggcccgacagcttccgcggcgcagtggtctg

SEQ ID NO: 128136 - DNA, 30 bp, Homo sapiens; identical to SEQ ID NO: 10993
  chr17:11901016-11901046
  hyper

SEQ ID NO: 128137 - DNA, 15 bp, Homo sapiens
  chr17:11924511-11924526
  hyper
gcataggccccggcc

SEQ ID NO: 128138 - DNA, 30 bp, Homo sapiens; identical to SEQ ID NO: 10994
  chr17:11924904-11924934
  hyper

SEQ ID NO: 128139 - DNA, 30 bp, Homo sapiens; identical to SEQ ID NO: 53724
  chr17:12490863-12490893
  hyper

SEQ ID NO: 128140 - DNA, 940 bp, Homo sapiens
  chr17:12568511-12569451
  hyper
ctggatctccagatgcgccgtgtcacatttgtccccccaaaaagcatatcctagaaaatgaaagcctttccatttccccgtggaaatgcatctaagtccagtattggagctgcgagatacagaatcgtctctgccagtgccctgagcccctcaaaccgaggggaatgcgtgggcttcggtccgtcggaagcttttcttctcaggggtccagcttatttccaaattgccccgcgtgaactgtcccgcgggcgcgcacgccctttcgcgcagcctttgcagccggctggcgggagatcccggccgcttccctttcgccggcagaagcccggccggggaagccccggctgcgcacgcccatccccaggacctcggagctcccagcggctgccgcagccccgcgaaccacctgcaagccccgcggcgtcgcagcccttccttctttcctccgggcatccgctctttagctcgcgcccctctcccagattcccgacccctggccctgctcccgccctctgtgcctcggcggctgcggggcccgccgcaaagagttaagagccggttcccgagacggcttcggcggctccgggtccccagaccccgctcgccgctcctgattggctgagcgcctgtcagtagtaaagggtatcagatggcaaagttgggaccttcataaaggcgtggtggcgattctccgcaatcgccggcagcctatgacatcagacaggaacgcctgggatgccgcgctgctcctggccaacctccgaggaggaggagggtcccgccggctaagagttaattagccccgcacggcgaggggggaggcgccagttttctggggacactggctgccactgtactcctacccaggggagctcacggagagttggatgaattctgggttgttagctgcggtcagctgggctcccgggagcctgttgct

SEQ ID NO: 128141 - DNA, 983 bp, Homo sapiens
  chr17:12692657-12693640
  hyper
caaagctgctggtgacgctgccttctcccacctccgcactccactgtccttgcaaactttggacagaggaaaggtgggcacggggcgcgaaactacaagtcccggcatgcacggcgttctccgcacaggcgcacggggaccgccgggccagccggccagccagcctgcggagactcccgggtccccgcgccggactgggactgggagcaggcagcccgggcggagcgggccggtgccgaggacggccccaggcattgctctgccccgggcattgcgcggcgcgcgtgagggggatgcggcaggaggcggcgcggcgggaggagtaggcggcggcgccctcgggagggagctgcgcgcgggccagacggcgcccggaggctccgcagtgccgccgccgtcgcccgggaggctccgcgcgggagccatgtaaccctgcggcgggctccgggctgctccgtccttccccagctcccgggctagcgcggcagcggggccacgatgaagaagcagttcaatcgcatgcgccagctggccaaccagacggtgggcaggtaggtcacccgcgggcaccgctgtcggtgcgcgcccgcgaggctgcatccgcaggggcgcgcaggtgatggagcccgcccagcctccagtcctccttgcctcagtcctttcccctgcaccagctccctccaggcgccgctcgcaggcgcgacccctcctccctaacttcccagaccccggagctcttctcactcgccgccttctgctccgggctccggttgccaagcgcaaagtgtgacgcatcctttacctgcgtccccggctgccccttcgcttcgtcctccctgcctttccccgggactcccttctccctctggccgcctgtcttcctggaaacaggtgtttgctctgattgtgctggaggcagccgaaccgcagtcggtctccggagatctcttccctcccctcccctgcgccgagttcagggctgc

SEQ ID NO: 128142 - DNA, 134 bp, Homo sapiens; identical to SEQ ID NO: 53727
  chr17:12877185-12877319
  hyper

SEQ ID NO: 128143 - DNA, 131 bp, Homo sapiens; identical to SEQ ID NO: 53728
  chr17:12877650-12877781
  hyper

SEQ ID NO: 128144 - DNA, 269 bp, Homo sapiens
  chr17:12921255-12921524
  hyper
cgcccacatgcgcccgtctccaccaaaactgagaaagccgccggtcacctacgcccgcgtttcccgtgcaccacctagccgctccgcatggcggatccagccaatcagcgcgccgtgcaccgagcttcccgcctacgcgaggctgctcatccaatagaaaggagctttaccgctcgggacttgtcaattgacagtggccatagagtagaggaatactagagcgtctcaagcggccccgcccctagttctgttccggtttgccggccgca

SEQ ID NO: 128145 - DNA, 108 bp, Homo sapiens; identical to SEQ ID NO: 10997
  chr17:13503836-13503944
  hyper

SEQ ID NO: 128146 - DNA, 575 bp, Homo sapiens; identical to SEQ ID NO: 10998
  chr17:13504194-13504769
  hyper

SEQ ID NO: 128147 - DNA, 764 bp, Homo sapiens
  chr17:13505001-13505765
  hyper
cgcccgagttcaggttctctcagccaaggagcgaggtccccccgagtccctctgcccgagcgggagacaggaggcccgtgcagagccgtccacccctctccgtagcgccgggttgctccaaactgctcttggaccccacctgtgagccgcgtggctgggctgggctgggctgcgcgggacctgtcagcggcccccgccactctgctcgcaggcgctcaccggctgcctcctgggccgccgctggccgccgccacacgtgggacgccgagggcagcaaacttgctggtgacgtcaaaggcccgggccggaccagcccccggacgagcgcagcggggcgcggaccagcggccaggcggggccagacgggcggggtgggatggagaaaaggtggcgcgggctccgcagcagccgcccaatggcactggagagggcgggggcggcaggggcgacgccccttccccagtgtcccccattcctccccgcggcttcgcccccttccagtggatccggtgtctgcggcggctccggggttgcctgagtgacagctaaggccggccggatctctgggggcctgacttccacccaagacgccactagcttggtgaggggccccagagctctccaccgcagctcagccctccgcagccctgaccctccctctccaggttccccgcgctctgctcccctcttggcactgttgccctatccttccccatcccactgctttccatcgcctggaacctactcctcgtccccttggaagt

SEQ ID NO: 128148 - DNA, 30 bp, Homo sapiens
  chr17:13972688-13972718
  hyper
tgctttgcggttcccggaagtccttcaggc

SEQ ID NO: 128149 - DNA, 308 bp, Homo sapiens; identical to SEQ ID NO: 53732
  chr17:14200598-14200906
  hyper

SEQ ID NO: 128150 - DNA, 285 bp, Homo sapiens; identical to SEQ ID NO: 53733
  chr17:14200930-14201215
  hyper

SEQ ID NO: 128151 - DNA, 30 bp, Homo sapiens; identical to SEQ ID NO: 53734
  chr17:14202901-14202931
  hyper

SEQ ID NO: 128152 - DNA, 30 bp, Homo sapiens; identical to SEQ ID NO: 53735
  chr17:14203174-14203204
  hyper

SEQ ID NO: 128153 - DNA, 1145 bp, Homo sapiens
  chr17:14203856-14205001
  hyper
ctccgaatgagtccccggcgtgggttggggggggggttccagtgcctagtgcatctcctaccctgctctccctcctccaaccgcctccctactctgcaacacgtaagcatcacgaaacctcctgcgaaacatctggatggggactggtgtcccaacatctgggcaactaccgccaaggctggcttctagggaacgagtgcggaaatgcgtgcgggtgtgggagcgcaccactcagtagggtaggacctctcccagcgctaggtcactgcagcattcttcccaccatctgctcctgtcaccagcccctaactccgcccctttgggcccgccccttgttccgaagccaatagcaacccctgaccgccctacaccgcccagaagcctttccacaccccctcgtcctgggagcgggttggctgctgagctctcggagaagcgcctgtatttgcatggcgttcggggtttttggtaggtagagcagcccgtcactctggaaggccgggaccgcccactccacctcggtccacagctctcttcctgcgcagttcgcctctgcagcctctgcggggaagtgccggggctgctcgaggctcagttcttaggactgcaaggaggcagccccggcgtgcggcggtgcgcacagtctagagtggccagggcgcgagagtgcaacgtcctcctggccccgagcgcgtcgtcgcgccccgggagcagaccctcgcccagcagttaccgccgtcccgactttccgttccagttgcagctcctgccgggcaacatgtcaagagccgccgccgctacagctgccgccgccacctggggaagagcagcagcagcagcggcggccgcgggcacacgggggcaataaaccgagccacccgggcgtccagcgtgccggggaaccctctctgcgctcactgcccggcgggacccacgccatgtgctgagccatgtccctggccgcgcccgcgggcagcgcatggggcagcgcctgagtggcggcagatcttgcctcgatgtccccggccggctcctaccgcagccgccgccgcccccgccgccggtgaggaggaagctcgcgctgctcttcgccatgctctgcgtctggctctatatgttcctgtactcgtgcgccggctcctgcg

SEQ ID NO: 128154 - DNA, 1196 bp, Homo sapiens
  chr17:14205182-14206378
  hyper
cgaggtgccggactccccaagccccatctccagctttttcagtgggtctgggagcaagcagctgccgcaggccatcatcatcggcgtgaagaagggcggcacgcgggcgctgctggagtttctgcgcgtgcaccccgacgtgcgcgccgtgggcgccgagccccatttcttcgatcgcagctacgacaagggcctcgcttggtaccggtgagtttccctgccaggggcagggtctccatcgtcgattcagaccctgagctaagggagacatggcgtatgatagggaattggcagggttacagcttcggaccacccggggtagggcagggaaactacggcagattgcgcagcgcatcctgtccgggtgcggtgagggttgcgctccgcttggttctcgtcacaacccacagaaagttctcgcggagcactggtgcccttgaattcatcaggcgacctcgccgcaaagaagaagggcagcgactgagaccgccctcagcaaagcgagccaccctctaaccatgggggtatccgactcgaatcgtattttatgactcgttttaaattttttcctcccggagcccgagacgctgggaatgttctgagcccctttggtcggtctccgccctcaaggaacttctagagcagcttctgcttcccagatggggagagggggtgggggccgcggcgtcccggcgaggccgcagagtctgttaactttttgttacagtccgcctggttaccggaaccccaagggtgtcagacccgcctcgctcgcgagccgcctgggctcgggagggtgagccgggcgggtggcccggcgcctccgcctggcgggcgggcggcgcgcggagcgtggagctgtgctggtccctgtcgggcaaaggcgcgcactgcaaccggctggagcggcgcgaggctttgaaggcgtccgggcctccgggcaccgccgcccgtttccgcctccctgccctcggtgctgggatagggaaagcaaggacgcgtgtctccgcggggcttttacacgtccggagcaaagaatattcggggcccattgattgagaaatgagggttgcttcgaggtcgcggcttccggaaattctgttctcgagtcgggttgcgggtcaggttccaaagggacagtggccccggggtcacaatcactacctctgcccactgctttccgcagctgctggtct

SEQ ID NO: 128155 - DNA, 86 bp, Homo sapiens
  chr17:14212386-14212472
  hyper
cccagctgcccccgacgttgccacgtgtccgctcctttcgggagctaggggggcgttggcttggacatcccgttctggaagggtgg

SEQ ID NO: 128156 - DNA, 130 bp, Homo sapiens
  chr17:14212588-14212718
  hyper
cggagacagatggcggagcttcccagtgcgggggcagggctggcagccgagactggggccgcctcccccgcccctaggctggccgggtagtcctccgtggccacgtgaccagcctcgccgtccggcctca

SEQ ID NO: 128157 - DNA, 30 bp, Homo sapiens; identical to SEQ ID NO: 11003
  chr17:14940884-14940914
  hyper

SEQ ID NO: 128158 - DNA, 207 bp, Homo sapiens
  chr17:15164105-15164312
  hyper
cgaacgcactgggccgagcgacggaggcgcgcgcagagggagggtcccgcgcactagcggaaggcccggcctggcccagcgcccgcagcccgaccgcccgcgcgggtcaggagccttcgcgccgcctgccgccgagagggggcagcagccgcctgcaggaccagcgcccagtgcccagcgcccagccgggcccgcctgcaacggaac

SEQ ID NO: 128159 - DNA, 350 bp, Homo sapiens
  chr17:15164529-15164879
  hyper
aggtgcccagatttccgtctgagacctggagacagccgtggcatgcggtgggggagacagcggcgaggaggctggtttcccagaccccagtgctctccgcattccgtttgtctccaagtttccacccaactctgccagcgtagaggaacggtcctggccccagctcagcctcgcgcagactctggcggctccggagaggtggtgcagagccagagtagtgtggaaagaaaagaatggctcgagagggttgcccggaccctgcgcttcccgtccaccgcgcgcttccccaggcagcccctggggtcagggggcattctgctcttgcgctagacccacgtgctcgcctaggg

SEQ ID NO: 128160 - DNA, 1032 bp, Homo sapiens
  chr17:15165788-15166820
  hyper
cacaaactcgggtgcgttggctccgctgctggcgccgccaaagctgcgctgcggggctgcgcgcgcgcgaagcaagggggcagtgggaggctcctggcgttcccctttaacgggaacaacgccctgtttgcgtcgctgcagtagggtgtgtccctgggtcagcgtgtgcgggagggcgggactcagggaggagagggggcaggagagagggagggcaggagacagtcacttggccttaaatgcgcctcaagaaaaagtcggtccctgcaaaaccgcggcgacttttactcgaaaccagaggcggctgagctttctcacctcccacctcccttctcccctggccccgtggagacctagtgttgaccgagaaactggctcctcagcccactctgggaagacccagccaaatgtagctcagcggatgcccagggctgggcttctgggcccgccgacgccgaccgcgcccgcgcggggctgaggctggattcctttcccactaatagagggcagcgggcgcttgagcgctggaagaagtccctctcctctcgggtcctggagcccctgccctgtcctggcgtcttagccggacacacctgccccgcgccggtccccgctattactgtctgcacctacgaagcatgccagcttcctaggattggcggggattgatctagcgggctcctcttgggtgcgaattaggggaagaaaagtccggccgactactggatagcatggtctgggattgggctcctcctagcctaggcaaaaccagactaccaccgaataagctctaggcaaagtgttcctgcagcagtcgggcttggctgtcagccttggctggagtcctggccatggggtttggcgggcgggtgcgaggtggccatttgaggtggggttggagcagccaaggaaatcagctgattcatagcctcctaacgtggcccgcccagcgttacagggagagaggctagcccccttcagtctcggcttggcagaggcgcgcccaactgagactcccgtgcgcaggccagc

SEQ ID NO: 128161 - DNA, 566 bp, Homo sapiens; identical to SEQ ID NO: 11007
  chr17:15244285-15244851
  hyper

SEQ ID NO: 128162 - DNA, 159 bp, Homo sapiens; identical to SEQ ID NO: 53742
  chr17:15244987-15245146
  hyper

SEQ ID NO: 128163 - DNA, 178 bp, Homo sapiens
  chr17:15820949-15821127
  hyper
ggggccggactccagcggcaggggcctccccaggctgcggctccgcgccggtgacgggggctctgccgaagggctcctgcccctgcctagcctggcccatgctggtcgcatcaggggctccattcaacagacgaccgctccgggcctggcgcgggcaggggcgcgcagtcaccgccta

SEQ ID NO: 128164 - DNA, 30 bp, Homo sapiens
  chr17:15848052-15848082
  hyper
gcctggagtgagctcgccccgcccggggtt

SEQ ID NO: 128165 - DNA, 650 bp, Homo sapiens; identical to SEQ ID NO: 53743
  chr17:15848768-15849418
  hyper

SEQ ID NO: 128166 - DNA, 82 bp, Homo sapiens
  chr17:15903672-15903754
  hyper
gcgggtaaaattgccgagaatgaggtgggtcatccgagaggggattggaatccatccaggcttttccgactctaaggcctgc

SEQ ID NO: 128167 - DNA, 30 bp, Homo sapiens
  chr17:16118685-16118715
  hyper
ctaagcgtgggagccgacgtgcgccccggc

SEQ ID NO: 128168 - DNA, 117 bp, Homo sapiens; identical to SEQ ID NO: 53744
  chr17:16120413-16120530
  hyper

SEQ ID NO: 128169 - DNA, 30 bp, Homo sapiens
  chr17:16256299-16256329
  hyper
cgtggcaacggctcccgcgccccccggccc

SEQ ID NO: 128170 - DNA, 30 bp, Homo sapiens
  chr17:16256616-16256646
  hyper
tggctagcggagcgccgtgtgcgggtggcg

SEQ ID NO: 128171 - DNA, 244 bp, Homo sapiens
  chr17:16256905-16257149
  hyper
gagggagacccggcccgcccggccgctgggacgcacctgcctgttcagtcccgcaggcagaggggctgcgcctgggcctacgctcgcgatacccagaatccactcgcacctgcgaaggcgcccctgccctgtgtgaatccagcgggctcttcgtaccttcccgacctggaggggcctgggttgggcctgaattcgcaggctcatccgagcgggcagcctggggtaacttcgtctccaaaaacga

SEQ ID NO: 128172 - DNA, 52 bp, Homo sapiens; identical to SEQ ID NO: 11011
  chr17:16283874-16283926
  hyper

SEQ ID NO: 128173 - DNA, 1162 bp, Homo sapiens; identical to SEQ ID NO: 53747
  chr17:16283956-16285118
  hyper

SEQ ID NO: 128174 - DNA, 421 bp, Homo sapiens; identical to SEQ ID NO: 53748
  chr17:16290016-16290437
  hyper

SEQ ID NO: 128175 - DNA, 257 bp, Homo sapiens
  chr17:16310307-16310564
  hyper
gtcccaaggcgcctggctcaccgctccagagcgcgctcccgggtcggcctccgccctccaagccggagggaaatgctgtggtcccgccgtccgcctgcatcctccagttcctttggagggcaggggagtggagcccacaggctctgacacccttacagtccagctctgtgacttggggaagggagtggcgcatgaggagggcgaagctggagtccaaaggaaggtccttccgttcccgcccccgacccgggatccgc

SEQ ID NO: 128176 - DNA, 339 bp, Homo sapiens
  chr17:16342654-16342993
  hyper
gagcctggagtctgcgaaggccgggacccggttccccggcccacagtgggggtgtgcaaacccgagagaactgggtaagttggggtcggcttgcagtttggggtaccccgagggcggtgtacgtcggtaagattgtaacagtattactggaagacttattcgactgtcctgatgatacttgtaataggaagtgccgtcagaagcgataactgacgacgtctaatgtctatctgaccgcagtcgctgaaacctctacaacttagttgaccgtaactgccagagccctgccctgaattcctgtccttactccctctttaagattgcgtacccactgcagag

SEQ ID NO: 128177 - DNA, 30 bp, Homo sapiens; identical to SEQ ID NO: 53750
  chr17:16343384-16343414
  hyper

SEQ ID NO: 128178 - DNA, 30 bp, Homo sapiens; identical to SEQ ID NO: 11013
  chr17:16394884-16394914
  hyper

SEQ ID NO: 128179 - DNA, 58 bp, Homo sapiens; identical to SEQ ID NO: 53752
  chr17:16395228-16395286
  hyper

SEQ ID NO: 128180 - DNA, 102 bp, Homo sapiens; identical to SEQ ID NO: 53753
  chr17:16439047-16439149
  hyper

SEQ ID NO: 128181 - DNA, 87 bp, Homo sapiens
  chr17:16439418-16439505
  hyper
gccgcctctcggagtcgggaggaagtcgagctggggtgcagttacgagtctcagttaataatgaatagggtggccaatggtgggcca

SEQ ID NO: 128182 - DNA, 321 bp, Homo sapiens; identical to SEQ ID NO: 53754
  chr17:16440042-16440363
  hyper

SEQ ID NO: 128183 - DNA, 761 bp, Homo sapiens; identical to SEQ ID NO: 53755
  chr17:16472053-16472814
  hyper

SEQ ID NO: 128184 - DNA, 459 bp, Homo sapiens
  chr17:16487635-16488094
  hyper
atttcagagaattggcgccgggaggggcacgggatcaccgtgcacagtgagtgctgtacaaagtgcctgtgcagctccccgaagccgcaggagggcgcccgactaagccttttctgccctgcgtgaggcgcatgcgtgttccgtctgcagctgcagacgcccatcctgggagtggacaccagcttcgttccctctcagcccactcgggaagcgccacacggcttcggcttcggacgatccagggccgcgtcctctgtgaggaaacagctgtgacggctgaggagggagggaccagctctaactgattgcttaagttgttacagatggtacagagccagtggctgagttttgtaaatcaggtgtgttcattgagcgaactttccacttcggaatattcagcatctgaggaggttcagtttgattttgtctatcgctggcggggcgcgggctgacgcctgg

SEQ ID NO: 128185 - DNA, 30 bp, Homo sapiens; identical to SEQ ID NO: 53756
  chr17:16556544-16556574
  hyper

SEQ ID NO: 128186 - DNA, 30 bp, Homo sapiens
  chr17:16556856-16556886
  hyper
ggccgcatagggcacgcggccctacctgtg

SEQ ID NO: 128187 - DNA, 208 bp, Homo sapiens
  chr17:16570360-16570568
  hyper
cgcctctcggggtccgctcccccggactggccctgcccacggagcgcgggtagcagccggcggccaggagccagtggcgggagccaccggtgggaaaaccggcaggaggctgcgctggaccccgctgggcagcgccaatccctaaggcagccgggcgggtgagctaacggcggcgggggcggctgagaggctgaggggctgaggcggc

SEQ ID NO: 128188 - DNA, 276 bp, Homo sapiens
  chr17:16570627-16570903
  hyper
ctgaggaggctgaggaggctgaggcggctgaggagctgaggggctgaggcggctgaggggctgaggctggtgaggggcttgaggggccgagcggataaggcggctgacgcggctgaagggactgaggggctgaggtggctcaggggctgacgcgggtgaggggctgaggggctgaaaggctgaagggcgggcagcgtgccgggtccctgcggctgggtccaccgcacgtcacgtggcagaatcccggggctgctttctctccggctgctcagccac

SEQ ID NO: 128189 - DNA, 30 bp, Homo sapiens; identical to SEQ ID NO: 53758
  chr17:16946232-16946262
  hyper

SEQ ID NO: 128190 - DNA, 30 bp, Homo sapiens
  chr17:17140069-17140099
  hyper
acttggttaatgggcgtgcccccaacctat

SEQ ID NO: 128191 - DNA, 134 bp, Homo sapiens; identical to SEQ ID NO: 53759
  chr17:17140478-17140612
  hyper

SEQ ID NO: 128192 - DNA, 30 bp, Homo sapiens
  chr17:17184136-17184166
  hyper
cctggcggaagtcacgcccccaaactgtca

SEQ ID NO: 128193 - DNA, 114 bp, Homo sapiens
  chr17:17184593-17184707
  hyper
ctcgcgagcggcgacgtcacttccgctggttcaagcaccgcgagactatacctagctgcccacccgttactgtttccatggaaacagcctgaattcgccgtagccggaaattag

SEQ ID NO: 128194 - DNA, 181 bp, Homo sapiens
  chr17:17204068-17204249
  hyper
gcggcctgatggatggagtttttaaaaaactgcaacggcaacccaatatagaaggcacagcaggagccccgccccttctgagttggcggggcgggagttccccagatgccgctgcagttgccctgctgcggctctggcccagcatctctgtgctcttgggaacctgtgaaggctccactgc

SEQ ID NO: 128195 - DNA, 30 bp, Homo sapiens
  chr17:17206537-17206567
  hyper
gtccacggagaagacgcaaatcgacagcgc

SEQ ID NO: 128196 - DNA, 30 bp, Homo sapiens
  chr17:17286852-17286882
  hyper
ccggatgggcatgaccggtccggtcagctg

SEQ ID NO: 128197 - DNA, 52 bp, Homo sapiens
  chr17:17287172-17287224
  hyper
acgcggggcgcggggcgatgcggcgcgccttggcttgccgggccttacgtct

SEQ ID NO: 128198 - DNA, 28 bp, Homo sapiens
  chr17:17287254-17287282
  hyper
cgtggccacgcgccgctgccagtccttg

SEQ ID NO: 128199 - DNA, 30 bp, Homo sapiens
  chr17:17380298-17380328
  hyper
tgtagagtgcgcgacgcttttggcgacccg

SEQ ID NO: 128200 - DNA, 814 bp, Homo sapiens
  chr17:17398322-17399136
  hyper
cgccgggaggggagacgccagtccgcgcgcgctcccggcctggggcgcaccgggccgttggatttgacttaacaaaaaggtcctccttaggttgtgtcgccagcgcggcggggctcctagctgatgacgcagcgctccttgtccttggcctggctgccggcgctggccttctcgcggatgtacatgaggtcgctgtgtacgctgggccggcgcgcgaagggtgccacgatgccaaaggcgtcgcccgggtcgccgccgccgccgccgctgccggcccgcagcagcttcttgttccgcagcgccttcttgtgcagcacgtcgcagtactgcaccgagaccttgcggtgcaggtctgggctcatctcgctgggcagcttggccatggcgaagagcgcgcggaacatctggtccaggctgctgttcttcttggccgagatctcgaagtaggcgcagcgctgggggtcgtcgcccaccagctgctcgatctcgcgctggtccacctcgcggtagaagtcgcggtcacccttgttgccgcagatgaccaggggcacgtccacgttctccttggttttgttcttgaggcaagacttggtgtcgaggatctgctgcctgagccgctgcacctcctcgaaggagtcgcggttgtccagactgaacaccaggatgaaaacgtctcctagagggggcacagagagcagaaaaggagaaggtgagggtggccgcccaggggacaagtcgggctgactttgaggccgcgcggggcgcgctagcctctctaagcgcgaagcgcactactcggcgcgcggcagccgga

SEQ ID NO: 128201 - DNA, 633 bp, Homo sapiens
  chr17:17399419-17400052
  hyper
gatagcagttcttggccgggatactcagctccgagtcgctcgggcacatcttcttgatcatcgcggccagtttcattgggcagaggggccgcgagggcgggcgcggggccgagagaagggcagagagcggctgagggtcgctggggtggcacgcggggtgagcggctggagggctctgctcgggctgggcgcggctcgggcttggggctccggctccgctcgggctgggctcgggctaggctgggctcggctggggttctcccaggatctgggcacaggccgcttgctctggctttggcgcccggccgccgcccttatatgcagcctgctcggctgccccgccccggccctcccagctcggtgcgtcacgccccgcggggcccgcctcccccgcaccggctcccagtcccggcgacctcgtcacccgctgccgggctcctgctctctgggcgcgggggctggggggagcagtccagggtcgggctgaggctggaggcgctcggactccgcttttccactgccgcgggctcggcggccgcaggggcgtcggggttctggtcccggcggtgcccctgtccctctgcgacttcgggcaaggacccccattcctgcacctcccgcgcgcgtacactt

SEQ ID NO: 128202 - DNA, 30 bp, Homo sapiens
  chr17:17494820-17494850
  hyper
gcggcggtccggtgcggtcagtacctgtct

SEQ ID NO: 128203 - DNA, 30 bp, Homo sapiens
  chr17:17584490-17584520
  hyper
tcctgtacgcagggcgctagtgtcctccca

SEQ ID NO: 128204 - DNA, 30 bp, Homo sapiens
  chr17:17585283-17585313
  hyper
gtgcgcgaggtcaccggatggacgtctggg

SEQ ID NO: 128205 - DNA, 228 bp, Homo sapiens
  chr17:17596964-17597192
  hyper
ggagaggaagccaggcggcaggtagctgagaaagacatcggatccagggggagcagcagagaaagcaaacaaacagggctttgtgtggctgcagattggcggctcagaagggaagccaggcctgtggtagggggaagggagaggaaggaacgggagaccaggccattgctctgggccagagatcggcggctggaccagcccgggctgggcggccgggaagtagcgagt

SEQ ID NO: 128206 - DNA, 30 bp, Homo sapiens
  chr17:17597506-17597536
  hyper
gaccggggaggcagccgtgctgaggggaaa

SEQ ID NO: 128207 - DNA, 30 bp, Homo sapiens; identical to SEQ ID NO: 53763
  chr17:17655149-17655179
  hyper

SEQ ID NO: 128208 - DNA, 526 bp, Homo sapiens
  chr17:17655443-17655969
  hyper
gagagggctgcccagcgccccgcaggagcctcccgcccggcatacccacgggccagtgccgggactgggcgcggggcggcgcgcgggcgcaggtagccatggtgacagcgccccagactactcgtatttcctgccttttgtgttcgcacatgccccagcccccagcccgggcagacgcccctgattggccgtcacactgcggaggggcggggcggggtgagcggaaaggggcggggctgacctgtgggcggggcccccggggcgaggctggtcttgtactggcgcgcgctgcctgtgattaacaggcgggcgcggccgcgcgcggctggaaaggggcggggcttccggaacagccgccccgggagcctgggataggggtgagtgctccttgatggcggccccgaacaaaggacgcctccagacccgggcttcctgtccgtagtttttcttggcccttggagtctgagagtgagaggcctgctaggccagcgccccctaatcctcatccggccgtgggtggccaggc

SEQ ID NO: 128209 - DNA, 2180 bp, Homo sapiens; identical to SEQ ID NO: 53765
  chr17:17685253-17687433
  hyper

SEQ ID NO: 128210 - DNA, 30 bp, Homo sapiens; identical to SEQ ID NO: 11021
  chr17:17726744-17726774
  hyper

SEQ ID NO: 128211 - DNA, 30 bp, Homo sapiens; identical to SEQ ID NO: 53767
  chr17:17727266-17727296
  hyper

SEQ ID NO: 128212 - DNA, 30 bp, Homo sapiens; identical to SEQ ID NO: 11022
  chr17:17740390-17740420
  hyper

SEQ ID NO: 128213 - DNA, 30 bp, Homo sapiens
  chr17:17875552-17875582
  hyper
tcctgccccacacgcggccttaccgaggca

SEQ ID NO: 128214 - DNA, 69 bp, Homo sapiens
  chr17:17876011-17876080
  hyper
agacgagtcaatcacgcaaatggacggaacagaggtgaatctaggaatatccccgcccatagaaagtac

SEQ ID NO: 128215 - DNA, 30 bp, Homo sapiens
  chr17:17876329-17876359
  hyper
cagatagtgcccgacgtaactctttcctgt

SEQ ID NO: 128216 - DNA, 30 bp, Homo sapiens
  chr17:17942845-17942875
  hyper
ctgggtcccggtggcggccggagcgcttgc

SEQ ID NO: 128217 - DNA, 30 bp, Homo sapiens
  chr17:17943111-17943141
  hyper
acccagcagcccggcgtggccaccagcctg

SEQ ID NO: 128218 - DNA, 82 bp, Homo sapiens; identical to SEQ ID NO: 53770
  chr17:17991152-17991234
  hyper

SEQ ID NO: 128219 - DNA, 30 bp, Homo sapiens
  chr17:18057064-18057094
  hyper
ctccctgatccccgcgctctccagctctgc

SEQ ID NO: 128220 - DNA, 145 bp, Homo sapiens
  chr17:18086429-18086574
  hyper
gctggcttgtaccccgacaacgcgcgtctggcttctgccggacgttcctatctgggttcagaactggggccgggtgctgcaggtcccgcagtctgagaagttttcgcgggtttcagaagtttccttaggcgttctaagggcttta

SEQ ID NO: 128221 - DNA, 30 bp, Homo sapiens
  chr17:18087565-18087595
  hyper
cgccagcggctacacggacctgcgtgagaa

SEQ ID NO: 128222 - DNA, 30 bp, Homo sapiens; identical to SEQ ID NO: 53771
  chr17:18129072-18129102
  hyper

SEQ ID NO: 128223 - DNA, 30 bp, Homo sapiens; identical to SEQ ID NO: 53772
  chr17:18161602-18161632
  hyper

SEQ ID NO: 128224 - DNA, 43 bp, Homo sapiens
  chr17:18163701-18163744
  hyper
agggtcgcctgtcacgtcacctgttcgcggtctcggaatgcag

SEQ ID NO: 128225 - DNA, 219 bp, Homo sapiens
  chr17:18164238-18164457
  hyper
tcctgcgaacggggcgtcacccgcccacctagggctgctgcgcggcctgctccgcccgggcccagggcaggcaggtttggcggaggagggaaggccaaacggcctccagggccccgctgcgcaaacttgggttattttcagccacccgtgccctttcctgcttctcggagctggaaggctgtggactgaggcctgcgcgaccccgccagagatggggct

SEQ ID NO: 128226 - DNA, 393 bp, Homo sapiens
  chr17:18218743-18219136
  hyper
aagccttgttcagagcgggggcttttgctgtcgcagtgggttccggagagtgcaggtgatttcgcagcaggtttcttgtgctggccgcgctcgccggacgaagaagagaagggcagttgggcctgcggccttggcgttcatgaggcctcagagagctccggaggagctacaactgtgagggggctgctagagttcttctcctcgggtgtgtgagaagcagcctaggaccccgggttcggggagtcgcaaagaaggccgtaagggcttcacttccttctccggaggcctgccttctgcgcgtcgattaacaccgcattctttcccacttcctctcaatgttttcttcatatatctggaaatatgatcagcgcccctgacgtagtggccttcacc

SEQ ID NO: 128227 - DNA, 259 bp, Homo sapiens
  chr17:18266749-18267008
  hyper
cccgcgcaccgccgcgggccagccacgtgaccagccgctccaaccccaaaccccgaacttggcgctggaccgctcgagctcaggaaggtgcactctgcgcgccaggcttgggcttggccccgcccccggaggcgcccaatcagagagcgcagccaagcatgggccgccaccaaacgcacccgcgctattggctgcggcgcagcggcgggcagggcctgtttctccggggcgggccggaggccgcgtagtgcagctgcgc

SEQ ID NO: 128228 - DNA, 231 bp, Homo sapiens
  chr17:18761716-18761947
  hyper
cactggggcgatctcgcgcccgcggcccttccatttttccctcccttcttcctctcccgccaggggtcggcgggggcgggggacgggcgtccggtgcctgggctctctcctctccctgaggcgccgctggggagtcgaaccctgatgatgggacctgtggtgagcagccctgaaagcaagcccagacccagccattctccgtccctaagctgacacggagcccctgatttt

SEQ ID NO: 128229 - DNA, 918 bp, Homo sapiens; identical to SEQ ID NO: 11026
  chr17:18907420-18908338
  hyper

SEQ ID NO: 128230 - DNA, 329 bp, Homo sapiens; identical to SEQ ID NO: 53777
  chr17:19140729-19141058
  hyper

SEQ ID NO: 128231 - DNA, 112 bp, Homo sapiens; identical to SEQ ID NO: 53778
  chr17:19141267-19141379
  hyper

SEQ ID NO: 128232 - DNA, 46 bp, Homo sapiens; identical to SEQ ID NO: 53779
  chr17:19141602-19141648
  hyper

SEQ ID NO: 128233 - DNA, 204 bp, Homo sapiens
  chr17:19265421-19265625
  hyper
tctggggattcagaacgcgggacagtaactccacacgggacacagcgcaaatgctggaaactcggccaagcctcggctcctcgcgttaaccccaggaggctcctgccagtgatccaagcaagtgggcatgacccgtgcgagggcccacaggcttgcccgagtgtgacctcggtactagctcaacatctcgaggtctgcttctat

SEQ ID NO: 128234 - DNA, 30 bp, Homo sapiens
  chr17:19265904-19265934
  hyper
ggacccacctaggccgcgcgcggttgctaa

SEQ ID NO: 128235 - DNA, 30 bp, Homo sapiens; identical to SEQ ID NO: 53781
  chr17:19266215-19266245
  hyper

SEQ ID NO: 128236 - DNA, 139 bp, Homo sapiens
  chr17:19281497-19281636
  hyper
gagcttcatggggacgcgcgcgctacgtgcaggggcgttgccttccattcacttggcgcccgactgccagtgcgcatgcgtttgaaggcggtgcagggcggggagcacacccctgcgaagtgccgggcaccctttgggc

SEQ ID NO: 128237 - DNA, 425 bp, Homo sapiens; identical to SEQ ID NO: 53783
  chr17:19282072-19282497
  hyper

SEQ ID NO: 128238 - DNA, 31 bp, Homo sapiens; identical to SEQ ID NO: 11031
  chr17:19391541-19391572
  hyper

SEQ ID NO: 128239 - DNA, 839 bp, Homo sapiens
  chr17:19436794-19437633
  hyper
gtgctaaccgagtcacggctcgaggcctctgggtccttccacgccaggtcattcagaacctgaaacccccagcggaggtggagagccggggtgagtcctggcgtccgagacgtggaggacccagcccccggagcgcgttccgttagtttacagagctttttcaaactttgccttccaagtgcaggagttccttggtctttgcaagacccgcaggcgtccgcagtggtgcagagagaggtgcaaggggcgcgcccaaggtcgcaggctgcctggctgcgcgctcagtcgggcccccgggcgccaggcgcggggcgggctctgggcgggcggccggggcggggactgcagagcaggctgcactgcgcggtacccactgccggcctgcgcggtactcactgccggcctccgcggtacccactgccggcctccgcgctacccggccgcagcgcgcgagtcacatggaagctcctgaggagcccgcgccagtgcgcggaggcccggaggccacccttgaggtccgtgggtcgcgctgcttgcggctgtccgccttccgagaagagctgcgggcgctcttggtcctggctggccccgcggtgagtaaggtggcctcagtggcaggccggtaccggcgggctggggacctggtgatttctgcctccgcgggtgactttggcgggctttggggaccgagcgagctgtccgccggcgggctccggggagcatcgtgccaggagccgggcgggcaccccagctcctctgcctgcgtcccggccgctttccgctccgcaccacccgactgggggccccgcggggcactgcgggaacggctggtacgcgcc

SEQ ID NO: 128240 - DNA, 30 bp, Homo sapiens; identical to SEQ ID NO: 11033
  chr17:19437914-19437944
  hyper

SEQ ID NO: 128241 - DNA, 30 bp, Homo sapiens
  chr17:19551878-19551908
  hyper
tccctacaccccgccgccccctggcccgtg

SEQ ID NO: 128242 - DNA, 241 bp, Homo sapiens
  chr17:19552167-19552408
  hyper
gtggagacaccccccggagggaggcggagggaagggaggcgaggcctgcacctgcatgcttcccgcctcccactccccagcgcccccggaccgtgcagttctctgcaggaccaggccatggagctcgaagtccggcgggtccgacaggcgttcctgtccggccggtcgcgacctctgcggtttcggctgcagcagctggaggccctgcggaggatggtgcaggagcgcgagaaggatatcc

SEQ ID NO: 128243 - DNA, 410 bp, Homo sapiens; identical to SEQ ID NO: 53788
  chr17:19648093-19648503
  hyper

SEQ ID NO: 128244 - DNA, 1181 bp, Homo sapiens
  chr17:19770123-19771304
  hyper
ggggggaaaacggtacgggggctcttcggggtgcaggggaccagtgctgggaaaggtgacacctcccaggctgcgaaagcctgaggctaatgggacatccgcccattttccgctgggtctgtaattatcaacctcaaaagtgaccagccctgggcacggggaaaaaaaccaaaggtccattcacgcccaaccctcgagtctgcacggtgcagtaccgtctattttgggtccagggtaacctgggtgcaaacgctcctgcgggcggaccgcggggtgggccccgggcacacaggaggatcagcagcagccggtcggtaggcggagcgctgccagaggcttgggcctcacaacaaccctcacaggaccaaaacaaacggcgagacgggctgcgcgcacaatagcatacccgggcggctagccgagtcgggggtctcggctcgcggctgcgccaagtttcagaaccacctagccccgtgcctgccgcccggggcccggcctcgccccggccggcgctcacctggcggtgccgcccccggaagaccacggcgaaggccccgtgtcccacgagatccctcttgctgtactcgaagtcacccaccacctccatggccgcgcccccggggcacacagcggacgggcgggcggcgcagtgcggcgcaggtatcagcaccgcggctccgcgggcccggagcgcgccagcgtgcggcgggtctggggcagccgcagccccgggcccgggcggactctcatgccgagagaccggagcggaaactggggaagctgccgcgcggagccagggtcagcgaggcccggcccggcccctgccgctcatggcccggcctgccgccggccgctggctgtctggcgaagcggcctcggcgctgccgggccaggggtgccgtcaccgtcactgtgcgcgcccagagccgcacacgcgctctgaggcagtgaggggcccggtactctccatccccagctcgtcgggcctcctcggccctccccgctcggggcgctgctgcgacggcgacggccgccgccctagaacccgcaccgccgcggccccgcgcttccccgcctcgcggcggcgcccaacgccctcgcgcgcgctacccgctcccgcgcgactggctgccctccgcgacgtccgcgcgccttgaaggccgcagcgccagccggctccc

SEQ ID NO: 128245 - DNA, 463 bp, Homo sapiens
  chr17:19881062-19881525
  hyper
ggagtgggccccaccgcctcctcgggatgcccaggcagctccagccgccatattatcaacaagccgcccgcccggagttccggtccttccccgcgctaggcttcacgggaggtcaagcgccggccccgccccttttccccatccccctcccgcgggtgcaggggcgcacgcccgcatcgcccacgtgacccgcgcgtgctacccgcgcctctttcccgggccctgggtgcctggagcgagccaccgttcctgcagctgttttgtggcgtctgtcgccggcccccggtggagcgctgcagacccagtctctgcaaaactaactccctggggcgggagccctcccagcagctggaacggggcgggccttaggtccccggcttccggcccctgggtacccttcaaattgtgcccttctaaaaggcagggtcaaccctgccacgctccagctcgacccctcctgctc

SEQ ID NO: 128246 - DNA, 80 bp, Homo sapiens; identical to SEQ ID NO: 53791
  chr17:19912415-19912495
  hyper

SEQ ID NO: 128247 - DNA, 30 bp, Homo sapiens
  chr17:19912901-19912931
  hyper
cggtcccctcgtcgcgtgtcctgtccccag

SEQ ID NO: 128248 - DNA, 30 bp, Homo sapiens; identical to SEQ ID NO: 53792
  chr17:19913202-19913232
  hyper

SEQ ID NO: 128249 - DNA, 30 bp, Homo sapiens
  chr17:19976883-19976913
  hyper
caagcgctctctgcccggccccctccgagt

SEQ ID NO: 128250 - DNA, 247 bp, Homo sapiens
  chr17:20059179-20059426
  hyper
atacagatgaggtgggcggacagtatgcagatgacgggggcgggccgcgcctggcgggcggtgtgcagttgaggtggtccggcaggatgcagatgaagggggcgggccgcgagggcgggcttgatgcagatgagggggcggggcccacgggcgcgggagagcagcggctccgccggcagctgctgggaactggaaggcgcccggtcctttctttgactggagcggacccgccggacgcaaccgcctc

SEQ ID NO: 128251 - DNA, 30 bp, Homo sapiens
  chr17:20744045-20744075
  hyper
ggaccgacggacgcacgggcgggcggccgg

SEQ ID NO: 128252 - DNA, 111 bp, Homo sapiens
  chr17:20744390-20744501
  hyper
gcctcttctgctgcccgccctgccccggccgcatcgctgccaagctcgccttcctgccgccggaggccacctacaccctggtgcctgagcccaagccggggcctggtgggg

SEQ ID NO: 128253 - DNA, 30 bp, Homo sapiens; identical to SEQ ID NO: 53794
  chr17:20755490-20755520
  hyper

SEQ ID NO: 128254 - DNA, 511 bp, Homo sapiens
  chr17:20755755-20756266
  hyper
tccttgagcgatcaccgagcgcacctcgcaatctctgatcttcgaacccactgaaaaagcacaaggcatggggagtcctgttggttcacgccccgggtgcgaataccaaaagcaactcccgctggaaagcctgcaggaaactcgagacaaagacagaggcaaacgcaacgctgggaagagccaggggtgctgccgtctgcaaaagcagagacgcgtctcccttcgggcaaagtgactgctacaaagtctgttccctcctgcgcagggacagagacatttaaaggcctgaacggacgtcagcaccagtagagctcgctgggtgagcgccaggcctccccgccccaaggatagcgcgcacagggcgatctgctgctcgcgaggtagaaagtggcttacttggggagaaaacagagctggtggcgctgctgagtgtcaaaccctggagcccatcgtcaagacgttatattggtggcagttctgctgtgagtgcacttgccgaattgaacagagc

SEQ ID NO: 128255 - DNA, 30 bp, Homo sapiens; identical to SEQ ID NO: 11035
  chr17:20945540-20945570
  hyper

SEQ ID NO: 128256 - DNA, 70 bp, Homo sapiens
  chr17:20945958-20946028
  hyper
ggtgggctgccgggcgcaccttgcgcttgcgggcctcagccgtgccgctccacacgaagcactggtagat

SEQ ID NO: 128257 - DNA, 30 bp, Homo sapiens
  chr17:20947029-20947059
  hyper
tcctgtcgggagcccgctgatagtgagggc

SEQ ID NO: 128258 - DNA, 30 bp, Homo sapiens
  chr17:21023072-21023102
  hyper
gatggcgtgatactcgcaaacacgggacta

SEQ ID NO: 128259 - DNA, 133 bp, Homo sapiens; identical to SEQ ID NO: 53797
  chr17:21030039-21030172
  hyper

SEQ ID NO: 128260 - DNA, 202 bp, Homo sapiens
  chr17:21069250-21069452
  hyper
cattaaaaaccaaaattgtgtgtgtccaagttcctaggtagccatagtaagtgctataattgataaggagggctttaggccataatgaacagacagacttggcgcgggctctgcctcctgttcattgtcaccgcactcctgtgccatcatattacagggcccggggctgggctttggcacctttctccgccccccctcacag

SEQ ID NO: 128261 - DNA, 30 bp, Homo sapiens; identical to SEQ ID NO: 53798
  chr17:21117656-21117686
  hyper

SEQ ID NO: 128262 - DNA, 84 bp, Homo sapiens; identical to SEQ ID NO: 53799
  chr17:21117924-21118008
  hyper

SEQ ID NO: 128263 - DNA, 30 bp, Homo sapiens
  chr17:21179482-21179512
  hyper
taggaaggcagtggcgcagggagcggtggg

SEQ ID NO: 128264 - DNA, 112 bp, Homo sapiens
  chr17:21187753-21187865
  hyper
atgttgacgggcagcgcgaggggcgcggctttagtccagggggcggagcctgaccggacctgggtttttcgggcggctggcggacttgacagagagcgggaggggcccggat

SEQ ID NO: 128265 - DNA, 30 bp, Homo sapiens; identical to SEQ ID NO: 53801
  chr17:21189239-21189269
  hyper

SEQ ID NO: 128266 - DNA, 213 bp, Homo sapiens; identical to SEQ ID NO: 11037
  chr17:21189751-21189964
  hyper

SEQ ID NO: 128267 - DNA, 30 bp, Homo sapiens; identical to SEQ ID NO: 53803
  chr17:25621215-25621245
  hyper

SEQ ID NO: 128268 - DNA, 30 bp, Homo sapiens; identical to SEQ ID NO: 11038
  chr17:25659594-25659624
  hyper

SEQ ID NO: 128269 - DNA, 203 bp, Homo sapiens
  chr17:25659905-25660108
  hyper
tggctctgcagtcgcggctctgcagtcgccttggagcggctgcccttccgaccccgcctgggctatgactcatcttcggtggaggagaaaggggcctttgtgagcgcccagctccggcgtctcctggacagcaccgccctccggtggccgcgagtcaggagggctggggaagccgcccgagaggcagcgcccgagctccccac

SEQ ID NO: 128270 - DNA, 30 bp, Homo sapiens
  chr17:25783085-25783115
  hyper
cagctgaggaactgcgggacgcacacccgc

SEQ ID NO: 128271 - DNA, 394 bp, Homo sapiens; identical to SEQ ID NO: 53806
  chr17:26120456-26120850
  hyper

SEQ ID NO: 128272 - DNA, 63 bp, Homo sapiens; identical to SEQ ID NO: 53807
  chr17:26120901-26120964
  hyper

SEQ ID NO: 128273 - DNA, 30 bp, Homo sapiens
  chr17:26219904-26219934
  hyper
gcaacttgctcttacgcagaagcataaatc

SEQ ID NO: 128274 - DNA, 39 bp, Homo sapiens
  chr17:26220450-26220489
  hyper
ctctgccggccgcgcgcgggactcggggtcctactgggt

SEQ ID NO: 128275 - DNA, 265 bp, Homo sapiens
  chr17:26554487-26554752
  hyper
cgccactacctcatcctggtcactcagccgtcgtgagcgcaggcgcggggcgggcggagcgggacccctggggctctccccctgcggccccgctccaccgggggcgtggctagatctgaccgcgcccttccaggccccgccctcaggtatgggaaactaggccgcccggtcgcgcgcctctccaaaacgttcttcccagactgcgaggaccgcctcggcaggtggcggtaaaagcgcccccatcaagtcacataacatcctgcct

SEQ ID NO: 128276 - DNA, 519 bp, Homo sapiens; identical to SEQ ID NO: 53810
  chr17:26554791-26555310
  hyper

SEQ ID NO: 128277 - DNA, 536 bp, Homo sapiens
  chr17:26578403-26578939
  hyper
ggacagagccgcgggcggtcacgtgaccccacggctggggtcggcgcgatccctgacggtagcttgcgggtgttccgcgccgtgggcagcctggcgtgcaggggcgctcagccgagggacgtggctatttctgggacacacaccagtgcacggacgccctaagggacatcctggtgcccaggggaatggtgcacacctggacatgcccggtgatgcacgcagaaagcatcgaggtaaaaatgaacggggagacacctctaaggtgtacgcacgaggacggcataaaaccattggtcagctccctaatctcaccgacctctctcccgcaaattccttatcgccctcctttctccctgcccttccctcaaagtgtcagtcaggttgtcctcagcccagaagactcttcctccagacatcctcatggccggctctgtcgccccctggaggcattagctcaaaatccaccttttaaatgggtcttatcctgacacccctgtttaaaattgcaacccggcagcgtgcggtagatgacgcct

SEQ ID NO: 128278 - DNA, 61 bp, Homo sapiens; identical to SEQ ID NO: 53811
  chr17:26879851-26879912
  hyper

SEQ ID NO: 128279 - DNA, 30 bp, Homo sapiens; identical to SEQ ID NO: 53812
  chr17:26898036-26898066
  hyper

SEQ ID NO: 128280 - DNA, 30 bp, Homo sapiens
  chr17:26898518-26898548
  hyper
gcttccggctgctccggccaccgtgggggc

SEQ ID NO: 128281 - DNA, 30 bp, Homo sapiens
  chr17:26898920-26898950
  hyper
aggagcctggcacacggaaagccctcaacg

SEQ ID NO: 128282 - DNA, 30 bp, Homo sapiens
  chr17:26900825-26900855
  hyper
gaggcttgcagggcacgcccataggagaag

SEQ ID NO: 128283 - DNA, 145 bp, Homo sapiens; identical to SEQ ID NO: 53813
  chr17:26903725-26903870
  hyper

SEQ ID NO: 128284 - DNA, 239 bp, Homo sapiens; identical to SEQ ID NO: 53814
  chr17:26903937-26904176
  hyper

SEQ ID NO: 128285 - DNA, 31 bp, Homo sapiens; identical to SEQ ID NO: 11043
  chr17:26925397-26925428
  hyper

SEQ ID NO: 128286 - DNA, 332 bp, Homo sapiens; identical to SEQ ID NO: 11044
  chr17:26925693-26926025
  hyper

SEQ ID NO: 128287 - DNA, 342 bp, Homo sapiens; identical to SEQ ID NO: 11045
  chr17:26926083-26926425
  hyper

SEQ ID NO: 128288 - DNA, 57 bp, Homo sapiens; identical to SEQ ID NO: 11046
  chr17:26926826-26926883
  hyper

SEQ ID NO: 128289 - DNA, 30 bp, Homo sapiens; identical to SEQ ID NO: 53819
  chr17:26972039-26972069
  hyper

SEQ ID NO: 128290 - DNA, 327 bp, Homo sapiens
  chr17:26988801-26989128
  hyper
cttcaccacggagccgcaagtaacgacacccaggctggacgctcccacagcgctccacaaaccccccaacaacagcagaggtactacagccatcctaactgtatcgcggagccccaaatcttcgaagaaaactcggcccctccccggaaccggaagctaatggcgaaaccacggagagaaggaagtgaagaagcccgagtctgatctttatggtttatttgactagagcggcctgagaaaccggctgagcctggttacttacgatactctcgctctgttccaggggctcagtgacagctgccttcctgagccgcttcggttaccttt

SEQ ID NO: 128291 - DNA, 30 bp, Homo sapiens
  chr17:26989417-26989447
  hyper
ctagggcctggtcacgtaagggaagaggca

SEQ ID NO: 128292 - DNA, 395 bp, Homo sapiens
  chr17:27038290-27038685
  hyper
agtccgatagccgagcgttccagctctggctggaaccagacttcccgcccatcccgcgggcgacccagcagggcctcaggaccccagtcctcaatcattggcccgcggctcgacgcgagcccgcccccggccctagctccgccccggccctagctccgccccggcccagcactgggccccgcctctctcgttggtttgcccgtctccctcgtcggtttgccggcttcccgcgtgcgccgctcggggtctgcgagccgggccgcgccctctgcccagcccctgccccgcccctcttaccgcggcatctgctctcatcccacgagcgggccttgggctcggtcttttccttagtccatctttcaattgtgagcgtcgtcctgacccacatcgctctc

SEQ ID NO: 128293 - DNA, 228 bp, Homo sapiens; identical to SEQ ID NO: 53822
  chr17:27038906-27039134
  hyper

SEQ ID NO: 128294 - DNA, 73 bp, Homo sapiens
  chr17:27039396-27039469
  hyper
ccgaagacctaactccgggctgaggacctgatgtcggctcccagcccctgcgccaccccgcagcgttcccgcc

SEQ ID NO: 128295 - DNA, 25 bp, Homo sapiens
  chr17:27044393-27044418
  hyper
tacaactcggggccacggggaccct

SEQ ID NO: 128296 - DNA, 162 bp, Homo sapiens; identical to SEQ ID NO: 11050
  chr17:27044581-27044743
  hyper

SEQ ID NO: 128297 - DNA, 74 bp, Homo sapiens
  chr17:27044880-27044954
  hyper
cgctgtaacacgatccccggaaattcctggagaagggccgccccccgcccctctcctggcggctccaggcctcg

SEQ ID NO: 128298 - DNA, 53 bp, Homo sapiens
  chr17:27046941-27046994
  hyper
taagtacaaagcatcgcgagtctttagtgctctttggcgctataagcccgtgg

SEQ ID NO: 128299 - DNA, 30 bp, Homo sapiens
  chr17:27053200-27053230
  hyper
gccgcctctcccgccggccgccagccccac

SEQ ID NO: 128300 - DNA, 30 bp, Homo sapiens
  chr17:27054096-27054126
  hyper
gtataaactctgggcgaaaggaggagcagc

SEQ ID NO: 128301 - DNA, 30 bp, Homo sapiens
  chr17:27055492-27055522
  hyper
aactctcgggaacgcgacatccttttagtc

SEQ ID NO: 128302 - DNA, 30 bp, Homo sapiens
  chr17:27056040-27056070
  hyper
ctctacggaggccacgcccctgacaggccc

SEQ ID NO: 128303 - DNA, 400 bp, Homo sapiens
  chr17:27070823-27071223
  hyper
gagaagcggagccacgatctctgtcccccaggggaaagaaaagcccatgatcccgtgggtgggcgagactggcggtcaccagacccaaaaaccatgcactcgggggtgggcggggccgcgagggcgcgcattaggaccgcgcggccgcggtccgccctctcttccggagggcgggcttcacagccgagccctggccgcgaccgccagtcggcgccgcccggagccgggagcgccgctccagcgaggcgcgggctgtggggccgccgcgtgcctggccccgctcgcccgtgccggccgctcgcccgccatgcctggcttcgactacaagttcctggagaagcccaagcgacggctgctgtgcccactgtgcgggaagcccatgcgcgagcctgtgcaggtt

SEQ ID NO: 128304 - DNA, 30 bp, Homo sapiens
  chr17:27072236-27072266
  hyper
ctccctccctcgctcggtcctccgtagctc

SEQ ID NO: 128305 - DNA, 30 bp, Homo sapiens
  chr17:27138921-27138951
  hyper
cttttttttaaattacggtttactgcatca

SEQ ID NO: 128306 - DNA, 30 bp, Homo sapiens
  chr17:27169878-27169908
  hyper
gcccctgccgggggcgtcttcctcagtgcc

SEQ ID NO: 128307 - DNA, 449 bp, Homo sapiens
  chr17:27181908-27182357
  hyper
gcaattcctcctcccgcccacatcccatgtgtctcggctttcaatttgggcagacctacctctctcctactcgctggttcgtcagccgctctgttcaatcgtaggagcgctcctggtcggttcccgcagtgccttgcggctgtaatggctgcccccagctggcgcggggctaggcttgttcaatcggtgttaagagtctggcaggtgggccctcatgtcgcgagggagcgggtgatccctttttcctcactcttaggcttccaacggaggtgcgtgtcctgcgtcgcggggtccgctttctctggtccccgcttggcctcggcttctcgcagtaatggccagggctctgccctggaccacttcctcggattctctcagcccgacagttcggtgactccttgcgtccccgcggtgtccatgaacagaggtaaagcgccctgataggtttg

SEQ ID NO: 128308 - DNA, 30 bp, Homo sapiens
  chr17:27224010-27224040
  hyper
ccgcgtctcctgggcgggcagtgccggtaa

SEQ ID NO: 128309 - DNA, 30 bp, Homo sapiens; identical to SEQ ID NO: 53828
  chr17:27224789-27224819
  hyper

SEQ ID NO: 128310 - DNA, 305 bp, Homo sapiens; identical to SEQ ID NO: 53829
  chr17:27230103-27230408
  hyper

SEQ ID NO: 128311 - DNA, 30 bp, Homo sapiens; identical to SEQ ID NO: 53830
  chr17:27254415-27254445
  hyper

SEQ ID NO: 128312 - DNA, 30 bp, Homo sapiens; identical to SEQ ID NO: 11052
  chr17:27276469-27276499
  hyper

SEQ ID NO: 128313 - DNA, 30 bp, Homo sapiens; identical to SEQ ID NO: 53832
  chr17:27277033-27277063
  hyper

SEQ ID NO: 128314 - DNA, 30 bp, Homo sapiens
  chr17:27277557-27277587
  hyper
ggactccaaagacccgctcgggagaggccc

SEQ ID NO: 128315 - DNA, 30 bp, Homo sapiens; identical to SEQ ID NO: 11053
  chr17:27278795-27278825
  hyper

SEQ ID NO: 128316 - DNA, 30 bp, Homo sapiens; identical to SEQ ID NO: 53834
  chr17:27329672-27329702
  hyper

SEQ ID NO: 128317 - DNA, 569 bp, Homo sapiens
  chr17:27332300-27332869
  hyper
aggtgagcgaggtcccaaccccgggtccggccgccatccggccccgtctcccctcagtaagaacactagaggccctggaaccggcggcaaagtcgagcgaagtttggcgggcggcaggggaagcgggaccacgggccgccagctggaccgtcccgactcactgccttgcgccccccggcacgcgccccagcaccctgagatgcctagagtgtggcgaggtagcgcgcgggtgagcgcgtgtgtgcggggagtgggtggcgtgatgaattgcatcagagaaatcccattagatctggggagatgattaaagacgaggtctcggccgggcgcgaatggcgggagccgcggcagcttcccgcccgcgaagcccgcgccccgcccggcttggccggcgccgggggcagcgcagccggcggggcgcggtgcttggactgggcagccagatgcccgaagctgggcaccgggtctcccttcccacccctggggccccgctcccgcccccgtcctgccgccggatgccggggtcccttaccgtgagccaggagcgccagcagcgagggcaggagcag

SEQ ID NO: 128318 - DNA, 198 bp, Homo sapiens
  chr17:27333090-27333288
  hyper
ggctgggggcgggggcgcgggaggagcggcttaccgtaaagtctcatgcaaaggcgcagagacccaggggcaggagcccaggctcccgctccaccgcgactgccctactcatgtgggcacacggcccctgcccttctgcgctgcccacccccagccaagcatgccaccctctttcccgttaacggcctgctaaggaac

SEQ ID NO: 128319 - DNA, 30 bp, Homo sapiens
  chr17:27472517-27472547
  hyper
tgtaatacctcaaggcgaacactgtgggga

SEQ ID NO: 128320 - DNA, 30 bp, Homo sapiens; identical to SEQ ID NO: 11054
  chr17:27506955-27506985
  hyper

SEQ ID NO: 128321 - DNA, 30 bp, Homo sapiens
  chr17:27507545-27507575
  hyper
ccaggcgggccgggcgctgccctggcagcc

SEQ ID NO: 128322 - DNA, 30 bp, Homo sapiens
  chr17:27620194-27620224
  hyper
gcgcccaaaaagggcgtttagtggtggaaa

SEQ ID NO: 128323 - DNA, 294 bp, Homo sapiens
  chr17:27621157-27621451
  hyper
agtatatctgagcgcgtctcgccagcgcactggttaaccgagcgattctgcgagattggcagccgcactccaacaatcaggagccacgctgtgccgcaagccccgcccccagctcaaatcctctttccttccccttcgccgctgccgcctggccaacgccacttaccctgtgcaacctcacagggccgggccttcaacgtcagcactatggctctctcttctgtcgctttctctccttcaccacgcagtctgtgaacagcactttctacactcctcgccggcaagcaggctcgt

SEQ ID NO: 128324 - DNA, 30 bp, Homo sapiens; identical to SEQ ID NO: 53839
  chr17:27717121-27717151
  hyper

SEQ ID NO: 128325 - DNA, 54 bp, Homo sapiens; identical to SEQ ID NO: 11055
  chr17:27893140-27893194
  hyper

SEQ ID NO: 128326 - DNA, 402 bp, Homo sapiens; identical to SEQ ID NO: 53841
  chr17:27893344-27893746
  hyper

SEQ ID NO: 128327 - DNA, 30 bp, Homo sapiens; identical to SEQ ID NO: 53842
  chr17:27894162-27894192
  hyper

SEQ ID NO: 128328 - DNA, 30 bp, Homo sapiens
  chr17:27895781-27895811
  hyper
gcctcctccgccttcgccccaactgcttct

SEQ ID NO: 128329 - DNA, 30 bp, Homo sapiens
  chr17:27915957-27915987
  hyper
cataaaaccacactcgcccccacctcccaa

SEQ ID NO: 128330 - DNA, 2 bp, Homo sapiens
  chr17:27918565-27918567
  hyper
tg

SEQ ID NO: 128331 - DNA, 107 bp, Homo sapiens
  chr17:27940230-27940337
  hyper
ggggccaggacgccgcgggactgaccgcctccactagagggtggtggccgcgggccgccctggagcctccacgccgtgtcccggccccggccggtgggtgggtgcgc

SEQ ID NO: 128332 - DNA, 519 bp, Homo sapiens
  chr17:27940590-27941109
  hyper
cgagcagtagcgccccctgccgggaccctcgccagcgccacgcgcgccacgcccagggccaggagccagacaaaccccggcctgcgcgcctgcagagcggcggctggagactggagccaccgcctcgcgggtgcagcagcacagcaggcacggttcggggagggattcggcatggccgcggggtaccttcccaggccagggccctggaggcaactggcacggcctggtccccctgctttgctgtattctgattccccaacccgctcccctgggctcagatctgtcctgtcctagggcggagccaggcggtcctgagggggagatgaatccttagaggagcgctgtccctatcccttgctccttctggccggtccgcatttctgttcactaaccccactccaggacactgcccctgaagcctttgcatctctgctcttcactcctggggggcagctgagctccccgcgtgctgtgtcactgctttgttccagacacaaaccagcacgtctagggcccagc

SEQ ID NO: 128333 - DNA, 30 bp, Homo sapiens
  chr17:27942122-27942152
  hyper
cttcgcgggggctgccgcgaggaagcagcc

SEQ ID NO: 128334 - DNA, 904 bp, Homo sapiens; identical to SEQ ID NO: 53845
  chr17:27942511-27943415
  hyper

SEQ ID NO: 128335 - DNA, 670 bp, Homo sapiens
  chr17:27949457-27950127
  hyper
cccgagcctgaggcccggcctccctgcacccttcttcagcctgctgccctgacactgcgttcttgcgagacgaggtgtctgcgccctccgggagcgctggctgctgtccggccaaatatagacaccacgtcctccccgcccgaaaccgaatttggcggcgcggggggaggaggcgcagacctctgcccctcagggaccccgcccgctccgctggctgcggtgacggccgggtgtggggggctgggtacctggtcctgagcgggctgcggggcgctcacgctgcgaatcctctgcggaaggggcccgagtgcgtagggggccgaggaaggcttcagggcgaaggagccacctctccgggtgtctgtagtatctgggacccgggtgtccagctccgcactctggccgatcctgcggctctctagagcccggcgccgctgcagccccagctgccgctgccatcaacctaagagggcggggctagcataggggcggggccagagcccaagttgccccgccccctccagcggcgggaaagtcgagcgaccccgactcccctcccagcttccgccggcctcggagaaccatcgaaaataaatgtgcagctgtgtgctaggtgcgcacgctgcttccctccctccatgactcccgggtaggctggggaggctcgggt

SEQ ID NO: 128336 - DNA, 243 bp, Homo sapiens
  chr17:28088056-28088299
  hyper
cgcgctcgccctcgcttgattgtttgctccccaggatgctggggaaagcggctgctgaaagagcaaactttctgagcgttcgcggaggcggagggcgcgcggcggactcacagctggttgatggcgttctgcgagatgaccgcgttggcggagaagtaaggaatcatgtcggggccaccgaggctgcaggtgcaagcgaggggcgccttcctcttgcgggccaacgtgctcagggtcatgggg

SEQ ID NO: 128337 - DNA, 56 bp, Homo sapiens; identical to SEQ ID NO: 11061
  chr17:28089159-28089215
  hyper

SEQ ID NO: 128338 - DNA, 30 bp, Homo sapiens
  chr17:28256409-28256439
  hyper
ccaaggaataactacggttgggcagttcaa

SEQ ID NO: 128339 - DNA, 326 bp, Homo sapiens
  chr17:28256762-28257088
  hyper
ggggcaaaaatcaacgtcttgtagttcctgctgctagtctttaacatgggggtgtgggggggttcgcggcagccgagtgccaaggcctgggaagcggcgcggcgcgtgcgcagtggcgttcggcgggacccgctgaggcaaagcggagccgcagtgacagaagcaagcggagcggccgccaggaaggactcaccgaggcgcaggggctggaggtggtgctgggggtaggtgaccgctggaccgtgaccaaagccatctaggcgctgctgggttgttccgggcagggcattcttgtcctgagtgtgggggacgggagggtgacggag

SEQ ID NO: 128340 - DNA, 330 bp, Homo sapiens; identical to SEQ ID NO: 53851
  chr17:28443741-28444071
  hyper

SEQ ID NO: 128341 - DNA, 745 bp, Homo sapiens
  chr17:28562513-28563258
  hyper
acctcctcgcctcctcgcagggcggtggggcgcagcggttctatccccctccccgaggcggggaagaaggtctggaaagaaacgtgggttcgaggcggagaggaaaagcggacccacctgccaggctgcgcggggaggctggtcccgggctgggcaggcgggctggcctcgcgccctcgaggcacccggcggcgctggctgtgcggaggggcgccggcgcggccgtatttgtacccgcgggccctcacatggtctgatctctagatagccgccgccaaagagctcttgaagaatttttgcgtcactttgaggcgaataaacttaatgcttccccgcggccgcggctccgcgctcccgctggatggggttgcgctcgccagggaggggccgcgctacggggcggggtgcgcgcccgaccccagagccaggaggggagggacccccgacacacacacacgctcgcagggaggagcggagcgcggagcagccggcagggcagggccgagcgaggaatcctgactttcctgctctttaactttgcgggaggggggaggctgcacaaaggagcaggtgtgcgcctcccctgccgccccgcgcccacaggacggcacacaggggtctgctcgtgccgctttctcttgacctcggacacctccccatcgtccccatcccgaaagctgctctctctttcttcctgggacctagcagtactcgatacccatgcgtttatctgactgaccggctg

SEQ ID NO: 128342 - DNA, 167 bp, Homo sapiens; identical to SEQ ID NO: 53853
  chr17:28563900-28564067
  hyper

SEQ ID NO: 128343 - DNA, 30 bp, Homo sapiens; identical to SEQ ID NO: 53854
  chr17:28618434-28618464
  hyper

SEQ ID NO: 128344 - DNA, 30 bp, Homo sapiens; identical to SEQ ID NO: 53855
  chr17:28619325-28619355
  hyper

SEQ ID NO: 128345 - DNA, 201 bp, Homo sapiens
  chr17:28705362-28705563
  hyper
ccgcctagtgaggtgcgagccttcctccccacgaggcgtcccgtgcaaccgcacgcggacagcggggctccagcggaggcggggtggatgcggagacaaggcgcctaggagactgggctaaggctttgagtgtccgaacgaagattctttcgaacctattgattttttctagtcttatgattctttcgaaccttttgattc

SEQ ID NO: 128346 - DNA, 150 bp, Homo sapiens
  chr17:29020920-29021070
  hyper
atcctccgcccacccggcaagcaccacttcatcacgccaccgccagggtgtcaggcggggctgagcggttgtcatttctctctaacccgtcagaactctgcacttccttgacagttcgctggctggcctccgacccgtagctgatttctt

SEQ ID NO: 128347 - DNA, 398 bp, Homo sapiens
  chr17:29033063-29033461
  hyper
gtggggtgtctcaggcgcggggctcatgggaatcccaaggcgcaaggtgggaggctggaagcgaggagcgccctgggagcagggtgtccgaagcgcgggtaccgatctgggcagcgcggggcacgcggcgcgcgggcgagtctgcgtgcgcgcgcggacgccttggttcccggagcccagttgctggcgcggcctccactgcggctgcgaagccgaaggtctgaggtgcgccagggctctttacgcggcccccagcctctccgcaccctttgtctcctgagcacgccgctcacaagtccaggagacatggatcagatggaggctggagagccgatcccagctgggaccagtggggtttagagggtctagaaaggggtgaggggcgagggtgagggggt

SEQ ID NO: 128348 - DNA, 30 bp, Homo sapiens; identical to SEQ ID NO: 53857
  chr17:29159698-29159728
  hyper

SEQ ID NO: 128349 - DNA, 30 bp, Homo sapiens; identical to SEQ ID NO: 53858
  chr17:29233360-29233390
  hyper

SEQ ID NO: 128350 - DNA, 347 bp, Homo sapiens
  chr17:29248939-29249286
  hyper
cctggctgaggcgccgcggccgggtccctctccacctgccgggcggagcgcacgggccatgggctgagccccgctgagcccgccgggccggccatgggcgatcgcgagcgcaacaagaagcggctgctggagctgctgcgggcgccggacacaggcaacgcgcactgcgccgactgcggggcggcaggtaagggcgcggcggcgcgggcagcgcgagacccccggccggaccccaggcccacccgactcctcccctcggccccaccgggtcccgccctcggccccctggacccagacgtggcacctgcgggccccgacccctcccacccacaccgtgaacctctcac

SEQ ID NO: 128351 - DNA, 406 bp, Homo sapiens
  chr17:29249457-29249863
  hyper
cgcccgagtccgggctctcgatgtctgcgcacccaggcgcgccccacgccctcggactcagacatcccagccagggctaaacgtcgggcccaggccgccgacagtcctgtgccccctgcccgctcccagacgccccccgaaggcctccccagcgccccacctcggggacgccgagggccccctaactcagcctccccacctgcagctccgcgccgagccccgcggtgcgccccccgcgccctcctctcggttccttctgagtcccttcacttccacgtcgcgcagcctcagactctctccccgggccctgaactgcctccaggatcttcaccccggtcgccgcgcagcggccggtgggctaaccagaaggtgccaggctggccgcttagttcgccttaggtgggag

SEQ ID NO: 128352 - DNA, 784 bp, Homo sapiens; identical to SEQ ID NO: 53859
  chr17:29297828-29298612
  hyper

SEQ ID NO: 128353 - DNA, 332 bp, Homo sapiens
  chr17:29335426-29335758
  hyper
accgcctgcctcagccgaccagcgccgtcgactactgggcctagcccagacgagaggagggaaaggccgcagaggccgcgaggatgctgcggaggcgcgggcggccggctgccgcctagttgtgcagcccagaccaaggaaagagaagtgggaggagcggggagctcggcgtcccgcgtcctccgcggctcaggacgactacgctcggcacgtccgggaccctccggccgtggcggttgcagcgccaaaagctcgggcctcagcccctgacgctgtggtgactccgccgcgcctcgccgtcgcccctgtccccgtcctgcccgccgcctccg

SEQ ID NO: 128354 - DNA, 2 bp, Homo sapiens
  chr17:29335853-29335855
  hyper
cg

SEQ ID NO: 128355 - DNA, 7 bp, Homo sapiens
  chr17:29421875-29421882
  hyper
ggcgcgg

SEQ ID NO: 128356 - DNA, 488 bp, Homo sapiens
  chr17:29421899-29422387
  hyper
cgccttccctctcgcttccccctcccctttcccagccgcgctctcaatctctagctcgctcgcgctccctctccccgggccgtggaaaggatcccacttccggtggggtgtcatggcggcgtctcggactgtgatggctgtggggagacggcgctagtggggagagcgaccaagaggccccctcccctccccgggtccccttcccctatccccctccccccagcctccttgccaacgccccctttccctctccccctcccgctcggcgctgaccccccatccccacccccgtgggaacactgggagcctgcactccacagaccctctccttgcctcttccctcacctcagcctccgctccccgccctcttcccggcccagggcgccggcccacccttccctccgccgccccccggccgcggggaggacatggccgcgcacaggccggtggaatgggtccaggccgtggtcagccgcttcgacgagcag

SEQ ID NO: 128357 - DNA, 60 bp, Homo sapiens
  chr17:29422761-29422821
  hyper
gcagaggtgggtaacgtttaggggttctctcttcctcttccctccgtgaccctcctaact

SEQ ID NO: 128358 - DNA, 145 bp, Homo sapiens; identical to SEQ ID NO: 11066
  chr17:29482999-29483144
  hyper

SEQ ID NO: 128359 - DNA, 92 bp, Homo sapiens; identical to SEQ ID NO: 11067
  chr17:29486026-29486118
  hyper

SEQ ID NO: 128360 - DNA, 192 bp, Homo sapiens; identical to SEQ ID NO: 11068
  chr17:29490202-29490394
  hyper

SEQ ID NO: 128361 - DNA, 110 bp, Homo sapiens; identical to SEQ ID NO: 11069
  chr17:29496907-29497017
  hyper

SEQ ID NO: 128362 - DNA, 69 bp, Homo sapiens; identical to SEQ ID NO: 11070
  chr17:29508438-29508507
  hyper

SEQ ID NO: 128363 - DNA, 89 bp, Homo sapiens; identical to SEQ ID NO: 11071
  chr17:29508714-29508803
  hyper

SEQ ID NO: 128364 - DNA, 164 bp, Homo sapiens; identical to SEQ ID NO: 11072
  chr17:29509519-29509683
  hyper

SEQ ID NO: 128365 - DNA, 175 bp, Homo sapiens; identical to SEQ ID NO: 11073
  chr17:29527438-29527613
  hyper

SEQ ID NO: 128366 - DNA, 124 bp, Homo sapiens; identical to SEQ ID NO: 11074
  chr17:29528053-29528177
  hyper

SEQ ID NO: 128367 - DNA, 76 bp, Homo sapiens; identical to SEQ ID NO: 11075
  chr17:29528427-29528503
  hyper

SEQ ID NO: 128368 - DNA, 141 bp, Homo sapiens; identical to SEQ ID NO: 11076
  chr17:29533248-29533389
  hyper

SEQ ID NO: 128369 - DNA, 136 bp, Homo sapiens; identical to SEQ ID NO: 11077
  chr17:29541467-29541603
  hyper

SEQ ID NO: 128370 - DNA, 137 bp, Homo sapiens; identical to SEQ ID NO: 11078
  chr17:29546008-29546145
  hyper

SEQ ID NO: 128371 - DNA, 81 bp, Homo sapiens; identical to SEQ ID NO: 11079
  chr17:29548866-29548947
  hyper

SEQ ID NO: 128372 - DNA, 125 bp, Homo sapiens; identical to SEQ ID NO: 11080
  chr17:29550460-29550585
  hyper

SEQ ID NO: 128373 - DNA, 157 bp, Homo sapiens; identical to SEQ ID NO: 11081
  chr17:29552111-29552268
  hyper

SEQ ID NO: 128374 - DNA, 251 bp, Homo sapiens; identical to SEQ ID NO: 11082
  chr17:29553451-29553702
  hyper

SEQ ID NO: 128375 - DNA, 75 bp, Homo sapiens; identical to SEQ ID NO: 11083
  chr17:29554234-29554309
  hyper

SEQ ID NO: 128376 - DNA, 85 bp, Homo sapiens; identical to SEQ ID NO: 11084
  chr17:29554539-29554624
  hyper

SEQ ID NO: 128377 - DNA, 442 bp, Homo sapiens; identical to SEQ ID NO: 11085
  chr17:29556041-29556483
  hyper

SEQ ID NO: 128378 - DNA, 141 bp, Homo sapiens; identical to SEQ ID NO: 11086
  chr17:29556851-29556992
  hyper

SEQ ID NO: 128379 - DNA, 124 bp, Homo sapiens; identical to SEQ ID NO: 11087
  chr17:29557276-29557400
  hyper

SEQ ID NO: 128380 - DNA, 85 bp, Homo sapiens; identical to SEQ ID NO: 11088
  chr17:29557858-29557943
  hyper

SEQ ID NO: 128381 - DNA, 118 bp, Homo sapiens; identical to SEQ ID NO: 11089
  chr17:29559089-29559207
  hyper

SEQ ID NO: 128382 - DNA, 515 bp, Homo sapiens; identical to SEQ ID NO: 11090
  chr17:29559716-29560231
  hyper

SEQ ID NO: 128383 - DNA, 412 bp, Homo sapiens; identical to SEQ ID NO: 11091
  chr17:29562627-29563039
  hyper

SEQ ID NO: 128384 - DNA, 137 bp, Homo sapiens; identical to SEQ ID NO: 11092
  chr17:29576000-29576137
  hyper

SEQ ID NO: 128385 - DNA, 64 bp, Homo sapiens; identical to SEQ ID NO: 11093
  chr17:29579954-29580018
  hyper

SEQ ID NO: 128386 - DNA, 160 bp, Homo sapiens; identical to SEQ ID NO: 11094
  chr17:29585360-29585520
  hyper

SEQ ID NO: 128387 - DNA, 99 bp, Homo sapiens; identical to SEQ ID NO: 11095
  chr17:29586048-29586147
  hyper

SEQ ID NO: 128388 - DNA, 148 bp, Homo sapiens; identical to SEQ ID NO: 11096
  chr17:29587385-29587533
  hyper

SEQ ID NO: 128389 - DNA, 148 bp, Homo sapiens; identical to SEQ ID NO: 11097
  chr17:29588727-29588875
  hyper

SEQ ID NO: 128390 - DNA, 112 bp, Homo sapiens; identical to SEQ ID NO: 11098
  chr17:29592245-29592357
  hyper

SEQ ID NO: 128391 - DNA, 434 bp, Homo sapiens; identical to SEQ ID NO: 11099
  chr17:29652836-29653270
  hyper

SEQ ID NO: 128392 - DNA, 342 bp, Homo sapiens; identical to SEQ ID NO: 11100
  chr17:29654515-29654857
  hyper

SEQ ID NO: 128393 - DNA, 204 bp, Homo sapiens; identical to SEQ ID NO: 11101
  chr17:29657312-29657516
  hyper

SEQ ID NO: 128394 - DNA, 195 bp, Homo sapiens; identical to SEQ ID NO: 11102
  chr17:29661854-29662049
  hyper

SEQ ID NO: 128395 - DNA, 583 bp, Homo sapiens; identical to SEQ ID NO: 11103
  chr17:29663349-29663932
  hyper

SEQ ID NO: 128396 - DNA, 216 bp, Homo sapiens; identical to SEQ ID NO: 11104
  chr17:29664384-29664600
  hyper

SEQ ID NO: 128397 - DNA, 322 bp, Homo sapiens; identical to SEQ ID NO: 11105
  chr17:29664835-29665157
  hyper

SEQ ID NO: 128398 - DNA, 103 bp, Homo sapiens; identical to SEQ ID NO: 11106
  chr17:29665720-29665823
  hyper

SEQ ID NO: 128399 - DNA, 142 bp, Homo sapiens; identical to SEQ ID NO: 11107
  chr17:29667521-29667663
  hyper

SEQ ID NO: 128400 - DNA, 128 bp, Homo sapiens; identical to SEQ ID NO: 11108
  chr17:29670025-29670153
  hyper

SEQ ID NO: 128401 - DNA, 142 bp, Homo sapiens; identical to SEQ ID NO: 11109
  chr17:29676129-29676271
  hyper

SEQ ID NO: 128402 - DNA, 143 bp, Homo sapiens; identical to SEQ ID NO: 11110
  chr17:29677199-29677342
  hyper

SEQ ID NO: 128403 - DNA, 159 bp, Homo sapiens; identical to SEQ ID NO: 11111
  chr17:29679273-29679432
  hyper

SEQ ID NO: 128404 - DNA, 124 bp, Homo sapiens; identical to SEQ ID NO: 11112
  chr17:29683476-29683600
  hyper

SEQ ID NO: 128405 - DNA, 411 bp, Homo sapiens; identical to SEQ ID NO: 11113
  chr17:29683976-29684387
  hyper

SEQ ID NO: 128406 - DNA, 144 bp, Homo sapiens; identical to SEQ ID NO: 11114
  chr17:29685496-29685640
  hyper

SEQ ID NO: 128407 - DNA, 48 bp, Homo sapiens; identical to SEQ ID NO: 11115
  chr17:29685985-29686033
  hyper

SEQ ID NO: 128408 - DNA, 218 bp, Homo sapiens; identical to SEQ ID NO: 11116
  chr17:29687503-29687721
  hyper

SEQ ID NO: 128409 - DNA, 3666 bp, Homo sapiens; identical to SEQ ID NO: 11117
  chr17:29701029-29704695
  hyper

SEQ ID NO: 128410 - DNA, 312 bp, Homo sapiens; identical to SEQ ID NO: 53914
  chr17:29718209-29718521
  hyper

SEQ ID NO: 128411 - DNA, 497 bp, Homo sapiens; identical to SEQ ID NO: 53915
  chr17:29718749-29719246
  hyper

SEQ ID NO: 128412 - DNA, 30 bp, Homo sapiens
  chr17:29721904-29721934
  hyper
gatgcattaaaaaatcggagtgttgttttc

SEQ ID NO: 128413 - DNA, 31 bp, Homo sapiens; identical to SEQ ID NO: 11118
  chr17:29815732-29815763
  hyper

SEQ ID NO: 128414 - DNA, 6 bp, Homo sapiens
  chr17:30186515-30186521
  hyper
cgtgtg

SEQ ID NO: 128415 - DNA, 30 bp, Homo sapiens
  chr17:30228946-30228976
  hyper
ttaagtgcgcgcgccgctagacttggacag

SEQ ID NO: 128416 - DNA, 30 bp, Homo sapiens
  chr17:30333949-30333979
  hyper
cctgtaccccaccccgactaattttcctcg

SEQ ID NO: 128417 - DNA, 144 bp, Homo sapiens
  chr17:30454643-30454787
  hyper
catgacgcccgtgccggagcccacgtgagcctttgccaaggagagattcagagatatgagcagaaaaactggaagatggacttcttcaataaggcagcgggacggtttggctgatggaagatgtttcccggaagcctgttcacg

SEQ ID NO: 128418 - DNA, 267 bp, Homo sapiens
  chr17:30469087-30469354
  hyper
ccagtcgccctactcgatcaagcattttctgacggccctatccaataacgtggggacgcagctgaaaaccatgcaagctgatcgctgccctcccggagtttatggtctggtgagaagatccctgctctgagtcactgccaagctctagctatgtgactttgaacagggaatttctgtccctatctataaaataaacggggttaaaccagggaatccgccattcaaattcctggcccaagtgtctccggggtcgcggtgcccaaagga

SEQ ID NO: 128419 - DNA, 30 bp, Homo sapiens
  chr17:30469733-30469763
  hyper
tgctggtgggagaacgtgagtccgcaccct

SEQ ID NO: 128420 - DNA, 1560 bp, Homo sapiens
  chr17:30592473-30594033
  hyper
ccgtccttacaacatcgcgcccccaattcactcctagttaaccctgacgtcgccaacatagtgtctccatcacatatctgccacctccaagtgatggttaagccgatggaagagccaagcccgggcccggagtgcaggccggtggtgaccgggccggggacggcgcagtccccatccccgccccgggcagcgccaccacttcctcgccagccccgccgcagccctcccgctcccgggccgcgccgctctgaccgactgggcccgggtggcggcgcccggggtggggtgcggggcgggggccggcgttccccgcgagcagccccgcccccgcccgcgcgccgcccccgaggactccgcggggaggaggagactcgggcgcagagcgggggccgcgagaagcgggaagggagcgcggggagcggcggggccggggccggcccaagggcgccctcgcctcggagccgggcgcgagggccggggcggaggcggaggccggcggggcagctagcgcagtgaagtttggcggcggaggggccgggcgtcccggggtcgcgaggaggcggcggcggcgcggggaccggggccatgggggcgggcgcgggctgcggagcgggcgcggaggcggcgcggcgcgcactgagcccctggagcggcgcggccgccgcggcgcaaagttagcccggcgccccgggacgagccccgcagccgccgccgcccccggaccccgtctcggccatgggcgagcaccccagcccgggccccgcggtggccgcctgcgccgaggcggagcgcatcgaggagctggaacccgaggccgaggagcggctgcccgcggcgccggaggacgtgagtgccccctccccgcccggcaaactttctagggggcgccggggggaaaagccgcccctgtctcgccccacgccgggcaacttggaggtttcagggtgacgcgggagcgccccggattggccgggtccccgcgggcaggagggggcggagggaccggtctccccgaaacgcgcgcgcaccgcttcccccgctctggttcccgcggcttccctgcgggacacagcaccgccactgcgccgcggacctgtcaccgccggagccccctccccgccgctggtgcagtgcccgggacacggcgttttcccgcagaggcggccgcgtcacggcggtgactccccctcccctcacgcccgcgacctgcgagctcccggagctggggaaggagcggacgccgcagagtccccgtccctggccatgcaagccggcctggcgaccccttcctccgctcccggattagctcccgcccggcacctgccttgccgcgacactgattgaaattcaagccggcccccgcctctgaccccggccggagcagggaggcaaagagtgctgggagcggctttgctcctagaaggaggcccgggagtccaagaccgtggcggtgccaggggacggtcccctgggcgaggagagggaggggctgccccgagggcttccccgccgtctgctgctcgggtctccatccctccggtcctgcgggccggccctgcg

SEQ ID NO: 128421 - DNA, 30 bp, Homo sapiens
  chr17:30668995-30669025
  hyper
caggccgagctgggcgccagcacctgcttc

SEQ ID NO: 128422 - DNA, 14 bp, Homo sapiens
  chr17:30669047-30669061
  hyper
gtggctgctggacg

SEQ ID NO: 128423 - DNA, 30 bp, Homo sapiens; identical to SEQ ID NO: 53920
  chr17:30677123-30677153
  hyper

SEQ ID NO: 128424 - DNA, 30 bp, Homo sapiens
  chr17:30771445-30771475
  hyper
acgggagctacaggcggagggacccgaggg

SEQ ID NO: 128425 - DNA, 90 bp, Homo sapiens; identical to SEQ ID NO: 53921
  chr17:30813421-30813511
  hyper

SEQ ID NO: 128426 - DNA, 30 bp, Homo sapiens; identical to SEQ ID NO: 11122
  chr17:30814499-30814529
  hyper

SEQ ID NO: 128427 - DNA, 298 bp, Homo sapiens; identical to SEQ ID NO: 11123
  chr17:30846451-30846749
  hyper

SEQ ID NO: 128428 - DNA, 109 bp, Homo sapiens; identical to SEQ ID NO: 53924
  chr17:31203739-31203848
  hyper

SEQ ID NO: 128429 - DNA, 30 bp, Homo sapiens
  chr17:31204409-31204439
  hyper
ggatggccgcctgccgcccacacttggtag

SEQ ID NO: 128430 - DNA, 58 bp, Homo sapiens; identical to SEQ ID NO: 11125
  chr17:31254913-31254971
  hyper

SEQ ID NO: 128431 - DNA, 378 bp, Homo sapiens; identical to SEQ ID NO: 53926
  chr17:31255334-31255712
  hyper

SEQ ID NO: 128432 - DNA, 191 bp, Homo sapiens
  chr17:31264130-31264321
  hyper
tggctggtatgccgacgtgcctgagcagagggtcggggccaggatgttttccacgtcagccacctggcccctccgcccacccgggagggcacctctgtatgcctgctgaaacaatggcactgctgtgagttccaggggcccacacgttccttgttgccatggccccaggtaaatcacgaggaaccagccct

SEQ ID NO: 128433 - DNA, 2022 bp, Homo sapiens
  chr17:31618425-31620447
  hyper
ggaggagaagttgtgcggcccgcagagctcgccgcggtacttgcaggagagcagcatgtcctccagctggtggcccaggcggtccatgaaggcggcgctgattccctcgaagtggcgcggaggcaggaagaggcggaagtccgccagcttgcggaaccactggcggcgcggctcgtcgccccgcagcagctcgctgacaagcgggcgcgcggtgcggttgggcagcagcagcccgagccagtggccggcatagtagaggtcccccttggagaggcgcgggaagcgcagcgggttgttgttgcacacagtgacggcggggaagggtaactggcggctccactcgcggtgcacccgcgtgtgtgacgggaagctgagccagtagagcaagcggttcgaggaccaggacagcagcaagccgaaggatgtacagaaggccagcacccacagcgcccgccgctggaaggagcccccagccgccgtgcgcccggcacacatgtgccgcagcccgtgcagtttagcgcggctcagcgatggccgccccctgcgggcgacccctggcccctgcagcgcccgctcgccgcctctgccgcccccgggctgcccggcagccgccaacgccgcgggcgccggctcctcgcgggccatgcggaagcgtcccgggccggtgagcgcggctgcgggcagcccggctccgccaatccggctcattcattcagcccgcggctggcggcagcggcggcggccccggccgggcggagccgccatgggagtccgcagcagcagtggaagcagcagcagcggcagccgcgcgcagcccgcgccagggaagcgtgcgcccgaaaggagctccggtggcgcggcatgcccgcccggcgccgccgctgccgcctccgcgggcgcccgcccggggctgagcgccgcctcagcccgcagcccctggcagtggcctctcccgagcgcctcccaggctttcccggcccctggtcttcctggaggatgcccggcgcccggcactacttctggaggggtcccactgggagccgcctctccagtccctgggtgctgcgcccgccttccctcgtcctggacctcgggggaccctgagccgagtcccccctgccccgcctaaccccagcttttacgctggtcctgggagaagggccactcggccaccatgcctgatctggacatccccagggaccccaccagcccggcccgtagcccagcggtgctgggacacgggagagaaggcgccaaggaacgagcgcccccagaggcgcaccgcggctcctggctgggcgggcggggtgggtgtgtacgggggtgagtggtcgccttgccggctgccgccttctttcccttcccctccaggacccttccttgttactgctccctgggctgcgctcggcagagacctgcttaggcttccccaagtcctgcgcctaagtcctgccaggcgcccgctctcgcctggggctgagagcttctcagggcgtcctgcgggaggctgttcgccgccggggtccttcaaggatgctagccgcagggaagtgtcgcttctcgcctcggctctcccaggtgcctcgcgtctccagaaaagcccagccttgctgtctctcgcgtcttctctctgcccccgcggcgacaagagctggggactgcggggacccgccaacacctcccgggggtgacccggactcgctgctccgcgcgcccttctcctctcgagactccgagctcgcggtggccgtgacgccggctaagctccttccccggttgcccgggagaaccctctttgggccccaggcgaacttgggcagcggccgcgcgacgctggcgcggctgggctccgagcacctgctcctcagctcgctggccccgcggctccgggcgggcggggcggcggcggccgtgagcgccgtgcgctcctggagacgcggtgctgacgcgcccggctcctcctcgctgcattttaattcctggccactgtggccgctgcacaccgagcgggaagcctcttgc

SEQ ID NO: 128434 - DNA, 346 bp, Homo sapiens
  chr17:32483867-32484213
  hyper
ctcccccctacacacgccactagagacaagattaaaagcgagagcgagagagaaaatgcttaaaacaagtcgctgagcagctcggagcctgttaaccagcgcataatgccccatgttaaccatcctgggggatgtcagggcggccacgctgatgcactgcggtcgggcgcagcggcacagccttcagagccgccgccgctcggttccttttcccatgatgttttggactccgaatgccgtttctcgccgccggcctccgtccctcctctcctcctcctccaggcccccttttgtgggcagaattccaaatgccagcggccgctgctagcaccggggagaggaggca

SEQ ID NO: 128435 - DNA, 30 bp, Homo sapiens
  chr17:32582113-32582143
  hyper
tggaaaaagtgtctcgtcctgaccccctgc

SEQ ID NO: 128436 - DNA, 611 bp, Homo sapiens; identical to SEQ ID NO: 11131
  chr17:32905944-32906555
  hyper

SEQ ID NO: 128437 - DNA, 1206 bp, Homo sapiens; identical to SEQ ID NO: 53930
  chr17:32906598-32907804
  hyper

SEQ ID NO: 128438 - DNA, 273 bp, Homo sapiens; identical to SEQ ID NO: 11134
  chr17:32907873-32908146
  hyper

SEQ ID NO: 128439 - DNA, 1137 bp, Homo sapiens; identical to SEQ ID NO: 53932
  chr17:32908170-32909307
  hyper

SEQ ID NO: 128440 - DNA, 520 bp, Homo sapiens
  chr17:32965108-32965628
  hyper
atgactcggtgcccgcgggcgaagaggacgaggaggaggaagaggacctgggttggggctgcccggatgtggcgggccccacgcggcccactgcacccccggacctgcacaattacatgcgcagaatcaaagagattgcatagaggcgccagccggagtagcagggacccccccccccaacggggtcagctcggggtaggacacagccgggaccccggttcacactgactctgggcggctgaattgattttgtactccctgcccctgcagcttggctccgtgcggagcgggccgcctcagtgtctgggccttccctcgcctcacgccattaccctcttctgccccctgcaggtggagggctcttcctccagtggctcgtaaggaggaaagcaaccccagcctctgttctgccctttccaaacctcctcccatcttaagcaaccccctgccccaagagtgaggcaaggaggtccagcttggggtcaggtgggcccacgctgtgtcccgggcccgcctcccg

SEQ ID NO: 128441 - DNA, 31 bp, Homo sapiens; identical to SEQ ID NO: 11136
  chr17:33125098-33125129
  hyper

SEQ ID NO: 128442 - DNA, 178 bp, Homo sapiens
  chr17:33213945-33214123
  hyper
cttcctgtcggggcccgtgcaccccgggtagcaagagccacgtgaacacatttgggttagtgtgtcaataagattagcaggaaagaaaaaggagaagttgtcagcatgtgagacataaaggtgtaaagcttttatcagtattgccaaatggcttcagtctccccgacctagatcccat

SEQ ID NO: 128443 - DNA, 923 bp, Homo sapiens
  chr17:33288231-33289154
  hyper
acgggcccctagccgcgtaatggccgctccaaccgctgtctcacattttcatggtgcctttaggacccaagttggtccgcagcacatcctgcagccctcgggcggcgcatatattgacagccaaagctgcccgggcccgcgccacctcagccttggagttgacggcctttatcgcagccatagcctaaccgttcagagggagaaaaaaaaaaagccttagtcgcgattctgagcaaaaacggcaatgcgacgccacgctctcttgagcctcggccaatcatcgcccttacaggaagtgacgttatcatgcctcgcccgacggaaaccagaatcgttttgggtctggtcgccaagatggcgtcctccgcctccgcccggactccggcagggaagcgagtgataaatcaggaagaattgcggcggttaatgaaggagaagcagcgtctgagcaccagtcggaaacggatagaatctccattcgcgaagtacaaccgtttggggcagctgagttgtgccctgtgtaacactccggttaagagcgagctcctgtggcagactcacgtcctgggaaagcagcaccgagagaaagtggccgagctgaaaggcgcgaaggaagccagccagggttcgtccgccagttcagcgcctcattccgtcaagaggaaagcgccggacgcagacgaccaagatgtcaagagagcgaaggccaccttggtgcctcaggtacagccctccacatctgcgtggaccaccaactttgacaaaataggaaaggagttcattagagcgactcccagtaagccttcaggactcagtttactccccgattatgaagatgaggaggaggaggaagaggaggaggaaggagatggagaaagaaaaaggggggacgccagcaagccgctctccgacgcacagggcaa

SEQ ID NO: 128444 - DNA, 30 bp, Homo sapiens
  chr17:33307384-33307414
  hyper
cgcttcccgggccgcgattgcaggttgaaa

SEQ ID NO: 128445 - DNA, 30 bp, Homo sapiens; identical to SEQ ID NO: 53934
  chr17:33308347-33308377
  hyper

SEQ ID NO: 128446 - DNA, 30 bp, Homo sapiens
  chr17:33415988-33416018
  hyper
agagtcccaggccgcgccccacacagagga

SEQ ID NO: 128447 - DNA, 112 bp, Homo sapiens
  chr17:33446951-33447063
  hyper
gcgcccctctccaccgcctgcacaggttcccgagtcccacgaccccctccgcgctcaacacgccacccgcggccacattcggcctctaccttctgccgcaacacacacaccg

SEQ ID NO: 128448 - DNA, 30 bp, Homo sapiens
  chr17:33468860-33468890
  hyper
taggtgggagctcacgccaggtgggtcacc

SEQ ID NO: 128449 - DNA, 189 bp, Homo sapiens
  chr17:33469239-33469428
  hyper
gcggcgacgccccccgcccccatccacgcacacccaccggcactgctgccgccatcctgcgtccccacgtggaggagaaagagcccggcagacagagcgccgtctccgtggtcgggcggggtcgccgccggccacatcgccctctgctgttggggaggagaagcgtcccgctgcgcacggcctcaggga

SEQ ID NO: 128450 - DNA, 30 bp, Homo sapiens; identical to SEQ ID NO: 53937
  chr17:33569313-33569343
  hyper

SEQ ID NO: 128451 - DNA, 60 bp, Homo sapiens
  chr17:33673437-33673497
  hyper
gaagccccactacaatggaagcgtcgggcgtatcctcccgggcctctttccctccctccc

SEQ ID NO: 128452 - DNA, 1627 bp, Homo sapiens; identical to SEQ ID NO: 53938
  chr17:33700164-33701791
  hyper

SEQ ID NO: 128453 - DNA, 457 bp, Homo sapiens
  chr17:33775273-33775730
  hyper
tgaaacaagagtcccaaccttcgcaacgggggaagcctccaggacgcacttggctctgcctgtttgttccgcccccgcggaaaccgctgctcgctgggcaggggctttctgttttgcagccggaacaggaacacagatagcccgccaagccgccggcgacaccttccaacccctttagctctccgcaccgtccctccccaccgccccgcctccacccgcgccgcgatcaagtcctcatagccttttagggaatttgctcagcaaactagccgaaccccaaaggcaggggagaagcacgcaaataccccgactccaccggctggccggagctggggggcgggggttgctctcctagcttgctccccatccgagtcaacgccagtccagggtcgtgccggactagaccctagggcgtgggtacaaacgggagctccgcagtccccgtaggagcagggac

SEQ ID NO: 128454 - DNA, 388 bp, Homo sapiens
  chr17:33787453-33787841
  hyper
cgccccactgcacaccgagcaccaccgtcacccagtttcctctgggccgcgccctggggcggccgcaatcgccgctgggcagggaggatgcctccaggtagttcttggcgaacgccgcagctccggtgacgcgaggagagccggaaggagacgcggccggcgagaggtgagcgaactgtattgctctgcggcctccagccacctgcggaggaagagggagccagaggccggccccgcccccgcccccgccccgctgggctgccacactccagccaatccctgccccgctctccgccacaacccgctcaagtagggggactctgactgccccgcgcaggtggcctgccttggcagcaccgcccgcgggaagtggcggcctggcgcgcta

SEQ ID NO: 128455 - DNA, 744 bp, Homo sapiens
  chr17:33814243-33814987
  hyper
gccaccgcgcccggccgccctgcggctttttaaggcgctccccagcccacgcacgggcggaagttttgtcatctacagctttcaagtcctccattgctaagtctacaacagcctgcggttttgacagacattgctacagagacaggagccaactttcccagaagggagagaaagcagcctcgggtctccccgagatcggtggggttgctctggcagcgccccacctcgtcccggagcccacggaccaccccccccggacccccggaataagaaacggaggctggaaggtttggcagtggagcgggacgaatttatctgccagcaattccctggaaacaggattccttgcaggcgctgtgccagcgcgggcccttaagcaactgaaagttaaacgcccacgtgaatagctctgagggatcacggagaagttctcgtttcgtctgtacctatttgtattttctaaggcgaaaaaaaagttatttaaagaaaaagagaacgaacctggcgaggtccatgtctgcgcactcttcaccaagtagggggacctgagttcttttccactttcctgctctccgcgtccgtgtgcggctagcccctcgctcagctgcatttctatcgggcactcgactccccggaagtggtggcaccgcacgcgctgttatcgactctgcgcctttggaaacggtgtgtctgcgaatccaacgacgggcgcggtgactcacgcctgtaatcccagcactttgg

SEQ ID NO: 128456 - DNA, 30 bp, Homo sapiens
  chr17:33895342-33895372
  hyper
tcttcccgggagttcgtgggatttggacct

SEQ ID NO: 128457 - DNA, 253 bp, Homo sapiens
  chr17:33905429-33905682
  hyper
tctgaggattcagtcgtgccactgtgagcccgggacacaagggctgactccagctgttggctttgagtatccccgcccgcgcccgtccttgctcgctgaccccaggcgaggcgcaaacaacccacgacgccacgtttgaagggaggtctccgctttatgacagaagccgcacccggaaatgaaaccaccaggacctctgggatgcctggcggaagagaggcgctctagttccgaatgcggtccggaaaccaga

SEQ ID NO: 128458 - DNA, 190 bp, Homo sapiens; identical to SEQ ID NO: 53941
  chr17:33914228-33914418
  hyper

SEQ ID NO: 128459 - DNA, 92 bp, Homo sapiens
  chr17:34400013-34400105
  hyper
tgtggtcatcccttccgccgcccaccggctcccccattgtattgactccacattgccccctgctggtgaaacaagtgcgaaggtcagcgtct

SEQ ID NO: 128460 - DNA, 460 bp, Homo sapiens; identical to SEQ ID NO: 53942
  chr17:35014237-35014697
  hyper

SEQ ID NO: 128461 - DNA, 30 bp, Homo sapiens; identical to SEQ ID NO: 11142
  chr17:35054543-35054573
  hyper

SEQ ID NO: 128462 - DNA, 174 bp, Homo sapiens; identical to SEQ ID NO: 53944
  chr17:35060308-35060482
  hyper

SEQ ID NO: 128463 - DNA, 487 bp, Homo sapiens; identical to SEQ ID NO: 53945
  chr17:35078588-35079075
  hyper

SEQ ID NO: 128464 - DNA, 30 bp, Homo sapiens; identical to SEQ ID NO: 11144
  chr17:35082280-35082310
  hyper

SEQ ID NO: 128465 - DNA, 644 bp, Homo sapiens
  chr17:35165346-35165990
  hyper
cccgcatttccaccccgctcccactgctgggtaaatgttcatctggacggggacaggatcgggaaccgccgggcagggggtctgcgcggcggcgtcctcccctccccgcccggctctcccgctccatccccgcggcctggccaagggcagcgccaagggcgcccgcggagggcgcagctgccccggacggagcccccgccacccccacagccgcgcgggtgctccagagcatccaacttcatttccacttcaattttatcagcggccggggagccgggcgggagataggaggccggccctgacacgaattagcccggagattgtccgatacgccttggccagggcgccggcgccgcgcgctcgcctccctcgcctctcctttgtgtccgcctcgcctcgcctctcggcctcgccgcgctccattcccgcggcgctggcccgggccgagcgaactgctttgcctttggccacgttgagcgcgccgaggcagccgggggcgcggggctccaggacccgtctgctcctggtgcccccagctcctcagggtccggccgggtcacctgggccgatccaggcgggcaggggcctcgctgctcctcccccgcagcccctctcgccctcccggggaccgtgtgcggggagca

SEQ ID NO: 128466 - DNA, 259 bp, Homo sapiens
  chr17:35241873-35242132
  hyper
gctgccaccagggcccgctccccctccagtatgatgggtgaggggttgtcagacggaggagcagtgggggctgcaggagagacgtccgagatgggacgggacatttgggcagttggggccgatttgtcgccattttcacgggcagacttgtgaattaagtggcatgaaattgagcacagaccaggctcccccccagagacggggcagcccccgcccaggaggggagaaggcaagggggcgggagcgggaggggtggccc

SEQ ID NO: 128467 - DNA, 191 bp, Homo sapiens
  chr17:35285488-35285679
  hyper
cccgagagcagagagcggcagaagctgttaattcttgaggctaatgttcacatctccaacttatctctccgaggggaagtgtccatttgaccacatgatcctccctcccctaccctcccccaaggggaaatcaaatcttgaagtgagaccggaagagctgctgcggaacgtgagcacgggagagctggtgg

SEQ ID NO: 128468 - DNA, 321 bp, Homo sapiens; identical to SEQ ID NO: 53950
  chr17:35289322-35289643
  hyper

SEQ ID NO: 128469 - DNA, 30 bp, Homo sapiens
  chr17:35289854-35289884
  hyper
cctgtctttgctccgcggtgcggagctgac

SEQ ID NO: 128470 - DNA, 1699 bp, Homo sapiens; identical to SEQ ID NO: 53951
  chr17:35290199-35291898
  hyper

SEQ ID NO: 128471 - DNA, 799 bp, Homo sapiens; identical to SEQ ID NO: 11147
  chr17:35291920-35292719
  hyper

SEQ ID NO: 128472 - DNA, 3361 bp, Homo sapiens
  chr17:35293022-35296383
  hyper
tgggggcggcggtcccgagttcctagccagagcgggattagggagttacgggttccctgaggagtgaactatggagggtgtggtttgctgttgtctggggaagccggtgccaacccgaagcctggacaggggaggactggaatcccggcacacgctgcccatgcactgcacgcccatctactgcagcctcttcgtggcgtcccggcaccccccctcctccttccctcttcccaacgccacgaccaccacccccagccgccgctggagcccccggtttcccgcctagtcgtttgtttttgtacgtaaaaggtgtctccggatcacagttttctcacaactttctcgccagggttgcaactcctcacccgaggcgcttcccggtccactccttcccccgcgccggcgccgcgcctccggtctccccgcccccatcaggaaaccgcccgaatcaactttgcaagagtgctctgcgggagacagacactcagctcgcccaggacccggaccctgtggactttggatggattgggggagggggcacagaaagagggacgggaggagggagattctgctgctaagagcctcctccccctccaaagatgtgcgctgcgcttgggacaaacttccaggtcaagaaagtacggggggacaatggcaacagccgctgaattgcaaagcccagcagtgcaggggagccgcctgggattccggacccggctgcaccccaaccttccacaaggctcggtcttggactacccccactctacagcagaactctggcctccgcctgcgcctattcccgctctctctctgtccctcccatcgaaacccacgccttaccggagcaggagggggcccaggcacggtgctgcccgccgtccgcgccgcgcggggccgcgggtgccgccgccactgatcctctaaacgcggtctccccgcactctcccgggccgggggatgcagaatggtttacagagggaccgcgaggcgctgattggtcgcaggccgcagtgacgtcggcgggcgctgcattaaggcgagggggcttccagagctcagccaacagccaggagcagtgaccaagccgccggagctggggagagacgcaccggggcggcgactgggccaggagaccagggactgagggacgcgcccggggagggccagcaacaagccgcggcccgggcgcgacagcggcggtccgcgccgagccgttccagccgccggcctactgtagccgctgcgccaggacatttttttttaaagctctccaagctgcccccctcctccccgactcctcccgctgcaaaagaaaaacaaaaaaaaaaaaggaaggaggctagaaaggaaacccagatttgccaccacaacgaaaaaaagaaggggaaaaggaaaaggagagaaagtcgagcgactgtggggttagacggaggcagacagagcgtgggccgagcgatgcggggctgtgcgcccaggcggccgcgagttgtgactggagccacgatgcacggccaggcgcggtgagaagccagcccgtagtgcctcccgaaggagcccgggcgcagggagggtcgccctgaggacacggaggccgccaggcaggccaagggccgaggtgactgggctggggcggtagggaaggagcgagtgcgcctggctgcctccgcacggagttgtccctctctgttttcgattgacacaaacacttctccaaaagcggggaaacctaagcaacaacagcaatcaacaccaagatcttcctcctaccctcccctctttcccttctcccgcggtcggccctcgccccctcccccaggcccagcgcgggcgctcggcgcgtccagacccgcggcgcgatgccggcagtttaggatccaaagcttctctgctccttttgttctttccttcccttttttaaaaaaagaggggggaaatcccagtggtgggcagcctggcacgcacacagtcgccctcataccccgacaaaagcagatgcactttgacttctgacagctctacctcaagccccggagaactcagcggcgctttcctcgcaacccgagctcggcgagtcgtcgtcttcttcttctccgtttttatttatttatttccgttcccgccgccgttctcgctgaccttcactcctccgcgggctctgagcagaagggtcgcattctctcccgcctgagacttcttttcctcgccccgggagctcaggcggcgccgctccagcccggggccccgggactccccggctgcacacttcactgagacgcccccccaggccccgatcagcctcgtttcctccaccctactttgatttcctggtgcgagttttggcttgcacggccgagtgtgtgtcctctttttggagagactggggagctcgtgccgattgtcttcaggagtcatcccctgggctctactttgcccctctctctctctgggcctcatcagaccaaaccaaagaccatggttcactgtgccggctgcaaaaggcccatcctggaccgctttctcttgaacgtgctggacagggcctggcacgtcaagtgcgtccagtgctgtgaatgtaaatgcaacctgaccgagaagtgcttctccagggaaggcaaactctactgcaagaacgacttcttccggtgagtactttcctcccacgcctctgctgctacctccccgcgggcccttcccggccagcttcggatcagaggttagcgtggcctcgctgcccagttaggaactgcttctagagagggcagccaagtcccgcgggcgcccgcctctccgccagctggcgcgctgggagcccgggacgcggccctgcttgcatcctggaaactatgggtctgggtttggctgcatgtgcctgggaagaaagggtctgagcctgactcggcccagaagccccttcaagcttggaagagacagggcagcctcgggcgttgtagcccggactgctgtctttcccggagccaagctctgcagcaactgcattctccaggccttcggggttgtttgccctccaggcagagcccaggctccctcccggccactaccttttccgaccccgagcggtcttggcggtaagctccgagccttttgcgtagagtgtctgggccaactgccctgtcagcggcaggaaagaactcggccttaaagccgatcctgcacgcccgggggtcttccccaaacccggacatgcctccgagtgcagacctggacaaactgctgcactgtagcctgcgaagtgcccggagctttttcctgcttccctggctgccgaagttgtctggtggttcggcttcagccccaggtgactccgactcccacgggctccgctcagtagtcctcctaggaa

SEQ ID NO: 128473 - DNA, 537 bp, Homo sapiens
  chr17:35296787-35297324
  hyper
tgctcgctggtatttcgggagaacgcgcaggctgagcctctgagcctccgcgggctgcccggttttcctcaaggactggatcatagcgggagggtggcaaaccgtactcgtacccgctgccagtgggtccctgagcctggcttccacaacccgcggcagagcgcccagagccagctcccgcagctcccgcttttgccaacctgtcccgctttaggcaagagcgtggcggcggccccgctaaggctacggaggggggctctccgcggctatgtttgtttaccaacagcggggctagacatcgccaaccccatgcctatgtgcgggtccttttgcgatgaaggagagaaaagcggcgctccgcgcacgtttatatagagttctaattgtaattcgacttttctgaatctaatcggaaaataagtgccccgttccccccgcccacacaggtcactgccttgccaccttctttagacgatgcatctttcctctgggataacgctgggagtgaggctggggcttggcgggtagcttgggccc

SEQ ID NO: 128474 - DNA, 591 bp, Homo sapiens
  chr17:35297629-35298220
  hyper
cctagcgacctggtgcggagagcgcggagcaaagtgtttcacctgaactgcttcacctgcatgatgtgtaacaagcagctctccactggcgaggaactctacatcatcgacgagaataagttcgtctgcaaagaggattacctaagtaacagcagtgttgccaaagagaacagccttcactcgggtgaggccccaattcctggctggctaggtgcaagcgggtcctgggggaggaaggctcgccaaggccccggctcatctgtcctttccctcttagccaccacgggcagtgaccccagtttgtctccggattcccaagacccgtcgcaggacgacgccaaggactcggagagcgccaacgtgtcggacaaggaagcgggtagcaacgagaatgacgaccagaacctgggcgccaagcggcggggaccgcgcaccaccatcaaagccaagcagctggagacgctgaaggccgccttcgctgctacacccaagcccacccgccacatccgcgagcagctggcgcaggagaccggcctcaacatgcgcgtcattcaggtcaggccccggcgcgcctctccatcccacagaggc

SEQ ID NO: 128475 - DNA, 192 bp, Homo sapiens
  chr17:35299251-35299443
  hyper
ctccccctccagacacggcggcctgtccaggtcctcctgtgggattcctgctcaccattggctcagggtccgccctgagtggtcctagtcagagatcgcaccgtcaccactaccctacacacacacacaagcgcgcgcgcgcggtgtcggctagccaggcggtgaaggggtgctggctaggcccggagcacc

SEQ ID NO: 128476 - DNA, 365 bp, Homo sapiens; identical to SEQ ID NO: 11152
  chr17:35299600-35299965
  hyper

SEQ ID NO: 128477 - DNA, 452 bp, Homo sapiens; identical to SEQ ID NO: 11153
  chr17:35300260-35300712
  hyper

SEQ ID NO: 128478 - DNA, 190 bp, Homo sapiens; identical to SEQ ID NO: 53960
  chr17:35300812-35301002
  hyper

SEQ ID NO: 128479 - DNA, 342 bp, Homo sapiens; identical to SEQ ID NO: 53961
  chr17:35303269-35303611
  hyper

SEQ ID NO: 128480 - DNA, 30 bp, Homo sapiens
  chr17:35305619-35305649
  hyper
aagataatcaataccgaggggtatgcagtg

SEQ ID NO: 128481 - DNA, 30 bp, Homo sapiens
  chr17:35306330-35306360
  hyper
aaggcgagaggatccggcagggaaggagct

SEQ ID NO: 128482 - DNA, 30 bp, Homo sapiens; identical to SEQ ID NO: 53962
  chr17:35306848-35306878
  hyper

SEQ ID NO: 128483 - DNA, 30 bp, Homo sapiens
  chr17:35715671-35715701
  hyper
agccctgaactgtacgcctcccagttccgg

SEQ ID NO: 128484 - DNA, 30 bp, Homo sapiens; identical to SEQ ID NO: 11156
  chr17:35716123-35716153
  hyper

SEQ ID NO: 128485 - DNA, 457 bp, Homo sapiens
  chr17:35716403-35716860
  hyper
tggcccggccttcgcggccccttctgccacagccgggtacggggccaacccctcggctcctcctcctggcggagaggggagtgggggaagcggtcccgcatgcgcctcgcatcagggacagaggcgtcccaagtgaggggccaggactagccggcctgtagaggcggggaaagggaacccagaattaaggcgggctagaatggggcaggcggtgtgcgggcccgtttgtctgtttaatcctaacacattaacaaggggtgggcaatcgcgtccactacctgtcctcatcacgctggctggtttccaagtctgggcgagctaagtaaccccatgctggaactccataaccagccccccgtttcgctcctcagccccgagacagcccactccaaaggtgttatacatgctggatcctggcgtgttgaggagaagcctcagtaaacgaagctcagtaaga

SEQ ID NO: 128486 - DNA, 31 bp, Homo sapiens; identical to SEQ ID NO: 53965
  chr17:35816364-35816395
  hyper

SEQ ID NO: 128487 - DNA, 65 bp, Homo sapiens
  chr17:35849756-35849821
  hyper
cctgcacggaggagcgctctaggggaggctgctgcctcgggagctagggcgcgcccggaccacac

SEQ ID NO: 128488 - DNA, 425 bp, Homo sapiens
  chr17:35969346-35969771
  hyper
cgcgccagctcccgcggccccgccgccaccagaaccagctcctggccgcagcgccatcttgctcccgacctgccgctgccttcgccgccgccaccttatcagcagctgtcagctgaacacagccacttccgggtcaaacaccaggccccacctcgccgcggaccgggcgatggggcggggcctcgcgcccacgtgactcccccggccctcggggaggcgtggcgcgcccacggcacgtgacccggcgccgcaggggtcccccagattcaattctagctctcgggctggtggggcggtcgcgggcgcctctccaagggagctgattcattgtctggtaggccctctgcagggcccagctggcggcccagtggcaaagcgccgttggtcctccgtttgaaaaccatgatcgcggttagtggaaagag

SEQ ID NO: 128489 - DNA, 388 bp, Homo sapiens
  chr17:36003201-36003589
  hyper
ccgtgcaggcaagccgaacacaaaaggaagcaaaataccccaagggtggcgagagccaggccacgggtgtccatgtgcgccggcctcccccagcagcgggttcattcccgggctcctgctccttctcagttactcggccctcggtcccttgggcacaatacctggaatcgagctgcgtctgccgagaagcgtctcgtgtcgaatttggcccccgcgccgagccggcgaaagagatcgtggacgtccatctttacccagaaagcgccacagttctacggcgcctgcgcagactacttcccaggccccgggcagcgtcggaagagggcgtgagcataattggctcctgtaggcggagcctggctgggtgagaaacgaggctattttatta

SEQ ID NO: 128490 - DNA, 30 bp, Homo sapiens
  chr17:36036412-36036442
  hyper
acatctcctatctatcgctgcctggctctg

SEQ ID NO: 128491 - DNA, 30 bp, Homo sapiens; identical to SEQ ID NO: 53968
  chr17:36093006-36093036
  hyper

SEQ ID NO: 128492 - DNA, 30 bp, Homo sapiens; identical to SEQ ID NO: 53969
  chr17:36096499-36096529
  hyper

SEQ ID NO: 128493 - DNA, 30 bp, Homo sapiens; identical to SEQ ID NO: 53970
  chr17:36098024-36098054
  hyper

SEQ ID NO: 128494 - DNA, 30 bp, Homo sapiens; identical to SEQ ID NO: 53971
  chr17:36099824-36099854
  hyper

SEQ ID NO: 128495 - DNA, 2092 bp, Homo sapiens
  chr17:36101942-36104034
  hyper
ttcacgtgtgttcaccgggaagagccgggagagctggttatttttgtttgtttgtttgaaaacacagctcaggttcagaggttccctaacacggagaaaggcaccggtcccgaagagggcctgcggccattgtgtcccaagcgcaggtgtcaaacgccggccgcggcgcccgcagggtccgtcccgcacgctccttctcaaacaatgactttgctgcccacgagcagagaagcctggactccagcgcagtccgcagcgcgttcgttaaggagcccaacttcggcttcttagaatgcagcccactttctagacgcccccggcgcacctgcctcgaggccgcgagaaaggccagctccggccgggagccggggaccgggaagcgcgcagtcccgaccttcctcccctgcctttctcttccaggaggtttactagaactccaggaactccaaaacgcgacttttctttctctttgcttttcgtcttaagggaacacggtgggcaaaagaagggagtgcgtgtgcccgaggcttgggagccccctgtgcagtgacctaggaaccgctagcgatttcttgaaaaattactttaatcaagtccggcgctcccgggagcgggggaggaaaggcagcacccgctcgggacgggagaaaaaagcctccaggtctgtcccgcgtctccaactcggcgagggtctccggctccccagtccctctccctgccctgctggggcctggggctttggggagggaagagcggggctggggtctaaggaccctgggccgggcctggctctccgccggccgggcctgcgggtgtcggcgacccgggggctccgcgggcggctcgggcgctcacagagcccgcgtcccgcgccagagcggtgaggccgcggggccgcacggggcgcctggctgggtgcgcgctgggagcggcgagcagccccgcgcccgcgttttgatctccttcccccctctaagccgcgtttacaacttcaccaatgaataacccgcctctcttttcaacctaatcacggctctttgtgtatctttctgttgatgatttatagaaataaattaataacaccccaactccacgtgctgcagtttatgttacgtctcagctgcggccagcccggcgcggggctgggtgcggaggggcgccccaggtccttccagcgccgcgctagaaagcgggcgcctgcggccgggtgggagggcctaggccctgtggcccccggtggccggcggtgggagcctggttcatccgccaggtcctgagcgacctccccggcagccctggcgccccagccgctcctaggggccactctctcgacccctcttagcctccgcgactcacaccttccgcctcgcggaactctcttgcaggagttctctcccggtaggggagaaatcacctccgggcgggagagcgacgagggaagaacctcaaacctatgaattataccaaagtgtgtttggggaaaaaaaatctacaagttcccctgattgttttggctagagggcaaaccgccaggccctcggagcacaaattcaaatgcaaggtcatatcccaccccaaaccgccgctgcggacgtgcggccaaggctcagccccgaaatcgcggcgcttcagtgtccgaagccacgcgatgggctctgtcctaaagcggagtggcccgggagcgacgtgctgtctcagggaaccgctcggctccttagataattagtaaccagctgtcaaagtctagggcggtcggggaggacccacaaacgatcccggccctggggatacactgccagccggcctgaactcccggggagaggccgggggtgggcagcgaggtctggaaacgccctcctttctcagactgagaccagatcctctgcgaactgaggtctgagacgcgttcgcccccacaccaccgcgcttcgtttctttggccccgcgcgtgtccacccggaccctgcatggaacatgccctttgcaaatctaaacccgcgttggggatcccggataattccgggccttgcatgggcgcggctaacaagagtgcccaccagggaactcgcctcccagatcccggctccggatg

SEQ ID NO: 128496 - DNA, 333 bp, Homo sapiens; identical to SEQ ID NO: 11159
  chr17:36104217-36104550
  hyper

SEQ ID NO: 128497 - DNA, 706 bp, Homo sapiens; identical to SEQ ID NO: 11160
  chr17:36104643-36105349
  hyper

SEQ ID NO: 128498 - DNA, 194 bp, Homo sapiens; identical to SEQ ID NO: 53975
  chr17:36105458-36105652
  hyper

SEQ ID NO: 128499 - DNA, 30 bp, Homo sapiens
  chr17:36204131-36204161
  hyper
ccagcccagaggcagcgtaggcgctctggc

SEQ ID NO: 128500 - DNA, 262 bp, Homo sapiens
  chr17:36204360-36204622
  hyper
aagtcatgccaaagtcgggtgtcagtaaccaggggggccgcctgaggcgtcgcatccaacccccgcccaggtttccgccccgggccagcagtagccagtccccgagggcccatcttccagccctgaagcggtaaacgcctcacctctagtggcgagtgcgaggaaccgcaccctagcccgcctgactgtccagccccgggtggtgcccatcctgcctgttgttccctctcaaaccaaataaacctcccgacgtatggactct

SEQ ID NO: 128501 - DNA, 749 bp, Homo sapiens
  chr17:36714787-36715536
  hyper
gaaggggtgggatggcgaagggcaggggcgggatggcgaagggcaggggcagagggctaagttctggggaagaacagaggcaggaggagaacggatggggatcgtggagaggggagcgttaaaatgggccatgcaaagggggagctgcatggctgtggccgcgagcaggggtggtattgcagggggaggagggcaaggttaagttctggggaatatgaggcaggagaaggggttgggaatatttgcgggacagggtgtagccctatgtaggtccctgccgacagtgcggccgcatggctatggcttccatcatcccggaatggggacgggactggaatgaaggactcaagcgctggcatttgatagagcttctatggctgggacaggaagactaagttgatgatcgatccaaccctgttccaagcctgaatggcgggggtgggcaagatcttacccgttgcccagatggcaattctctgccccctccccagcctgtctctgctaattatcctcacctgacggcccctgggcctgcttgaggagcggactcggcgatgccaagctcctgacaggtgggaccatctgccaagcagggccggggagactgttggggctcaggagggaggagctgagaggacttgggggaagggctctcgctgactcagggaaagggatgcagggcaggaaggaactggaactgccccgagggatactgacgacggaggggctcagtgggtgactggggctcc

SEQ ID NO: 128502 - DNA, 255 bp, Homo sapiens; identical to SEQ ID NO: 53978
  chr17:36716048-36716303
  hyper

SEQ ID NO: 128503 - DNA, 244 bp, Homo sapiens
  chr17:36729018-36729262
  hyper
ccgcctccgcagccgcggccgccgccgccggtgccctttgctgcaatgcgagagccgccgcggccgccgccgtgccggcccgggccccagtcgccccggtaaccgcgactccacctggcgcggcgctgcgcgccgccgtgcacatcccctctcgcggccccctccctcggcgcggccccgccggcgcagccccgcagaggagcggcggaggctggtggctgcgtcgccgcggtcacccgatacg

SEQ ID NO: 128504 - DNA, 172 bp, Homo sapiens; identical to SEQ ID NO: 53979
  chr17:36735070-36735242
  hyper

SEQ ID NO: 128505 - DNA, 30 bp, Homo sapiens; identical to SEQ ID NO: 53980
  chr17:36749381-36749411
  hyper

SEQ ID NO: 128506 - DNA, 30 bp, Homo sapiens; identical to SEQ ID NO: 53981
  chr17:36754365-36754395
  hyper

SEQ ID NO: 128507 - DNA, 30 bp, Homo sapiens; identical to SEQ ID NO: 53982
  chr17:36755706-36755736
  hyper

SEQ ID NO: 128508 - DNA, 30 bp, Homo sapiens
  chr17:36761837-36761867
  hyper
cccccgcccccggccgagggggaaaacaca

SEQ ID NO: 128509 - DNA, 46 bp, Homo sapiens; identical to SEQ ID NO: 11164
  chr17:36762362-36762408
  hyper

SEQ ID NO: 128510 - DNA, 31 bp, Homo sapiens; identical to SEQ ID NO: 53984
  chr17:36762777-36762808
  hyper

SEQ ID NO: 128511 - DNA, 30 bp, Homo sapiens; identical to SEQ ID NO: 11165
  chr17:36763009-36763039
  hyper

SEQ ID NO: 128512 - DNA, 549 bp, Homo sapiens
  chr17:36829803-36830352
  hyper
gaggctgaaggtgctcgtggtggggagcgtcggtgcagggcggcggggctgcgcggtgcgcggagggggcgccggcagccggcgtttcttggcggctccccgagccggccctttcgcaggcggccgctctggcccccggcgcaaactcggagtgtccaaggcgaagcccttcgcgtaacaccaaagtttcgaccggcggatcagacgatcgaaatgttcctggcggagatctccgggtgcggccggagccgggctggccgtcgaggggctggccgctggagcctcgggggcggccggcggggggtttccatcgacttcggcaggctggccgggcaggaacggccgcggcgccgtcccgggacccgcgggctcggtggagaggcccgcaggtggcgacggaggccgggaactgggttcctgaggcgggctggcggctgggccacgctgaggctcgagacccggggccgggcgaggcggggccgaggcgaagctggtcgtagattcccgagggtgcgggggcgcagggcagcggcccggaggtgcacagga

SEQ ID NO: 128513 - DNA, 30 bp, Homo sapiens
  chr17:36831298-36831328
  hyper
ccctccggcggcaccgcccccgtccccatt

SEQ ID NO: 128514 - DNA, 285 bp, Homo sapiens
  chr17:36859555-36859840
  hyper
agacaaaggcttcccggcccctgtctccaagtcgtccatccctggggcgtaggcacgttttagtgagccctgtccggcgaaacccgaaactgcggccaccttggcagcggtgggccccaaaaggaaatattcaaatattctgaaactcgtgcatgatttaggactgacatttttacgtttaattttcttgcagttttattcttgctagtaaaggtaattcgttagaaacccttaagtgcagtttctcctctgtgtcttgtttaacttttcgtgttagcgaaattc

SEQ ID NO: 128515 - DNA, 30 bp, Homo sapiens
  chr17:36886273-36886303
  hyper
tgctcccagaagcgcggcctaggctcggcc

SEQ ID NO: 128516 - DNA, 223 bp, Homo sapiens; identical to SEQ ID NO: 11167
  chr17:36886753-36886976
  hyper

SEQ ID NO: 128517 - DNA, 38 bp, Homo sapiens; identical to SEQ ID NO: 11168
  chr17:36904349-36904387
  hyper

SEQ ID NO: 128518 - DNA, 1325 bp, Homo sapiens
  chr17:36905016-36906341
  hyper
ctagaccaaagggcgcggggctccggcgggggacgcgacgccttcagccaggcgtccgagcgattttcattcactccaagtgacactcccttaaaattaataactgcatctgggagggcgagcgtgtcctccccactccccttgccccctcggcggcaggggcgctggccccgaaaagcggcgcaccaggatccagcctgggcgcctggcagggagcaatcgcgagaggggagtggaggtgcggggtgaggccgggtggggggcctcgccgcggggggatcgggtagctctggcggaggctgcgcccccggcgtgctcgggcagagaagaacggaggcccgctgaggatgggaactcaggctccgggtctgggacacaataatccggccgaaggcgagcggccacactggactaggaaacgaggcgccgggctgtaaggtgggcccgcgccttttctcctgcctggcgctgattcccgcatttttcgctcgcgccctgcgctgcgcgctgcctgtgcgcctccctgggcgcgcgggcgggagagtcgggcgagcgccaagacggctgggcccgactcccactggcgccccggctccacctggcgctggggctccggtccgcagtggctccggcaggagggagagaacgaggagggaggcttggaaacgccgggagtagcggtgaggccgacgccggggaagcgaatcgatactgcgttactggacgcccgtgggcctcatgaggatggtcgattccctcattcgttattcacgatttattagggatggcggccgcgtctgtccctccagagagctcgattatccatccggccagcagcgccattaagcgcactgacggtgggaggctcgagttagaaattaggataggaatcttcgcccagttttggagcgcctgcctcctcttccctcgttgctcgcagccaaggcagccgcgaagctgggggcctcgggtgaatgctttcgccctctggccggcgaccaggagacctgcgcacactggccgccgagtgaccccagctcgagcctgcagccacaccagcgggacgggggcggggaggaagaggaagggcggagagacttccttccagagggagtggtccgagaaccggcgggagaagggccaagggaagatccggtcacctgctccggagcctgcaggcggagaggcgagtagttcaccggccccggaggaaaggggaccctcccactgttcccaggcaaatgtgtcgccggcatcctgcactctgccggggaagacgcgcatccactcgctctgcagggaggggaacgcgggaaggactccca

SEQ ID NO: 128519 - DNA, 30 bp, Homo sapiens
  chr17:36908864-36908894
  hyper
acttccgcttttcccgcctccgttttgact

SEQ ID NO: 128520 - DNA, 30 bp, Homo sapiens
  chr17:36956364-36956394
  hyper
ccacccgcggggcacgccccttgcccccag

SEQ ID NO: 128521 - DNA, 30 bp, Homo sapiens
  chr17:36981133-36981163
  hyper
atccgccccctccccggtcttcccagaatt

SEQ ID NO: 128522 - DNA, 250 bp, Homo sapiens
  chr17:36981591-36981841
  hyper
gggcgtcatctcaccgcgtcggcgtcgcggaacgatgacgtacagggctcggtcgcgctttgtgacgttggcgttacttgcagattttgcaaaggtccgggctccgctgtcgaggcctttgctgtcgaggtctcattttggctgcttcgggtcgccacgttgcctgatgtcccagactctctgttgaaacgccacaactctgttcagtgatgggttgccgtgggcctgtgcccacggctgtgttgccatg

SEQ ID NO: 128523 - DNA, 30 bp, Homo sapiens
  chr17:37009294-37009324
  hyper
attacagctcctaccggaagacccaaggaa

SEQ ID NO: 128524 - DNA, 25 bp, Homo sapiens
  chr17:37009648-37009673
  hyper
cgcagaggtcgcgcaaaccagggcc

SEQ ID NO: 128525 - DNA, 242 bp, Homo sapiens
  chr17:37009958-37010200
  hyper
gacatcttgaacgccggaaaaaagaaaaaaggaagtcgattcaaaggacactgggatatgaactttaacgccccgcccaccctcctcacgtggccggagcaaaaaccggcctcttccgcctctgggcgctgccttattacgtaataagtttacgacgtcgcttttagccctctctgcgaagtgggagttgaggtagaagcgcaagagataggaagtatcttctctacgagcttaagagtagt

SEQ ID NO: 128526 - DNA, 199 bp, Homo sapiens; identical to SEQ ID NO: 53993
  chr17:37025963-37026162
  hyper

SEQ ID NO: 128527 - DNA, 30 bp, Homo sapiens
  chr17:37026626-37026656
  hyper
ggagggcgagcgggcggtgtcatggggtgt

SEQ ID NO: 128528 - DNA, 30 bp, Homo sapiens
  chr17:37027015-37027045
  hyper
gggctatcagcctgcgagtgtgtggcatct

SEQ ID NO: 128529 - DNA, 30 bp, Homo sapiens; identical to SEQ ID NO: 53994
  chr17:37050591-37050621
  hyper

SEQ ID NO: 128530 - DNA, 161 bp, Homo sapiens; identical to SEQ ID NO: 53995
  chr17:37183537-37183698
  hyper

SEQ ID NO: 128531 - DNA, 319 bp, Homo sapiens
  chr17:37307714-37308033
  hyper
gcctgcttgctgccccggtcctgacgagggagggggccctggctcaggctgcggccgcgcggtccccggggctggcggaggggcgggcggcgaggagacggcggagcgcggggccgggcgagccggcaggagcggcgagagcgcgagcggagctggaggctgcggcctccgggagcaggcggggagctgggggggccgctgggtcggtgggggtgggggggagctggggcagggggcggggcggggggcgcggcgtcgttgggggctctcccggcgcctgccctcagccctaacggagcgctcccctagagctctgcag

SEQ ID NO: 128532 - DNA, 20 bp, Homo sapiens
  chr17:37308156-37308176
  hyper
cgttccgccgggaaagctgc

SEQ ID NO: 128533 - DNA, 30 bp, Homo sapiens; identical to SEQ ID NO: 11173
  chr17:37309399-37309429
  hyper

SEQ ID NO: 128534 - DNA, 148 bp, Homo sapiens
  chr17:37310272-37310420
  hyper
ggtgtggaaggagaagtctctcgaaatatttcacttcgggggcgtcccactctcctgccctgcagaagaccccttgccacgtctcggagcttctttctccctcccacatgctcacgcggcttctcccgacctgtcttccccagcccag

SEQ ID NO: 128535 - DNA, 464 bp, Homo sapiens; identical to SEQ ID NO: 53998
  chr17:37321160-37321624
  hyper

SEQ ID NO: 128536 - DNA, 117 bp, Homo sapiens
  chr17:37321787-37321904
  hyper
cgccgggacccaagaggagcaggcagggacgggggcaggggaggccgcggggcagtcgaggagcgcccatatacgaccctcggagcccgaggtccccccgtgcgtccgaccacagat

SEQ ID NO: 128537 - DNA, 30 bp, Homo sapiens
  chr17:37331434-37331464
  hyper
gcccctgcctctcagcgaatgtagacgcct

SEQ ID NO: 128538 - DNA, 385 bp, Homo sapiens
  chr17:37353468-37353853
  hyper
ccgctccgcagcatcgccacccagccccaggcccagcgcccatcaatcacaacctgcaaggatggggggcgcgcaggcatccctctctcctccgcgcccggcatataaccccttcctctcccgcgcctctcgagccgaccttaacacggtccgcgggagcgaccccctcccgttgggccgggccaccacgcctcacctgcgggctggggtcgaagacctccatggggatctcctgggagggtgggtaagggccccgggacatgctggtcttctggaccatggagaggagcctcccctcccgccgccggcccggcccagccgggctccctcagcgcatgggagaggccgtgggagccgaaagcagcgcggcgcagccagcacccgg

SEQ ID NO: 128539 - DNA, 30 bp, Homo sapiens
  chr17:37356539-37356569
  hyper
ataatgggaggagccgggcccgagcgagct

SEQ ID NO: 128540 - DNA, 645 bp, Homo sapiens
  chr17:37365972-37366617
  hyper
cctggctcagggggcgggggctgtaaaccggaaccggtggaggagggggcgctcatcaggaaaggcagcccccactctgcatccgggcagcgccagcagtgccccagcacccccgcagcccgcctctccttggcgccccgctcccctccgcctataaatagcacaggacgtgctcgccgtggcgatgacgcggctgggcaggcggaggggaaggaggcagctctgccagagcggtgggcggcgagcgcggcggcgggaggggtgcggcccctccatgctgggctccgatgacaggggcgactgagtcatcccggggacccacgggccacgactgtccccgccgccagcgtttctgtctccggcttgggggactgcggggacgaggctgacctcggatgggtactgagccctcccagacccccggcacgcccggtctcggagggcacctctgggtgggcaagatcggcctcgacggccctggcgcgcaggagcatgtccgcccctgcgcgactcaggtgcacatggaggcggaaagtgaccgcagccccaagccgtttccctccagcgtccccagacctcctcccactttcctcaggtccccttttggctctccccagaccccaccctcctcgggctgctggagga

SEQ ID NO: 128541 - DNA, 543 bp, Homo sapiens; identical to SEQ ID NO: 54001
  chr17:37380886-37381429
  hyper

SEQ ID NO: 128542 - DNA, 156 bp, Homo sapiens; identical to SEQ ID NO: 11179
  chr17:37381570-37381726
  hyper

SEQ ID NO: 128543 - DNA, 632 bp, Homo sapiens
  chr17:37381825-37382457
  hyper
cgggcgtctccgggactctgaagccgttctccagaggctgcccccagttagcccccggcacggcagcccccaacccgcgggagcgggcagagaaagttgccggggtggcgggcgaggggaggccaccacgctgagccgcaggagcgggacgaccccgggcgcgaggaccgagggtctgcagaggatgctgctcgcagcgcggggaggagggaagtggggccgcggggatgagccgagggagggagccaaggagctgtccgtgtccagccggctccgccgtccgctgcgcccgccccccatcccctcccctcccccgccggccccagcccggcacccggcggcccctccgcccagtcctcgccgcccaactttgatttaggaggtcgcctggtcccgccccctgccctacgccgctcccccgcgcagccctgcaaatcaggctctcagctattggctgcctcggtggccaggagggcgaactgggcggagtcttggggggctcgacacgatggggcggggcttggcggggaaagaagcggaggagggagtttcacactgaaaaacccgggatggaggggcgtgaccagattgagggaagcttggggagatcatagtagcgtctggatgggttg

SEQ ID NO: 128544 - DNA, 30 bp, Homo sapiens; identical to SEQ ID NO: 54004
  chr17:37395772-37395802
  hyper

SEQ ID NO: 128545 - DNA, 30 bp, Homo sapiens
  chr17:37558966-37558996
  hyper
cgggggcgttttcccgatggaaacacttca

SEQ ID NO: 128546 - DNA, 30 bp, Homo sapiens
  chr17:37607090-37607120
  hyper
ttgagagtccccatcgccctaaagtcgaag

SEQ ID NO: 128547 - DNA, 61 bp, Homo sapiens
  chr17:37617658-37617719
  hyper
gtgaaagcgaagcacgaaacatcgcgagaggctactggactctcgcgacgatttctgggat

SEQ ID NO: 128548 - DNA, 936 bp, Homo sapiens
  chr17:37618439-37619375
  hyper
tatcgaagcacaagcggcataagtccaaacactccaaagacatggggttggtgacccccgaagcagcatccctgggcacagttatcaaacctttggtggagtatgatgatatcagctctgattccgacaccttctccgatgacatggccttcaaactagaccgaagggagaacgacgaacgtcgtggatcagatcggagcgaccgcctgcacaaacatcgtcaccaccagcacaggcgttcccgggacttactaaaagctaaacagaccgaaaaagaaaaaagccaagaagtctccagcaagtcgggatcgatgaaggaccggatatcgggaagttcaaagcgttcgaatgaggagactgatgactatgggaaggcgcaggtagccaaaagcagcagcaaggaatccaggtcatccaagctccacaaggagaagaccaggaaagaacgggagctgaagtctgggcacaaagaccggagtaaaagtcatcgaaaaagggaaacacccaaaagttacaaaacagtggacagcccaaaacggagatccaggagcccccacaggaagtggtctgacagctccaaacaagatgatagcccctcgggagcttcttatggccaagattatgaccttagtccctcacgatctcatacctcgagcaattatgactcctacaagaaaagtcctggaagtacctcgagaaggcagtcggtcagtcccccttacaaggagccttcggcctaccagtccagcacccggtcaccgagcccctacagtaggcgacagagatctgtcagtccctatagcaggagacggtcgtccagctacgaaagaagtggctcttacagcgggcgatcgcccagtccctatggtcgaaggcggtccagcagccctttcctgagcaagcggtctctgagtcggagtccactccccaggtgag

SEQ ID NO: 128549 - DNA, 30 bp, Homo sapiens
  chr17:37729797-37729827
  hyper
cccggttgccaaggcgcggttgccagcgcc

SEQ ID NO: 128550 - DNA, 30 bp, Homo sapiens
  chr17:37730083-37730113
  hyper
ccttccccggccctcgcccccagccgctcc

SEQ ID NO: 128551 - DNA, 173 bp, Homo sapiens
  chr17:37755346-37755519
  hyper
ttgtttttaaccctccccctgcgccgcgccccagcctcggcctgggagcccggccgagcgcgagttcgctgcaagcgggatccgctctgagcccggccggccggcagcctccgcggtattcccggcgcgggcccctccaggggctcccctgcggctcctgggggcaggggtac

SEQ ID NO: 128552 - DNA, 921 bp, Homo sapiens
  chr17:37755735-37756656
  hyper
ccacccccacccctcgcttttaatgcgactctggcgagaacagatgtcccaaaccgggcgaactgcccagaccccgcccagctgtgcccttggtgaagacttggctaagagtaggaactggcatgcaggtccccaaaggggttcgggggttcccgcgacccctgtgggacctgacctagcagccttggcctcctggccagctcagcctcaggcgggaggcggaagagacccggaaagacccgttcctaattcaattaattccgaaaagaggaatgagacgcagacagatactgacagaagctgggagagaggtttaaatacccgaacaccagacacacactctggtatggaactccgcagcccctgtcagcgcggggagacctcgctgcgctcccgcgctggagagggcaggagagttggctgcgctagagccataccctggctcacatctgggcagcgtctccacccaacgctgtgccccagctccctgggcatggccggcgcctagaggttccctcttctcctcccctcggagcgccccagcttcccttccctgccctagggaactaaggtgactccgctcctcgcatctccctcctgaaatccgttgccctccttcctgtgaacccagccccggtcttggccttcttctcacgtccacactcccagggctggcgcccctgtcccagtgctttaggttggagaaagtttccagagcagaacagccctcccaaggcagctgcgccctttcttaccacttctcacccagggaaactttgtcgagaatttttaaagctgcaggacagaaaggcagaagctgcttcaggattcagaaccggggcagggttttaaggtttctcacagttcaggtgtcatttctgctctggccccgtggccagcgcctgggtatcccagccctga

SEQ ID NO: 128553 - DNA, 796 bp, Homo sapiens; identical to SEQ ID NO: 54008
  chr17:37757095-37757891
  hyper

SEQ ID NO: 128554 - DNA, 770 bp, Homo sapiens
  chr17:37759986-37760756
  hyper
ccctcaatgaaatgaggccaccgtgagaaaccggtccggctttgcatctcatttacataaatatttattaatcgtcattaaactgaacagaaacacgcaatgcacttcgggtgtccgacgggagtttcatcttcgctacaagaggaaggtaaaattgcgtgtgtgtgggtgagtgtgtgggtgtgtcgcctgtgggattgcatttttgcatcgtgtatttggatgcctgatcccctgcctccggtgggcagagggtctccttttgcccctttttgggggaacctccagtaggagccctcagacctctccccgcccacccaccagctaaagccaagaggactccttggaccaaaaaatactctctccagacaccggaaatcgccaggtggcacccaccgaggcacagtccgggcaggggtggggctgcccccaggtctccatccccacccctcaccccaggaggggacagaatggccgcggggaggaggagccggcgagctcacctccttctgccccccggacgccggcgccgggcctgcttgtgcgtgcggtgtggtgtgcgtgtgtctttcatgcaaaccctccctccccaaaccgaccccccaacagtttgccattccatacaaatttggaaacaggtttttaaaaaacagcatgacgcacaacggggacggggcgggggagggcagtggcactggggccccaaatctccgagtcactgattgtaagaacctggggagggggagggggcggcgcgggcccccacttca

SEQ ID NO: 128555 - DNA, 677 bp, Homo sapiens
  chr17:37761153-37761830
  hyper
taaaatcgcaaaacgcggagactggaggttgggggtgagggcgttccaggcccgggctccggcgccctaacttctaccctcttcaagaaagagggagcgcctggctcctttttgcctcggcagctgggtgtctgtttttaaaataataatgagagggggaaacgcgttccattgctcagctgcccccttaccaacgccttgggcctgcagggaggagggggaggaggaaacctcagcgaagatattgggaatgggggaggggtgcctccagggagcccccggagagaggtccctggagaagcactccttgggagagaggaggagggaaccccttggggagagagaaggcgagtcccctgggggaagcgaggcccctgggacaggccacccacaggtaacaggactgcgctgccccaggagagcggcaggaccggtggcccgctccccgcgcccggcgccggggtaggatgggggtgtccctgcgctctgggggctggggacaggggggcgggcaaaggcaaaagaaaaagaagggagccggcgcgaagtctcagttatgaaaaaacgcattgagctcctcgtacatggggccccggtcgtggtgaaggtgcatatcgtaagacaagagattctccgagtggacgcccccgcgcacagccgacgagccgaagactagc

SEQ ID NO: 128556 - DNA, 1039 bp, Homo sapiens; identical to SEQ ID NO: 54011
  chr17:37761946-37762985
  hyper

SEQ ID NO: 128557 - DNA, 30 bp, Homo sapiens; identical to SEQ ID NO: 54012
  chr17:37763219-37763249
  hyper

SEQ ID NO: 128558 - DNA, 30 bp, Homo sapiens
  chr17:37763469-37763499
  hyper
gccggctctgggcggcgaggactgaagcag

SEQ ID NO: 128559 - DNA, 184 bp, Homo sapiens; identical to SEQ ID NO: 54013
  chr17:37763953-37764137
  hyper

SEQ ID NO: 128560 - DNA, 255 bp, Homo sapiens; identical to SEQ ID NO: 54014
  chr17:37764263-37764518
  hyper

SEQ ID NO: 128561 - DNA, 30 bp, Homo sapiens; identical to SEQ ID NO: 11189
  chr17:37774334-37774364
  hyper

SEQ ID NO: 128562 - DNA, 340 bp, Homo sapiens; identical to SEQ ID NO: 11190
  chr17:37774744-37775084
  hyper

SEQ ID NO: 128563 - DNA, 1045 bp, Homo sapiens
  chr17:37782848-37783893
  hyper
ctctccccacgacctcgcaggcctctctgaaactcccagtaccaggaccacgaaggggttaaagccagagtcctgcctccccgctgcccctctccccctccctccccctttatcctctctgctggactccatcaataatgcagcttcaagttctggggagaccgcagggggccccccagctggctccccaggccttggctctaactcccaccctcctcccagccccaggagaacacgattctccatgctcattggccagtttcccctaaaccctccctccgagcacccgggcgccagtcccaggcggaggggacgggctggggaccccaaagctgggaccggagggtgagcccggcagaggcagagacacacgcggagaggaggagaggctgagggagggaggtggagaaggacgggagaggcagagagaggagacacgcagagacactcaggaggggagagacaccgagacgcagagacactcaggaggggagagacaccgagacgcagagacacccaggccggggagcgcgagggagcgaggcacagacctggctcagcgagcgcggggggcgagccccgagtcccgagagcctgggggcgcgcccagcccgggcgccgaccctcctcccgctcccgcgccctcccctcggcgggcacggtatttttatccgtgcgcgaacagccctcctcctcctctcgccgcacagcccgccgcctgcgcgggggagcccagcacagaccgccgccgggaccccgagtcgcgcaccccagccccaccgcccaccccgcgcgccatggaccccaaggaccgcaagaagatccagttctcggtgcccgcgccccctagccagctcgacccccgccaggtggagatggtaaggggcccgtgccccaccccggcagcgtacccgacacaccccgcggggcttcttcgccctcccaaggcgctgccccggccggactggcctgggggtgggggcgcaaggagagccgggctctgcctcggtcaggacggggcgcggggccgcgtgtgaagttagct

SEQ ID NO: 128564 - DNA, 33 bp, Homo sapiens
  chr17:37793197-37793230
  hyper
gtgtggcctaataacgacggccctggtcttctt

SEQ ID NO: 128565 - DNA, 142 bp, Homo sapiens
  chr17:37793984-37794126
  hyper
ctcatttctaatgacacgttccctcaccccgcatttttgggttagtcaatgtctcctggttttcttcgtaccgctctgacagtcggtcaaagtcccgcttcacgttttcctctgtcgcccaacccctcgctctgtacactga

SEQ ID NO: 128566 - DNA, 725 bp, Homo sapiens; identical to SEQ ID NO: 54019
  chr17:37823745-37824470
  hyper

SEQ ID NO: 128567 - DNA, 94 bp, Homo sapiens
  chr17:37844397-37844491
  hyper
cggatttttgtgggcgcctgccccgcccctcgtccccctgctgtgtccatatatcgaggcgatagggttaagggaaggcggacgcctgatgggt

SEQ ID NO: 128568 - DNA, 31 bp, Homo sapiens; identical to SEQ ID NO: 11196
  chr17:37844562-37844593
  hyper

SEQ ID NO: 128569 - DNA, 814 bp, Homo sapiens
  chr17:37856348-37857162
  hyper
ccccccgggcagccgcgcgccccttcccacggggccctttactgcgccgcgcgcccggcccccacccctcgcagcaccccgcgccccgcgccctcccagccgggtccagccggagccatggggccggagccgcagtgagcaccatggagctggcggccttgtgccgctgggggctcctcctcgccctcttgccccccggagccgcgagcacccaaggtgggtctggtgtggggaggggacggagcagcggcgggaccctgccctgtggatgccccgccgaggtcccgcggccggcggggccagaggggcccggacgagctctcctatcccgaagttgtggacagtcgagacgctcagggcagccgggccctggggccctcgggcgggagggggcagttacacggcagcggctcgagatggcccatccaagagactggcgctttccaggctccgaggggctccgggaacttgtcaaagaagttctctgaaattgttcagaaagttttcccgcaaagggtgtattgcgtagagcgcgcgcgcgcgtttccccccttcttgagccccctcaagctttctcaaagcctttccagttggcagcctccgcctccggactggcctgggctggattccttgggggggtcctctgccctgcccctcctccagcccctccccgctccccttcagacgattttggtttggttgctcctgcttctggcggggtcgggtgtgtgtgtgtgtggtggagtggagggtggcatagcaacctgtcccaaccagagccggggaggaaagggtggcccggagggtggcctct

SEQ ID NO: 128570 - DNA, 30 bp, Homo sapiens
  chr17:37886638-37886668
  hyper
cctccagccggggccgctcaccagtactcc

SEQ ID NO: 128571 - DNA, 89 bp, Homo sapiens
  chr17:37886987-37887076
  hyper
ccactccccactcccggtgtccgctggacttcatggcttcatttactctaatggactatcttagactgcaaagcgcttttcagtttaca

SEQ ID NO: 128572 - DNA, 31 bp, Homo sapiens; identical to SEQ ID NO: 11199
  chr17:37895237-37895268
  hyper

SEQ ID NO: 128573 - DNA, 444 bp, Homo sapiens
  chr17:37895513-37895957
  hyper
gggacctcatggaggcgggcagcctgtaatgattaactgcagagacactccagcattcttcccgaattaaactttaaaagagctgccccgccttctcccattgggtatttttcctgagtgagagtgggcggggcctcagagtcctgggtcctcccttatactaggagtcatccaggggtttctcaccttctcacctgggccctgcaccctaaaaaattataagcctctcccgtgggggcggggcgtggagtactgggcggacgggggctctcccgccacatccaggcccctggcccaggcctcagtcccgcaagcccttccccctgctctgggaagcagagttgttttctgttggccctgaacaccgggccccgccacctgcccttagggccagccaggtggggcgtgattcaggaagtaaacaaggaggttgggaggacggga

SEQ ID NO: 128574 - DNA, 79 bp, Homo sapiens
  chr17:37896009-37896088
  hyper
cggagttacctcgttgaggggacaaactgattttgggggtcggtgtttccaaccgaagctttaccggggcctcagtttg

SEQ ID NO: 128575 - DNA, 320 bp, Homo sapiens; identical to SEQ ID NO: 54027
  chr17:38020385-38020705
  hyper

SEQ ID NO: 128576 - DNA, 48 bp, Homo sapiens
  chr17:38024014-38024062
  hyper
gacacccagtttcagcgttcatgagaagagaggcgtaggaaatcccca

SEQ ID NO: 128577 - DNA, 30 bp, Homo sapiens; identical to SEQ ID NO: 54028
  chr17:38051332-38051362
  hyper

SEQ ID NO: 128578 - DNA, 30 bp, Homo sapiens
  chr17:38083339-38083369
  hyper
tgagacctcgggtgcggggccggggggagg

SEQ ID NO: 128579 - DNA, 30 bp, Homo sapiens
  chr17:38083773-38083803
  hyper
ccgggagcgggggccgctgctgctccagca

SEQ ID NO: 128580 - DNA, 30 bp, Homo sapiens; identical to SEQ ID NO: 11202
  chr17:38084022-38084052
  hyper

SEQ ID NO: 128581 - DNA, 30 bp, Homo sapiens
  chr17:38136764-38136794
  hyper
gtcatctcgtcccgcgctcggataggctgt

SEQ ID NO: 128582 - DNA, 30 bp, Homo sapiens
  chr17:38137082-38137112
  hyper
gtttgcagctgctccgtcatcgtgcggccc

SEQ ID NO: 128583 - DNA, 30 bp, Homo sapiens
  chr17:38137474-38137504
  hyper
atcgcgggtgacagcgacccctgtgatttg

SEQ ID NO: 128584 - DNA, 173 bp, Homo sapiens
  chr17:38210765-38210938
  hyper
accgtatttgtctgcgccggcgaggaaactaagggactcgtctagtcggcccgcattgttcttctcctttaagggaggacatccaggagctgaggcactacagagactcagggactcgagggagctcgaaaggccgctcacaacccggcgtcgcccacgacgtcactgtcgac

SEQ ID NO: 128585 - DNA, 30 bp, Homo sapiens
  chr17:38218928-38218958
  hyper
actcctgcgggagccgcccgggctggggag

SEQ ID NO: 128586 - DNA, 79 bp, Homo sapiens
  chr17:38219346-38219425
  hyper
taaggaggagggagcgagggggcattaatatgcaaatgccttgcgattgattatgcaaagccgcggggctccgtggcca

SEQ ID NO: 128587 - DNA, 30 bp, Homo sapiens
  chr17:38219822-38219852
  hyper
cgggtgggcttgcacgggtccggggagagg

SEQ ID NO: 128588 - DNA, 40 bp, Homo sapiens; identical to SEQ ID NO: 11203
  chr17:38228512-38228552
  hyper

SEQ ID NO: 128589 - DNA, 38 bp, Homo sapiens; identical to SEQ ID NO: 11204
  chr17:38228860-38228898
  hyper

SEQ ID NO: 128590 - DNA, 30 bp, Homo sapiens; identical to SEQ ID NO: 11205
  chr17:38232113-38232143
  hyper

SEQ ID NO: 128591 - DNA, 83 bp, Homo sapiens
  chr17:38255679-38255762
  hyper
aaacaaacgcagcacgtgggcccggctctagagccatgtgagccctcccggcggccggagccctgtaggtgccctccctcggg

SEQ ID NO: 128592 - DNA, 56 bp, Homo sapiens
  chr17:38255830-38255886
  hyper
cgaacgattctcccagcccctccttccctgaaccccatcgcgccactcttctcaga

SEQ ID NO: 128593 - DNA, 128 bp, Homo sapiens; identical to SEQ ID NO: 54035
  chr17:38256106-38256234
  hyper

SEQ ID NO: 128594 - DNA, 120 bp, Homo sapiens
  chr17:38256917-38257037
  hyper
tcccgggccgcacgcggcactggagcaggtaccatgtgatcccagggagcgcctcgtgccccagtgacacacttttccaacagccggcacgttgagctcttgcgcgcctgcgcaacgaca

SEQ ID NO: 128595 - DNA, 362 bp, Homo sapiens
  chr17:38264383-38264745
  hyper
ggagacagaagcaggataaagcgcaaggagacaagaagggagccccgcgcgctttccctccttcctcatcttgcctcctgtttctctggcccacggaggaaggggcccagtgtgtttgtgccggctcgaggctcacgcgggctgccggggtcacatggcccgggcatgtgcagcctgctccatttctaccacaacaactcgctcataaacagcccggctgctgcggcggtggcggtggagacatgtgcaagcgagggggtggggcacgtggccctgcccgagccaagggaaggcgctcgctcagcactgcctccacccctccccagcactggcgctgcctcgtcacaggaaattcctagtgc

SEQ ID NO: 128596 - DNA, 30 bp, Homo sapiens
  chr17:38269832-38269862
  hyper
tagcatcctgctcgcggaagcctggaacgc

SEQ ID NO: 128597 - DNA, 30 bp, Homo sapiens; identical to SEQ ID NO: 54038
  chr17:38277746-38277776
  hyper

SEQ ID NO: 128598 - DNA, 90 bp, Homo sapiens
  chr17:38296367-38296457
  hyper
tgactccttccactcgggaagcccaagatggccgggccaggaacccgggaggctgctgaagtctcaattcccctcgccctaggcctgccc

SEQ ID NO: 128599 - DNA, 30 bp, Homo sapiens
  chr17:38296683-38296713
  hyper
gcgggatggccgagcgccgcacgcgtagca

SEQ ID NO: 128600 - DNA, 173 bp, Homo sapiens; identical to SEQ ID NO: 54040
  chr17:38347442-38347615
  hyper

SEQ ID NO: 128601 - DNA, 428 bp, Homo sapiens; identical to SEQ ID NO: 54041
  chr17:38347753-38348181
  hyper

SEQ ID NO: 128602 - DNA, 110 bp, Homo sapiens; identical to SEQ ID NO: 54042
  chr17:38375104-38375214
  hyper

SEQ ID NO: 128603 - DNA, 21 bp, Homo sapiens
  chr17:38383815-38383836
  hyper
tgttccaggctggttgcggtg

SEQ ID NO: 128604 - DNA, 166 bp, Homo sapiens
  chr17:38443941-38444107
  hyper
tagattccctcccccgttcagtggtcgtggcctcacagcgactctaagacttggggctctctcattggctgtaactcttccactggattggtagcaaaaaaagaggcggtgcccaaggcgaaaggctctgtgactacagccaatcagaatcgaggccgggctttgg

SEQ ID NO: 128605 - DNA, 30 bp, Homo sapiens
  chr17:38444608-38444638
  hyper
ataaagacaccccgcgtgcctggagggagg

SEQ ID NO: 128606 - DNA, 254 bp, Homo sapiens
  chr17:38474110-38474364
  hyper
cacttccatattacgccgccgcctcacttctcagatttaggtgtgggtgtgtgtgtggttggggggaaaggagtgtaggataccacacgctgcggtcttctccaccgagcgctattttcattctttccgcagaacctcaccccgttcttgctctgaatcttcggttctgggtctgagggagggattctcccggattcccacggtccagtcttcaactaggagtggctcctttaagactcgcccttcccgaggtc

SEQ ID NO: 128607 - DNA, 408 bp, Homo sapiens
  chr17:38478451-38478859
  hyper
cagccaaggtgccctcgtctgggcgggcaccttggagcagtgagggggattcctcaagcacaaaaggcaggggagaagtggcagggaagaggtggcaggggagaggtggcaggggctaggcacagttgggaccttgcttgcctggaggccagtagatgccggagatgaacctggaggctcaggacagggcaagagtggggcacgccggggctgggtcctctggctgttccctctccccacagagttacttgaggtcaggcagtctccatgtgtcactgtaccccgcaggcagtgtcaccgtgacccactcgctgtgtgtctgtgtgtacacacctaccttggagtggctttatcccggccctccccccggagcctctgtcccctgggtcctaccgcaggtcctcagcc

SEQ ID NO: 128608 - DNA, 1097 bp, Homo sapiens; identical to SEQ ID NO: 54046
  chr17:38498083-38499180
  hyper

SEQ ID NO: 128609 - DNA, 30 bp, Homo sapiens; identical to SEQ ID NO: 54047
  chr17:38499536-38499566
  hyper

SEQ ID NO: 128610 - DNA, 152 bp, Homo sapiens
  chr17:38501382-38501534
  hyper
ctcccaccaatctccgccactcacacctccgcccgctcccagacgtccaagaatgtgaagcacgtggatgcccgtagttgggggagggggagacgcttatcaggcggccgctgggctaggggccttcttccgctgccgcggtacacccagag

SEQ ID NO: 128611 - DNA, 30 bp, Homo sapiens
  chr17:38519792-38519822
  hyper
aacagcaccgggggcgccgagagcagcagg

SEQ ID NO: 128612 - DNA, 92 bp, Homo sapiens
  chr17:38573796-38573888
  hyper
agggcaacaacgcacgacaccctggaagccgggtcatacttcactactagcaccagaaggggcttccgcctctccacgatcaccccggaacc

SEQ ID NO: 128613 - DNA, 90 bp, Homo sapiens
  chr17:38574210-38574300
  hyper
gctctcaccgtctccgtccagaagaaccaatcgtagcttgccttttatatccacctatgaacggctgagttggccggggtttgtttgaat

SEQ ID NO: 128614 - DNA, 30 bp, Homo sapiens
  chr17:38574584-38574614
  hyper
gggagccttagcttcgttttcctgaggaaa

SEQ ID NO: 128615 - DNA, 204 bp, Homo sapiens
  chr17:38599493-38599697
  hyper
cagcttccaaactgcgccgcttccttcttcggcagaaaaggactttcagatgcggcggcggcggcggcggcgactcaggacagcgccccctccccctaacggccgcctctccctctccccctcgcccgccccggctcccccacctctgggaaggcgctgggggtgtggccagggaccggtataaagtccgggggagccggtccc

SEQ ID NO: 128616 - DNA, 30 bp, Homo sapiens; identical to SEQ ID NO: 54050
  chr17:38600290-38600320
  hyper

SEQ ID NO: 128617 - DNA, 160 bp, Homo sapiens
  chr17:38604452-38604612
  hyper
agcctaggtgtctctcgagggccaggggctggcgttggggagaaattgtgagggtaaaatcaggcaacaggaaagaggaaatcctctggctttcgccacaaactttgcagccggtggtgccaaagccgtgtggcctcttctctggcgccttcccttcctc

SEQ ID NO: 128618 - DNA, 30 bp, Homo sapiens; identical to SEQ ID NO: 54052
  chr17:38716787-38716817
  hyper

SEQ ID NO: 128619 - DNA, 138 bp, Homo sapiens
  chr17:38739097-38739235
  hyper
ttccccagtgagacccggtggtgacctttatcttggcaaggtggcaagggcgacaggaaacttggactgaaataacctctgtggtgaaagcaggggtgggaaatgttgaggctggtctcatggcgagtgataaattag

SEQ ID NO: 128620 - DNA, 31 bp, Homo sapiens; identical to SEQ ID NO: 11214
  chr17:38776490-38776521
  hyper

SEQ ID NO: 128621 - DNA, 265 bp, Homo sapiens
  chr17:38804061-38804326
  hyper
ttccctttgtcccgcgctcgccccgcccctcgcgtccggagcttccgcactcgcactttccacactcttcttaatttttttttttttccgggccccacccgaccctctttagaaaaactaaccttctagtgaagatgcggtgatgcttagcacactcagggatttttttcaggacccattggatcctcaaaactccccgaattttgatactttcccagccgggcgctgattcgtcacggcgaagagggccgaggaggcccgacct

SEQ ID NO: 128622 - DNA, 30 bp, Homo sapiens
  chr17:38804591-38804621
  hyper
acctgggatggaggcgtggaggacttgctt

SEQ ID NO: 128623 - DNA, 30 bp, Homo sapiens; identical to SEQ ID NO: 54055
  chr17:39596539-39596569
  hyper

SEQ ID NO: 128624 - DNA, 1139 bp, Homo sapiens
  chr17:39683515-39684654
  hyper
cccattcttcctaaacgaatgggccccagggcgggagagtgggaggaggccaaagcctgagagggatgaacactagacccttccggccagagaaacggaatgcaggaggccctacgctgcggtggcagagggggcaagactggccccgggtggaccagatcaccaaagccaaactctcgcatcttcctgcggcagcgcggcccctggcctagacctctgggcactctacagccgggtcccatctcctcccactcttcaggcctcgctgacccgcgtcccttcttcgtcccggggctccaaccttgcccccgccacctccagaggccccacccacttatctgccctgcccagttctcctcccctttccaccaccccggcctctgcatccagccccgaggtcctgccccgcacgtctcctgtccccctttactcggccccacctgtggaccttcccacgtcctaacgggctcctgcccgccgccccgcctggaacctcgcccggcccgcggggctgggtttccgcggcaggtgcactgcacttcccgcggccgggcctccgcccaccttgtcccgcaggtcctggatggtcgtgtagtagtggctgtagtcgcgggagggcccaggcccctgcttctggtaccagtcgcggatcttcacctctagctcgccgttggccgcctccagggcgcgcaccttgtccaggtaggaggccaggcggtcgttgaggttctgcatggttagcttctcgttgcccgccagcagcccgtcggacgcggtcaggacgccgccgtagccgccgccgtaggcccccgaggaggacgaggacacaaagcgggcggaggacacggatacgccgcggccgccggagcccccgtgaatgctgggcgcgcgaaaggcgacccccggcccaaaacgcacggagccgccgcccaggcctccgaaggacgacgtggccgacgactggcgatagctgtaggaagtcatggcgaggcggagcacggacggagcaaccctggtctcagaagctgcgattcgcgggaggagcggcgaggccctcacctggcgccttttatgcccgcggccggtggaggggggaagggaggaatggtgtcaggggcggatatctgagccctgaggaa

SEQ ID NO: 128625 - DNA, 30 bp, Homo sapiens; identical to SEQ ID NO: 54057
  chr17:39705219-39705249
  hyper

SEQ ID NO: 128626 - DNA, 30 bp, Homo sapiens; identical to SEQ ID NO: 54058
  chr17:39795172-39795202
  hyper

SEQ ID NO: 128627 - DNA, 30 bp, Homo sapiens
  chr17:39804970-39805000
  hyper
gcccacccctctgtcgggtctcgccacgct

SEQ ID NO: 128628 - DNA, 30 bp, Homo sapiens; identical to SEQ ID NO: 54059
  chr17:39819085-39819115
  hyper

SEQ ID NO: 128629 - DNA, 30 bp, Homo sapiens; identical to SEQ ID NO: 11216
  chr17:39822527-39822557
  hyper

SEQ ID NO: 128630 - DNA, 566 bp, Homo sapiens
  chr17:40306685-40307251
  hyper
gaggacagtcatagcggtttccttaaggctcaccaaaggcaggtaagctaaggaaagaagctccccacctcctatggcccgacgcctggggagcccctcaagagggggctacgggtcgggggaggggtcagtatccccctaaactggggctgggcgggaggaagggctgccctggagatgcttcaacgcaggcgagacaccaggtcctgggacaagcatactcacggcggctccggggcggcggcgttacttggggccggggctcggacgggatccgcttctctccccgccggcggtgtcccaggctccggcctccacttccgcctttcagccgctccggatccggatctccacctccgccccgcccctcaatactcccaggtgattgacagtgcggagaccaatgggaggcactcttggccgacctacccagcggcgccggtaggaacgcgggagtggcggtagggagcgcgcgagggatcgcgggacttgtagttcgcagcgctgggaggagtcagtggctgcctgggacttgggcttagggtggagccggctgactgcgaggc

SEQ ID NO: 128631 - DNA, 454 bp, Homo sapiens
  chr17:40332755-40333209
  hyper
gggagttcctagacccgcacctccattctctcccctcgcctcgggtctcaccatgtccaggagatccgagacggccccgaggatacttgccccccagctcgaacctcaagccccgacctccgtcccactcacgcgttccgtcaaaacgggtggcgatggtgtccaggaaggtgttttgcggggccagcaaccccttcatgaccggcatggccccggggcgtgggttcaaggcgcggcgctggggagctttcagcgcggccgggccggagggggcgcgctgtcggaggggccggggcgccccatgcgccctcctgcctcctcccctccctcttactgccgctgccgctgccgctgcctctgctccgaaccccgtagctctcggctcggctcagcgccgtttcggtcccccccacctccccacgggccaggttcttcccctcgggctcggcccgca

SEQ ID NO: 128632 - DNA, 54 bp, Homo sapiens
  chr17:40333431-40333485
  hyper
tgtggctccacctcgcgggttttcccgcgcggcgtccacgctgggctggtgtct

SEQ ID NO: 128633 - DNA, 282 bp, Homo sapiens
  chr17:40400756-40401038
  hyper
aggcggcactgttaccggaagaagcgaagagcagcgatttccttccaaaaggtcagctgcctcagacagaccaaacagaaagcagcgaattcttgccaacttcccctcctgcttctgcagctagtacgcaatagcatttagtttccagtaaagctccagataaaaacaaagcaaatgtgagacccagaatctacacaatgtcagtgtctcgcttgactgaacgaagggcagtaagatcatatggagctacgctttttcaacgtggtggaagtgttaggaagg

SEQ ID NO: 128634 - DNA, 385 bp, Homo sapiens
  chr17:40427458-40427843
  hyper
acaagtgtttgcaaccgcctcttgctccgtgtgagttctttcctctttgttcaccccgaccatcttgccagattcctttagcctcagaccagcttttgtgatacaactccccttccgactctccatatctaccccccgacaccaggagcacttttaaccctttatccctgactagaaagaaaaagcacactgcatcccacggccacacgcacgagcccaggcctggcgggtcctgatgtgggatcccgccccccagagtcttatcgaaacgttcgtatttgttgtcttgattccttataaggccctgtttcttgaagctttgctaataccccccaccgcaccaggcacccccgcaggctcatcccatccccggagtcccgggaac

SEQ ID NO: 128635 - DNA, 30 bp, Homo sapiens; identical to SEQ ID NO: 54065
  chr17:40427937-40427967
  hyper

SEQ ID NO: 128636 - DNA, 518 bp, Homo sapiens
  chr17:40428744-40429262
  hyper
tagcagggctagggcgcactgtcgtggtcgttttggttggccccctccgcggcccgcccacctctctccctgggagcccaggcccgcgttccgggtcctctcccgccgaggccgaggtcagaagtccacaggggccccgatcaataattatcctgggtttgcccccgggagggcgtctcagccagggctcctgccgcctgcatgggcacggcaggaattcacattcgcccaggccgaattcacctgtccgagttccagggtgaacctacgggggacggggcgcctggggccggttcccttcctgggaaaatctggctggctcccaccagtcagagctgcgggagggactgctctctctagagaagaaagaataaacagggtcatctgtaggatccaggggaagggggtcccccagatcctttccacgtgctgaggagggggttgcggttgtgggaagccaggctgagtcacccactctcctttcctctgctacgtctatctcccggagctggccagcg

SEQ ID NO: 128637 - DNA, 56 bp, Homo sapiens; identical to SEQ ID NO: 54067
  chr17:40441310-40441366
  hyper

SEQ ID NO: 128638 - DNA, 386 bp, Homo sapiens
  chr17:40464189-40464575
  hyper
taaaaagcaggggactcgaggtttggggaaatgatggagatgggcgcgggtgggcagaactctgacccaggcttctccttagcagctgctgctcccagcagcctcgaagctggcggctgagggcccggcgccaagatgcttctcaaccctcggggccaggggcagtcccagagccgcaacaaccgtcccatcctcctccttcccagagaccagcaggtggcaccacgcggctgcgctgttttcagctggctgccggcgactgtgcgaggcggaggtgcagcaagcgggaccggctcgccccggctggacccccgcactgccggctgcagccagtccctgctgtcgctggggcccttgggctcagggacgcgcgctccctgggcggg

SEQ ID NO: 128639 - DNA, 59 bp, Homo sapiens; identical to SEQ ID NO: 54069
  chr17:40540528-40540587
  hyper

SEQ ID NO: 128640 - DNA, 30 bp, Homo sapiens
  chr17:40540845-40540875
  hyper
agttcctggcagtgcgtgacgtcaaggcac

SEQ ID NO: 128641 - DNA, 98 bp, Homo sapiens
  chr17:40558068-40558166
  hyper
caggggaccaaacttcgggtcggagatggggttgcgtaataattgcacttgggctaaaatctctgtggtcgtccaaccctgtcctgatccctttccac

SEQ ID NO: 128642 - DNA, 51 bp, Homo sapiens; identical to SEQ ID NO: 54071
  chr17:40558226-40558277
  hyper

SEQ ID NO: 128643 - DNA, 598 bp, Homo sapiens; identical to SEQ ID NO: 54072
  chr17:40573765-40574363
  hyper

SEQ ID NO: 128644 - DNA, 183 bp, Homo sapiens
  chr17:40574657-40574840
  hyper
actttaaagttgcggcgccgcagcagctcggcctcgttgacctccagcttcttgatctgccccgcctggcgctccaggctgccgcgcacggtcttcacgttgacgctgaccttgcgcaccttctccagcagcttgctcaccgtattgctcgtggtggcgtgcgccttgcccagcttgctcagc

SEQ ID NO: 128645 - DNA, 557 bp, Homo sapiens
  chr17:40574882-40575439
  hyper
cgctcctccagctgtgcttgagtcagctggatctggtctacggccccgatgattttgtccaggaggctcagcaccagcacgccgttcacctggtccgacttgatcagctcttctgagccggcccccgacggctcctccgctgcctgagccccagcggaggaaggctccggggcctcggcgtcggggtacccgggaagcggccgctcgacaatatagagcgtggggtcctccatggctacccggagccgtgcgggaccggccgggtggggctggagctggagcgggagacccggagagaagcaggagcggaagggaggagagctagcgggcgagagcggagagcagaggaaactcgagccacgtccgtgcgcaccgggacagcggccagaactgctgggcgggggatcggtgagctccccagctcccgggccaaactccggagtctgatcgctgattggctggccccaccccagaaagggagggaccggggcagaaggggagatcgacgaggcggggcggcggagggggacccaagagccgagcgccccacccttccc

SEQ ID NO: 128646 - DNA, 116 bp, Homo sapiens
  chr17:40610750-40610866
  hyper
agcacgctgggtctcgcctgcgacccccgtgactccgcactgctgcagcccgggcgaggctgcgccccattggccaactgcaatgaggtcattgcgggggcgggggccggcggcgg

SEQ ID NO: 128647 - DNA, 30 bp, Homo sapiens
  chr17:40688123-40688153
  hyper
gtgcggtcacgagacgcccccaagggagta

SEQ ID NO: 128648 - DNA, 30 bp, Homo sapiens; identical to SEQ ID NO: 11222
  chr17:40688557-40688587
  hyper

SEQ ID NO: 128649 - DNA, 64 bp, Homo sapiens; identical to SEQ ID NO: 54075
  chr17:40713960-40714024
  hyper

SEQ ID NO: 128650 - DNA, 200 bp, Homo sapiens; identical to SEQ ID NO: 54076
  chr17:40719397-40719597
  hyper

SEQ ID NO: 128651 - DNA, 968 bp, Homo sapiens
  chr17:40760807-40761775
  hyper
aaaagaggagccctcgctcactcttgagcggctcaagatgttaccagaagctcccgccagatgtgcggggcgggggtgcgggcacaggtaaggcagagaagatgggtggacggccctgggaagaactagggtgccgaagcctgcaggcgggatggagtggaaggaggtgaggcaaaattaggcaagtacaggaaggagccagtgcagcgaagaaaacagggcaggcgagaagtagagccctagaggaaccaacgaattcgggactcggagggtttccgagggtccagttctctcaccagaaagccgcgttcagccccaggcaccacagagcgctcctagctggccgctcccacaccagggctgcctgcacccgactcagcagaggctcgtaaggccccagcacctccaccagggcccgctgcgccgcctcaacctgctggtcccgctcccaggagcctgacacatctcggcggcccctgaaagtcgaccccgaagccgggcctggggtcgtgggaaccccttcggcctcagccatctccccgcggcagccacaacatccggggccgtggcccgacaagtcacaataacagcaactgcgcagatgcgcgattcggcgggggaggtggcttcgcaccacagcgcgcttgcgcgcaggcccaagcaggcgcccacccagaggggagggaggacgccgtaccccgccctcactgaggcgcggagccggatccggaggcgccgagccgcatccggagccgcgcacgcgcaatctgcatgaacgaaggccagtgcttaaagacgtgccattcattgccagaactcgattctcattggagcggaggaagttcgtgggtggagctggttgtttggcgcctgcgtcttgcggcgagcgggctggcgtgcggcgccgttgcgggcgggagcggctgcaacgccggtgcctgaggagcgatgccgagggaaatcatcac

SEQ ID NO: 128652 - DNA, 30 bp, Homo sapiens
  chr17:40805701-40805731
  hyper
aggccgggtagagggcgggcgtggggcgag

SEQ ID NO: 128653 - DNA, 30 bp, Homo sapiens; identical to SEQ ID NO: 54080
  chr17:40827748-40827778
  hyper

SEQ ID NO: 128654 - DNA, 30 bp, Homo sapiens; identical to SEQ ID NO: 54081
  chr17:40828890-40828920
  hyper

SEQ ID NO: 128655 - DNA, 94 bp, Homo sapiens
  chr17:40829162-40829256
  hyper
cctggcgccgggcgcggctaccaatcagacggctgaaaccgcgttgggttgcatcatgtgcccctggcttggtgacagcggggaggggcgggga

SEQ ID NO: 128656 - DNA, 30 bp, Homo sapiens
  chr17:40830242-40830272
  hyper
gaccctttgaggatcggcgccgtctccggg

SEQ ID NO: 128657 - DNA, 31 bp, Homo sapiens; identical to SEQ ID NO: 11224
  chr17:40830981-40831012
  hyper

SEQ ID NO: 128658 - DNA, 420 bp, Homo sapiens
  chr17:40831604-40832024
  hyper
ggagctgagcaggaagaaaggcggggccggcgggggcagccgcggcggggttgaggccctgaggggcagctcccaccccgtagcagcctccgcaggtcctggcggaagcgcaggcccaggaaggcgtagagaacgggattgaggccacagcgggcgagggccaagccgctggtcaccagcagtgcgacatccttgcgtttgctggcagggcagctccgctcgcgcgcagccagtagatcggcagtatccagcagcagggcgaggctgtagggcagctgcagcaccacgaaggccgccaccagagccaccacgacgcgcagcgcacgccggcgctcgggccccctggcggccagcagcgtgcggcccagaagcgcgtagcaggctaccatgacgcccagcggcagcgcgaagcccagggcc

SEQ ID NO: 128659 - DNA, 14 bp, Homo sapiens
  chr17:40832268-40832282
  hyper
ggaagaggaagccg

SEQ ID NO: 128660 - DNA, 30 bp, Homo sapiens; identical to SEQ ID NO: 54086
  chr17:40834728-40834758
  hyper

SEQ ID NO: 128661 - DNA, 30 bp, Homo sapiens; identical to SEQ ID NO: 54087
  chr17:40896866-40896896
  hyper

SEQ ID NO: 128662 - DNA, 63 bp, Homo sapiens
  chr17:40897134-40897197
  hyper
ttacccgtgccgcgcggacgcactactgtcatttgccgccaaaaccccgcactcaggagtcct

SEQ ID NO: 128663 - DNA, 30 bp, Homo sapiens
  chr17:40912952-40912982
  hyper
gagtcctgggcgccacgcagccgagccccc

SEQ ID NO: 128664 - DNA, 122 bp, Homo sapiens
  chr17:40925325-40925447
  hyper
ttttaggataacagcgagggactgggtcatgacgaggactcctcctgccggtctctctctttccagaaaggcttccggaacctttctgcattgccttctgcccggacgtgcggaagcgaagg

SEQ ID NO: 128665 - DNA, 30 bp, Homo sapiens; identical to SEQ ID NO: 54089
  chr17:40925775-40925805
  hyper

SEQ ID NO: 128666 - DNA, 35 bp, Homo sapiens
  chr17:40932500-40932535
  hyper
ctgctcgcgggatccgcaccgcgggagcagctcgg

SEQ ID NO: 128667 - DNA, 60 bp, Homo sapiens; identical to SEQ ID NO: 54090
  chr17:40932938-40932998
  hyper

SEQ ID NO: 128668 - DNA, 212 bp, Homo sapiens; identical to SEQ ID NO: 54091
  chr17:40950644-40950856
  hyper

SEQ ID NO: 128669 - DNA, 30 bp, Homo sapiens
  chr17:40976405-40976435
  hyper
gcagcgggcttcagcggatgaacaaggtta

SEQ ID NO: 128670 - DNA, 57 bp, Homo sapiens
  chr17:40985216-40985273
  hyper
ggccgcaccgtttccgagtctctcggaggctcagttctcagcgcaccattccccaca

SEQ ID NO: 128671 - DNA, 192 bp, Homo sapiens
  chr17:41116340-41116532
  hyper
ctccctacacgtggcgccctcttccccaaaccgccttgccggcccggcagtctcaagtgcctcgccgtgacgccgtacctctcgggcataactgtcacgctgacaccagaacgccatacctgcaggcgtgtgaggaggcgcacgcgcagagaagcctgggagcgaacggagagcgacgtgggacaaacgtca

SEQ ID NO: 128672 - DNA, 39 bp, Homo sapiens
  chr17:41132448-41132487
  hyper
ctgaattaaattcccggggaaggcgcgccctcggggact

SEQ ID NO: 128673 - DNA, 363 bp, Homo sapiens; identical to SEQ ID NO: 54093
  chr17:41150139-41150502
  hyper

SEQ ID NO: 128674 - DNA, 30 bp, Homo sapiens
  chr17:41173868-41173898
  hyper
tgccacacccccggcgctcgcccactcgtg

SEQ ID NO: 128675 - DNA, 30 bp, Homo sapiens; identical to SEQ ID NO: 54094
  chr17:41176458-41176488
  hyper

SEQ ID NO: 128676 - DNA, 515 bp, Homo sapiens; identical to SEQ ID NO: 54095
  chr17:41196310-41196825
  hyper

SEQ ID NO: 128677 - DNA, 695 bp, Homo sapiens; identical to SEQ ID NO: 54096
  chr17:41197124-41197819
  hyper

SEQ ID NO: 128678 - DNA, 62 bp, Homo sapiens; identical to SEQ ID NO: 54097
  chr17:41199658-41199720
  hyper

SEQ ID NO: 128679 - DNA, 75 bp, Homo sapiens; identical to SEQ ID NO: 54098
  chr17:41201136-41201211
  hyper

SEQ ID NO: 128680 - DNA, 56 bp, Homo sapiens; identical to SEQ ID NO: 54099
  chr17:41203078-41203134
  hyper

SEQ ID NO: 128681 - DNA, 85 bp, Homo sapiens; identical to SEQ ID NO: 54100
  chr17:41209067-41209152
  hyper

SEQ ID NO: 128682 - DNA, 42 bp, Homo sapiens; identical to SEQ ID NO: 54101
  chr17:41215348-41215390
  hyper

SEQ ID NO: 128683 - DNA, 79 bp, Homo sapiens; identical to SEQ ID NO: 54102
  chr17:41215889-41215968
  hyper

SEQ ID NO: 128684 - DNA, 89 bp, Homo sapiens; identical to SEQ ID NO: 54103
  chr17:41219623-41219712
  hyper

SEQ ID NO: 128685 - DNA, 312 bp, Homo sapiens; identical to SEQ ID NO: 54104
  chr17:41222943-41223255
  hyper

SEQ ID NO: 128686 - DNA, 192 bp, Homo sapiens; identical to SEQ ID NO: 54105
  chr17:41226346-41226538
  hyper

SEQ ID NO: 128687 - DNA, 128 bp, Homo sapiens; identical to SEQ ID NO: 54106
  chr17:41228503-41228631
  hyper

SEQ ID NO: 128688 - DNA, 173 bp, Homo sapiens; identical to SEQ ID NO: 54107
  chr17:41234419-41234592
  hyper

SEQ ID NO: 128689 - DNA, 90 bp, Homo sapiens; identical to SEQ ID NO: 54108
  chr17:41242959-41243049
  hyper

SEQ ID NO: 128690 - DNA, 3427 bp, Homo sapiens; identical to SEQ ID NO: 54109
  chr17:41243450-41246877
  hyper

SEQ ID NO: 128691 - DNA, 78 bp, Homo sapiens; identical to SEQ ID NO: 54110
  chr17:41247861-41247939
  hyper

SEQ ID NO: 128692 - DNA, 47 bp, Homo sapiens; identical to SEQ ID NO: 54111
  chr17:41249259-41249306
  hyper

SEQ ID NO: 128693 - DNA, 107 bp, Homo sapiens; identical to SEQ ID NO: 54112
  chr17:41251790-41251897
  hyper

SEQ ID NO: 128694 - DNA, 141 bp, Homo sapiens; identical to SEQ ID NO: 54113
  chr17:41256137-41256278
  hyper

SEQ ID NO: 128695 - DNA, 90 bp, Homo sapiens; identical to SEQ ID NO: 54114
  chr17:41256883-41256973
  hyper

SEQ ID NO: 128696 - DNA, 79 bp, Homo sapiens; identical to SEQ ID NO: 54115
  chr17:41258471-41258550
  hyper

SEQ ID NO: 128697 - DNA, 55 bp, Homo sapiens; identical to SEQ ID NO: 54116
  chr17:41267741-41267796
  hyper

SEQ ID NO: 128698 - DNA, 100 bp, Homo sapiens; identical to SEQ ID NO: 54117
  chr17:41276032-41276132
  hyper

SEQ ID NO: 128699 - DNA, 214 bp, Homo sapiens; identical to SEQ ID NO: 54118
  chr17:41277286-41277500
  hyper

SEQ ID NO: 128700 - DNA, 30 bp, Homo sapiens; identical to SEQ ID NO: 54119
  chr17:41321703-41321733
  hyper

SEQ ID NO: 128701 - DNA, 30 bp, Homo sapiens
  chr17:41322477-41322507
  hyper
gttgcggcttattacgtcacagtaattgct

SEQ ID NO: 128702 - DNA, 93 bp, Homo sapiens; identical to SEQ ID NO: 54120
  chr17:41323034-41323127
  hyper

SEQ ID NO: 128703 - DNA, 30 bp, Homo sapiens
  chr17:41392649-41392679
  hyper
ccgacaaggcaaggcgcgcggacggggctg

SEQ ID NO: 128704 - DNA, 121 bp, Homo sapiens
  chr17:41393017-41393138
  hyper
gatcgccgtagccacgcctacccacgcgggaaagggcgagacatgcaaattagaaatggcgcttcagccacggggcaaaaacagagctgagaattcacttgaaaacgtagccaactataaa

SEQ ID NO: 128705 - DNA, 30 bp, Homo sapiens
  chr17:41446248-41446278
  hyper
ggccctggtaatctccgctcagtgagtggc

SEQ ID NO: 128706 - DNA, 331 bp, Homo sapiens
  chr17:41446505-41446836
  hyper
cggtagcccagtgagcgcgaccactacttccctgtgaacgcgagagctcagacaagccacagggggccagagccgagaaaccggaagaccggcgaggagaccatagcacactcccaggaaagagagcgcgagggcttgggccaggatgggggcagtgcgggggctgaggagtggccagattctgggtgtactttgaaagcagagctgatggcctttgcggacagttgggatgaggggtgagagaaaggagtggagggtgactccaagggtttggccagagcgactgccacattcagcctgggcgacaaaagcgaaactacgtctccaaaaa

SEQ ID NO: 128707 - DNA, 135 bp, Homo sapiens
  chr17:41471595-41471730
  hyper
tctttggggccctttcgcacatttttgccccacactcatacttagcgataggttgggttttctcaattttgttcatgaggaaacagaactgggatttgaaaaatgggccttcgtgattgccgagctggtaactgc

SEQ ID NO: 128708 - DNA, 167 bp, Homo sapiens; identical to SEQ ID NO: 54123
  chr17:41476227-41476394
  hyper

SEQ ID NO: 128709 - DNA, 30 bp, Homo sapiens
  chr17:41561285-41561315
  hyper
aattttcaatttaccgtaaacaaaggggac

SEQ ID NO: 128710 - DNA, 30 bp, Homo sapiens
  chr17:41623287-41623317
  hyper
cggttacataagaacgtgtgtgtgtgtgtg

SEQ ID NO: 128711 - DNA, 30 bp, Homo sapiens; identical to SEQ ID NO: 54124
  chr17:41623825-41623855
  hyper

SEQ ID NO: 128712 - DNA, 86 bp, Homo sapiens
  chr17:41624074-41624160
  hyper
gctcctccggctggcgtctgcacacgtctctgcatctgcgtgtacgtgggagtatgaacatgtctgtgtgcgcccaggagggaggc

SEQ ID NO: 128713 - DNA, 550 bp, Homo sapiens
  chr17:41723352-41723902
  hyper
tgggtgccaccgttccgggaactcgagaaggcgggggaggggcccgatagtcccggtgcccgggtcaggggtgtcgtggcaccctggcccgggggtccgcgtccgatccgggttggccgcccgcggggcgcgcccggggagcagggcagggggccgagttcctggcgcgggctgcctgcccggcggcctctggctccaggccggagaaggcaggtccagacccctccggaagcgggagcgtgggcagcagggaaggacgcgcagccccgggccggggtccccgaggagccctccggccttggccgccgccagcgccgcgccccctcctggcagcgggccggggagggtcggtcacgagcggatgacgggcttcccggagcacagcccggcccacgggcccggagagaggcaggaaacccgggcttagacgacgggcgcggtcggggactggtttcccaatcttctcccgtcccgaggcttagtgtttcccagcccttcctttccacggttgcggggagtggatagcccagaggaccgcagaggcttgaat

SEQ ID NO: 128714 - DNA, 195 bp, Homo sapiens; identical to SEQ ID NO: 54128
  chr17:41790828-41791023
  hyper

SEQ ID NO: 128715 - DNA, 258 bp, Homo sapiens; identical to SEQ ID NO: 11232
  chr17:41791085-41791343
  hyper

SEQ ID NO: 128716 - DNA, 77 bp, Homo sapiens; identical to SEQ ID NO: 54130
  chr17:41791412-41791489
  hyper

SEQ ID NO: 128717 - DNA, 30 bp, Homo sapiens
  chr17:41823001-41823031
  hyper
gatccccagcgcatacgtgaggacgatggc

SEQ ID NO: 128718 - DNA, 12 bp, Homo sapiens
  chr17:41832684-41832696
  hyper
cggtggggaggg

SEQ ID NO: 128719 - DNA, 142 bp, Homo sapiens
  chr17:41832729-41832871
  hyper
cggcctggttggctttggcgctccgggcgcggggccgcggcttccggcccttctgcggccgagcggcctcggtcccgaagtccttgagctccgactggttgtggaagcgggtgaggcgcttgcacttgcacgaggccaccag

SEQ ID NO: 128720 - DNA, 30 bp, Homo sapiens
  chr17:41856223-41856253
  hyper
gtagcagccgctgccgtccgagagcaggtc

SEQ ID NO: 128721 - DNA, 30 bp, Homo sapiens
  chr17:41856553-41856583
  hyper
taaactggcaagcgcggtaacttccttccc

SEQ ID NO: 128722 - DNA, 657 bp, Homo sapiens
  chr17:41910021-41910678
  hyper
gagccagcccgcagcgccgagccccggtgccactaagaggcgtaagagcggccccgggccctccagcctccgccccgccccgccccgccacgccacgccggactcaccctcgggctgctccccgcaggaggccgagcaccgactcccgctcgctctccgaaggaacctgtgggagaacaaggagcgcactgggcgcaggagcagcgaccccgggggacctcggagggcggtcccggaggacgcggagcagcagggagcggggggcgcgcggcggggcgggcgcgggaagagggaggcgggggccgaggggcggggttgagactcccgcggtgggctcggtgggccgcgaggctgtccgggagcacgggaggagggtctcggcccggcctcccgcccctcccgccgcggcgcccagctccctcgtccgttcccctcgcggcctcctacctcgtcgcgccgggatgtgtgctccgcgaacgggagccgcgcgagtgcccagagcctgggccgccgctggctccgccttcccggacccctccctgcggctgccgcgccgggcgggggtggcggagcctgaggaggcgcggcgcggggaggaggcgcggcgcggggaggaggcgggggaggagcggaggccgccctccgcgtctggcaccg

SEQ ID NO: 128723 - DNA, 283 bp, Homo sapiens; identical to SEQ ID NO: 54132
  chr17:41910700-41910983
  hyper

SEQ ID NO: 128724 - DNA, 297 bp, Homo sapiens
  chr17:41977936-41978233
  hyper
ggggactcccggagcgtcctacacgccgccgtctaccgcctccccagccaaagcctggccgggctggggaaggcgggagtcgaggagcgccctctgaggaaccagccaatgggaaggctcagccgccgtgaccgccttgctgattggctaaagccctgactggcgctgcgcggtgcagagcaggcggtaacccgggtgggagaagagtggtgggagggagccctagtcccacagattgcccgatccccagcatgtcagtgtcggtggggatggggaggaggcggctaacaggaagtt

SEQ ID NO: 128725 - DNA, 174 bp, Homo sapiens; identical to SEQ ID NO: 54134
  chr17:41984003-41984177
  hyper

SEQ ID NO: 128726 - DNA, 891 bp, Homo sapiens; identical to SEQ ID NO: 54135
  chr17:41984410-41985301
  hyper

SEQ ID NO: 128727 - DNA, 30 bp, Homo sapiens; identical to SEQ ID NO: 54136
  chr17:41986293-41986323
  hyper

SEQ ID NO: 128728 - DNA, 364 bp, Homo sapiens; identical to SEQ ID NO: 54137
  chr17:41995083-41995447
  hyper

SEQ ID NO: 128729 - DNA, 30 bp, Homo sapiens; identical to SEQ ID NO: 11239
  chr17:42005404-42005434
  hyper

SEQ ID NO: 128730 - DNA, 452 bp, Homo sapiens
  chr17:42015410-42015862
  hyper
gtcccttaaggcgtccgtgctctggtgtgtgtcccagaaatagacacgaccctcggtctgagcgcccctgcaccccagcctgcccaccgcgcggaacacctgcaagctccggtccgggtgccgcgctgaccacagccccggcatcacgtgacctcccgcggctctgtctgccccgccccctccagacgcctgctctgcgctgcgcattcgctctggccatagcgggcctcgtgtcgctgctgatgcagcccgagggcgccctcggcgaggagctgcaagtgccgcagcccagggccgccagttggctgaacttaggctccatcaagaagtacttggggaagctcttcaacagcaggtgggccggcggagggtgtgaggaagggagggagggagggaggaaagcggggggtggggggggcgcgggggggggacacggacgccaccaggcaccc

SEQ ID NO: 128731 - DNA, 506 bp, Homo sapiens; identical to SEQ ID NO: 54140
  chr17:42030244-42030750
  hyper

SEQ ID NO: 128732 - DNA, 107 bp, Homo sapiens
  chr17:42030779-42030886
  hyper
cgcccctaggcagacgagcagggccagaagcactgtggtcaaggcgggccacggcctgcgcacgaacaccatctgggaaggcgacattgggacgtgggtcattccaa

SEQ ID NO: 128733 - DNA, 558 bp, Homo sapiens
  chr17:42061025-42061583
  hyper
tcaacaagctcagacacccaacgctccccggggccgggtcttaggcgcacattggctcgcggtgcacgtccactctcctgtaggctcgtgcccttgacatatccggggctgtcacagtcccatgccccgaccccgaccccgcgcgagtctgcttgatgacgtcgctgtcgcaccccaccggcctccccgggtcctccccaggcgcgcgcaggggccgcgtgtccggtgccggccgggctgagtgttccgaggcgagcggctgctgtttgcgcagctaagtggcgtctgtgtacccagcggggcgcagcggtcgcgcgcttatctcccgcaaacaccgcgcccggatccgccggaaccacggccgcgccgccccatttgcacgccccggccgccggaggcccttatcgcccgcgtttatcgggccatcgctgataagaaaccgagggggcggcggggcggcccctctccttggatccaagaagcgatggggtcgctgttagggggggcgccagccccggggatgcggggagccttcgcagcctccgggtcagccctgct

SEQ ID NO: 128734 - DNA, 126 bp, Homo sapiens
  chr17:42072189-42072315
  hyper
ctgcctgggcccaacgaacgggagggcgctggctggggccgggggtggccagggccccgggggaaaggcggtaagcatgagcaagagggtatcaggagtcgccccagcctcgccgccccggggcgg

SEQ ID NO: 128735 - DNA, 2131 bp, Homo sapiens
  chr17:42081911-42084042
  hyper
cccctgtccggaccccgccccgaccaggtccagccccgcccaacggcaagttaagagccccccagtgccagacgctccagacagactgccactcttggggggcaagagttggttgtcgtcatggcgacggcgctgatggctgtggttctgcgggcagctgctgtagccccgaggctgagaggccggggaggcactgggggcgcccgaaggctgagctgtggcgcgcggcggcgggcggcgaggggcaccagcccggggcgccggctcagcaccgcctggtcgcagccccagcccccgcccgaggagtacgcgggcgcggacgacgtctcccagtcgcccgtcgccgaggagccgtcgtgggtgccgagtcccaggcccccggtgccccacgagtccccagagcctccttcgggccgctcgctggtgcagcgggacatccaggccttcctgaaccagtgcggggccagccctggggaggcgcgccactggctcacgcagttccagacctgccatcactccgcggacaagcccttcgccgtcatcgaggtgagcggagcccggcgtgggccgtgacgcagcgaggggatggggttgtgcggccacctgtcctcaggcatggcaggatacgctgcgggctctgcgcagcggaagcgggaaggagcccggcagggcccagaccagcgccgccgggaatgggagaggccgtaagctcctccggaagcctcccgcccagcccgagtgaggatcctgggggaccccacccgccaggtgtgatgctctgaagaaggcccccaacatgggcgcagttaggggttcagaaggacctggacaggagccgcttgcactgcccctcccccaaagatgtcccggagtccaaggtcggagggaggagggcgggaggtaccccagcgtgagacaagggagtggcaagacccaacggggcaaagggcggagcaggtgggcactggtggccagaactgggtcctgacagcttctggaagggtagggtcaccgagacggccctgcaggccaggctgtgggagccagcggctcaggtccgtgtcacgctccttgaaagcccactcctccgcaggtggacgaggaggtgctcaagtgccagcagggcgtatccagtctggcctttgccctggccttcttgcagcgcatggacatgaagccgctggtggtcctggggctgccggcccctacggctccctcgggctgtctttccttctgggaggccaaggcgcagctggccaagagctgcaaggtgctggtagacgcgcttcgacacaacgccgccgctgctgtgccattttttggcggcgggtctgtgctacgcgctgccgagccggctccccatgccaggtgagtgcccgccctgcccgcccaggcgtcctcagagcgtgctactctgcccgccctgccccgtccggcaggcctggagggggccctctcgagcaccacgtctggcccacagctacggcggcatcgtctcggtggagacagacctgctgcagtggtgcctggagtcgggcagcatccccatcctgtgccccatcggggagacggccgcgcgccgctccgtgcttctcgactccctggaggtgaccgcgtcgctggccaaggcgctgcggcccaccaaaatcatcttcctcaataacacaggcggcctgcgcgacagcagtcataaggtgcggccctttctttcaccttcccccacgccggcgatccgggccttctcttgcgcccctcgcacttctccccgacgggccgcagactcactagcaagccgggtgggtagaaaagcctaagggagtataggggaggagttcagccctgggtgcccagatctgcgccctccctggctaaggactccgggcggaagtaaggataaaggggtcagagaaaagagaggtccgtgggggtaggggggcagtccgtgccggctgtgggccaggctcacccgctgactccggacacaggtcctgagtaacgtgaacctgcccgccgacctggacctggtgtgcaacgccgagtgggtgagcacaaaagaacggcagcagatgcggctcatcgtggacgtgctcagccgcctgccccaccactcctcggccgtcatcaccgccgc

SEQ ID NO: 128736 - DNA, 846 bp, Homo sapiens; identical to SEQ ID NO: 11243
  chr17:42091702-42092548
  hyper

SEQ ID NO: 128737 - DNA, 30 bp, Homo sapiens
  chr17:42143587-42143617
  hyper
cacccactgatcctcggtaaagccccagct

SEQ ID NO: 128738 - DNA, 30 bp, Homo sapiens; identical to SEQ ID NO: 54146
  chr17:42143859-42143889
  hyper

SEQ ID NO: 128739 - DNA, 30 bp, Homo sapiens; identical to SEQ ID NO: 11244
  chr17:42148055-42148085
  hyper

SEQ ID NO: 128740 - DNA, 30 bp, Homo sapiens
  chr17:42148577-42148607
  hyper
ctggtccccacccccgagggccctgagtca

SEQ ID NO: 128741 - DNA, 562 bp, Homo sapiens
  chr17:42200350-42200912
  hyper
ccccctcctcatgcacggaagtcaaggacataaaatcaaggatgcgttcgtagctatggggagaagcgctctgggtggacagcacccctcacctcagagtaccaagaaaggggtgtccagcgaagaggggtctgcacagaatccgggtgcagggctcaaatggctctgcaacgcaacatgcgccgccagggaaggggcaaatcagacaaccccggccggtctccgagccatttgggggcgcagggcgcgagaaggcgggcccctcccttacctgtagggaaggcgcccctgtctgggaggggcagggaggggcgcgcgcagcaaccccgatgtcccgctcacgggctgccgatgctcccggggggcgccggctggctcccagggccgggaggaaggaaggggggcgcggagcgcggcgcgcgcgctgggagcccgcggacagagacagcaggaggagggggcgccgcctcgcgtcccggggtccggggaagatgggatctgggccggggcggcgcgctcacccgctgcggctcgagctccggcttcgcgggcggcggcggca

SEQ ID NO: 128742 - DNA, 209 bp, Homo sapiens
  chr17:42200973-42201182
  hyper
cctccggctccgctcgccgccgccaccaacaacaacattcggagacgtcactcccgtcacgtgacccgacccggagctaaaaatagacccagaccccccccccagccccccccgccttccccttgcccgcagccaccaccaacccctcccctgcctctcggccctccccgccgggcggggccagcgacgccatcgtgacagctccttaa

SEQ ID NO: 128743 - DNA, 129 bp, Homo sapiens
  chr17:42219139-42219268
  hyper
agtgctgaaccagccgactgggaagaggagccgcttgggggcgaccgagagcccatccgtttcccctttaagaccagagcggaagactacagtgagaaggccctttgtgtcggcgggaaagaaatatgc

SEQ ID NO: 128744 - DNA, 170 bp, Homo sapiens
  chr17:42263791-42263961
  hyper
ttgaaatgctttcccgccttctttctccgggtcccacactacctggggccgcactcttcaagcactggatgctgactaactggtctccttatctgtcttcccgactggcccagagctgagttcttactaatccccgctaacctggagttaggtgcgcgttgcaaagcagt

SEQ ID NO: 128745 - DNA, 112 bp, Homo sapiens
  chr17:42264410-42264522
  hyper
cccctacggaaagacgagtccaggggccgtcctggcgaggtcaaaacatttagtctggtcttttcaggtgaggacttccccatccaggcacagtgccggtccaatccccctt

SEQ ID NO: 128746 - DNA, 30 bp, Homo sapiens
  chr17:42276025-42276055
  hyper
agcctgccactccacgaggggagcagagcc

SEQ ID NO: 128747 - DNA, 509 bp, Homo sapiens
  chr17:42287798-42288307
  hyper
ccgactgagccttgagcgccgcctctcgggccttgtacttggcctgcggggatggcccgggcgtcagccttccacccacccccagggggcgcgcgctccccgcgcagcagcccaggcgctcccgccggcgggcagaagcatgggctggtgcagatgtctcccgcctggggctcgcccccgcctggtctgcggcgctcagctgacagcttcccgccttccggctgctgggcgccggccccacgtcccagcccaggcaccgcgtggctcaggcggccaggggcgaggtggcacggcccgccaaggggaagagggggccctggcagcccccctgggggcacagcgctccgccaggcagcctgaccttcttcttctcagacaggtcgttccacattcgggccagcaggcgggtcagctcgctctcggagagctcaggccgctcctcctgcagctgccgccgtttctcctccgagaagatgaacatggccgacacgggccgcttgggcttctcg

SEQ ID NO: 128748 - DNA, 150 bp, Homo sapiens
  chr17:42295576-42295726
  hyper
gcagtcggcttctccgttcatcctccagctgtccagccacctcctcggtcgtgctggccgggcaacccggggtcaaagccacctcaccctttggaagacataccagttcccactcaggaaggctgagaggtgaacgactaacgactttct

SEQ ID NO: 128749 - DNA, 202 bp, Homo sapiens
  chr17:42297964-42298166
  hyper
tccggcggaggggccgctgtgggagccggttcaatccagcccggcatggttctccaggcctgcccgggcgcatgaagatcggcgccgccgccactcgtagcaacccctctcccccgaaatccgcggctcccgggctcacttaccgagcgtgtggatgggagcgcaggccgggggcacctgggagcacggcgggccgaacagt

SEQ ID NO: 128750 - DNA, 615 bp, Homo sapiens
  chr17:42298855-42299470
  hyper
agacggcgtgaggccggagggggatttgcaaggaaacctgcctgcttcccgctcccattgctccatccccgctgcctcctgcctcctgcttctctcctgcgtctttccaactctcccctgtcgccactggtgtgtgtctgagtgtgtgcgcggttttttttttttaattgctctttgcttttgcaaccctgaagcaaaagggggggggggtagttacagggaaaaaaaaagcgagaaagaagctcttagatttgcaacacatcggaaaaccgggggagcaccccgccttatccgatctccatgctccgcaagggccttccgggttttaggacaagcttctcaatgtcccgtttcgctgggtttaggatccgaggagtccgagcaaaaagttctccccctgggtcgtagtgacgggtgtcggggtgggagttgcggggatttttcaagaagcagcagctaccccggcgtcggtcactgggccggggtaggggaaagagcaaaatcccagtgggtttgcgcgagggatcttctagggtcgaggcgggtgtggggggagttggaaccgggagacaccgcttggcgcatctctccctcggtctctacctcctgtcctat

SEQ ID NO: 128751 - DNA, 276 bp, Homo sapiens
  chr17:42299536-42299812
  hyper
taccggcgtcacacccggaccagccaatccccgccacgcaatcagcttgtcaaaaagcctcggccatccctaggaaagcaggccgcaggcgctgccccccggcggcggcgggcagccgcgaggggagcccagcacccggttctcgctgccccgggtggcagcggggcagcctccgacaagacgtcccttggttcactgtcctgcaggccggggatgaaaggcctggacagggtccaccacccactctcccactgccacggccgtggttgactgtct

SEQ ID NO: 128752 - DNA, 125 bp, Homo sapiens
  chr17:42385179-42385304
  hyper
caacgcggcaatgccggcagccaaggggttaaccttaggccagctggctctggggtggtgcgagggggtgggccgccaccccctccggttgccttggcaccattgtaggcgcctgctctgctgct

SEQ ID NO: 128753 - DNA, 233 bp, Homo sapiens; identical to SEQ ID NO: 54155
  chr17:42386108-42386341
  hyper

SEQ ID NO: 128754 - DNA, 55 bp, Homo sapiens
  chr17:42392355-42392410
  hyper
cctacctaaagttcacgcagaggtgagcggctccatgactgcggcggggcggggg

SEQ ID NO: 128755 - DNA, 247 bp, Homo sapiens; identical to SEQ ID NO: 11247
  chr17:42392465-42392712
  hyper

SEQ ID NO: 128756 - DNA, 86 bp, Homo sapiens
  chr17:42392912-42392998
  hyper
gcggcgcagaaccagcgcgagaaacgggagctggaaggcgtgatcctggagctgcaggagcagctgtgagcgcacggcctgcccta

SEQ ID NO: 128757 - DNA, 30 bp, Homo sapiens
  chr17:42393347-42393377
  hyper
accgtcatcatccgccgtgacccccgacct

SEQ ID NO: 128758 - DNA, 235 bp, Homo sapiens; identical to SEQ ID NO: 11249
  chr17:42393843-42394078
  hyper

SEQ ID NO: 128759 - DNA, 403 bp, Homo sapiens; identical to SEQ ID NO: 54159
  chr17:42402709-42403112
  hyper

SEQ ID NO: 128760 - DNA, 63 bp, Homo sapiens
  chr17:42422394-42422457
  hyper
tgggttaaggaaggcgacgagcaccagctgccctgctgaggctgtcccgacgtcacatgattc

SEQ ID NO: 128761 - DNA, 30 bp, Homo sapiens
  chr17:42423010-42423040
  hyper
ggtggttcccgcggcggcctggagccggag

SEQ ID NO: 128762 - DNA, 153 bp, Homo sapiens; identical to SEQ ID NO: 11251
  chr17:42441041-42441194
  hyper

SEQ ID NO: 128763 - DNA, 45 bp, Homo sapiens
  chr17:42441402-42441447
  hyper
agggtcccatcacccgggttcttgggtttcgagagtccccaaaat

SEQ ID NO: 128764 - DNA, 150 bp, Homo sapiens
  chr17:42462943-42463093
  hyper
gctcagggtgttcccgcgacagggggagtactcggcgcggcggccgctctctggctgagccaaaaagcagctacctacgggcgtcttctcagcctcctcagtcttttctaggacgttccagtgctgccagggggcgcaggcctggagaaa

SEQ ID NO: 128765 - DNA, 30 bp, Homo sapiens; identical to SEQ ID NO: 54163
  chr17:42579637-42579667
  hyper

SEQ ID NO: 128766 - DNA, 30 bp, Homo sapiens
  chr17:42580509-42580539
  hyper
ggtgcgaggagatgcggcctccctcaagcc

SEQ ID NO: 128767 - DNA, 30 bp, Homo sapiens
  chr17:42581065-42581095
  hyper
ctgttgctcacttccgggtgtcttttctca

SEQ ID NO: 128768 - DNA, 446 bp, Homo sapiens
  chr17:42633724-42634170
  hyper
aaaattccctcaaacgttcgtcaggcctaagagagtcgtcccttcactcaaaattgcccgtcaccccccgccccccaccattaactttcgattaagacctcctccttagggcaactaaactttactttgcacaattaagatttgccgcagaagaagcgggagggagaagccgcagctccgggccattctcctttccctcgctccctccaagccccccgccccaaccctccagctccgggcctccgagttcctgagttttctcactttgaggtgccaccgaacacaaagaaccataatgggctcctttgtgttggctacggggcaattacgcctcggagtcctggtccctttaagagtctcttaaagagacaggatcccatttttcagagggttttttaagggtgtgtggagggggagggcgagggatctacgtgtaaagtgaagtg

SEQ ID NO: 128769 - DNA, 30 bp, Homo sapiens
  chr17:42634399-42634429
  hyper
tcccccgatctcgccgcggcaactccggag

SEQ ID NO: 128770 - DNA, 892 bp, Homo sapiens
  chr17:42635072-42635964
  hyper
ccctgccccgcctgctgctgccgctgctgctgctgcccgccgccgggccggcccagttccacggggagaagggcatctccatcccggaccacggcttctgccagcccatctccatcccgctgtgcacggacatcgcctacaaccagaccatcatgcccaaccttctgggccacacgaaccaggaggacgcaggcctagaggtgcaccagttctatccgctggtgaaggtgcagtgctcgcccgaactgcgcttcttcctgtgctccatgtacgcacccgtgtgcaccgtgctggaacaggccatcccgccgtgccgctctatctgtgagcgcgcgcgccagggctgcgaagccctcatgaacaagttcggttttcagtggcccgagcgcctgcgctgcgagcacttcccgcgccacggcgccgagcagatctgcgtcggccagaaccactccgaggacggagctcccgcgctactcaccaccgcgccgccgccgggactgcagccgggtgccgggggcaccccgggtggcccgggcggcggcggcgctcccccgcgctacgccacgctggagcaccccttccactgcccgcgcgtcctcaaggtgccatcctatctcagctacaagtttctgggcgagcgtgattgtgctgcgccctgcgaacctgcgcggcccgatggttccatgttcttctcacaggaggagacgcgtttcgcgcgcctctggatcctcacctggtcggtgctgtgctgcgcttccaccttcttcactgtcaccacgtacttggtagacatgcagcgcttccgctacccagagcggcctatcatttttctgtcgggctgctacaccatggtgtcggtggcctacatcgcgggcttcgtgctccaggagcg

SEQ ID NO: 128771 - DNA, 30 bp, Homo sapiens
  chr17:42636222-42636252
  hyper
catgggccagatcgacggcgacctgctgag

SEQ ID NO: 128772 - DNA, 61 bp, Homo sapiens; identical to SEQ ID NO: 54166
  chr17:42733683-42733744
  hyper

SEQ ID NO: 128773 - DNA, 202 bp, Homo sapiens
  chr17:42766992-42767194
  hyper
gtaggctccataaacggctcggtccactcccagtgcctccaaccgtccgtccagccaggagccaaagccgccgcctccgccatcgccttcgccaggggctatcgcggccacttcgctgggcgccgccatcttggggtcagggtcctgcaagcccctagggcgcctaccgcagtgcctgacgggccgcgccgcaggtccaccg

SEQ ID NO: 128774 - DNA, 30 bp, Homo sapiens
  chr17:42852675-42852705
  hyper
caaggtaccagccccgcggcggggagcatg

SEQ ID NO: 128775 - DNA, 30 bp, Homo sapiens
  chr17:42852987-42853017
  hyper
tgcaccctgactcacgacgccatgtgcagc

SEQ ID NO: 128776 - DNA, 30 bp, Homo sapiens; identical to SEQ ID NO: 11255
  chr17:42853596-42853626
  hyper

SEQ ID NO: 128777 - DNA, 1173 bp, Homo sapiens
  chr17:42906457-42907630
  hyper
tactcgatttcacatcgtcttgatgctaacaaaattaagcatgagcataatgaaatcggtatcactgccagttctcaatgaacaaaaagaaaaccaaattcgcccatttcgcaaaggaaaagtactcccaatcagacaatcgcaaaaaaaagaacaaaatctaaaccatacattcacgtacatcttttcaactcagagctccaaacgcagccgccaaccacacaactgcccacaatcacagcggtagcgcctactcttaattttgaagctagagacttaaggaaacacacacacacacaaaacagttctcaagtttgacaaagtgggggaaaagtcattttaagtaaagacaacgagttaatcaggaggcgatgagcccagtccttccgccccgctttcccgcttccagccctcgaacgaaccctcctctaacccccgggaggcaggagttccagcggggagatgcgggaagcctcagacgagcccgcacgccgccggagacgcagggatcgaggtcggggagacaaagagcagcccgcgaagagcccgggcggcgaggggcggcccggctccgccctgcgcccctaaccgcccgggtagttgtcggcaccgccggggcgccgccgagtgcgcgccgcttctgtccgggctccccgaccgtcgcccgacacctccgcggcccaggacacccccgagccgtttccctcccgatttgggagccgcgcgcctggggacaaagagggagggtgcgccggggacagtggcaggacgcgggccggcgacgcccctccggactcggcgggaacccctcggcggcgcccccctccttctcccgctctggccgcgctcctccccggacctccggaggttctcctcggcccctccccgggctccccaagagttctcccgcctccccctgggaccccgcccctggcccgcttctcctcagccggccctgcggccgcccctcacccggcggcgggttcccccggagccgcctcctccgccgggcctcggcccgtcccgccggtcgcggcctcatgtgccccgcgtcgccatcgccttcaccctcgcctctcctccacctcctccgccgctgccgccttcgcctcagtctccagccgaggcagaagccgctcccgccgctgccgccgccgccgccgcctcccgctc

SEQ ID NO: 128778 - DNA, 498 bp, Homo sapiens; identical to SEQ ID NO: 54169
  chr17:42907654-42908152
  hyper

SEQ ID NO: 128779 - DNA, 30 bp, Homo sapiens
  chr17:42976427-42976457
  hyper
gaagaggaagtgagcgaggggactggacag

SEQ ID NO: 128780 - DNA, 45 bp, Homo sapiens
  chr17:42977087-42977132
  hyper
ggcaaccacagctgcgggcgtggtctgcgcggggttgccctcctg

SEQ ID NO: 128781 - DNA, 326 bp, Homo sapiens
  chr17:42988668-42988994
  hyper
attgagcaggtcctggtactcctgcaagtggcgggccatctcgtccttgaggctctgcccctcttcctccagccgcgccagcgcctcctgataactggccgcctcccgcacgtgccgctcctcctgctcgcgcatctgcctctccagggactcgttctgtgggatggagccggccggtcccgcggagccccgacccgacttggggaggtttcgaggcccggcccccggccccaggccccgcctctagcccgggggtaacgttcaggccccgccctcgacccaggtcctcgtccctggcccttctcccctggcatctcctggggtgg

SEQ ID NO: 128782 - DNA, 110 bp, Homo sapiens; identical to SEQ ID NO: 54172
  chr17:42989016-42989126
  hyper

SEQ ID NO: 128783 - DNA, 350 bp, Homo sapiens
  chr17:43025008-43025358
  hyper
tccgccgctggcgtcgctgcttgctcacgggtcccacagccacaccacagacagcagtacccacaccgggagagagcgccccacaccctcccctacccgcgccaacctccacccggcgccttgcgttcaaattagccgggcgggccggaccgtgcttcctattggtcagcgtccgtatcgctgattggctgtttcctaagtaacaaagtgttgcgagagccgttcacagtgggcttgctcacttcctcttcctgtcggctgcagtttcccaggcggtgtctccggggttgggcacacgagagtagcgggcagaagccaacgcagggttgggatacgtggggccacagcca

SEQ ID NO: 128784 - DNA, 23 bp, Homo sapiens
  chr17:43028038-43028061
  hyper
gccaccgcgcctggtctactttg

SEQ ID NO: 128785 - DNA, 30 bp, Homo sapiens
  chr17:43037792-43037822
  hyper
gaggtgaggcagtcccgtgggggaggatca

SEQ ID NO: 128786 - DNA, 418 bp, Homo sapiens
  chr17:43044388-43044806
  hyper
gcgcctaggcgcccgcgggcgcggatgctgcttctccctgttccatacgccagagcccatccttgccctccccttatcgcccactgctgtcggcccgaatccacttcccaaggggcaagcccccaagggcaagtccgtgcacctgggagccctgcgctctgactagttgggttcatttcccgcatttccagtagcgttccagacggtgcccagcagcgtctgtcttggagcgggaacccaggaactgaggatcggcgatgtccgctggctccgaccatccccacacgtgatgaccaagcggggccgctgtggggtgggatctccacctgcgtccgcctggcgcccccgccaactccgatcaggtacccatttgccccgggctccctgggtgccctgggcccagcccagccccatgccc

SEQ ID NO: 128787 - DNA, 5 bp, Homo sapiens
  chr17:43044863-43044868
  hyper
cgccg

SEQ ID NO: 128788 - DNA, 227 bp, Homo sapiens; identical to SEQ ID NO: 11263
  chr17:43045038-43045265
  hyper

SEQ ID NO: 128789 - DNA, 201 bp, Homo sapiens; identical to SEQ ID NO: 11264
  chr17:43045371-43045572
  hyper

SEQ ID NO: 128790 - DNA, 7 bp, Homo sapiens
  chr17:43047918-43047925
  hyper
cgtctcc

SEQ ID NO: 128791 - DNA, 5 bp, Homo sapiens
  chr17:43099552-43099557
  hyper
gggtc

SEQ ID NO: 128792 - DNA, 30 bp, Homo sapiens
  chr17:43129614-43129644
  hyper
cagggtcctaacttcggatataaagctcgg

SEQ ID NO: 128793 - DNA, 31 bp, Homo sapiens; identical to SEQ ID NO: 11266
  chr17:43209588-43209619
  hyper

SEQ ID NO: 128794 - DNA, 30 bp, Homo sapiens; identical to SEQ ID NO: 54181
  chr17:43210088-43210118
  hyper

SEQ ID NO: 128795 - DNA, 170 bp, Homo sapiens
  chr17:43212858-43213028
  hyper
cgggctgggaagtccgacccttcgattaagccccgcctgattgggaaaggctctgagaaactatttgcatgatcttgaaagagctgtgctgaatggttgaggtaggtaagccgaatgtgaaacaggctctctcattggcctaaattccccccctcgatctgcgtcgccat

SEQ ID NO: 128796 - DNA, 30 bp, Homo sapiens; identical to SEQ ID NO: 54183
  chr17:43213255-43213285
  hyper

SEQ ID NO: 128797 - DNA, 30 bp, Homo sapiens
  chr17:43225212-43225242
  hyper
ttacaaaatgtgctcgcgatatccttccgc

SEQ ID NO: 128798 - DNA, 30 bp, Homo sapiens
  chr17:43227142-43227172
  hyper
aagggccagccggtcgcgccctataacacc

SEQ ID NO: 128799 - DNA, 30 bp, Homo sapiens; identical to SEQ ID NO: 54184
  chr17:43237960-43237990
  hyper

SEQ ID NO: 128800 - DNA, 179 bp, Homo sapiens; identical to SEQ ID NO: 54185
  chr17:43239155-43239334
  hyper

SEQ ID NO: 128801 - DNA, 30 bp, Homo sapiens; identical to SEQ ID NO: 54186
  chr17:43275449-43275479
  hyper

SEQ ID NO: 128802 - DNA, 31 bp, Homo sapiens; identical to SEQ ID NO: 11268
  chr17:43278126-43278157
  hyper

SEQ ID NO: 128803 - DNA, 325 bp, Homo sapiens
  chr17:43298576-43298901
  hyper
ccactggcctgcgtccgcgccccccaccctgtttaggagttcctgtttggagatggctccccctcgtcctcagctcgtctctgggctaagcaggggaggagagaaataaaaggtggggggcctggaagggggttcccaccttctcagtccgggacgcgagacgggaacgcagccctggcgccccaacgctgcaccaccgtgggtctccgagccgtgctcgcagtcgctgagatcctcggtgcggagaagatgtgcccctccaatccccaggccgtgatccccttcacccagacccggccaatccctcgcccgaggcgagcgggag

SEQ ID NO: 128804 - DNA, 30 bp, Homo sapiens
  chr17:43299183-43299213
  hyper
gaggggggagccagcgccgcagcttcctgc

SEQ ID NO: 128805 - DNA, 73 bp, Homo sapiens; identical to SEQ ID NO: 54189
  chr17:43324280-43324353
  hyper

SEQ ID NO: 128806 - DNA, 876 bp, Homo sapiens; identical to SEQ ID NO: 54190
  chr17:43324795-43325671
  hyper

SEQ ID NO: 128807 - DNA, 298 bp, Homo sapiens
  chr17:43339109-43339407
  hyper
gtccctactccaaggcgcgcatgcgtgtccgtgagagcacatgggtgtgcaccgcgcaggggctgaggctgggagccgtagtcaggggcaccgggtgggctttggcggcgggtcgacctgcctttcaggtgccgggggtttgggagcaggggaacgggccctgggcggattcctgaccgcccccttcgcgcccctccccctctcactttcgctttccccgcctgccccaaccctcgcccccgggcgctcggccgctcccacctgtcacccccatgcagaccgaggctctgtcctggag

SEQ ID NO: 128808 - DNA, 370 bp, Homo sapiens
  chr17:43339475-43339845
  hyper
cgctggaaatattagaggcgccggtgcctgtgatgtcgccgcctctgtgacgtccccgccgcgaccccacaggcagggagccgcatttaggtttcgggcgggcggacgggggacggcccgagtgaggcgtcctccgaaggctgcgggcccgaagccagaactccttcctctccgaagacctcgggggtggggctcgcgcttccgcagcgggcctagagcgagaggcaggcggcaggtaagcctggctgtgctggacaggacttgcacccgctctgcacgccagcggctcagggctgccgcccttttcgtggtcccagggcccttccaagaaccggctaaaccaacccaagccgcgcgcacacacacttgt

SEQ ID NO: 128809 - DNA, 30 bp, Homo sapiens
  chr17:43362239-43362269
  hyper
gagcctctgcccaggcggagctggtgcgtg

SEQ ID NO: 128810 - DNA, 70 bp, Homo sapiens; identical to SEQ ID NO: 54193
  chr17:43974329-43974399
  hyper

SEQ ID NO: 128811 - DNA, 115 bp, Homo sapiens
  chr17:44849685-44849800
  hyper
ggtggtgacttaaaacgttcaacgcggagtgaatgggtagcgctcccagagccgctttcccctggctcttggccggagacgggaagagcgatcagaggtgactcgcttttgggga

SEQ ID NO: 128812 - DNA, 94 bp, Homo sapiens
  chr17:44849831-44849925
  hyper
cgctacctggcccgaggaggggcaccggaaagcgctgagaccaacacaccgacaagaacgagtttgaaatgcaaaccgccgccacttggcccca

SEQ ID NO: 128813 - DNA, 289 bp, Homo sapiens; identical to SEQ ID NO: 54196
  chr17:44919153-44919442
  hyper

SEQ ID NO: 128814 - DNA, 30 bp, Homo sapiens
  chr17:44928512-44928542
  hyper
gggcggacaatgacccgggttttccaccga

SEQ ID NO: 128815 - DNA, 352 bp, Homo sapiens
  chr17:44928882-44929234
  hyper
ctcctttcccagcgccgcctgccccgccccacccgggtttaaagtcccgcgggcgggtggtggcggagctgcgagcttgagcggcgcgaggagatgctagagggcgcagcgccgccagcaccatgcgccccccgcccgcgctggccctggccgggctctgcctgctggcgctgcccgccgccgccgcctcctacttcgggtcagtgcccgccgcgccccccgcccgctccccggcctgcctgtctctccctcctgcgctacagctgggccaatttttccctcccgctgtccttggccccgccgaggtctcgaactcagaccctagcccggcgcgacccaacccacttcgcag

SEQ ID NO: 128816 - DNA, 365 bp, Homo sapiens
  chr17:44929255-44929620
  hyper
cggtctccagcttccccggctccgaatccatcgccctgttcagtgtccgagtctctggtcgccccccagccgccgctctcctcatcccgccgggtctcggactctgcgcacgcctcggaccctggccccgtccgccccggccccgcccgttcaggcgtcagtcccgctctctgatgccctctcgggatcctcacgccggtgccctgtctgccgccatcctggcctccggcgagccgtccttgcctcggactccttccccaccctccgccttcgccctgcggagcggagaccgagagggctgggtggatgggtgggacgggctgttcccggtctcggggcagaggatcgtgcgcgtccagggagaa

SEQ ID NO: 128817 - DNA, 61 bp, Homo sapiens
  chr17:45000262-45000323
  hyper
attgtccttcctaacgcctgactgaatcctgaggctagccttcagcgaacatgtacaccgc

SEQ ID NO: 128818 - DNA, 30 bp, Homo sapiens
  chr17:45000778-45000808
  hyper
ctggggcctggagacgtggggcagatgact

SEQ ID NO: 128819 - DNA, 128 bp, Homo sapiens; identical to SEQ ID NO: 54199
  chr17:45055672-45055800
  hyper

SEQ ID NO: 128820 - DNA, 1174 bp, Homo sapiens
  chr17:45055831-45057005
  hyper
cgggcgtccaagtcccttcccgcgcccccgccgacagtctcgccgcgtccccgcccgggcgccccaggcacgtagctgcccgcccggaggcggcggcagagcgcagagagcggggcgagggtccgggtctccggggtccttcttgcagcagcgctggcgagggcggacccagatggcgctcagtacagccccaggatggctgcgcccacgtccttggagggccggcgctcctgcaccagaaagttgatcatgctctcggacttgatgagcaggttgcagcccaggaagaagacgccgaagaccacggtaagcgacagcacgcagagcacggcgatctgcgccacccgcgacacccacaggctgcgctcgtcgggcgccagccccgcggggaccccgtcgctggcggccagcggtgcgccccctggacagcagcccagccacgtgcccagcccgtgggtgcggtttcccagggcggccccggcgccgccgcccacgccgtccacctcctccaagccgctgtggttcaggaaggtcgcgttcatcgccgcgcggcgccgggggtctcggcgcgcagtcccgggtgcactgggctgctcgccggggtccgcgctctcagggacgctccggacccctcggaccggctcctgcggtacggggaggggacgaaggcgggaggctggctgcctgcgcgctctcgggccgcctacccctgggcaccgggcgggaagcgaccgcccggaggagcgagcaacaggcggcgcaggagctggagccggagaacctagtgtgcttagcggtcgcccgctgggttcctcgcgcgcctggccgcccctcccctagcaacggcccggccccgccccgccggtccccgcggcatctccgaggggcgggaatcccgccgcgggcgcagcctccccggagtcccggtgctggagggggtcgggagatccggcagcctctgtccgcgggccggcgaaactccaccccctcctggcacccgctgtccgttcttggctagaaaacctctccaaggtgcccattccaggatttgatacccttagcagtgaagttattccggaatctgccctgactctcttcgcttattatttaagccctcgtaagccttgctagacatcagatgagtcgccgggacccctggcgctgcccactccac

SEQ ID NO: 128821 - DNA, 30 bp, Homo sapiens
  chr17:45177363-45177393
  hyper
cggccggcagcccgcggcccaggtctgcaa

SEQ ID NO: 128822 - DNA, 30 bp, Homo sapiens
  chr17:45177844-45177874
  hyper
gagaggcttttggccgagaggactagaagg

SEQ ID NO: 128823 - DNA, 30 bp, Homo sapiens; identical to SEQ ID NO: 11277
  chr17:45266584-45266614
  hyper

SEQ ID NO: 128824 - DNA, 143 bp, Homo sapiens
  chr17:45266822-45266965
  hyper
agtctgacccaaagcgtaggtttctcttctcagccacgccttcagccacgcacaccacgcccaatcggccgtcccagggttgggctacgccaaatctgcaaccagcaggctgggcgtggcgtgacagcgcgggcgggtagcgt

SEQ ID NO: 128825 - DNA, 826 bp, Homo sapiens; identical to SEQ ID NO: 11278
  chr17:45330947-45331773
  hyper

SEQ ID NO: 128826 - DNA, 38 bp, Homo sapiens; identical to SEQ ID NO: 54204
  chr17:45401133-45401171
  hyper

SEQ ID NO: 128827 - DNA, 30 bp, Homo sapiens
  chr17:45401382-45401412
  hyper
ctgaccacagagagcgcgggggcctccagc

SEQ ID NO: 128828 - DNA, 37 bp, Homo sapiens
  chr17:45500788-45500825
  hyper
cgtcggctgcgcccgcggcccggggcggagttggcca

SEQ ID NO: 128829 - DNA, 378 bp, Homo sapiens
  chr17:45500865-45501243
  hyper
cgcaggtggctcctccttcgcttctcccgatccccggccgtgccaggcacggtgccggctgccgagggaacgcctttgtgcccggtcctgggaacccgcgacggccgccgcgcgccccggtccattgtttcgcttctctgggttccaggtaggtgcgggcggcgcgcggggtccgcacgacgtgtcaccccggcggttggggcgccgggacccgcgggcgccggcaggggcgttcccgggcgcacggcggcggtgcagcacctgaagcggtggtggtcggccagcggcggcctcctgcacctcaccctcctgcaccttaccctcctgctgagctttgctgggctccgtgtagacctagacctttacctgctactgccg

SEQ ID NO: 128830 - DNA, 40 bp, Homo sapiens; identical to SEQ ID NO: 11279
  chr17:45609731-45609771
  hyper

SEQ ID NO: 128831 - DNA, 30 bp, Homo sapiens
  chr17:45727067-45727097
  hyper
cccctcggccaatccgcgcgctccattccg

SEQ ID NO: 128832 - DNA, 30 bp, Homo sapiens
  chr17:45727583-45727613
  hyper
ggagtcgccgccgccgccacctccgccatg

SEQ ID NO: 128833 - DNA, 167 bp, Homo sapiens
  chr17:45772371-45772538
  hyper
cggggtgcacataacgctccagcgcgcgcacacacctcggacagtcccctcgcgtctcacgtgacacgcggcccggacgtgccaccctgcccacgcgctcacgcacgcgtgcacacaccagcctcctggtcgctgccccactccgtcccgacgcccctgcgaccccg

SEQ ID NO: 128834 - DNA, 30 bp, Homo sapiens
  chr17:45798726-45798756
  hyper
agtccggggaggggcggagggagatggcac

SEQ ID NO: 128835 - DNA, 939 bp, Homo sapiens
  chr17:45810487-45811426
  hyper
tgcctagtattagccacgagagggcggggtggggcgaggcggagcagggccgaggtggcggagtgggggggagccggagagcttcataaagccacagcaaagcgctgcgactctagtgacagcggcccgctggagaggaagcccgagagctgccgcgcgcctgccggacgagggcgtagaagccaggcgtcagagcccgggctccggtggggtcccccacccggccctcgggtcccccgccccctgctccctgcccatcccagcccacgcgaccctctcgcgcgcggaggggcgggtcctcgacggctacgggaaggtgccagcccgccccggatgggcatcgtggagccgggttgcggagacatgctgacgggcaccgagccgatgccggggagcgacgagggccgggcgcctggcgccgacccgcagcaccgctacttctacccggagccgggcgcgcaggacgcggacgagcgtcgcgggggcggcagcctggggtctccctacccggggggcgccttggtgcccgccccgccgagccgcttccttggagcctacgcctacccgccgcgaccccaggcggccggcttccccggcgcgggcgagtccttcccgccgcccgcggacgccgagggctaccagccgggcgagggctacgccgccccggacccgcgcgccgggctctacccggggccgcgtgaggactacgcgctacccgcgggactggaggtgtcggggaaactgagggtcgcgctcaacaaccacctgttgtggtccaagtttaatcagcaccagacagagatgatcatcaccaagcagggacggtgagtgcggcgcgccggcccttggggcctctgtgcccgcgccggaacaagaacgtctcgtctgtttttctggctcgacaatgcttctgactccgtgtccctcactgctttggct

SEQ ID NO: 128836 - DNA, 613 bp, Homo sapiens
  chr17:45867088-45867701
  hyper
cctctgcttcctcctcgcagcagccggcgcgtctttgttccgtccaggcatcttcaacgcgtccctccctctggacgctgccgaggaaatactgaagtggtagaggatgtggggaggccgtccaagagtggaggtgtcccgggcctgctctctccaggaggaggagtgcaggctggggtccacctccccggtccagcagtgctggggaggggaccccgcacgtgtgcccggagcgcggacacggtgatgcggctgcccctcgccccggccccaggctcgctgcgccctccctccccggtcgcctctgcgtttctcccgccagcaggagaccgagtctgagcgcagccgccgaccctgcgccttccctgtgcactcaaagaccgccagctctgggggagcccggggacccacgccgctctgggcacaggcgaccgaggccaaggcgctccgggtctctccagttccggcgtcttctggtcctcgggctccgctccgcggccactgggcccgctgcacgcgagcgcgccgagctctgctcccgctgctcctgcgaagctggtgtccacacccgccggcctgcaggcacctcggggcccacgtgtcctccggccac

SEQ ID NO: 128837 - DNA, 30 bp, Homo sapiens; identical to SEQ ID NO: 54209
  chr17:45909395-45909425
  hyper

SEQ ID NO: 128838 - DNA, 70 bp, Homo sapiens
  chr17:45918750-45918820
  hyper
ttcccggagcagagcggccttgcgagtcccacctggctccctgtcctacccaggcgcccatttgaggcct

SEQ ID NO: 128839 - DNA, 620 bp, Homo sapiens
  chr17:45928209-45928829
  hyper
ggcgcgttcggagtgcgttttttcgagacaatctccgtagcgctcacccctggccaccccgacccgcgctcctacctcgaggctgcggcgggctccgggcacggctggctggtgcgctactgacggtcgctcataggccctgtgcgccggcgagctctccagcggtaaggggcaggagcccagggcgagccagacccggcggctggcggcaggcggcaggcggcggaggtgagcgctggcgagagggcggaggacggagggcgggcaggagccagcgagcgaacaaggccagctccgcccgtgactcacccgcgctctctgccttcatcctctccccagcgctgctttttcccccggactcgcggccccgcccacctcacctgcggccgcctttaacccttgagggctcggctggaccggagcccagccagggccgcgaggagggggtgggcgggagtgggggaggaaagataactagggcgtgcgccgcccgctccctcgctcctccctggtcccctccactcccagggagaggggcccgggtggggtgattcccaggttctaagacccgccccgccgggtggaaaactgccctggagctagctcggtctagcagagga

SEQ ID NO: 128840 - DNA, 30 bp, Homo sapiens; identical to SEQ ID NO: 54212
  chr17:45973138-45973168
  hyper

SEQ ID NO: 128841 - DNA, 240 bp, Homo sapiens
  chr17:45973402-45973642
  hyper
gctttcggttggtgcgctctaccgtccatcagtgacattgcacagacctattggtcaaatcaacgtcgctctagacgcctctggttgattggttaatagtgctgtcggtccccaatgttccaagcgcttattggtgaaggctgccgtcgctcgggcggtggcgggctccgggattggcggttgcttggcgggcggtgtcaggctctcggtggcggcggaggcggcggaggccagggagga

SEQ ID NO: 128842 - DNA, 30 bp, Homo sapiens
  chr17:46048055-46048085
  hyper
tctggatggtaaagcgacgcaaggagggaa

SEQ ID NO: 128843 - DNA, 163 bp, Homo sapiens
  chr17:46048349-46048512
  hyper
aggcctgagtggagcgtaaaccctgattggctgtacggaaggcggcgacgtggccgaaggatgcccgtttgtgtctaaacggaggctcggccacaacgccactggattggtggtagggcggggcgggccacagtctccagcctgaagcggaagtggaggaaag

SEQ ID NO: 128844 - DNA, 30 bp, Homo sapiens
  chr17:46048807-46048837
  hyper
gggggaggcctgtgcgttgccccctgtgtc

SEQ ID NO: 128845 - DNA, 811 bp, Homo sapiens
  chr17:46089196-46090007
  hyper
ctggtttccccagaagttgcccgtttcctgggccattcctctccaggcagccctcgggagttcccgccgcaccgaccccagccaggctccagcggtcccctctcttccatcccgccatctctctgaggggcttgcgtctccctgatgcgctctggtgtctgtctgagccatccatcaaggatggcaggctgggggaaacatgaaaaagagcctatttggctattaacatcccctcccgctttgttgtctctctcctccccagtcccctaccagcccctcacccaacccctcccttttccccttttgcaggagacaaaaccagactgacaagctgaagactcaaacattaatcaaactgcgctccggaacaacctttccctcgcattaataaatacatttgcggcccctcattggacagttggcctaatttgtttctttttcgcggggtggggggagcagccgcgcccgcgccccctggctcccagcagccctgtgcaaagcagatgttccgccgcagacgcggagctgcgcctagccgcgcgccccggaggccgcggttgccatggcgacggcggggccgcctgctgtcgccgagcacgctgtctcgcccgctcagtgattacctccatctccgcagtgttcgccatacggcccggattctaatcagatcccctcccccctcccccctccctcctccgcccggcccactaccccttcagctcccacagccttgggactcattgagaactgcccgcgcatccctgacggtgcccaggaaggcagagtgggggagagacgacccgcactcagc

SEQ ID NO: 128846 - DNA, 30 bp, Homo sapiens
  chr17:46101532-46101562
  hyper
tctggaaggggcagcgcccttccttgccgg

SEQ ID NO: 128847 - DNA, 30 bp, Homo sapiens
  chr17:46102866-46102896
  hyper
aggttctgggacggcgacagagaagggaag

SEQ ID NO: 128848 - DNA, 30 bp, Homo sapiens; identical to SEQ ID NO: 54216
  chr17:46103976-46104006
  hyper

SEQ ID NO: 128849 - DNA, 302 bp, Homo sapiens
  chr17:46124667-46124969
  hyper
ccctaaatggggtcttcgcatcagctgcgttaaaatcaccccagcaggcaggttatccggccgccactccagggtcattaaatcagactctccagtgggacctcggaattcgtagcttagcaagctccccaagtgatgctgggagtaaactaacgtttgagagtcacaaacatgttttggcaatataaccagatgggactggagaaattaaaaaatgagaaacatccctaaaaaagcaagactaagctgcgtgggaggccaaacgaggggggtcctttgggctgtttctaccatgacaaaaa

SEQ ID NO: 128850 - DNA, 307 bp, Homo sapiens; identical to SEQ ID NO: 11285
  chr17:46125006-46125313
  hyper

SEQ ID NO: 128851 - DNA, 83 bp, Homo sapiens
  chr17:46125607-46125690
  hyper
agagggacatccgtcgacggccccggcctcggctcgttgattggagaaactgttcctagggtgtttgcggcgggcgggtttcc

SEQ ID NO: 128852 - DNA, 30 bp, Homo sapiens
  chr17:46126217-46126247
  hyper
cggactcgggtatccgggcagggtgggacc

SEQ ID NO: 128853 - DNA, 200 bp, Homo sapiens
  chr17:46178730-46178930
  hyper
ggtggccgcagtggcgtccctcactgaagcggcgtaccgcaggccccggccaacggccctcccctcagccgaacaaaagagcctcgcagtctgcgctgcccgccgctcgcaccgcgcaggcgcaacgacccgccgcacggcaccatgggcctcgggggtctgtccaagactacaaggcccgaagcgccgcgcgccgcgca

SEQ ID NO: 128854 - DNA, 30 bp, Homo sapiens
  chr17:46184574-46184604
  hyper
tcgccggaccctctcgagtctgactttcac

SEQ ID NO: 128855 - DNA, 30 bp, Homo sapiens; identical to SEQ ID NO: 54219
  chr17:46411484-46411514
  hyper

SEQ ID NO: 128856 - DNA, 30 bp, Homo sapiens; identical to SEQ ID NO: 54220
  chr17:46500657-46500687
  hyper

SEQ ID NO: 128857 - DNA, 211 bp, Homo sapiens; identical to SEQ ID NO: 54221
  chr17:46507534-46507745
  hyper

SEQ ID NO: 128858 - DNA, 30 bp, Homo sapiens; identical to SEQ ID NO: 54222
  chr17:46534779-46534809
  hyper

SEQ ID NO: 128859 - DNA, 418 bp, Homo sapiens
  chr17:46570075-46570493
  hyper
gcctggggtggagccgcgccggagccgggccggcagcgctggcgaggaggttcgggtgttgtgtttccactgtaactataattaggcggattcagtgtttatttaggctgagagctgtaagataaatgacagcttcgaagatgcttttcagcacttcgtaaatcacccatccgcccgggcagtttgctgctgccacgtctcggttctccctccgcgcgctccctgtccccccactcacctcggaagagggcacacccggggacgactccggagctgtcaccacaaagggcaggagggcaaaggggaaatggtgtctgtgcttcccagagccctcagcgccccggaagggtacggggcagcctccaggaaagctgtcaggagacgcttcctcccgaggtggtcccggcggccaagtggg

SEQ ID NO: 128860 - DNA, 16 bp, Homo sapiens
  chr17:46619087-46619103
  hyper
cgcaggggcgggggca

SEQ ID NO: 128861 - DNA, 1714 bp, Homo sapiens
  chr17:46620278-46621992
  hyper
gaagaaagggagtggattaaacgctaattcagtaatacctgaattttagcaaaacacataagtctatgcgactgagggtgggagaggctcgatttttccagtagacggccaaggagcgcgggggtcgaaaggaccgggaggaggaaacaggttagggaaactgcaggtcgatggcacagagcgtactggtgaaaaaatccagctcttcctcggaaaaagggaccgggctgtcgagagaaccctgtaggctaggggagaggcctccggatagctggagacaggagtcggccgcgaagaagttgaggtcgggaaggaaaggtgaatcctggcgccccgagaagacgtcttctggcaatggcccgggctccagcccgccggccccgcgcagcgcgcagccgggactcgacgcgcctgcgccctctaagcgaacggctaaaggccgggggtccgcgcttaaggcccccggcaccacctccggcgggtgacagcaggcttcccacgccgcccgcgaggcggaggggccgcccgggctggccgcgggttcctcggcagggtcgcagatgtcctccagggctcccgggcaggcaggctccccatccggcggctctcggtgctgcgtctgccgcttgtgcttcatgcgccggttctgaaaccagactttgacctgcctttcggtgaggtccagcaaggccgcgatctcgacgcggcgtggccggcacaggtacttattaaagtggaattccttctccagttccagcagctgcgtgttggtgtaagccgtgcgcagcctgcgcgccccgccgccaccagcctccggcagtcccaggccatctgcagggaaaacaggctcggcgtcatagcgggccgtgtactcagcccaacctcagttcggactaccccatcctccaaaaccagtatcacctctccccttcctcgccaccccacccccgcccccaccccaaagccgctcgctttactgcttttgggttttcttctctccctctctagtctacagccccggcccgggtcagggcaaagcattcagagccgcccacgggccacgcagggggcggagagcggctcccttcggcgccggaacctcagatccccctcccaagccctcccagtggacccctcaattcggaactttccaactcaaccggagcgagggtcagaaagattgttcttcacccctcttcctccctagctctgaattcttcctcttctcctagagttggggcagaaaggaccgaatcttttctgcttctagggtctatcccagcaacaacatactcattcccctacacagatacgggtgaaaacctcaatcaaatcattttcttctagcagaaaaaaaggcgtttccccaaccagcttccaaaatcagccatagggagagaaagagagagagagacagaaaaaaaaaaagacgctgttagcggccaggcctgaaccccagtgggatattctacttccccatcccaggaatggagggggtaaggaaccccaacaggctcgccaccattttttttaaacctccttccactgctttttctccccctcttctagctgcccctcaccccacccccaccacgcttaccgacctgcaggcgatccgaccccggaggccggaacggcggaggcggccggagaaggagacgtggcggattggctgggtttcttggcggatttcttctctttcatccaagggaac

SEQ ID NO: 128862 - DNA, 114 bp, Homo sapiens; identical to SEQ ID NO: 54227
  chr17:46622061-46622175
  hyper

SEQ ID NO: 128863 - DNA, 464 bp, Homo sapiens; identical to SEQ ID NO: 54228
  chr17:46654954-46655418
  hyper

SEQ ID NO: 128864 - DNA, 548 bp, Homo sapiens; identical to SEQ ID NO: 11291
  chr17:46655450-46655998
  hyper

SEQ ID NO: 128865 - DNA, 488 bp, Homo sapiens; identical to SEQ ID NO: 54230
  chr17:46656057-46656545
  hyper

SEQ ID NO: 128866 - DNA, 189 bp, Homo sapiens; identical to SEQ ID NO: 11293
  chr17:46659084-46659273
  hyper

SEQ ID NO: 128867 - DNA, 482 bp, Homo sapiens; identical to SEQ ID NO: 11294
  chr17:46659384-46659866
  hyper

SEQ ID NO: 128868 - DNA, 412 bp, Homo sapiens; identical to SEQ ID NO: 54233
  chr17:46662739-46663151
  hyper

SEQ ID NO: 128869 - DNA, 445 bp, Homo sapiens
  chr17:46663379-46663824
  hyper
cgaccaaaaccagccgctgtgctccgaagccgcaaggctcagcccggatccactaggggagaggcagtccagagggcggcctcgcagactgggaactgtttccggggaggagaagctagaggatactgcagagagtgcatttttctctccaagaggaactttagggggagaagagacaagagaggagacgcctaaatcactgagaaaaggaataagaagagagggaagagaaacgttaaaacttggggacaaggtgctttttgggatccgacaggttcccgaattgcccgaagtccaatactctccaggctcccaaatttcccctcttcctcttggagcctgcaatcagtaaattcgccaaaagaaagaacgaaagatccgcctaaacctgccggcgtgcccccacccccggtctacagaggcggaggtggctgcggcggtgtgg

SEQ ID NO: 128870 - DNA, 109 bp, Homo sapiens; identical to SEQ ID NO: 54235
  chr17:46663855-46663964
  hyper

SEQ ID NO: 128871 - DNA, 30 bp, Homo sapiens
  chr17:46667712-46667742
  hyper
tgtctgacttctcggcgatttttacgatct

SEQ ID NO: 128872 - DNA, 801 bp, Homo sapiens; identical to SEQ ID NO: 54236
  chr17:46670737-46671538
  hyper

SEQ ID NO: 128873 - DNA, 923 bp, Homo sapiens; identical to SEQ ID NO: 54237
  chr17:46674937-46675860
  hyper

SEQ ID NO: 128874 - DNA, 298 bp, Homo sapiens
  chr17:46683516-46683814
  hyper
cggcggcgcagagagcgggaagagaggctcggaggaagccccgggcgtggcgtggtcaggctccgagagcggccgggatgcggccacaccggcctggtaaactcgcacctcttaggatcttgctcccggactcattcccttccccaccccctattttaaagttttatttgggtcgtctgtatcaatttagaacgagataaattaagacaaagaaagtaaaataaatcgaaataaaatataggaatagctcttggcgaaaatgtttgccgtgcgagcaggaagccgtgagcgccctagt

SEQ ID NO: 128875 - DNA, 30 bp, Homo sapiens
  chr17:46684018-46684048
  hyper
aggcctgaatgaggacgcgggtttgtgaaa

SEQ ID NO: 128876 - DNA, 1635 bp, Homo sapiens
  chr17:46687506-46689141
  hyper
atggctattctctgcaaacaccggccttcctccgcaagacaaacggcctcgtctccagcccgtgccggcgctgctgataaatatttaaagctaaaaggccgagaggaagggtgggggcgggctgggggctcgcagcgccgtggtgccggcgaagagagatccgccgggaagcagagcgagcctgagagcaccgagcaaatatgggggcggggatggcctgctgggtcgcggcccagtgggtgcagccttccagggccgacctccggctgggagcactctggacgcggaaaggggcgcccagccgggaaggaggcgccttcagggtaatgtgccccggcccctggggctcaggacagctcggtgcgcggcgttacctgagcttcgcatccaggggtagatccggaagttactctcggccgccaagtccgagtccctctgctccttggcgcccgccgccttggcggagtcgccgggacacaccccggagaggttctgctcaaagggcgcgcagtgcatgttgaaggaactcggctcgagcccatagccggccgcgtagacgccggccgcgctctggcccgccatgccccccccgccggggtacaagccctgcatcgaggcggcgaaggaagcgcccgaacccgctccatagcccgggcgctgggggttggaagcaaacgcacaagaagtttgttctgggaaggctccggtagcgaaaaccgaacttgaggctggatatttagaaaataaagtattcgcataatacaatgaactcataatttggccggatgatttgtaggcagggacgttttagtgtcggttttacgagattccttgatatattacagaattagagtccagatttacaccaaaaaggaccccctttttcctctccggaccacgtgaccccgcccacgtgacgtcccctccgccaatggccgggccgtctccccacggctcccggtaatgtggaaaaaattgtgtggcgttggatttataaaatatgatcaataatgaatgggaaagccgagccctgtggattggggctgggggctcaagggccgctgccgactcccgcgggctggaggccgcttgcaggcgagatttggggaggaagagattgagtggaagggaaaataaataacctcggggcgatccgtgtcaccctccacccatcctcttcagcccgttaccgagcgagagacaaacgcagggattgaatgcacgcaactgggtgggtgggtgcttggggcaggtctgttctttattaaaccaggccaattctgcacggcaaggccttttggggaagttggtccggttctcccaagacgaggaatgaggcgagcctggctcacgactctgtctctcttggtgccccagatatgcgggcggagatggagcaagtcttcctaggtgctcctagggcacaggatccagcccacgggccttggacgctgccgtttctggtggcaaaaaaaaaaagaaagaaagaaagaaaaagaaaaaaaaaggtttgaaagtaaaagaaaaagggggttgggagggtggggagagaaaggaagggtggaggttggcccgggcgcgctgctctcccggttcccggaggcggatgcctcagtggagcgtgactaccagaga

SEQ ID NO: 128877 - DNA, 152 bp, Homo sapiens
  chr17:46689519-46689671
  hyper
ccaatcaggctcagccgcctccctcacccccagcgcccctgggccgagggactcgcaccacctgcctccagcccccgccccctcctctctgcagcctagcctcagcaggcgcaggagcccggtgacaggctccccaccggctctgcaaggca

SEQ ID NO: 128878 - DNA, 333 bp, Homo sapiens; identical to SEQ ID NO: 54240
  chr17:46690030-46690363
  hyper

SEQ ID NO: 128879 - DNA, 275 bp, Homo sapiens; identical to SEQ ID NO: 11303
  chr17:46690429-46690704
  hyper

SEQ ID NO: 128880 - DNA, 216 bp, Homo sapiens
  chr17:46690852-46691068
  hyper
cgcctgcgtccggcggctgctgggaatgggggaaagggcgagacagaggggaggggagggtgggggagggggcagggacggagaaggttggaagattcgtgaacgagcctgggagaccattataataagggcaggggaccttctaccccgtgcgggggcggggggggcgcaagaaggccgcggtcggcggaggaggaggggcgagggggattagac

SEQ ID NO: 128881 - DNA, 382 bp, Homo sapiens; identical to SEQ ID NO: 54243
  chr17:46691436-46691818
  hyper

SEQ ID NO: 128882 - DNA, 607 bp, Homo sapiens
  chr17:46691987-46692594
  hyper
cgcagtcataataattggggcgcagggactccccggttttgtatttggagaacagtgagttgacgaaataagagctcattttattgaattttgaggcggcggcggcggcggaggctatagttgggggctgttggggagggggtggggagggggaaagggagggagagagagaaaaaaacgcggattcgccggctcctagtcaccctcgccaggaaaggagagggaaagagaggagggaaaaaaagaaaagaaagaaaaggcgaagaagatctcgaagccgacacactttttgtggtttccaggaatagaaaaggacagagaagcctccaaaagtctaagcttgcatggcagccgcggctcgctcgccctccccccaccccccaccccccaaacaaaaatataccaccacttaaagaggtcctcgctttacatttcgaagaagggatgccagttcataaacagttttcggtgatttacttccctgcaaatgagttgtttcatattttgcactgtcttttcatgatcatttgcatccattagagaccccgcatcctattggcttcttcgtactcctcccggacagaacgcagagcgagggtgagagcga

SEQ ID NO: 128883 - DNA, 30 bp, Homo sapiens
  chr17:46696062-46696092
  hyper
acatccgcagctgccgctccagggagtttc

SEQ ID NO: 128884 - DNA, 217 bp, Homo sapiens
  chr17:46696375-46696592
  hyper
atttctagcggagaccgcaaagcagtgcgccctttatggcctgtaaaaagggggaccgagcagttttcaaactccacgcgattgtttcaaattctgaggagaaacagttgggctttttgtcgggggagaggaggcctgagaggataggatgagactgtaaaagaatcaagaggctgcccgcgcccagacgtctggccccgccggacctgagtgtgtg

SEQ ID NO: 128885 - DNA, 267 bp, Homo sapiens
  chr17:46696642-46696909
  hyper
caggaggctcctcgtttccgacgcctgattctggagggggtgtgaagaacaaagacaagagccccagttgcaatttctgaagcatttgcgacaacaaagtgttctttcccggcttctctcttctccctctctgccccctgccaccccccgccccggaagcccggagccccgtgttctgtgcgggtgagggtgaaggctgccggagcggggcccacccattcccccgccaggccgggagccccggcccagctgcggctctctcagctc

SEQ ID NO: 128886 - DNA, 1809 bp, Homo sapiens; identical to SEQ ID NO: 54247
  chr17:46702259-46704068
  hyper

SEQ ID NO: 128887 - DNA, 17 bp, Homo sapiens
  chr17:46711510-46711527
  hyper
ggtggcctccatttttt

SEQ ID NO: 128888 - DNA, 492 bp, Homo sapiens; identical to SEQ ID NO: 54249
  chr17:46713827-46714319
  hyper

SEQ ID NO: 128889 - DNA, 533 bp, Homo sapiens
  chr17:46723838-46724371
  hyper
agcccacgcctgccacgggcggttggtcctgaaagctcgggccacggggctgcccagcttggagaggggcctttcacgccgcagtccccagctgcgagaggaagggctgcgcccgcctcctcacctacctctcggaaccacgccgtcccccgcgcgtcttcgtagactgcaggagtccagggcgtctggggactgtgacggcgcccaaggcgggggatgtggcggctctgggtcgccgccttctgcccccgcctctgtgaggcctctcgaggcagtgtctgtgtctggggcagcgacgccgacggcgctgggggcgcgaaggggctcacgctcctgcgttcccctggcgccggtgagtggcgggcgaggacagggtccgggagggggataggcgagagcgcttcctgcctccgcccgggcggggctcggccgtctcacctgcccccacccacggcgccgtcggatcccagagcggctggtgaggagatgggcctggcgcgccgcggggaggccagaggcgcggaggagcagcg

SEQ ID NO: 128890 - DNA, 277 bp, Homo sapiens; identical to SEQ ID NO: 54251
  chr17:46724659-46724936
  hyper

SEQ ID NO: 128891 - DNA, 393 bp, Homo sapiens
  chr17:46755633-46756026
  hyper
ggcaggaagggcaggcgccaagcctcaagtctcaaacacggtgcggggctgcgcggcaaggagaaacccaggagatgctcggggtcggggcccagggcagggaaaaccctcagctctggtcaaaagccaagtgagcgaaggaggcgatgcaacgtcaccctggtggccaaggcaggcacccaggtctcgaggttccaggagagggacgcgctgtgaccaccagccccctaggctcctgtctgctcgatgagcgtccactcgccagttccagccgcgagcgcccccagcactcccggagctgggccgggcgccgccttccctcgggcggccggcaggggtcagtgtttggccgcaggtgaacagacagcggccggggctgaatctggttcttct

SEQ ID NO: 128892 - DNA, 921 bp, Homo sapiens
  chr17:46795452-46796373
  hyper
gtgttctacttgctgcgatcgggatagtttttttttccactttgaggctctttttttttttttttaaggggcaggaacatcattttgcatcaggccctgtaaaaaaaaaaagggggggggggtgggtaggaaccaggatgttggggaaaattatttcaatgtgttgagtctgaagctttttggaaagcaatgtagatgtgatctcgtttgctctgaatcgaattccacagaaaccgctgtgccgaatactgcaaatccttaactttcataaacgccggcaccgaactcaacgcaaaactacccaagtgccaaagaccatttctgggaagctcattccatgagaccttcgcatttttccaaatcaaaggcttcccttcggatctaattatttctcctctacagggctgcgggagggggaggggatgtgagactagggcaacagattaagattgaaagtcctttctcgcagcttcattttcgcccccacactgtcccaaatgcttagaaccctcctcgtcagaatgggaacggtgcccccgcttgtcctaaaagacacagaccaggtccgtgaacttgacccaggcgcccacgcctcttttccccgaaggtcagacaaaggcagaagggttggctggattctttcccgggccgcgaaggcctggggatcgcaagttgaggaggagaagaccgcaaacccctttggttcaagcaagctctgcggcaggtaaaaggcaaattggtggggacgggtaggacagggagagcattatctggctaactcccgcaggcctcttccgatttgtcggcggggacctgactccctgcggtgtctctggccccaaatacggaggccaggagcttttcgttgtctcgcccgatttggtatcttattagccggtgtcgctgagccgcgggggactc

SEQ ID NO: 128893 - DNA, 74 bp, Homo sapiens; identical to SEQ ID NO: 11315
  chr17:46796498-46796572
  hyper

SEQ ID NO: 128894 - DNA, 6 bp, Homo sapiens
  chr17:46796631-46796637
  hyper
agcagg

SEQ ID NO: 128895 - DNA, 364 bp, Homo sapiens; identical to SEQ ID NO: 11317
  chr17:46796849-46797213
  hyper

SEQ ID NO: 128896 - DNA, 357 bp, Homo sapiens; identical to SEQ ID NO: 54257
  chr17:46797274-46797631
  hyper

SEQ ID NO: 128897 - DNA, 499 bp, Homo sapiens
  chr17:46799463-46799962
  hyper
cctttctgcccagggcggctgccggtctctccaggaaccgcgagtaggtgctcccgccaggtggtatcggtgaaagcctgctgctcacccttcccttgtttcccaaaacttctgaaggctcccaaattcctgggagaccctctcccagggcctcctgatgcagctaccatactgagcgatccgtcgataacgcccttggcccaccgatcagtttaccttattagagagaaaagcactcttggaggtagtaagatgggccggtccttgatctgagaaatgggcgcacaacatcgctgttctctctgcaaaggtggggaccagaatccagcttgcctgaccttgcaagcaagcatcggcctaaaggtttcagcctcccagtggcgctctgtttgcacgccttaggctaggagaggaaggacgggagcacagcactgggtgcccctctccctgtagagtctggggcggggctcagtaagaaggcctgcggttggtggctccc

SEQ ID NO: 128898 - DNA, 882 bp, Homo sapiens
  chr17:46800165-46801047
  hyper
aaatgggggcgggggcggtggagaccaccagcctggaacttcaagttcaatggcaaagtccctgaccctccccccaggctgggcgccagcattattctaggggcgattaaactcttttgctgccccctgtgcacctcccagttcgggggcagtttaggggaggagagaaggtaatggtggaattctttccctcactctcccccgaccacttcgtcccctccccctcatcccctctacacagaactaactggtagggagagaggaagaaaggctggcatcggttcctcattggatgttttaaatctgtctcaggcccaggccagtgcctggggggaggggcggggtgtcctgcttttgggctagaggcccggggccgctcccgagctttctcccctcttccctggagagcgactgttcgggagggtgagaatggtataaatttcaaaaacaacgaaaccttcttttgccccctccgcagcagtcgcctccgggctttattgcaagtttacggtaacgagttcatctatttaattcgcggttgcagctcggggatttctattagacaggacgggttggggccggggggcacagggtctcccctgaaggaaacccaattagagtgcagcacttagcaccttcaatataactttaatgaagggggggaggggagctgcagggaagagaagtttgctctaggttggggaaggaaagctggagctgctcccgagaactggggggcctggatgaggctttttcctgcttcgagggctttccagcttccggcccgggaactactatttggagtagggatcgcctgcagggaaggcggggcggattctcggctggcggcggcctcgcagggttcccggaagcgctagccag

SEQ ID NO: 128899 - DNA, 220 bp, Homo sapiens; identical to SEQ ID NO: 54260
  chr17:46801108-46801328
  hyper

SEQ ID NO: 128900 - DNA, 248 bp, Homo sapiens
  chr17:46801831-46802079
  hyper
ccattcgagatggctcgtaccgaacctccttgccttcttcctgggtctctcgggggctggaccaatacatctgccgatgccctggccgaatggcaggcgacatcgggtcctggacccccacacgcagctcagtacccacgaggccccaggccgctggaagcctgtagctccgcggacgatgaaagcctgcccgcaggttctcctggagtggtgagcctctgtcggaagggggcgcccacgtcttttta

SEQ ID NO: 128901 - DNA, 531 bp, Homo sapiens; identical to SEQ ID NO: 11321
  chr17:46802380-46802911
  hyper

SEQ ID NO: 128902 - DNA, 300 bp, Homo sapiens; identical to SEQ ID NO: 54263
  chr17:46802993-46803293
  hyper

SEQ ID NO: 128903 - DNA, 30 bp, Homo sapiens
  chr17:46803657-46803687
  hyper
cacaacgaatctgcccgttcccctctcctc

SEQ ID NO: 128904 - DNA, 334 bp, Homo sapiens; identical to SEQ ID NO: 11323
  chr17:46804101-46804435
  hyper

SEQ ID NO: 128905 - DNA, 710 bp, Homo sapiens; identical to SEQ ID NO: 54265
  chr17:46805458-46806168
  hyper

SEQ ID NO: 128906 - DNA, 625 bp, Homo sapiens
  chr17:46806430-46807055
  hyper
ctcatttacacgtccggggggaggggaggcgtggtgggcggaggaagaggggacgaggagccgggccccacctccttctcctcctctccctccctagctttctgtctcctgcgctttgacaggtttaacgagagaataaaaagctctctctataaagtgtccatctcctgggggggaaggggagtcgggggtggggctgggaggccgctcccggcctcagaggagaacccgggaatgcgcctgtgtaagaggaggctgggaaatgggggttaataggtatttctggcagcccctggctttgggtcctgggtactagcaccccagttcattcccggtacccttcctgtcccagatgtcctggaatgagctgctccgggccccagggaggtgccctggacgccccttacccagggactcgctactgcccagaatgctctggaggccctgattcgggtgaggctgagggaagaggcgggagacacgaacgtagacgtagaagacatgcgatctggatggaacccaggacactccacttccggacctgaaggggaaatggagcctctagagtggcctgtggaagggtctggatttccctttaagtaaagacatacggagggacggagac

SEQ ID NO: 128907 - DNA, 433 bp, Homo sapiens
  chr17:46810525-46810958
  hyper
gagcccattcagctcggccccacagacagcctgtgacctttacagcccggcctttgagcgcggccgccgcgcccccgggggttccggcaacggggacttggcacctcggtgtcagctcccgcccccacccaggctagggacccgccaacgaggggtgggggcgggaggcgcccacccgtcgcactagtgggcatttgctaaactacgttttatttttttgtaaagtgagcgcccgctgccttcgttctcccaactggagcaaactctgtggcggcgacgatggcggccgtcaggtcggtggtgatgaatagagaggatttctctgcagcgcgacgctcccctctcccgaaaggttggctccacggtcccgccggccgcgcaggtctggctgaactgcttggggtcgcccggctcctctcgattttatgaaaat

SEQ ID NO: 128908 - DNA, 151 bp, Homo sapiens; identical to SEQ ID NO: 54268
  chr17:46811348-46811499
  hyper

SEQ ID NO: 128909 - DNA, 72 bp, Homo sapiens; identical to SEQ ID NO: 54269
  chr17:46811594-46811666
  hyper

SEQ ID NO: 128910 - DNA, 30 bp, Homo sapiens
  chr17:46811948-46811978
  hyper
ccacggcagctgctgcgcgccctgacgccg

SEQ ID NO: 128911 - DNA, 146 bp, Homo sapiens
  chr17:46812470-46812616
  hyper
acagaagagtgacgacgggcagcaggagggaagggagctttaccggaaggagagggaagaaaactgtagaaggaacaagaaagagtccaggaagctgccacggatttttcatgcgtgtctagtgcaggcacggttattagtgcttt

SEQ ID NO: 128912 - DNA, 748 bp, Homo sapiens
  chr17:46815971-46816719
  hyper
ccagcccatcctccccggccttgcactgcccgagatccgtgcaggtcaagcgggcaaggtgggacgctctcaggtgggagaattcataggaattaaggggaacccactaactcttcatcaagactagaggccagcctaaagaattttccccctttttgtcccagagacattctttccttccttctgcgtgtgtaaacacacctggtcgggcagatttttcagtaatcccaatactgagtcacctcaccggccggggtttactccccagctcctggatggtaaagcgccctgcggcccgcgggtcaggtctttaacggtccagccagcgcagcaagagagctggggagtcttcttgcagtcccttcctcctactcacgcaaagatctcctctatgctggtaggtgcacctgccctccaccgatcctcaccctgagcgcaggtcgtacctcaaggcgaaaacccgcttagtgcgttggcgggtggagagctgccgccttcttgatccgggactgagaagctgcactccctgacgccactgtggccagcacctcgggccgcgcagacccctacatctctaatcccatagccctccaggggtccttggggcagtccctttggaaagtcttcgaagtgcagggtactttaagtaccctgtagacgccttttatttaatccgcacaacaaaagaacggggcaggagtggggggaaattgttacttccgttttgtagataagagaactgagccgg

SEQ ID NO: 128913 - DNA, 14 bp, Homo sapiens
  chr17:46824261-46824275
  hyper
ggggagtaaatcag

SEQ ID NO: 128914 - DNA, 989 bp, Homo sapiens
  chr17:46824358-46825347
  hyper
cgcttactggttctcaagtcagagtcccccttcccggggctccttctggggactccgggggagagggatctctctgtccatcctgcaactcctctcctggcatagatgccccgcacccccaccttgggccatccttatctgcctgttccccatcacgattgatcctccagggtcgccaaggctcctgctgactacaaaaacatccccaagattcccttcttgacccggttcaggcatatctctttatacttccatgtctccgtttctctatatttttactgtggaggactcagaagagagctgaggctattgtccggggaggaaaggaattcgggcaaatttgtgggtaggggcccagacccaagacccgtgtttctcctgcgtgggttggagtctgtctcaggtcgctccagggacatcaagagcccgcgccgccgagagcccgcgccgccgtccagcgggaagcagcggacccacaggggcctccagccgcctccccgctcccgccccgtgtttctcctgggcctccagctccgtggagagagctgagagttctcggcccgcgggcttcctcaccaaatccccaaaaaccgacgcaggcacagagggctgactgtgttttgagtaatgcacgcgaggcagtccaatccggcgagatggcccgaagcggggcccagcggtcgggggtgtgggtctggagagagagggtctccccacttccttcctccggctgctcggtcacccatcgactacccgggcggaagcggggcgcagaggggcgcagagggaggcattgccctccaggagtatctattcccatcggggtatggtgaatgccatctaggcccatgctccattcccagggccccctcggttcctccaaaggcgtccacccagaagcagccccagtgtcgcgcattgactcccgccggccaagtcgccgccgaaacaggatctcctaaagcgggctccaccgggtcccagggcga

SEQ ID NO: 128915 - DNA, 205 bp, Homo sapiens
  chr17:46826842-46827047
  hyper
tctcttacggaattccgaccttattgaaaaaaatgaggagaggtttgttttgtttcttaatcatttcttcgccatctctgactctctttaaggttagaagacacggaaaagttccacattgggccgggatggcaaaggctggatcactgcagaacaaagacctcagtcctcgcatccccaccccgacccccggcagcctctttcg

SEQ ID NO: 128916 - DNA, 81 bp, Homo sapiens
  chr17:46827420-46827501
  hyper
aggaaagccaggggtcgaagggatcgattctaggggccgcagaggctactctcgtgctctggagaagcaccgcatctttct

SEQ ID NO: 128917 - DNA, 131 bp, Homo sapiens
  chr17:46827625-46827756
  hyper
cgccagcattttgccggggtttatgcctcaatcccgcattccagccacttccacgaattacttggaagacagaatggtttgtgcccatttatcctacctggagcacagacaagaaacggccaaaaaatgaa

SEQ ID NO: 128918 - DNA, 30 bp, Homo sapiens
  chr17:46828776-46828806
  hyper
ggcagtgggggtgcccgaagcaagcagctg

SEQ ID NO: 128919 - DNA, 713 bp, Homo sapiens
  chr17:46829422-46830135
  hyper
ctaggaaagcacagacgcacctccaggcgaccctgcagactggggtcgggaaaaggacaggctgagaagtctagaaaggcaaagaagttaacgatgtttggcagtctgaggtcttatcagtgtgttggggtcaggtgggggccgaggcaacaagctcaggcagacgccagccggggctgggacggtgcaggtgaggaggggctgcctgggggacagcccgcctcactgacccaacctgggacaaggtagtggctgggttaggggctggggtgtgtcttggagcccccaggtgacaggagagggaggaagggagtgactggtgaaacattaaccccctcagggttctgaagggaaggggaacatccttagaggacacagggagaagacaaacgtcccttcatcctgagattcacttggaaatcccctgaacttccaactcctggctgatgaaacggagcaagttgtctctgccttatggcctccatcaccaagcctgaaggagagtctctcagcccggtttgggagtaaacccaaaaccgttcattcgtcagggaatgccccaggttggttcacgcgagttttaaaatgaatcggaggtgaaatggagctcattaccctctcttcagcccgaccctcaatctttggcagcgaggggcagttatgggacggggggcgggtgggaagagcgcccagggccccctccgggttctccc

SEQ ID NO: 128920 - DNA, 532 bp, Homo sapiens
  chr17:46830189-46830721
  hyper
cggtagggatgcctgggagtctagggagtggcgggggtgtttcttggcccggcagggtggggtttccaagcgtgatctcctcgccctggcagagccggggtgccgggtgggggcaggctcgggggcctgcctgcggtgaatcaggcttgtgacctcaggccgtccaggtaaacatcctctgcgctttggaaactgttgggactagaaaggagcgggcggcagggagagggaagggggaaggagggattctgagtggaggagacctctgaaatcctctctcctgccaggaaaccagggcggtcttccaagcgggcagccacgttgcctacttgaggccaaggcagaagcatcaatcacatggggcgtagtttctgtctggctaaagaacggctcacgcggacctcgggaatgcgactgtggaaacgacggggaagctggaagggctgggtggcgggggaagctggagggcacagcttccagattccagtttgttaagaatcacctgaaggacgtttctctgaagggaaagtgg

SEQ ID NO: 128921 - DNA, 1107 bp, Homo sapiens
  chr17:46831218-46832325
  hyper
agcgctgcagagccccgtgcttagtgaccaaaataatgtcccgcctgcctcatcttcctctcggatttttgccaaggccaaactgcgcgtgtcccagaaaaaaaccctcggacacttggcctctgccctgtctcagccgagtgactaggatgactgggaagtgaatcacaggaaaatcacccaagcccactcttctccacagccggtgagcagaaggaaggaagcaaagaaggaagggaggaagggaagaagggagagttcagttccctttcgtcgttcacacagtggtcctccacaccaggaaacctaagggctctgtggagggccaggtgccgtggcagcaacactcctcagggcctgtttcagcaccccatttacgtggcacatgaaaaattcaggatgaacgccctggctgaaagctcttcctgggtttgggacatcagaagaccttcccgggatgggctcttgtctctgcagtagctatgacctgcacataaacctgtttcctacactgtaaaattggcgtaaccaccattccctcccagtctttctctggagtcctaatgggaacagtgacggaatgaaagtgaccacgctggaacccgaagcgctgttcccctccgtggcttcacactgatctccacactagaattccgtgtctgcagttcaagttcaaactactgtggtcggggaagggctacagagatctcgcttggccgtggagtcaccggccccgtccagtcttgcttgggacacatactggtttacactctctcgggttcagtttcctcatctgtaaatggggctcgtatccccctcataaagtggtttgggggataataaagcttgtaaaagcgctttgccccagtgcttggcacataatacgcgctacgttaacaatgtcgcgtacacgcccgaaccggaggaaccccattccacgctccttctggaaccgaattcacctctgaggctttggggcttcagagccggagccgcttgggcaaaaccagcagaacagcgagagggaacgggctggtctagccctgccctgagcatttctactgagacccccggtcctgcttcttccagcctctgctggatttctct

SEQ ID NO: 128922 - DNA, 467 bp, Homo sapiens
  chr17:46832489-46832956
  hyper
cgtcgacccggggtctttttccgccaaggagctcggggctcaagaactcgggactgggctgtgggcggggcatggttttcctctctgggcgtcctaatctccaatttcaggcaaattcgctaggaagaaccttcccgagcgcgccttctccaacaggacctccaagccagcctcacgcacgcaggcctggctctctcctgcagaatccccacctgccctataactacccacttcagatatgggggaatggaggagatattccaatcacgccatctacctacagtttccacggccccttctgttgaatggtattttcctttagggtccctagaagcagagcaaatgaaaaggccagggggaaaaaaaaaaaaaaaagaaagaaccggtgaattggctctgagcccaataaacggttcctctttccttctccggtcctttcccttccaacagagcgattgagaaatcat

SEQ ID NO: 128923 - DNA, 44 bp, Homo sapiens
  chr17:46891976-46892020
  hyper
gaatgagcactgggacgggtccactgggacgggtccattgcggg

SEQ ID NO: 128924 - DNA, 226 bp, Homo sapiens
  chr17:46894279-46894505
  hyper
gcaccaggaggctgcggtctggagccagcaccgggctttggggcgctcttacccgcaattcctactcccccgtctcgccccgctgggctgctagtccagcttgcaaccacacctgccggccccctcctcgaaggatgaaggagtaacgctcccattggctgccagacagccccaaccccaacccgcgctcgccctaactttgggtccgcccggccctcatatttgc

SEQ ID NO: 128925 - DNA, 30 bp, Homo sapiens; identical to SEQ ID NO: 54283
  chr17:46908823-46908853
  hyper

SEQ ID NO: 128926 - DNA, 322 bp, Homo sapiens
  chr17:46970398-46970720
  hyper
ccaacggtaatgaacgattgactgcctcggctggggcgggtcggggactgctgtgtaagatgggcaggatcctgcgcgacacctgcccagtatccgcctccagtcttcccgagagaccattccctttcgcaacatttccttcctggggcttgggcacatttccttgacttccgatctccatgactttgctttgaagacccactgctctgtccctctgacctctaatgccctcctcagctggggcacggtgcaaggaagagcgtggtctagggaggacggacgggggtgaaggggacgaccaaaggtcgtcattataagcaaa

SEQ ID NO: 128927 - DNA, 199 bp, Homo sapiens; identical to SEQ ID NO: 54286
  chr17:46985397-46985596
  hyper

SEQ ID NO: 128928 - DNA, 30 bp, Homo sapiens; identical to SEQ ID NO: 54287
  chr17:46986792-46986822
  hyper

SEQ ID NO: 128929 - DNA, 280 bp, Homo sapiens; identical to SEQ ID NO: 54288
  chr17:47072748-47073028
  hyper

SEQ ID NO: 128930 - DNA, 224 bp, Homo sapiens; identical to SEQ ID NO: 11343
  chr17:47073103-47073327
  hyper

SEQ ID NO: 128931 - DNA, 2061 bp, Homo sapiens; identical to SEQ ID NO: 54290
  chr17:47073388-47075449
  hyper

SEQ ID NO: 128932 - DNA, 8 bp, Homo sapiens
  chr17:47075726-47075734
  hyper
tacccgga

SEQ ID NO: 128933 - DNA, 162 bp, Homo sapiens
  chr17:47075879-47076041
  hyper
cggcgccgggtcgccatgctgcttcccgagacgccgaggctgggccgagaggcgcgcgcggtggcagtgagggaccctccccgccaggccccgctccgctcccccaggtccaccccttcccaaaccagccccgacaggtgaccgctccgtggcccaaagccc

SEQ ID NO: 128934 - DNA, 754 bp, Homo sapiens
  chr17:47209859-47210613
  hyper
cgaggaaggaacggtagggaccgtggtgatagactaggggtggacgcggggattgtgtttttctttaagcgggagagagaagcccgatcaccggcagcggaggagaaaagtccagggtagagatgggggcgctggtgtgggggcggtcaggagagaagggcgggggccgtcccaagcgtcctgcacctgccctactcgccgagaatttgcccgggtcggtgccagggcggggcagtcggcggcctggctgctaggctccgtgacatccggcagtctgagggcggcgggattcgggatgacttcgggcgggtgagtgtccccggggcagagcagagcgagaggtgaaacttcgggagcagggagcgccgcgggtcctttctggcgtctgcagagcgggcaggtgctggggacgcagacgccggagccagggagcgggcggttggagtcttaagtccaaccggttccccgcataggtggctgcagaggcgaggtgacggcgcgtgcggaacgaactctgcacccccaggaatggggagcgctggcttttccgtgggaaaattccacgtggaagtggcctctcgcggccgggaatgtgtctcggggacgcccgagtgtgggaatcggctcgggagtgcgggcttcggggctctctgcttggaactcagaggcgctgacccagcctggggcccgtttgctgcccacgggaggagccgccgtcaggggtatgtgagtgcccgggcgcggggactgcggg

SEQ ID NO: 128935 - DNA, 125 bp, Homo sapiens
  chr17:47301640-47301765
  hyper
gcgcacatctgcagccgtttcccagggcaccacgctggcgcggaacgagctgggctcggccttctgggcctcctgaatgaggcggtgcatggggtagccgcggcgcgggaaggccacgtcgccgc

SEQ ID NO: 128936 - DNA, 434 bp, Homo sapiens
  chr17:47301801-47302235
  hyper
cgtcgcccacgtagaagaggcgctcgaagtgcacgccgtcgtgggcccgctcgcgcaggtagtcgctgagcaccttgtgcttgcacatgttggcggggcagcgcgcgcagctgtgtgtgtggaacggccgcagagccagcagtccccgcgcatccggccccgacgggttgctgaggatgcggcggaacaggctgtggtggccggcggcgcgcagcgagctctccacgccaaaggtgttggcatcggagatgagaatcacctcgaagcaggcgccctgttttgccacaaactgcagcaggtcgctcatgcctggcgacaaagggatggcttcgtagatggcgctcaggtcccgcggccgcacgccctgctcgcccaggtacttgaagacgcgctgcatgtactcgttgtagaagccctcgcggtaggtggctcgc

SEQ ID NO: 128937 - DNA, 1137 bp, Homo sapiens
  chr17:47307529-47308666
  hyper
ctctggcgcacccccggctggcgggcgctgggctccaatgcgggcggggggtgcgcggctcggggaggggtattgtgggtggcagggagcaaggggacaccaattccttggctttgtcagagtcggggacggagggataccccagcactatgttcctgggtaggagagagaaggggactcactcctgagctccagaactcccccagtgccacgcgcgtgaaggagcgccttcaaactccacagcccccaccccgcgccgggaccccagccctcccctatctcccggagcccaggactcacgtgggggcggcggcagcagaggtctgtcccggctgagtttggagtgtaagaagtggggaagggggctagctgaggtattggggcgcaggatggagcaaggggtgcttacgggaattggaggggacgcggtgtcttatccacccccggatttctgggctccggctcacgagtccctccagtcccgagggactgaggatgatgtgcgtctgagccgtcccctccacttgcccctcatcccccccgggcagccgccgcgtcccctttaaatgcccgggagccggagccggagccggagccgcggccggcgctgcggctgctgcagcagcggagcccaccgcagtccccaacgtcacaagcgactgtccaatcgcagcggtgccggcgcacatcaaaggggcgggccgcccgaggccacgcctccctcctgccccggaggctccgggagcgccagctaaggtgggattaggctctcggggaaagggtagcagggtggggatggagcgctgcccttccgaggaacgtgggtgggggcaccctcactagagcggctgtggacatacgctaaatccctgcctacacacccaaaattgctagggctgtggactttctcatccgccgcctccagggcttcggttcttgagatttgcagaagtgcacctccacctcctgcccattccgctgtcgcgtcctaaacccagtgggaggcacgggatgacccagccctcgggacccttttccccagattataggttactgaggattgcgggggttggcgggaggaatgactccctacccccacccccgcccgtaaagttggtggagcgggtggtgacagac

SEQ ID NO: 128938 - DNA, 30 bp, Homo sapiens
  chr17:47438078-47438108
  hyper
ttcccagaacaatacgggcctggccatcct

SEQ ID NO: 128939 - DNA, 30 bp, Homo sapiens
  chr17:47438896-47438926
  hyper
ggcaggagaacgctcgcaggaggaccggtg

SEQ ID NO: 128940 - DNA, 399 bp, Homo sapiens; identical to SEQ ID NO: 54295
  chr17:47439787-47440186
  hyper

SEQ ID NO: 128941 - DNA, 203 bp, Homo sapiens
  chr17:47492338-47492541
  hyper
tcaccctggttctgcggctcttagcagatgaactacaactcccaaaaggctatgcagcggcgggcccgcggagaaaagcgttttctctttggtgatcaacgcgaggatgttgccgcaaagccttttgggggctgtagttttctggggctaaatgcacgtgcctatcctgtacagaggctaagactgccgcaaggagagcctta

SEQ ID NO: 128942 - DNA, 30 bp, Homo sapiens
  chr17:47547416-47547446
  hyper
caaatgacccgcatgcggccctgcccaccg

SEQ ID NO: 128943 - DNA, 14 bp, Homo sapiens
  chr17:47547682-47547696
  hyper
cccgtgtccctccc

SEQ ID NO: 128944 - DNA, 91 bp, Homo sapiens
  chr17:47547746-47547837
  hyper
cgttccaagggaccgctgcccggcatccatcacggctgacagactggggatcggggtgggggaggggacgccgacacggagctgccatcgg

SEQ ID NO: 128945 - DNA, 151 bp, Homo sapiens
  chr17:47563692-47563843
  hyper
aacactcctgccttacgctcttggagggaagctccactcccgggcctgccaagggctggggccagaccggaaacgggatcatcttcgatcaagggctgtgggctctgctggttcctgctgcctgtgccggctcccccgtcctcccctcctc

SEQ ID NO: 128946 - DNA, 2070 bp, Homo sapiens
  chr17:47572595-47574665
  hyper
gggcggggcggaggcggggccgcagcactggcttcacccagcctctcccgcccgcagccagagcgagccgagccgcggccagctccggcgggcagggggggcgctggagcgcagcgcagcgcagccccatcagtccgcaaagcggaccgagctggaagtcgagcgctgccgcgggaggcgggcgatgggggcaggtgccaccggccgcgccatggacgggccgcgcctgctgctgttgctgcttctgggggtgagtgttagccggagggggcccgctccctttcccgggatcagaactccgagaagagccgggcgccgccaccaaggaaacagaacagagcattggggtcccagatactgagggtgggtggtgggaaaggacctctgatgccgggaccacgaaggagggtctagggttcccggagcgcagaggcgactctccagggtggagatgagggcaagaccggagcacggatgccggtcctcaggtaccgcagggggcggtgggggagctgggaggggtctttcaagagggggcatggggctctccgatgcccaggttcttcggaagaggacactcgaatgccgggatcccgaagggactttcccctcagcatctcggtctctggagagtcgtgggacagaaccaaggcgagagaaggagggggaactggacggggactagagatgagaggggcgagctgggctggggcggggagcccgggacgacgggatggaacaatggaggaggtcggagggactggaggcagaggggacccggcaaggacaatggggaccggccagacaatgggggggaggggcgtcggagggagaggttggggagcgggagagaggttgagaagtgggttagggagggcagaagaggggcgacggcgagggcggcagagagatggaagcagaaggaaaggagacagagcggggcgcggaccctgaagtggtcggggtcccgcctgcccgctgagggacagtgagacgagaagagagagcagaggcttggacatttccagcgcctgtccccgcgctcctgctcgcggcctctcccagtcccggaattggggctgcggatctaaggctgggaggggagtgcccacttcgccggggcgaacccgctcccggggttcccccacggccggcgggctcctccgacgcgcgtgttctcacggcttgaagcagcgcagcggatcgcgagggacggagcgggtgtgcccctacccgggctggcggtggctacgtctcggggtgcagagcgccggggcgcactaggcggggacccttcctggccgcgcgcagctctggctacgcaggcgggaggcggcaggcagggggcgctgcggggcgaggcaagtgcagtccgccgctgcctgcctgcgagtctggggctgcgcgccgctccccacctagctgcgcgacccgagcgccgcgcccaccgcgctccgtgggctcccgcgcctcgaagggtcgggatccggtctgagcctctcctggctctcggtgcaagccgctgggcacctaacgagacgggggcgcccggacgcctcggattctgtagcgcggtatcccgggccaccgactcggcaaaggtcggcgggtcctccgggtggtccgacgagattgtcagatgtggcctgctttatggccatgaaccgaatgccctggaaggtctggcaacggaggaggcgtcttcactctccccgccagcatctttcatcagagcactgcgccccaaattccggctttacagatacggagactgaggctctgagagtttaaacgacttggccaagatctcacagcaagttgggccagagtcgtggctagactccccgacctgattcccagctcggtactcccccaccttttcagggggcagccgctgtcccagctcggggtcacggctgcgtttcccagcagggcggggggggttgacactgtccccagagtccgtcggcggtagagcctgcgggtgaggtgggcagagattctgtccgggtgcgggccccagcccgaaagctcagccccagttccctggagctgtcaggacctgtggct

SEQ ID NO: 128947 - DNA, 427 bp, Homo sapiens; identical to SEQ ID NO: 11350
  chr17:47574903-47575330
  hyper

SEQ ID NO: 128948 - DNA, 30 bp, Homo sapiens; identical to SEQ ID NO: 11351
  chr17:47645353-47645383
  hyper

SEQ ID NO: 128949 - DNA, 216 bp, Homo sapiens
  chr17:47647458-47647674
  hyper
gcgagtgagcagagcgcgcggcgggcgcggcggggcctcaccttctcccgggccaagcgcccacaggaggcgccccgagtgcccaccaggtggcgcgctgacgccactcgcctcccacgcgccacacccgcttggtctcttcatcgccccctgcggagctggcgtggaccgcagcgacttgggtccagccgacaggtggccgagggggcagccact

SEQ ID NO: 128950 - DNA, 852 bp, Homo sapiens
  chr17:47653241-47654093
  hyper
gggcgagagcggcgccgctggagccgaggggggcgccgagcgcagatctggagcagcagagccacggcgcagctggggcccttcgaggcgctcggggcgcacatctgggacctcgagcgggggccgtgccgcgcgcagctggaccaggggaggggggcggcggctgcacagctggaccgaagggggcggggtcggccctgggcgacccgctgaggggagggccgcgggccgccggggactggagcatgggacggcgcgcctgaaggagcaggaaggggaaggaggcctgggaccccgaaaagagaaggggagagcgaggggacgagagcggaggaggaagatgcaactgactcgctgctgcttcgtgttcctggtgcagggtagcctctatctggtgagtggtccgaggggagctgcgcagaggggcgggggcccggaggatcgggggagagcgcgggaagcttgcgagccctgaaactttctcccttcccccgacatcccggggatggcggggaagactggaggctgggggagagggcgggtccgaggccggagactggacagatagggttaataggggcggggagagggtgcttggctggcccacccactccgcagcgggtggctggaggtgcgaccagcgctcggaaaaaggcctggagccgggtcgccagggttaccctaccccttcccagagcctcaggaccgctgaagccgggggcgagtggggcgcgggtcgtggagctggtgacctgcaggcttttcccctgacctctgggactcagagagcctcgggttctgggtcccccagagcacagagccggtccaggcggggggcggcccccgcgtccc

SEQ ID NO: 128951 - DNA, 30 bp, Homo sapiens
  chr17:47754961-47754991
  hyper
cgcgttcacactcgcgcatgcgcagtcacc

SEQ ID NO: 128952 - DNA, 30 bp, Homo sapiens
  chr17:47755338-47755368
  hyper
tgcctcatactgtccgcaacatccgggacc

SEQ ID NO: 128953 - DNA, 44 bp, Homo sapiens
  chr17:47785462-47785506
  hyper
ggaaccggcagcctcgagactgatccctcgccctggagattttt

SEQ ID NO: 128954 - DNA, 30 bp, Homo sapiens; identical to SEQ ID NO: 54304
  chr17:47840628-47840658
  hyper

SEQ ID NO: 128955 - DNA, 30 bp, Homo sapiens
  chr17:47840858-47840888
  hyper
actcctgctcccagcgccagccatccgcac

SEQ ID NO: 128956 - DNA, 109 bp, Homo sapiens
  chr17:47841693-47841802
  hyper
cggttttccaacatcccaggggctgctgattggcctgtacagaagagggctggttctccagcgccaccaatgagaagacgcagaataggggagcgtcacacccagtccc

SEQ ID NO: 128957 - DNA, 317 bp, Homo sapiens
  chr17:47865437-47865754
  hyper
gttttgcctcctccccgcgacatcaactaactcacttgctgttagctaagggcaaggacaatgtctcctctaccagacaggaaacttgatggcggacgctatccgttagttcctttttcaattccccattcccaccccttcgagaccacgatgtttcttaaaatacaaagtttcttttacaaaacatccctccgcaactttgagtttatataataaacggaaacgtcctttaaacaatcaggctacgaaggggttaaatctaatctcagcaacctgatggattctggggggtttccttcctcgactctagaaattaa

SEQ ID NO: 128958 - DNA, 30 bp, Homo sapiens
  chr17:47866100-47866130
  hyper
actgatacagaggccgccacggagcccgcc

SEQ ID NO: 128959 - DNA, 521 bp, Homo sapiens
  chr17:47928287-47928808
  hyper
catcctgcatggtcccgacctcgtcagcgccagagccgtcctgcatgaggcaggatgtggtgggcgcacagcagggacgaggcggggggcacggggcagaaaggagagggcgacgggaagaaggcagagaaaacccaaaaggtccggaaggctgggagggaggcagggcacaggctggaaaccgcggctatttgcagcgtcgccctcgggctgcggtcaggctggcgctggcagtcctggcggccgagcccgccgcccctcccggtgccctcggccacccgggcacggccctggccggtgcgtccagctccgcccggtccccgcggccccggcggcgggtgggctgcggcgctgccgccagaggagggacccggccgatccggggtgggctggggcagggccgtgcgcaagtcggggtgcgacccccggcggggtatgtcgcggcggtggcgcccccgcgggagccgggccgggggcgggtcgcggccgcggcgaggctcccagggcgccgggtgggcgca

SEQ ID NO: 128960 - DNA, 174 bp, Homo sapiens
  chr17:47929092-47929266
  hyper
atcttgactgaggagcgcgaacccgagggagtggggcgtggggctgggaggcgaggcgaaagggagagggctcggtggggggtcatgactgcctggtggggaccctggggacaggggcagccgcaggttgacgatctgggttccttcaccgaccacgcacgaagggtgggggga

SEQ ID NO: 128961 - DNA, 75 bp, Homo sapiens
  chr17:47967995-47968070
  hyper
gcgccgggcccaagccgaccccctgttttggctctgccgcctgatttctaccgcaggcagatatcttccgagacc

SEQ ID NO: 128962 - DNA, 167 bp, Homo sapiens
  chr17:47968095-47968262
  hyper
cgctaccccagggccccaaatgcctgagagaggtggaagaactcttataactaggcttctgccccgtcactgcctactctagtcccgccagttttggggtagccgggggactcgctggcctcctgttcccgctgggagcggggccagggtctcgaggtaggggggag

SEQ ID NO: 128963 - DNA, 249 bp, Homo sapiens; identical to SEQ ID NO: 54308
  chr17:47979496-47979745
  hyper

SEQ ID NO: 128964 - DNA, 542 bp, Homo sapiens
  chr17:47987573-47988115
  hyper
gctttcctggaggagcggctcccggtggcggcgggctgcctggaggaggaggcagggccaggctgggcgctgaggaggccgccccggtggcgctcccacgacccgggcaaggcagtctgggcgccgtctccggtctcggggcctgcggtcggggcaccgcggtgccgcgtttgagccggtcagctccctgcggaaattacaggggcgctcggcgctgcggtcgcgccccccggggcagcgcccgctggttggaggcgtttaaattgaaagcagctttggggagagggggcggacgcgggccgccgagcaaggggagggggcggcccggcacagcgaccccattgtctgtgcccgccgaggggtggaaccttgcggtgagctcggcgcggcgccccctccccgagctccggcccagcggcgctctcagctggttcccacgctgcgcagcgctggccacgacccctcgtcccttctccacctgggtctgcctcttggctcgctgactgcaagcctggcagcgcgcacgcgcacacttcctccag

SEQ ID NO: 128965 - DNA, 458 bp, Homo sapiens
  chr17:48041211-48041669
  hyper
tgtcttcgatgttgccgctagaggaaccttccaactcccactactcccacctccggctttcaccctgcacccggcgatgaagacgtcggcgaaacgcctactttccatgcctaggtctgggaaggtctgaagatcccggcggagctgccttcgttcggggccgggcaaattcgttgcagccgggttggcctcagggcctctcgccggctcgctatgtttccccggggcgccctggcaggccagccggcggtctgtcagtccagctcctggtgcgggcgcctcgttttggtccaccgggtccggggctgggacaccgagggaaaacttcagagctccgggccaccgagcctggaagttacgcgtcccccagcccacgcgtccccaatcccggggtatttcctgctccctcatccagcgaagttcagcgtcgcgtgtctccccagcggcgcagcctgcct

SEQ ID NO: 128966 - DNA, 3 bp, Homo sapiens
  chr17:48041886-48041889
  hyper
act

SEQ ID NO: 128967 - DNA, 236 bp, Homo sapiens; identical to SEQ ID NO: 54313
  chr17:48041904-48042140
  hyper

SEQ ID NO: 128968 - DNA, 434 bp, Homo sapiens; identical to SEQ ID NO: 11361
  chr17:48042213-48042647
  hyper

SEQ ID NO: 128969 - DNA, 328 bp, Homo sapiens; identical to SEQ ID NO: 11362
  chr17:48042750-48043078
  hyper

SEQ ID NO: 128970 - DNA, 30 bp, Homo sapiens; identical to SEQ ID NO: 54316
  chr17:48045891-48045921
  hyper

SEQ ID NO: 128971 - DNA, 30 bp, Homo sapiens; identical to SEQ ID NO: 54317
  chr17:48046350-48046380
  hyper

SEQ ID NO: 128972 - DNA, 331 bp, Homo sapiens
  chr17:48046648-48046979
  hyper
ctttcccaggcgcgcgttctccgctgaaagaggctcagagagacactttctccgggatcttaagtgtgggggctgctggctggggggcccgtccggcccaacgccggaggcttggaaaagagagttggcagcgggagcggactacgtgccgggccatggcccttctgcccgggccctggccacaatgacctctttgccctgccccctccccggccgggacgcctccaaagctgtcttcccagacctcgcccctgtcccgtcggtagcggctgcctacccgcttggcttgtcccctacaaccgcagcctcccccaatttgtcctactccagg

SEQ ID NO: 128973 - DNA, 319 bp, Homo sapiens
  chr17:48047056-48047375
  hyper
cgcggcgctctctcagcccctctgcggacctgcagagcaccctcaggaactcgaggcaggtaagttcggccgtggaggctcttcccacctctggggttcggctcctgtgcgcccctaaacttctccctcgcctggttggacgcagctagcgggattcaaaccttccttggattccctgggatgtgggggtggggggagggcgaagggatggggcgggagacacggggggaggggcgggggagagttgatctaggtctcctttcaaaaccgacctggtttcgatttgcagttgtgtaaagacaggcgagagggccccccc

SEQ ID NO: 128974 - DNA, 1759 bp, Homo sapiens
  chr17:48048843-48050602
  hyper
ggggctccatgatcgcgacccgggcagatctcgtaacttgctggaactggggtagggaaaggcagctgtccgggaaggaacttggagggggtctgctgggagagttggggcgcggagggctatgcgaattcagcaaccgggtcggcctcagagactctgcgtccccgctcgaattgcgcagtccacgcagccagagaggcgcgggtgggctctgggctgccagcccagagctgccagcagtggggtcgaggcaggggaggcaggacaggcgcgggcgggagcggaaacccaacggtttttctgggaattggttgaggcagggtcgaggagggaggatctcagaagcccgcagcgcccgaggccacgggtgagggatgcgggggaggtgacggcagctggtgaccgcggctggccgagggcgggtacactgacgtgtggagggtgagcccgactaggggaagaaggtggggggacgcgggcggacagaagccgctctctctcggctcaggtcggctggacagacccgcagggaatgcggcgaacgctgccctaagcgcccgggcattgcggctgctccatccgccctactcctcccattgcctgggacctctgcagcgtccccgtagagccgcgcaggttagggtggctggcttggaagaacagaaacccctcggcccaaccctcccctgtccctcagcattctagggctgggctgtcccgcggccgagattcctggagagctaggcgggccagagctgaccagatcccccgcggcggcaccgcagcgcgatccaggagtggccccgccgggctacgctgcgcgctcttggaacccgggtcaccttccctgccgccggaaccgctctgtgcgcgctgcccaacgaaggaaggggctgccccacgcagacccggcttctgggggtccctggaaacccaggcggccacggtgtggcgggggagacatggtcacttttcctgcagggtgcgcctgagcagaggggcagcccgttacagtaggcgaggccagggcaaacccggggtcactatcagcgctgcgagactggtattcaaggtcctctcagccgggcctctcacccaccccgctggccgcagccggaggctgccacgcggacaccgtctcaagcctctgagcattgctctgagcctctgcctgcaatgtccttcctctgtcatctctaggcctcggctcagccctggacctagcctttctgccccgccctaccccaagctggcgccaccgcccgtggctgaactccgacctcccaccgcaggcgccgcggtaccctggctgtggccctcggcgctttcttcctagggtcacaggacccatacgagtgggagctccctgggagcagaactgcgtcttgtatcacctggcgcggtgaacgtgggggttgaaacgctccacgcggaaggtagagggcaggggccaagggggcgatcctggtggctgcgctttttgctatttgctgccgacggcatgcagacgagatgcaaataagcttatgaaactgtccgtcctaccccctcgctccctcctcgccccctacaccgtgttgtgctgcccaccagactcggagaagccgcggctgtccccggaaccctccgagcggcgccctcaggcccccgccaaaaagctccgcaagccgaggaccatctactccagcctgcagctgcagcacctaaaccagcgtttccagcacacgcagtacctggcgctgcccgagagggcccagct

SEQ ID NO: 128975 - DNA, 695 bp, Homo sapiens; identical to SEQ ID NO: 54321
  chr17:48070683-48071378
  hyper

SEQ ID NO: 128976 - DNA, 95 bp, Homo sapiens
  chr17:48071609-48071704
  hyper
ctcattgccccctcacgactcctagtctccccatcccttatccaaaggagggcccctagagtttccagcccctgccgcctacccccaagccctct

SEQ ID NO: 128977 - DNA, 54 bp, Homo sapiens; identical to SEQ ID NO: 54323
  chr17:48071806-48071860
  hyper

SEQ ID NO: 128978 - DNA, 546 bp, Homo sapiens
  chr17:48072069-48072615
  hyper
tacgccccgtattgccggtaggaggctccgtaggtatattccgacttgggcgagtaagcgcccgtgcctgcaagcccattgagattgaattggtggtggtaggtgtaggggttcaccgtctggccatagggctggcccgagtagtaatcgtgctggggagcgctgtagtagcccaggtcagtgacagaagactcgggcagggtaggcgagtccttggagcccgcatggcagctaagggagctggagatgtcggtgaggatgctgctgagcttgcgatcgaaggagccactcatcctggcgggcgctgcacctccccagggctggcctccgcagaggacaggaacggaccggagtgcgagagaggcggaagagacgaggcaggggtgtgtgtccagaaggcgaagggaggacccggccgcgtctggggggagggggaggccgagaggcgcttacaccattgcctgccgtcaggcggtcgctgcgcgcctctcctcgcgtcccaagccacaatcaaatgctgccagctccgcccggccagccggttat

SEQ ID NO: 128979 - DNA, 30 bp, Homo sapiens
  chr17:48074302-48074332
  hyper
agaaacagagggcacggtccgcggactgag

SEQ ID NO: 128980 - DNA, 86 bp, Homo sapiens
  chr17:48133039-48133125
  hyper
tcggttcccagatgcgccaatgccaggtctctccagcccggctggccttttcagcagcagcagcagcagccgcaggaaagcggcca

SEQ ID NO: 128981 - DNA, 244 bp, Homo sapiens
  chr17:48133661-48133905
  hyper
acgaaaccgatcagcgctacggagcgcagcggccggcgggttccagtgtcctccggcggcgcggggagcaggtgaacaggtcctcacgcccagctccgcgccctcacgcgctctcgccgggaccccgcttccgctggcagccatgggccccggccccagccgcgcgccccgcgccccacgcctgatgctctgtgcgctcgccttgatggtggcggccggcggctgcgtcgtctccgccttcaac

SEQ ID NO: 128982 - DNA, 30 bp, Homo sapiens; identical to SEQ ID NO: 11366
  chr17:48134211-48134241
  hyper

SEQ ID NO: 128983 - DNA, 30 bp, Homo sapiens
  chr17:48171933-48171963
  hyper
ctttctcaggtggtcgcgctagatgtccaa

SEQ ID NO: 128984 - DNA, 244 bp, Homo sapiens
  chr17:48172653-48172897
  hyper
gcgccatgacgagccgattggctgggcgttggaatgcccgccagggcaagggtagggaggaggcggccgaaccgcgtcgctgggccgaaaggtgcgcgagcgctgcccgcgcggggaccacaaccaaagtcgcggccgccgcagccatgcgctgggtgtgggcgctgctgaagaatgcgtccctggcaggggcgcccaagtacatagagcacttcagcaagttctccccgtccccgctgtccat

SEQ ID NO: 128985 - DNA, 343 bp, Homo sapiens
  chr17:48206096-48206439
  hyper
gaaggaagtgaggagtaggaagaagcagagacagacacacaaactggcggagagtccacagggctgctgagaagaaagagatcacaccgagagtggggccacgggaactggcactgggaacaagggcttccgccgctctaagtgacgcccgagggtgggagagaagggagaagcccttcgggcaggcgataggaaagggcccctgaagaggagaaagcgacagagagaagtgcaactgggagaggccgggaagaggtggatgggaaaggagactagcggtcggggaggcagttgtggagccagagaggtggtccccccttcccatatcgccggccgtccactg

SEQ ID NO: 128986 - DNA, 31 bp, Homo sapiens; identical to SEQ ID NO: 11369
  chr17:48207254-48207285
  hyper

SEQ ID NO: 128987 - DNA, 219 bp, Homo sapiens
  chr17:48207629-48207848
  hyper
tcattcaacaaacgtccgccgagcagccggggcgccgaggctggaggggacagcggtgaacagaacccccgccccctaactgcgctcaaggccagtgggccagtcgggggctcagacgagtggggaggccctcacgagcctgggcgccatgggcccagctaacagagggcacttcttgccggaagggagagcgcacccctggcccggcctgggtccagg

SEQ ID NO: 128988 - DNA, 132 bp, Homo sapiens; identical to SEQ ID NO: 54331
  chr17:48226427-48226559
  hyper

SEQ ID NO: 128989 - DNA, 30 bp, Homo sapiens
  chr17:48227693-48227723
  hyper
acatacttttgatgcggtggacgttggagc

SEQ ID NO: 128990 - DNA, 30 bp, Homo sapiens
  chr17:48228609-48228639
  hyper
ccgctgcccccggacgttggccagcactct

SEQ ID NO: 128991 - DNA, 30 bp, Homo sapiens; identical to SEQ ID NO: 54332
  chr17:48229250-48229280
  hyper

SEQ ID NO: 128992 - DNA, 30 bp, Homo sapiens
  chr17:48238916-48238946
  hyper
agcccggggcggcgcgctccgcaggcatcc

SEQ ID NO: 128993 - DNA, 30 bp, Homo sapiens; identical to SEQ ID NO: 54333
  chr17:48277201-48277231
  hyper

SEQ ID NO: 128994 - DNA, 30 bp, Homo sapiens; identical to SEQ ID NO: 54334
  chr17:48278071-48278101
  hyper

SEQ ID NO: 128995 - DNA, 178 bp, Homo sapiens
  chr17:48278763-48278941
  hyper
ggacttactgtcttcgtcttggccctcgacttggccttcctcttggccgtgcgtcaggagggcggtggccgctaagaggagcaggagccggaggtccacaaagctgaacatgtctagaccctagacatgtagactctttgtggctggggagggggttagcgtccgctcatgcgtggcc

SEQ ID NO: 128996 - DNA, 60 bp, Homo sapiens
  chr17:48350453-48350513
  hyper
tcaagacagattggcgacacagcaggaggcgcccaaggacatgacgttgagcctctcagg

SEQ ID NO: 128997 - DNA, 30 bp, Homo sapiens; identical to SEQ ID NO: 11371
  chr17:48351993-48352023
  hyper

SEQ ID NO: 128998 - DNA, 30 bp, Homo sapiens
  chr17:48423839-48423869
  hyper
gtgacctggagacccgggccctggtggatt

SEQ ID NO: 128999 - DNA, 30 bp, Homo sapiens
  chr17:48450230-48450260
  hyper
cccaaatccccaaccgccaaggaacccgtc

SEQ ID NO: 129000 - DNA, 30 bp, Homo sapiens
  chr17:48450609-48450639
  hyper
agttgaaagagtggcgggagaagttgcagg

SEQ ID NO: 129001 - DNA, 30 bp, Homo sapiens
  chr17:48474935-48474965
  hyper
agcgtgtgcgggcacgccccctggtgccca

SEQ ID NO: 129002 - DNA, 273 bp, Homo sapiens
  chr17:48503148-48503421
  hyper
tcaaggacgcttcgcgcctgctcctttggcccccggctcgcaagtagcggggccagcacgtgacccgagggggcaggggatggatggatcttgaccttgccatctggcccctcacggatgtgctgctggctctccctctaggaaatcaacaaatttttgcgcttctaacatccaggcccctgaggatggtcgcgaggaagatctgtttcggactgcagctggggccttcggatccagaggaaaccagggctattcttcgagggtgggaggggg

SEQ ID NO: 129003 - DNA, 40 bp, Homo sapiens; identical to SEQ ID NO: 54338
  chr17:48585620-48585660
  hyper

SEQ ID NO: 129004 - DNA, 30 bp, Homo sapiens; identical to SEQ ID NO: 11374
  chr17:48609908-48609938
  hyper

SEQ ID NO: 129005 - DNA, 30 bp, Homo sapiens; identical to SEQ ID NO: 54340
  chr17:48610240-48610270
  hyper

SEQ ID NO: 129006 - DNA, 195 bp, Homo sapiens; identical to SEQ ID NO: 54341
  chr17:48619095-48619290
  hyper

SEQ ID NO: 129007 - DNA, 608 bp, Homo sapiens; identical to SEQ ID NO: 11376
  chr17:48619346-48619954
  hyper

SEQ ID NO: 129008 - DNA, 243 bp, Homo sapiens
  chr17:48624466-48624709
  hyper
ggcgaagacccgcccgcggctccgtaggtgcccggcccgcccctcgcagcctcctgacttcccttcctgtcctcagcggccgggcccacggccccgagcagccatgctgggcgcgcgggcctggttgggccgcgtccttctgctgccccgcgccggtgcaggcctcgccgcgagccgcaggtacgggcgggcgagcgggcccctagggcactccctgcgcctgcctgcgggcccagtggaggg

SEQ ID NO: 129009 - DNA, 1429 bp, Homo sapiens
  chr17:48636444-48637873
  hyper
ccccatcggccggggcgggaactgagacgaccccaaccctctgcggtggcgggaggtgcgcgggggctgcgtgggtggtgcagccttaggagagtgaacaacgcccaggggtgatggcctcagcaaagtgaggggtggtgatggaggtcatccgacccatcccgccgcctctccgcagtggcgcaagcgccccaaaatctccggagagggaactgactgacccactaggttccgccgtgtctacctctcgcagatgttggggaagtgcttcccggcgtctaatcctcgctgttcccccctccaccggcgcccagcacacccgcggcgctccgctcccgggtacccacagctttctggagtggcgccggcggcaggagagagctagagccgactgagccccagaactcggggaggtaggcggggcaagggccggggtctgcgcgtgcgtgtgcacgcgtggaaagcacaaacccacgagggcccgctgccggtagggttaaggtgagtgagtgaaggcggcagacccgcgaagttccagttccgcggacactctttccctaagccacatagggacttaagagaaactgaggcacgaagttggggggtggcggtggtggggactttgaaggtcgagtcgataaagcccagctctgtgcttccgccccctcccacacactcgagacccccacaggttccttcttaggggtcctcgctctgctccgcagcccctcctggggatccgggctctgcggtccagcgcgacctgcctggggccacgtgttcaagcacgaagcccctgcgtggagtccacgcccttcaaaaggtccctaggggcaaagggatgaagcccaggagcgtcaatgtgaggtcaggtccagcgggttagggttacgaggtcagggtcgaagtctcagaattgactcgggagtatgaccaataagcccaagagatttgtggaggccacgcccagaccatgcctaccctagcctttctcgagctccgcccgtttctccaagactgggcccctccagcctgaagccccacccccaggacatccagctccgctccttccctcccccagtcccgcagccaagctcaactccagggtgggagattaaccaggtggagacctgggatttcgctctgggaccccctggtgacaaccctcacccccgtgccgcctgtctcctttcttccccaggcccgcccagagctgagctccgtcctccggctgctgcccaaatcaggggtcgtggacaaaggatgcctggggcctgcggccctacgccaggaccccgcgccgaatactctgattcttcgggctccctccaagggagtcccaaagaccccaatggccaataggaaagtgggttcggtctgggcagcagtctgattggctccagccttcgggagcggacccaggggcaag

SEQ ID NO: 129010 - DNA, 31 bp, Homo sapiens; identical to SEQ ID NO: 11377
  chr17:48638201-48638232
  hyper

SEQ ID NO: 129011 - DNA, 139 bp, Homo sapiens
  chr17:48638579-48638718
  hyper
gggcgcaggggaagcgggactcgcgccgggcggggtttccctgcgccccggcgccccgcgggcagcatgcccctgcgggcagggggagctgggctgaactggccctcccgggggctcagcttgcgccctagagcccacc

SEQ ID NO: 129012 - DNA, 649 bp, Homo sapiens
  chr17:48639234-48639883
  hyper
gacgcgagcaggtctcgtcggtaacccgggcttaccccacctgcgtacacacacctcagtcttcctgggttgggggggtggggatccaggccaggagaagagagctgtgccccgctggctcgcagctggacgccctccagatgtggtcaggggagggtcgtcatcctccagatgtgggaagcttcgggagcctgggagctgtactctgcccgcgccggttagcgagctgggtttggtttccgagtttggtggggggtgggtgggggcggtggggaggaagctgcggggacggaggaggggggaccgcaatctcctgggtttccctccttcccccgccccaaagtttgcggcggattctagggtctgatcccccaacctggtccttgaggctgaggtttttactgacctagaaggagatgttggggggcggggaccaggtcctggcccacctcaccccccacctcgcgggttggaggcacaacaaggagattccggcggcggctgatgtcaggggcgcagaatgagaacaagatgtggtggaggggagctgtctgcccccggagctgggagtggagcccctttccgctagagcccagtgccgcgggtgcctcctacccgatctccattcgatgcagggtgcttaagattg

SEQ ID NO: 129013 - DNA, 731 bp, Homo sapiens
  chr17:48711975-48712706
  hyper
cttggaaatagactcgactcctggactgttagcctcggtatttagagagacatccccctggcttggcccaggggccgctcgcaggggctgtcgccgtgccaagggcccccccacctctgccccaaagtccctcccagggaggcgctgtcgcaacccgcgggacgggggcagggagaccggacccagaggcactggggtagggctcggcagggcgggtccgggcggagcgcggggtgcggagggcggaggcggctccggcgcccgctctgcccgccgctgggtccgaccgcgctcgccttccttgcagccgcgcctcggccccatggacgccctgtgcggttccggggagctcggctccaagttctgggtaaggcgcggggctccggggtcactgcgcgggggccagggtcggccggcttcgcccggtccccgccgcctgccttcccgcggggccggcaggtatcccgggacggagcccctgagacggcctgggcgcccgggagggggcgatgggctcgggagggaggttggctgcgccgcccggagccgggtcccacgcggtgtcggggacctgccctgctctgcccttcccggctgcagcactggggagcccgggaaagtgaggaagagtgcgcggctggggcgcaaaggcacagtgcgtggctgggtgagtcggctccatcccagcccctccgtcgggtgcggaaggggcgtttcgcaatcagccgcgg

SEQ ID NO: 129014 - DNA, 105 bp, Homo sapiens
  chr17:48785240-48785345
  hyper
cgcctcccgaaggccggctccgggggaccctgttcagtgtgacaacgctgacccagatattttccgttccgacccggggctccggcgcccgggctggctgtttat

SEQ ID NO: 129015 - DNA, 46 bp, Homo sapiens
  chr17:48796757-48796803
  hyper
aagctcgggaaaaccgggcgcttggggaggcgcgcgggcagaggct

SEQ ID NO: 129016 - DNA, 30 bp, Homo sapiens
  chr17:48797124-48797154
  hyper
taatgggccgggaccgaaacctagccccgg

SEQ ID NO: 129017 - DNA, 30 bp, Homo sapiens
  chr17:48942796-48942826
  hyper
ctgctcacagccctcggagcccaagcgcta

SEQ ID NO: 129018 - DNA, 30 bp, Homo sapiens; identical to SEQ ID NO: 11381
  chr17:48944743-48944773
  hyper

SEQ ID NO: 129019 - DNA, 30 bp, Homo sapiens
  chr17:48945217-48945247
  hyper
gggcacaaacccgccgtacatgccaggcct

SEQ ID NO: 129020 - DNA, 38 bp, Homo sapiens; identical to SEQ ID NO: 11382
  chr17:48997200-48997238
  hyper

SEQ ID NO: 129021 - DNA, 30 bp, Homo sapiens
  chr17:49008516-49008546
  hyper
cctgcttagcagccccgcggcggctgactt

SEQ ID NO: 129022 - DNA, 383 bp, Homo sapiens
  chr17:49008768-49009151
  hyper
tcctctctggtcccccgcgctgccgagcgctcgcatctaaaggtcttgaacgcgttccaggtttctaatttcgtttgcttatgcaaccaaaaatattatggccgcgtttcctgggggtgatgaagtctatattctgggctacaggcacactaaaaacggcagcgccagggcccagcgccgctcgcgcgtgcaccacgcgccggctttttttggttcctccgaggcgcgggcagctctgcagccgcgggggccgcaggaggtgggggctggacccgcccggagctcgggagggcccgggatggccccggggagcgcaggtcccggcaggggccgagcgaacaagggccggcctggggcgcccagagacgcgggggaccgttctg

SEQ ID NO: 129023 - DNA, 681 bp, Homo sapiens
  chr17:49021779-49022460
  hyper
gaggtggggaggtggggctgtcggtgctccagggtccccgcagagggcagggaagccctggacctggtctgaccttgcgcgctagccccagaggtcgccgtgctctgctgtcggcgttcaggtgcccgcggtcgggccggggagggcagtaatcaagccggcccggcggctggcgaggggcgcgggtccagcgcgctgccctcggccgccgccctgagcggttatttataaccgcgggtcgcgttacctcctgaccttaagctggggcgggcgatccgcagcgattagcatctatctcctccccgccgcccgctgcgaacaaacacccctctgtgcgccctcccccgcccgccccgcgggaggccctgcaggaagcaggatgttgacccggagcctccctgcgctcctgcggcggccccgccacatgtgagtggcgggcggtggagtgcgggtgggggggaagcggggagcaggagctactcgtgtttgatggcttcccgagttgccaatgtcctggtctattctgagtgaccgccttatttacaatatagggctccccagcccgtgtctgcccaaaggggtgccctctcccaagccagtgggggccagccagccctggttggggcagcacctgcacaggtggtcccagaatcacaggctgcaaaccgcatcctccaacag

SEQ ID NO: 129024 - DNA, 116 bp, Homo sapiens; identical to SEQ ID NO: 11384
  chr17:49027999-49028115
  hyper

SEQ ID NO: 129025 - DNA, 188 bp, Homo sapiens
  chr17:49197805-49197993
  hyper
tgctcctggtcctgcgcgaacaccgagtccaggttctccagcacagccaccaccagcggcatcagctctttgaccacctcctcgtcatagcgcccgataagccgctcgaactcgcggtagatggagccggccaggccggacacccgctccgacatcacggccccggagccgccgggctcctcctgata

SEQ ID NO: 129026 - DNA, 131 bp, Homo sapiens; identical to SEQ ID NO: 54356
  chr17:49199265-49199396
  hyper

SEQ ID NO: 129027 - DNA, 30 bp, Homo sapiens
  chr17:49243625-49243655
  hyper
cgatctctgcctggcgagggcgcgccccgg

SEQ ID NO: 129028 - DNA, 30 bp, Homo sapiens
  chr17:49244143-49244173
  hyper
ccagagcctgcgcccgggccctgaccgcac

SEQ ID NO: 129029 - DNA, 30 bp, Homo sapiens; identical to SEQ ID NO: 54357
  chr17:49244619-49244649
  hyper

SEQ ID NO: 129030 - DNA, 188 bp, Homo sapiens; identical to SEQ ID NO: 54358
  chr17:49337242-49337430
  hyper

SEQ ID NO: 129031 - DNA, 30 bp, Homo sapiens
  chr17:49337772-49337802
  hyper
gctgggtaggggagcgggagttacgtagag

SEQ ID NO: 129032 - DNA, 104 bp, Homo sapiens; identical to SEQ ID NO: 54359
  chr17:50235154-50235258
  hyper

SEQ ID NO: 129033 - DNA, 947 bp, Homo sapiens
  chr17:50235416-50236363
  hyper
cgcgtgtctcttctcttcgcaccagcggcggaaaccgcactagcagcggcggcggcggcggcggcggcagcagccacctgaagccaccaacactgggctcttccagcaaaaacgagaccccgattcgtctggcgccccaagaagacatagacgatagccccccgccgggctgcgccgtgcaattccgggctcccgggagcgcgtagctcgctggctaagcccaggcagtccgcggcaagttgccctcgaagtccgcccccctcaccggggcatggtcggagggtggctgctgcgctccggggcagttcttctcctgcttccggggggcggggaaggagcagacacagcagacacacagagaaagagaggcagggattattgcccgaaaccgccagccgccggcagcctccgccgaccctccctgctccccaggtccgcgcgcagcctgcagcctctcagccgggttccggcagtgcgtccagggcgccgaggggaagggctgggccccggggactggggcgcggtgggggcacacagactctccaggtcgcgcgcgcccttcctgctcctctgctattttcctgaactccccagaacccccagttgcctggcttccatcgcccgcaactagcgccgctgtcgagattttccgcaatacaactgcaggggtcgttatttcctcgcctacggatccctacgcttcccaactcagagaggaggaggacaggtgggggcgggagggggaggaggagaaggaggcttggccaggtgagcgtcctcgccgccgccgggcgtcccagcgtcagctccgcagcccggcacccgggggcggaggcaggaggcccgggcggggaggtgaggctgagcgcggccatgaggaggaggaggaggaggctgggtgtcacagcttcaggccaccttggccgccgcctcggccccagtccctg

SEQ ID NO: 129034 - DNA, 867 bp, Homo sapiens; identical to SEQ ID NO: 54361
  chr17:52977560-52978427
  hyper

SEQ ID NO: 129035 - DNA, 144 bp, Homo sapiens; identical to SEQ ID NO: 11387
  chr17:52978453-52978597
  hyper

SEQ ID NO: 129036 - DNA, 30 bp, Homo sapiens; identical to SEQ ID NO: 54363
  chr17:53051517-53051547
  hyper

SEQ ID NO: 129037 - DNA, 30 bp, Homo sapiens; identical to SEQ ID NO: 54364
  chr17:53056455-53056485
  hyper

SEQ ID NO: 129038 - DNA, 141 bp, Homo sapiens
  chr17:53316182-53316323
  hyper
accgatcgtttgcacgtttgcattctcaatttctgcactatatagggcaactcagacatgaaaacaatctttgtaagaagaagtggaatgctaatggttcctggagttttgcaggaatattccaccggccccatttctaat

SEQ ID NO: 129039 - DNA, 452 bp, Homo sapiens
  chr17:53341252-53341704
  hyper
tcatttgtgcccattcgttcttgcagccccttccccagatcgaagactagggtcttagtaaggagaggtaaggagggaggggaagaacctgcctggccccccgcggagctctgcagggggcgtcgcggctgcacgccagcgcccgcaccaccccaggcgggaagggagttatcacacagggggtcgcacgcagatctcggggaccgtgggtgccacgaggtcaaactggcagagggagacgctgcagctgctgtaacagcaaggaaagccgaagcccccttaggggatactttacaaaattattttaatcaccgtgcaaacctaataacttgacccaagcgcaatcacctgtattcacccagagtaaatattcctaaaatcccgttcagtgtgtctgtgtctctcccgcctctttccgtttcaggcaaatgtctaccccccctctcccccca

SEQ ID NO: 129040 - DNA, 22 bp, Homo sapiens
  chr17:53341786-53341808
  hyper
cggacttataggaagtagttat

SEQ ID NO: 129041 - DNA, 1576 bp, Homo sapiens
  chr17:53342190-53343766
  hyper
aaggtccccgaaaatcggcgcgagcggcgacgctaaacacgcggcggcggggcgagcgggccaggcgggcggtgccgcgcgtggccccgcccccgcacgcctatgggcgcgaggtgcgggccctgacgtcactcttgtcagggccgcggcacatgggcggccggatgcgctgagcccggcgctgcggggccgcggagcgctggggagcagcggccgccggcgcggggaggggggtggggtgggacggcgcaccgcctccggtgctggcactaggggctggggtcggcgcggtgtcttctgcccttctgcagccgtcgacatttttttttctttctttttttcaattttgaacattttgcaaaacgaggggttcgaggcaggtgagagcatcctgcacgtcgccggggagcccgcgggcacttggcgcgctctcctgggaccgtctgcactggaaacccgaaagtttttttttaatatatatttttatgcagatgtatttataaagatataagtaatttttttcttcccttttctccaccgccttgagagcgagtacttttggcaaaggacggaggaaaagctcagcaacattttagggggcggttgtttctttcttatttctttttttaaggggaaaaaatttgagtgcatcgcgatggagaaaatgtcccgaccgctccccctgaatcccacctttatcccgcctccctacggcgtgctcaggtccctgctggagaacccgctgaagctcccccttcaccacgaagacggtgagcgctgccgcggccccgctccgggaagggacgacgctccgggggtccccctccgcggccgggcacgcccgctggagcatcccccaaccccgctcccgccctgtcccgcggcgccccggccccgcgctgatgaaattgaggagctcacccagcacccttcctccccttcctcctcctccatgaaaggggagggacccctcctgagctacatttaaaagagcttcgggcacccggcctccctgggtcccgctcctgcggcgcgggtgggaggtgtaacttgacaggtcaggatcgttccctagaacgaggcacacccgcacgcagagcgagcccgcctgcggagggcagagcctcccgggctggggaggagaaaccctggggcctggttctgtgcggggcagggggcgggggtcggcttgagggagggggtttcactgcgtagcctgggttttggggttgtgttacagcttctgttactggttagtatttggaactcacgaggtgtgagagaagactcgttttcttctggtgaagggtagctgagaaagcggggtgggggctggggccggtggggggagtggtctctcggcgggaagccgtgcacgcctccagcgttgacactttcccggtgcactttttctggtgggaggggagagcggagcaggctcacgtgtaaccgcgcaggagcctcctctggcttgagccctttcttggtaagtcccaaaccttcccaagacaaccttggccttagcagtagaggaggggtacgtgtgatgaggccccaaacccggctaagtgatgcc

SEQ ID NO: 129042 - DNA, 30 bp, Homo sapiens; identical to SEQ ID NO: 54368
  chr17:53445243-53445273
  hyper

SEQ ID NO: 129043 - DNA, 30 bp, Homo sapiens
  chr17:53498943-53498973
  hyper
gaggagccgggagccgtgcgcttaacggcg

SEQ ID NO: 129044 - DNA, 30 bp, Homo sapiens; identical to SEQ ID NO: 54369
  chr17:53558866-53558896
  hyper

SEQ ID NO: 129045 - DNA, 30 bp, Homo sapiens; identical to SEQ ID NO: 54370
  chr17:53922864-53922894
  hyper

SEQ ID NO: 129046 - DNA, 30 bp, Homo sapiens; identical to SEQ ID NO: 11389
  chr17:54376036-54376066
  hyper

SEQ ID NO: 129047 - DNA, 40 bp, Homo sapiens
  chr17:54670213-54670253
  hyper
taagaattacatcacgctgcgcaacgctgcggctctcgga

SEQ ID NO: 129048 - DNA, 30 bp, Homo sapiens
  chr17:54671131-54671161
  hyper
gagcccggagcaggcggagggaagtgcccc

SEQ ID NO: 129049 - DNA, 687 bp, Homo sapiens
  chr17:54671709-54672396
  hyper
cctggtggacctcatcgaacacccagaccctatctttgaccccaaggaaaaggatctgaacgagacgctgctgcgctcgctgctcgggggccactacgacccaggcttcatggccacctcgccccccgaggaccggcccggcgggggcgggggtgcagctgggggcgcggaggacctggcggagctggaccagctgctgcggcagcggccgtcgggggccatgccgagcgagatcaaagggctagagttctccgagggcttggcccagggcaagaagcagcgcctaagcaagaagctgcggaggaagttacagatgtggctgtggtcgcagacattctgccccgtgctgtacgcgtggaacgacctgggcagccgcttttggccgcgctacgtgaaggtgggcagctgcttcagtaagcgctcgtgctccgtgcccgagggcatggtgtgcaagccgtccaagtccgtgcacctcacggtgctgcggtggcgctgtcagcggcgcgggggccagcgctgcggctggattcccatccagtaccccatcatttccgagtgcaagtgctcgtgctagaactcgggggccccctgcccgcacccggacacttgatcgatccccaccgacgccccctgcaccgcctccaaccagttccaccaccctctagcgagggttttcaatgaactttt

SEQ ID NO: 129050 - DNA, 30 bp, Homo sapiens; identical to SEQ ID NO: 54374
  chr17:54673178-54673208
  hyper

SEQ ID NO: 129051 - DNA, 792 bp, Homo sapiens
  chr17:54673561-54674353
  hyper
aaggctcacagcctccgggatcttgcaggtccgagccccgaaatcccaggccctcggccggaggtgctggggatatcagggagatttgacactggcctcccctctccccggggacctaaggaagactaagggccatggtttcggaggggtccgaatctgggtgaaaatcaccacctctggcatctgcttttgggaagagagtatgcctgtgctcgggcactttctccccttgaggggtggggaggagggagaaatcggaaccggaatctttgcgctttaagattagataggggcagaaggcacgtaacccattaaagggacgtgcaaaacatcactcccaccccaccccttaaaaagccaactccttgggaccgacgcctgactctcgcatgcgtccctccgcctcagtccccagtggcgcccgtcctcacagctccacgtgggccagcctcctgacactgctcagcgctctctttatttatcttggactccaaagtcgctctcctttgctccctccccacctccctgccacctctccgcgcctccctcccggcgttccttccaccccaccccccaccccccccaaccccccaagtccggagtcccggcgaatctatgctaattatttcaaacctgcgcctggtccccagcgcagtctcaatgcccccggccccgcccgccctgtccctccagcccggcgctttcttccctcccgacgcagcctcgatggctcctcatttcaatagcctggccccggagccgagccccctccccggcgctgcctccgtcagc

SEQ ID NO: 129052 - DNA, 260 bp, Homo sapiens; identical to SEQ ID NO: 54376
  chr17:54674986-54675246
  hyper

SEQ ID NO: 129053 - DNA, 17 bp, Homo sapiens
  chr17:54755973-54755990
  hyper
tgctgctggtgcgagcg

SEQ ID NO: 129054 - DNA, 195 bp, Homo sapiens
  chr17:54756198-54756393
  hyper
gggggccccctccctcccccggctcccctcccccctcctccccgaaatttgcagacatctgctagctggagcccagcgttggagtcataaagaagagctggcaggagagtgatgtacagccctgggccctcccgagtgactggcgttaacctccaacggagagacgctcaccccgtttacgacggagccctttgt

SEQ ID NO: 129055 - DNA, 170 bp, Homo sapiens; identical to SEQ ID NO: 54378
  chr17:54857394-54857564
  hyper

SEQ ID NO: 129056 - DNA, 85 bp, Homo sapiens
  chr17:54857790-54857875
  hyper
gccctcgctccgggcggccagagtcgcagtcaagtcgctctttgcacagagcagctctgtgtggactggcgggggtgtggccggt

SEQ ID NO: 129057 - DNA, 354 bp, Homo sapiens
  chr17:54910846-54911200
  hyper
aaaccgcggccgggctcggggtcagcggcgacgagcgggcggctgccccgctcgccctcggcctccgcgcccgcccgccgctccgcagcggaggagccctcaggtttgcgttactgcggccgccacacctacctcagcccgccgcggccaggtcgggcggtgccgcgcaggccgcctccccccctcgcttcccagtcggcttacgcatccccggcggcggcggcgccggcatcggctagaggttcggctcaagtcgggggcactcgtgtctgcgccgagcggcgggcgtgagcgcggcccctgggccccgcgcggcgcggtgctgcgaggaggatcctcgtggccttgccccgc

SEQ ID NO: 129058 - DNA, 918 bp, Homo sapiens; identical to SEQ ID NO: 54380
  chr17:54911483-54912401
  hyper

SEQ ID NO: 129059 - DNA, 30 bp, Homo sapiens; identical to SEQ ID NO: 11395
  chr17:54990647-54990677
  hyper

SEQ ID NO: 129060 - DNA, 30 bp, Homo sapiens; identical to SEQ ID NO: 11396
  chr17:54991049-54991079
  hyper

SEQ ID NO: 129061 - DNA, 30 bp, Homo sapiens
  chr17:54991682-54991712
  hyper
gatgaggaagctgacgcctgggtgcagaac

SEQ ID NO: 129062 - DNA, 360 bp, Homo sapiens
  chr17:55038097-55038457
  hyper
gccgcccacccggccgtcccgctccctgcgccgcgcacctgaggcagtcgttgtctctcacaaggcgcgcgctctcggcggggggcaagagccccccctccaggtagaggcctaggaaggccccagaactgaagccgaagcgctggcggatgagactaatgagatctgtgacgactcggcatctgttcaagtcgaccagaagccagaaggccgtacagtgcggggtagctggcggcgggtaatcaaattgaagccgtagcctaaccgtctcggaagctgccatcttgcttggtgctcaacggaagccgagagataccacggggccaccgagaggcgtgctcgggcggctcgcccccgccg

SEQ ID NO: 129063 - DNA, 131 bp, Homo sapiens
  chr17:55055243-55055374
  hyper
aaatgtctcctttccgaaatactctccctaaaatgacagagaacctggccaggcggacagaacggcccctgcgcatttgcaggggtcctggtgggcttgccgggcagagggcgtgcgggtctcagcaagct

SEQ ID NO: 129064 - DNA, 30 bp, Homo sapiens; identical to SEQ ID NO: 54385
  chr17:55056051-55056081
  hyper

SEQ ID NO: 129065 - DNA, 30 bp, Homo sapiens; identical to SEQ ID NO: 54386
  chr17:55162583-55162613
  hyper

SEQ ID NO: 129066 - DNA, 51 bp, Homo sapiens
  chr17:55162840-55162891
  hyper
gcaggtgcagggtgcgacgcgccctccaggtaccccgggggcgggacgctc

SEQ ID NO: 129067 - DNA, 30 bp, Homo sapiens
  chr17:55163459-55163489
  hyper
ggggaatttgcattcgtagcccctgcaggc

SEQ ID NO: 129068 - DNA, 30 bp, Homo sapiens; identical to SEQ ID NO: 11397
  chr17:55163835-55163865
  hyper

SEQ ID NO: 129069 - DNA, 30 bp, Homo sapiens
  chr17:55320675-55320705
  hyper
ttcgccagacgagggcgctcatacccatgg

SEQ ID NO: 129070 - DNA, 30 bp, Homo sapiens
  chr17:55334124-55334154
  hyper
ggcacctcgggcagcgccaacgactcccag

SEQ ID NO: 129071 - DNA, 51 bp, Homo sapiens
  chr17:55335000-55335051
  hyper
gaatggggctcaggcgcgtggctgatctcgaacggcgctctataccacccc

SEQ ID NO: 129072 - DNA, 120 bp, Homo sapiens
  chr17:55927363-55927483
  hyper
cctgccatgatctgcgcctggtaccgagcgtgactagctgctaccggaaccggaagcggctgctccaggtaaagggcgcataagttgctggccgagccaaggatcgctgggctttcaccg

SEQ ID NO: 129073 - DNA, 421 bp, Homo sapiens; identical to SEQ ID NO: 54390
  chr17:55938683-55939104
  hyper

SEQ ID NO: 129074 - DNA, 30 bp, Homo sapiens; identical to SEQ ID NO: 54391
  chr17:56024651-56024681
  hyper

SEQ ID NO: 129075 - DNA, 705 bp, Homo sapiens
  chr17:56031840-56032545
  hyper
aggcgaccacgcgaccgagaaaaggaagagggaggaatgaataaacgctgacaccagccccccttggagctcagagcctggggcacaggagccggcggggcgggcgagcaggggcggggacagcgcattcccaactttccctggccgagctgacgggagatacagctcccaggggaccgggagggaccaaaaaaggctgagccgacctgtgacatcggcggggggcaggaagcgaagctcccctccccctgaaaggcgctcggctcccagcaggcgcccccgcctgccgtcgccgcccagcctgcgcccccaggcccgggcactgcggggaggggcgcccacacaaaagggggagcggcgggagaggggactcgggcgaagccggctccgggaggcctcgtctcccttccctgcggcgctggcccgcgccccccggtctaatcgcgcgccccgctcccggccccccagatgcccgcacgccccccgcgcccggggcccgggatgaggtgggggctcgggaaggaagggcgggcggggacctgccgcacgcggagctcccggggagccgcgccgacagccccgggaatcaaactcgcgacggcccggccctcccggcggcgcctgggcaacgggtcccgagaaggtggggccgctgggccggggccgcggccgggattgcgcgcggggcgccggcgaggaccgcgc

SEQ ID NO: 129076 - DNA, 30 bp, Homo sapiens; identical to SEQ ID NO: 54393
  chr17:56032800-56032830
  hyper

SEQ ID NO: 129077 - DNA, 30 bp, Homo sapiens; identical to SEQ ID NO: 54394
  chr17:56064913-56064943
  hyper

SEQ ID NO: 129078 - DNA, 30 bp, Homo sapiens
  chr17:56065466-56065496
  hyper
ctccatggctgcggcggccgacccccctcc

SEQ ID NO: 129079 - DNA, 168 bp, Homo sapiens
  chr17:56084354-56084522
  hyper
cttgaggtcgatgtcgcggatagcgccgtatttgtagaacacgtcctcaatgtccttggttcggatgtctggaggtaagttacccacgtagatgcggcaatcgttgttccctgcggggccacgaatcacaccacctcccgacatggcggtgacgaaaagcgcggactc

SEQ ID NO: 129080 - DNA, 76 bp, Homo sapiens
  chr17:56084799-56084875
  hyper
cttggggtggtttgcgaacagagtgaccagccgtttggtaaaagttaaataacgaactttcgttaaaggagctagt

SEQ ID NO: 129081 - DNA, 552 bp, Homo sapiens
  chr17:56234325-56234877
  hyper
gctgcgggttgctagcggagtcgcgcgtcgggagctacgtagggcagggaaggcatggcttctgttttcgtccaatgagaaggggccagcggtggcggtcgggccaggtccggggcctggggacgccgaggcggccgcggaggagcgccgcgtcaaggtctccagcctgccctacagtgtggatgcgctcgtgtcggacaagaagccgcccaaggaggcatccccagtgccggccaaaagcgcctcttccggggccaccctgcggctactgctgctgccggggcacggcgctcgggaagcgcacagccccgggccgctgatcaagcccttcgagaccgcctcggtcaagtgggaaaactccctaagacggagcggcgtggatgcaggaaccctgctgataattcgccgccgccaagacacgtgagccctaccacctgcaccctgagaaaacacaagaccaatccgaagccgcgcacagcctttaccacgtcccagctcctcgctctggagggcaagttgctccagaaacagtacctctccattgcagagggt

SEQ ID NO: 129082 - DNA, 477 bp, Homo sapiens; identical to SEQ ID NO: 54397
  chr17:56296379-56296856
  hyper

SEQ ID NO: 129083 - DNA, 429 bp, Homo sapiens
  chr17:56326872-56327301
  hyper
ttggagccccggagccggcctgccgaagctcagcgaggatcgtgctggtttcaggaggaagcctgcgctgggcgccgccaacagggctctggcgcgctggctgcccgcggagtacgaggacgggctctccctgcccttcggctggacgccggggaagacgcgcaacggcttccctctcccgctggtgagggcaggccgggccggggtgaaggatgggagccagaggggacgggatgcactacccaaacacgcagtgaaaggaggaggagggatcggtgggggcagcaggggtgcgcgatggagatctgcacagacccccaccttccgctagagggcagcagagctcggagcccggagcccggccacgtggcggtcacgttctggccgccgcaggccagataccctggggtctcccgggcagatggcctc

SEQ ID NO: 129084 - DNA, 611 bp, Homo sapiens
  chr17:56401718-56402329
  hyper
tacctggagccggggcggacgcaccgccgcccccgggtagctggggccaggcctggccagccaggcgggcgctgacgggggcgtccccgctctacggcggcggcgggaggaggcggcgcgggctgggccccgggcggctgccaggacaaccagggatttgcggccgggccgtaccactggcagcgcggcaggggcggccggccaggccccgctgggcgcaggcctatggagggcggaaccctggagcccccaggggagggcacggcgcaggtacgagcacgggaggcttggaggtggaccctgcccaggacgggaaagctccccagcccctgggagtgcgcacaccaccactgagtccttggggttctgagcacggtgcaggggagatcccggtggtcgttccccccacccatctgcacgcacccacacacctgcccttgcgccggcgctcacctctcccggggccccgggagcaggcgcccctgctctggcctggagagcagggcccgggggccaggacggcgggagcgggagcgtctcccgctggttgcgcagcgcgatctgcctctgcagccgcagcacctcccgctgggactcgcgcagcagccgat

SEQ ID NO: 129085 - DNA, 331 bp, Homo sapiens
  chr17:56405978-56406309
  hyper
ctgctgctgctctttcgcttgctgggtggctgggctggtcctaaggaggcctgggtcgatgggctgcttgcctcatagtctcagcccctgctggcctctgctctggggactgcaggggtcccttacagtccaggagcctcgagatggtgggctccgaggagggctgagcctcagaattgggtgggggggtgagccgggaagagccagccctcccctcctcctcctcctcctcccctcccacccaccaataggaagtcggctgctggtttccatggtgatggcgctggactggtgggctgaaccggctgacagggtcggggacagaaggaag

SEQ ID NO: 129086 - DNA, 1163 bp, Homo sapiens; identical to SEQ ID NO: 11403
  chr17:56429043-56430206
  hyper

SEQ ID NO: 129087 - DNA, 30 bp, Homo sapiens; identical to SEQ ID NO: 54403
  chr17:56591735-56591765
  hyper

SEQ ID NO: 129088 - DNA, 30 bp, Homo sapiens
  chr17:56592110-56592140
  hyper
gcctcgtaggagggcgtaccctactccagg

SEQ ID NO: 129089 - DNA, 30 bp, Homo sapiens
  chr17:56594979-56595009
  hyper
ctggtcccagggggcgggccaggttggcag

SEQ ID NO: 129090 - DNA, 231 bp, Homo sapiens
  chr17:56595390-56595621
  hyper
tcgagtcgggcaaacgccctcccagcctttagccaatcggatgcctaaagacgagactatacctggaggaaggaggcgcggcgccggaggggagacgcgaccaatgggaaatcacagcgcgtccttgcggcagccaataggagagcagtaaagagggggctgctggccactgctctggggaccggaagtggaggcggctcgtcgcctactggtagcgcaattagaggcggg

SEQ ID NO: 129091 - DNA, 628 bp, Homo sapiens
  chr17:56736330-56736958
  hyper
cacccttcctagaaacggtataaaatacttagcgagcatctaattaaaacagaccgtaacctaagaagacgtaaggtcataaccacaactccaaaaccaaacgcgcgccactacaacaactctgaaaataaacacacgcaacaacacacaagccgtcttttaaactagttcaatcacaggacagaaaagcgcaaaagcagtcccccactaccacaagttatgcagccgagttttctcattcggggaaatcgcgggagcaaacacatagtaaaaaccctcccccaagaaaaacactttatcaggaccaacagcgtctctcccccgccacaaagacattatttacttaatattgctaataccttaccatcgtcctcaacacacaacatactcatggcaaattgtattatgagttgtttttaggcatcgcttcgaaactaccgcttcttcgtatgacacatctcagactacaccttctttggtattcgctagaaaatttctcccgcgaagaacgcactagaaccggcaatcactgcgcccctatctacatatgcccgcctcttatagtaacgtcaccacctgcttctgtacgatctgactgaactcccttacggatcggttcgctctagct

SEQ ID NO: 129092 - DNA, 26 bp, Homo sapiens
  chr17:56833015-56833041
  hyper
atgcttaattagaaccggttgccatg

SEQ ID NO: 129093 - DNA, 839 bp, Homo sapiens; identical to SEQ ID NO: 54407
  chr17:56833161-56834000
  hyper

SEQ ID NO: 129094 - DNA, 291 bp, Homo sapiens
  chr17:56834019-56834310
  hyper
cgcccgcctcggcccccacgcctcctacccggccttgaagccgctctcctgagccccggcgccctcccgccgggcccgggcccctcatcccctttcacctcggcccccagcttctagctccacttcacgcaacctttccctttcctgcctggaaaggtccttcctcccaggcttgagctccctcttcttcccagatcccttctttctccgggaggtttcctcccaccccagtctgtcttttcccgggctgagtgccttgttgtttggcggcagagacgcgactcctttcta

SEQ ID NO: 129095 - DNA, 68 bp, Homo sapiens
  chr17:57184397-57184465
  hyper
ttggggctctgctacgccacccacgcccaccttggcggagggcggggccccacggctctcaaacttgc

SEQ ID NO: 129096 - DNA, 30 bp, Homo sapiens
  chr17:57231711-57231741
  hyper
gccccccagctgggcgccccccgagcaggc

SEQ ID NO: 129097 - DNA, 30 bp, Homo sapiens
  chr17:57232552-57232582
  hyper
ggcggcgcttaagccgcaagccgtactagc

SEQ ID NO: 129098 - DNA, 30 bp, Homo sapiens
  chr17:57232946-57232976
  hyper
attcataccagaagcgcctcagctctgatt

SEQ ID NO: 129099 - DNA, 30 bp, Homo sapiens; identical to SEQ ID NO: 54409
  chr17:57297742-57297772
  hyper

SEQ ID NO: 129100 - DNA, 30 bp, Homo sapiens
  chr17:57298035-57298065
  hyper
gttgcttaaatacccgaccttgctgcacca

SEQ ID NO: 129101 - DNA, 30 bp, Homo sapiens
  chr17:57298660-57298690
  hyper
gaagagagggaaaccgagtcccccgagcca

SEQ ID NO: 129102 - DNA, 30 bp, Homo sapiens
  chr17:57409680-57409710
  hyper
actgtgggactgggcgccctcgaaatttct

SEQ ID NO: 129103 - DNA, 30 bp, Homo sapiens
  chr17:57410067-57410097
  hyper
aaaagccaggtgagcgagtgtcttgttttc

SEQ ID NO: 129104 - DNA, 30 bp, Homo sapiens
  chr17:57643278-57643308
  hyper
cgaggcgaactttgcgtccaatgagcactt

SEQ ID NO: 129105 - DNA, 30 bp, Homo sapiens; identical to SEQ ID NO: 54410
  chr17:57697100-57697130
  hyper

SEQ ID NO: 129106 - DNA, 30 bp, Homo sapiens; identical to SEQ ID NO: 54411
  chr17:57697474-57697504
  hyper

SEQ ID NO: 129107 - DNA, 470 bp, Homo sapiens
  chr17:57784632-57785102
  hyper
ggtgggtaatgcaacgaggtgaaaagaaacgttcctactggcgagaaaatgaataatgatattggtctccttcgccctgtaaggagccaaccaacctacctacagtacctcctttcctcactcgcgccttcccttcttctgggcagcgaacacgtttctatcgcgtgagctacctcttccggggttcctgggtgacaagttccggatcaagaatcacaaagcgagcagtcattcttcctcttgccacacccacagggcccgcactaagagcctaactgaaatcccgcgaggatcaaccgagctcgccgaaaggagggaggaacgtatcccttctggaggctgtctcagggggcagagggaccggaccggaagtgacgtgagcgggttccggttgtctggagcccagcggcgggtgtgagagtccgtaaggagcagcttccaggatcctgagatccggagcagccggggtc

SEQ ID NO: 129108 - DNA, 30 bp, Homo sapiens
  chr17:57785508-57785538
  hyper
tcccgaacctctggcgcatgatgctagatg

SEQ ID NO: 129109 - DNA, 421 bp, Homo sapiens
  chr17:57970250-57970671
  hyper
cttcagatatggtacgcatgctcactgtccaccgaacgctccagctgacaatgcgcatgctctagtcctccaagcgcgacttcggctggtgttttgcgcatgtttctgccagcgcctggatcctgccgatagttctgcgcatgtccactgcccactgtttggcttcacggaaccctgtacgcatgctcctacgctgaactttaggagccagtctaaggcctaggcgcagacgcactgagcctaagcagccggtgatggcggcagcggctgtggtggctgcggcgggtccgggcccatgaggcgacgaaggaggcgggacggcttttacccagccccggacttccgagacagggaagctgaggacatggcaggagtgtttgacatagacctggaccagccagaggacgcgggctctgaggat

SEQ ID NO: 129110 - DNA, 30 bp, Homo sapiens; identical to SEQ ID NO: 54415
  chr17:58041243-58041273
  hyper

SEQ ID NO: 129111 - DNA, 30 bp, Homo sapiens
  chr17:58041532-58041562
  hyper
tgccgtgcttttcccgtttgtctaggagga

SEQ ID NO: 129112 - DNA, 30 bp, Homo sapiens; identical to SEQ ID NO: 54416
  chr17:58042255-58042285
  hyper

SEQ ID NO: 129113 - DNA, 143 bp, Homo sapiens
  chr17:58156216-58156359
  hyper
cgcggtgcctcccgcggctgcacggaaggccacgaaccgacaacttgcacagcagccatcttttctacgggcggggggggtgggtggggtgatcccagggaaatacttccgggacatcctcccgttccgcgcgctctagttcc

SEQ ID NO: 129114 - DNA, 258 bp, Homo sapiens
  chr17:58212865-58213123
  hyper
acacacagaagactgcggggagccttagcccctacccggcctgcagtgctctctggggcacacggcagccccacgacgcctttgggtttcttcgagcgctactcgcacgcaccagcgcccacacagctgcaacgccaaacgcccgccagcaccttagggccgcgggagtcccttccccaggcccgccccacacgccggccttttctgccgcttcccaagccggagccaatcagcgctcagcagcgaccggcagggacg

SEQ ID NO: 129115 - DNA, 30 bp, Homo sapiens; identical to SEQ ID NO: 11406
  chr17:58215071-58215101
  hyper

SEQ ID NO: 129116 - DNA, 21 bp, Homo sapiens
  chr17:58216281-58216302
  hyper
tgtgtataggcaagtcgctaa

SEQ ID NO: 129117 - DNA, 64 bp, Homo sapiens; identical to SEQ ID NO: 54420
  chr17:58216772-58216836
  hyper

SEQ ID NO: 129118 - DNA, 433 bp, Homo sapiens; identical to SEQ ID NO: 54421
  chr17:58216865-58217298
  hyper

SEQ ID NO: 129119 - DNA, 179 bp, Homo sapiens; identical to SEQ ID NO: 11408
  chr17:58217356-58217535
  hyper

SEQ ID NO: 129120 - DNA, 158 bp, Homo sapiens
  chr17:58218835-58218993
  hyper
cacagaagctgcagcggcgcggggcggtgggctgtgagcgagcatatgtaggggagcgtttcccgcgagaaagcagaacctgcgccagccgagggccctagggctgctggtaggaggactgttctctatcgtccagctgctcccgacctcttctctga

SEQ ID NO: 129121 - DNA, 171 bp, Homo sapiens
  chr17:58227226-58227397
  hyper
ggggagggcaggccccgccagggggaggagccgcctcccgcgtccagctgtcggggctccctcccgtcgcggctccgctataaaacccaggccggcaggatcgctgcacccgcggcggcctcctcggtgcgcgacccccggctcagaggactctttgctgtcccgcaagat

SEQ ID NO: 129122 - DNA, 15 bp, Homo sapiens
  chr17:58227787-58227802
  hyper
cgttgggaggcagag

SEQ ID NO: 129123 - DNA, 455 bp, Homo sapiens
  chr17:58228041-58228496
  hyper
aaaaaaaaaaggatgcttctcggacccgcctcaacgcacgccttcttttctcacccagcctcctccgtctgcccgtgggtttccgtccgtcccgctgggactcagcgctgggtgactgccccgcggccagagcaagggcggtctggcagggtcctggaagccgcgcttcccacacgggttccttgcccctgagggtcgcaagctcccctggcctccctaacctccagcgctgaattgggagcctggcgggggcggggggtgggggacccggagccccaaggcctctgcggagccggtctttccggacagggtgattttcgtttaaagattaatggtgaagccgagctcttaattattcctctaggtgggaggtggcaggaaaggcatgttaatatttgataagaagctaaaggcgcttcaagcggctgggcacagggatccgatcctggaggcac

SEQ ID NO: 129124 - DNA, 30 bp, Homo sapiens
  chr17:58469246-58469276
  hyper
cctcagcgcctcctcgtagctgaggaatcc

SEQ ID NO: 129125 - DNA, 30 bp, Homo sapiens
  chr17:58469712-58469742
  hyper
gccggggagggggacgcatctccgcacgta

SEQ ID NO: 129126 - DNA, 30 bp, Homo sapiens; identical to SEQ ID NO: 54426
  chr17:58470018-58470048
  hyper

SEQ ID NO: 129127 - DNA, 668 bp, Homo sapiens; identical to SEQ ID NO: 54427
  chr17:58498602-58499270
  hyper

SEQ ID NO: 129128 - DNA, 30 bp, Homo sapiens; identical to SEQ ID NO: 54428
  chr17:58603022-58603052
  hyper

SEQ ID NO: 129129 - DNA, 30 bp, Homo sapiens; identical to SEQ ID NO: 11411
  chr17:58603272-58603302
  hyper

SEQ ID NO: 129130 - DNA, 30 bp, Homo sapiens
  chr17:58603694-58603724
  hyper
gcgtcccttccaagcggccccggagtggag

SEQ ID NO: 129131 - DNA, 51 bp, Homo sapiens; identical to SEQ ID NO: 11412
  chr17:58676700-58676751
  hyper

SEQ ID NO: 129132 - DNA, 30 bp, Homo sapiens
  chr17:58677231-58677261
  hyper
caaggccagcaggccgcattaagaacgctg

SEQ ID NO: 129133 - DNA, 802 bp, Homo sapiens
  chr17:58677542-58678344
  hyper
gggggaagcgcagtgcgcaggcgcaactgcctggctctgctcgctccggcgctccggcccagctctcgcggacaagtccagacatcgcgcgcccccccttctccgggtccgccccctcccccttctcggcgtcgtcgaagataaacaatagttggccggcgagcgcctagtgtgtctcccgccgccggattcggcgggctgcgtgggaccggcgggatcccggccagccggccatggcggggctgtactcgctgggagtgagcgtcttctccgaccagggcgggaggaagtacatggaggacgttactcaaatcgttgtggagcccgaaccgacggctgaagaaaagccctcgccgcggcggtcgctgtctcagccgttgcctccgcggccgtcgccggccgcccttcccggcggcgaagtctcggggaaaggcccagcggtggcagcccgagaggctcgcgaccctctcccggacgccggggcctcgccggcacctagccgctgctgccgccgccgttcctccgtggcctttttcgccgtgtgcgacgggcacggcgggcgggaggcggcacagtttgcccgggagcacttgtggggtttcatcaagaagcagaagggtttcacctcgtccgagccggctaaggtttgcgctgccatccgcaaaggctttctcgcttgtcaccttgccatgtggaagaaactgggtaagttccctggcttgtttggcgcccgcccctttttcaggcagttcagggcttttatggcaccagccccgcgtgggcccccggcacccagagcgca

SEQ ID NO: 129134 - DNA, 243 bp, Homo sapiens; identical to SEQ ID NO: 11414
  chr17:58700867-58701110
  hyper

SEQ ID NO: 129135 - DNA, 126 bp, Homo sapiens; identical to SEQ ID NO: 11415
  chr17:58711212-58711338
  hyper

SEQ ID NO: 129136 - DNA, 192 bp, Homo sapiens; identical to SEQ ID NO: 11416
  chr17:58725251-58725443
  hyper

SEQ ID NO: 129137 - DNA, 251 bp, Homo sapiens; identical to SEQ ID NO: 11417
  chr17:58733951-58734202
  hyper

SEQ ID NO: 129138 - DNA, 1531 bp, Homo sapiens; identical to SEQ ID NO: 11418
  chr17:58740341-58741872
  hyper

SEQ ID NO: 129139 - DNA, 750 bp, Homo sapiens; identical to SEQ ID NO: 11419
  chr17:58742891-58743641
  hyper

SEQ ID NO: 129140 - DNA, 145 bp, Homo sapiens
  chr17:58754611-58754756
  hyper
attgttgagattaccggccgtgccccttattcagatcaacccctcctcggctgatcgccggcgcgagccagcctaggctcccggaaggtaaacacatcgccaagggctgggcagaaggcgggtgtgggacgggtgagtggccagc

SEQ ID NO: 129141 - DNA, 30 bp, Homo sapiens
  chr17:58754975-58755005
  hyper
cctgcgtttgcaaccgaacctgacacctcg

SEQ ID NO: 129142 - DNA, 30 bp, Homo sapiens
  chr17:58755240-58755270
  hyper
gagctggagactagcgttaaccggcggggc

SEQ ID NO: 129143 - DNA, 164 bp, Homo sapiens
  chr17:59467390-59467554
  hyper
ttaggcctggcggcccgatcctaaggaagcccctgcttttcttgcgcctgccggtgctcttctcccgcccgcctggccctgctgtcagcgccccctagtgccgggccggccgcgcatgagggcggtgggacagatcgcccacaactcctcggcttgcttttggg

SEQ ID NO: 129144 - DNA, 39 bp, Homo sapiens; identical to SEQ ID NO: 54439
  chr17:59469780-59469819
  hyper

SEQ ID NO: 129145 - DNA, 30 bp, Homo sapiens
  chr17:59473440-59473470
  hyper
tcgtctgcagctccccgggttaggggattc

SEQ ID NO: 129146 - DNA, 340 bp, Homo sapiens; identical to SEQ ID NO: 11421
  chr17:59473906-59474246
  hyper

SEQ ID NO: 129147 - DNA, 475 bp, Homo sapiens
  chr17:59474741-59475216
  hyper
cgccaggggagggggttcctgggaagggggagggggccggcctaggtgggggaggggcccagcggaggcctcacggcgccgctccagggcctcccaggcctccccagcgccagctttcggtgagcctcgggcattcctagctggagagtttggctgggggtcgctacagactcttcagagcggctgcagcaggacctcagggtgatcgcgggaccgcggggcggggcgagtggtgggatcctggcccggacagagccccggaaagccagagggaaggtcggtgccactgtaggtggggtcgccgtccccagatgcagccgctgcactgtcgccgccaggtttctcggtcaaataacccaggcctgagtgtttcaaactcttcaggcctcggacccctggaccagctatggatggactaatgaaatggactaatgtctaaaacgcacacatttagatgtacacatactcttacaag

SEQ ID NO: 129148 - DNA, 3462 bp, Homo sapiens
  chr17:59475275-59478737
  hyper
gcgcgcgcgactttgcgaatgtattcacggattcctaggccggtacctgggttcccggctaaggaaagctgccctggttattatctggtcacctcaccggctgcgcaaacgtgtccacaacgggtccctccccgagaggccacatctcgcctaaggtggagccagcaggtatttgcctgtggaaaactgcagtggatcctgccccgtctgcgtagactgcgcagctcggagtcaaagattcgttctggccagagaggaggtactaagagaggtgcgacctagccaagaacgaggtcgtggagaaaaccctgtgggggcggcgctcacatatgcggtgatgaggagttgtgagggccctggggtcggccccgaaaagtagggataacggtcgcagaggccatactgcttccgccggtcccgaatccgcactgccaggagagatccggccttcaaacgctgctcccaacgttcaacaacgaagtgccctgcgaccggtgtgcgcagtgggcgggcgcctgcatgggtcaatgttggatgtacgcgcccaccacgcggttgtacgggtgggaatgtcacccgtggctagtgcatgctctgtcttttccttcagaaaacgaccttcaggaatcagcctgagtgttcgcgcccgagcccgattggaagcaggtgcgtggtcgcttcactctccccgtgcacaccttgagttatagctctcgctgcgcacagagggcaccacacggggcccgacacacacacacacacacacacacacacacacacacacacacacaccatcacttcatgggggggaaactgaggctgccggaagacagaaaacgaagactgatcacagaagagggggcttcaatcacaggtgctcgcagacaccccaactccctcacgcgttactcagcactccttaacttaggagacgtgcgcttccgagagatgagaagaaactaaaaaagtggttggcagggcgaagagaggaagccggtatttcggaagaaggagactttcgtctccggtaccggatagggcgaaaattcgttgggtcgcgggtggagaatccggggtccgcccgcgcggtgccgccctgtgctcagcgaaaggtgcgctcaccttcctggccccgaggatccgctcctcccggccgctggaaagctcagggcggggcccgggcctgcggagaactccaggttccttccgagtcttccggtgaaggcgggcgcgggtagggggtccccgcgtttccccagcgcaaggccgcgtcccgctcccgcccgcgccggccccagcagggctcggccatggctccactcaccagctcccgccacctgggatccgctcccggacctcggccgcccgagcctcccgactcgcccgcccaccggcctcgctttccagtgcctgctgtctctttccggggcgcagggacccccaggcggcgccacgacccggagctgggtcggaggccaggctggggctcgggccagagcggccgggcctctgggcgcgggagaaggagggcgccccctctccgctcggggtcgtgtcaatgctttgcacttggggccggcgtgcggctgcgggtccttccccaaggccccgggacccgggctcccctcgcctcaggccctttcggcgggtcaggtcggccctccgcgctctccagtccggcgcaggcagccgcaggcgcgggcgggcggtgggggccggggcaggaggaggggtctcggggcccggcggcccgtcattggttaatattttattctgttgacatgttttcttactgctgaggcttccgacaccttctcccaggccccccctcccggccggagcttggcctgagctgtcaaaaccccgcccccggagacccacaattggtccaaaaagcgtaaaatcagcaatcaaggggggcctggctcgttagcgcaggggatccgagctgggcaggacatgtgagatagtcacagttttccagagatcacgacaagatctaaccagtcgcgcgtggtccccggcgccggagcgggccagctcagcccggcccagcccggccccgcgcagagcccccgccgcccccgcgcacagagccgggtgccccttgcggtgcgccggacgggaagccccgaggagcagctgctgcgcccgccacccgggtcgtccgtccaccgcgcgcgccgccgcccgggccgggggtccgagccgcgcgcccccggccccggccccggcccccgggcgcctgggccggatgtcccgatgagagagccggcgctggcggccagcgccatggcttaccacccgttccacgcgccacggcccgccgacttccccatgtccgcctttctggcggcggcgcagccctccttcttcccggcactcgcgctgccgcccggcgcgctggccaagccgctgcccgacccgggcctggcgggggcggcggccgcggcggcggcggcggcagcagcggccgaggcggggctgcacgtctcggcactgggcccgcacccgcccgccgcgcatctgcgctccctcaagagcctggagcccgaggacgaggtggaggacgaccccaaggtgacgctggaggccaaggagctgtgggaccagttccacaagctaggcacggagatggtcatcaccaagtccgggaggtagggctgccggccggctggaaggcgcgcgggcgggcgggcgggctggggcacgggactgcacggatcagagcagagctggggactcccggctcccggctcccggctccaggttctggccctgacgccacgcttcgctcccacggacaaccaagttgacttttctcgtttggcaccggagcgatttttttttaaaacaaaaacgctaaaatcctccgaatgaaataaaacgaaaacatactgctaaagaatagccccaaccgttctgagtcccagcgcagaggaggccccgcggcttggccctggcggtctcctccgccccgcgctctcgctcttctgcgtccgggtccgtctccgagctcgggggaaattcagcctctctcagactctgctccgaccccgaagcccctagtgggacctgggcccagctaaccccacgctggttgctcggttcctggcagcgagccccgggtcagccgagccctccgcctcaccgggctgggagccctttctccaccgcgggcatccgagccctggacgcatccgccgccccaggccttaaagcctgaagaaagccacagccccggcccctccacccttcgactcagccaccgagaatccaggcctcgggttcaccctcttcccccgaactgcacggccaggatgtcttatcaggctctgtagcccagttcccaatacaaacaccctccagatttatttctgggagcttccgtcccaagtgggtatttcccctgaacgaatttcggggagattaaggagaagcgagaatatttctagagggcct

SEQ ID NO: 129149 - DNA, 329 bp, Homo sapiens; identical to SEQ ID NO: 54443
  chr17:59488094-59488423
  hyper

SEQ ID NO: 129150 - DNA, 494 bp, Homo sapiens; identical to SEQ ID NO: 54444
  chr17:59488634-59489128
  hyper

SEQ ID NO: 129151 - DNA, 692 bp, Homo sapiens; identical to SEQ ID NO: 54445
  chr17:59489181-59489873
  hyper

SEQ ID NO: 129152 - DNA, 30 bp, Homo sapiens
  chr17:59494429-59494459
  hyper
tcaaaccaggagtccggggcttgggttcag

SEQ ID NO: 129153 - DNA, 139 bp, Homo sapiens; identical to SEQ ID NO: 11426
  chr17:59529011-59529150
  hyper

SEQ ID NO: 129154 - DNA, 11 bp, Homo sapiens
  chr17:59529253-59529264
  hyper
cgacctcggga

SEQ ID NO: 129155 - DNA, 436 bp, Homo sapiens; identical to SEQ ID NO: 11428
  chr17:59529843-59530279
  hyper

SEQ ID NO: 129156 - DNA, 298 bp, Homo sapiens; identical to SEQ ID NO: 11429
  chr17:59531719-59532017
  hyper

SEQ ID NO: 129157 - DNA, 248 bp, Homo sapiens
  chr17:59532269-59532517
  hyper
cgatcccgccggggccctagatatagttggacccagcgcgctggccggagcgggcagctaccctactggcgcagcggccctgtgtggggactcctaggtttccgaggctcggcccgcgttcgcacgtggcccgaggcgggtgctggcgctggccatgtccagcgagtctcactccctgcaggctgtggccgaagactggtccgcctgtcaaccttatctttatgggtttttcccaacccagactggcc

SEQ ID NO: 129158 - DNA, 15 bp, Homo sapiens
  chr17:59532591-59532606
  hyper
cgggatgaggaggcc

SEQ ID NO: 129159 - DNA, 14 bp, Homo sapiens
  chr17:59533753-59533767
  hyper
ccccgcacgaagtc

SEQ ID NO: 129160 - DNA, 531 bp, Homo sapiens
  chr17:59533874-59534405
  hyper
cgagagcgaggaggccttccgggccccgggcccagcgctcggagaggccagcgcagccaacgcccccgagcccgcgctggcagcgccgggcctcagcggagccgcgctaggcagccccccgggacccggggccgacgtcgtcgccgccgccgccgcggagcaggtagggctgcgccagccgtcgggtagaagtcgggcgtcggtctgtctgcggggccgcctgtgtccgtctttccgtccgattgtcggcaggactcgctttcaggaggacctggctgcattcaggacggtctgcccgttcgttctccactggacatggctcgctttctctgccttttgggtccttctccactttgagccctcggggctactctgggacaagcaagagctagagctagagatagaggagagggcggtaagagagagggagacccccgtagcatctgagcgagcctggaccaagtgtccagctccaacaacccgtagagggcctgggacccaacggcgagggggcaggaggaggccaccccg

SEQ ID NO: 129161 - DNA, 1007 bp, Homo sapiens
  chr17:59534556-59535563
  hyper
cgcctctccctgtctgtgtctgccccgggagcctgtggcgatggcccgccacagaaatgttcatgagtgagcaggagtgtcgtctaacctgcgctggccactatgtgtgtcctctgagggttcctccgtaggtgcagctttaaaggaggaagttttagccaccgattaattcttttatattcacgaatagttcaaaatcgttctgtgaaacgaaatctggagccatgggctccgggcgggcagggttccgcacagctcttcgggtctggttcttctttcctcaggctccgcgtggagccctgggcctggcagacacaagtttctctccctcccatccccagaccatcgagaacatcaaggtggggctgcatgagaaggagctctggaagaagttccacgaggcgggcaccgagatgatcatcactaaggctggcaggtcagcgctgggagatttacttccggggatggcggtggggagcaaggggggccagggaggtcccttagaagtcctctcggccccggcctggtggcctgtgggaggcctctctgcctcctcgggcgtcagtgccacctcccttcgcagcttgggactgggccgccaaagcccgcagggggccaccgcagccgcgcgggccttgcgggaaagaccgaggggaggggcagcgctatgcaaatgaatccaaacagggatcgcgacgctcaaaagtcccagctccagcacttttggccccctggggggctgctttgccctcctctctttgaggacctgaggaggtttctcaggaatgcattgattggagacccagagatgcctctcagcagatggggagagggaaatagactatgctgttcagttttcatacattttcgtgagtgactcgaaccccaagtttttcatcccaggggcgccgctcttctgtttccatccccatctctggccaacgggaaagcactacgttgggctccgtgtgtgttgttgggggagcggctctcggtggctgccagaa

SEQ ID NO: 129162 - DNA, 772 bp, Homo sapiens
  chr17:59539224-59539996
  hyper
gacctccgagaaagtcggggctgcagcggggttggggcttgggggaccctccaggtggagagaatctaggggtatcccctagtctctgtccctttccccaggaaaggggctgagagtaagcgccttgaatttggccaccgctttggccggggagctcccgcggctctcgcagcgcagctagaacttgcgtgttccctcagcagtgagttcgcagttacgggtttgttgccagaattaaaaaagccccaaacccttgccccgcgccccgcgcgcctccaacaccgagaaacgtccgaggaagcttatcttagcagttcattctaaagccatttccgagtatgaatagataaaggctccagctccgcaccctttcagagcctgtttcatgatcagaggagaagccccgggctttcatctcctcccgggccggcgagcaggcggcttgtttattcccctggcggagccgtttccgcgtgtgccgtggggagggcgggggagcccccatctgtctgggggcgcgggagcccgacggcgcgaggggaactgggggagcatggagagggcgcttggggcgcggagagaaggtgcggggcacgtggaaagcgtgccgaggggctgggaagagggagggacaggaggacggggtgggagcagggagagggtagggggcatagggagagggtgcagggaggggagagggggagcgcgcaaggagggggctggctggggcggacccagaggtagagcgcagagtgcccgggacaggcgggct

SEQ ID NO: 129163 - DNA, 30 bp, Homo sapiens
  chr17:59940432-59940462
  hyper
ccgccaagaattaacgcagcgcccgggcta

SEQ ID NO: 129164 - DNA, 33 bp, Homo sapiens
  chr17:59941037-59941070
  hyper
gggctcaaggtacgcggcggaaggttgtcgcca

SEQ ID NO: 129165 - DNA, 30 bp, Homo sapiens
  chr17:60004763-60004793
  hyper
ctctcaaggccgaccgactagcagcagcgt

SEQ ID NO: 129166 - DNA, 131 bp, Homo sapiens; identical to SEQ ID NO: 54455
  chr17:60142476-60142607
  hyper

SEQ ID NO: 129167 - DNA, 90 bp, Homo sapiens
  chr17:60143462-60143552
  hyper
ggccactaacatagcgccatctgctgggtgccccggccagtataaaacgacccggggccctggccctctctttgcggggaaatttacagt

SEQ ID NO: 129168 - DNA, 30 bp, Homo sapiens; identical to SEQ ID NO: 11435
  chr17:60704528-60704558
  hyper

SEQ ID NO: 129169 - DNA, 30 bp, Homo sapiens
  chr17:60705043-60705073
  hyper
gacccggaggaggacgcgagccccttgcgg

SEQ ID NO: 129170 - DNA, 30 bp, Homo sapiens; identical to SEQ ID NO: 11436
  chr17:60705824-60705854
  hyper

SEQ ID NO: 129171 - DNA, 52 bp, Homo sapiens
  chr17:60771356-60771408
  hyper
tctgcaagcgctaggcgttactgccgtttctgggctgcggctccaggggagc

SEQ ID NO: 129172 - DNA, 193 bp, Homo sapiens
  chr17:60781449-60781642
  hyper
cccggccgcggctggacggagcgcggggccgcagcaaccaggccgggctccccgtcgcgccccttccggagcgggaggccctcgccgaggcggaggctgggacgcgcggggcgggcggcggcggggagccgcggggccgaggcgcagggcgttttccccggaggtgcggcgtgcgcccgcgacacaaaggtct

SEQ ID NO: 129173 - DNA, 469 bp, Homo sapiens
  chr17:60885401-60885870
  hyper
actggagcggagcggcgggggcgagggggccgttacctgtgggtctgcccttcctcccctgccggggctacaggggtcgaggggctgggcgggcgggccggtccagggcgcaggagccgcccattaattgcgcggggacggccctgagctcctcttcctcctcctctttttgcttcttcactccctacacctgcccctcttcctcctccttccccgaggctgctttccgcggcgccggccggccttgcctggggcggaggcggtgggggcggctaccgggcgtcctccggtttccctagcaaccgcgcctccccgcccccgcgcgaccaggtgcagccgccgagagcacggggcggggcggggcggggctgtggccccggggtcccaagccagtcgtgggcgcccgccggttgccgtgggaacgaggcgggctgcagtcggggagtcagagccacgctggtgggcagag

SEQ ID NO: 129174 - DNA, 55 bp, Homo sapiens; identical to SEQ ID NO: 54462
  chr17:61043209-61043264
  hyper

SEQ ID NO: 129175 - DNA, 126 bp, Homo sapiens; identical to SEQ ID NO: 54463
  chr17:61043853-61043979
  hyper

SEQ ID NO: 129176 - DNA, 97 bp, Homo sapiens; identical to SEQ ID NO: 54464
  chr17:61044392-61044489
  hyper

SEQ ID NO: 129177 - DNA, 76 bp, Homo sapiens; identical to SEQ ID NO: 54465
  chr17:61522993-61523069
  hyper

SEQ ID NO: 129178 - DNA, 609 bp, Homo sapiens
  chr17:61553819-61554428
  hyper
aagccccaggtgtgccggccgccctgagcccctccagcacctcccggaggcgcctgcaagacacctaaggtccccgcctccctcctctcccccccgccacacccctacccccggcaggcgacgtccccgcccctcgaccatggcctggtgaagaagccggccaggcccgatcagccccatccccgccgcacgagcggcgcctgcggacagctcctggggccccggccttgtcactccggaggcgggaggctccggggggtcgggctgggaagatcgagccggaggccgctaggctcccaggccccggccgaggctgcgcggccgcacggtgggcaggctcgggtgttccggcaaactgccgggtccccatcttctaaagagaggaggccctttctccagcttcctctgcgggagcccgacccagccccatcccgccacccccgggctgcacctcggcccctccccggcccgcgcccctgcccggggcgggccaggaacctcggcccgcgccgctggggactctggagcggaggaggaagcgcggcggggcgggggcgggggtgtgtcgggttttataacccgcagggcggccgcggcgcaggagaaggg

SEQ ID NO: 129179 - DNA, 30 bp, Homo sapiens; identical to SEQ ID NO: 54467
  chr17:61554914-61554944
  hyper

SEQ ID NO: 129180 - DNA, 382 bp, Homo sapiens
  chr17:61615573-61615955
  hyper
ggagtatttccagcacgcctggtcctacaccaatggcattgacatgaacgcggtgagccccgccgctccggctaatgccccgggcgtgggggggagccaagatcctgcgggggcggggcgtccccagagccctcaccaccctctcccccagccccaccccggccgcgtcccgctggacttggccgcccgccttgcaggtgctgaagggcttccccgagtgcctgcaggctgacatctgcctgcacctgcaccgcgcactgctgcagcactgcccagctttcagcggcgccggcaagggctgcctgcgcgcgctagccgtcaagttcaagaccacccacgcgccgcctggggacacgctggtgcacctcggcgacgtgctctc

SEQ ID NO: 129181 - DNA, 30 bp, Homo sapiens
  chr17:61627688-61627718
  hyper
gatttcagacgctacggccgcaataaccaa

SEQ ID NO: 129182 - DNA, 238 bp, Homo sapiens
  chr17:61678077-61678315
  hyper
gaaacaaagtccggcgctctctaggcaaccgtgagggcttgagcactaactagatctgctcaagggcaagagaggagcgagtaccgtgcagccacggaacggactttgcgggcagtggggacgtgtttttggagcgaacccggtaaaggaagtgtgctacgccatcaagggcccccagtcccgggtgccgcggggacagtgtagggtcattagctgttgagccgccccgggcgggccc

SEQ ID NO: 129183 - DNA, 30 bp, Homo sapiens
  chr17:61699486-61699516
  hyper
cgatgattggcaggcgctagacagccctcg

SEQ ID NO: 129184 - DNA, 30 bp, Homo sapiens; identical to SEQ ID NO: 54469
  chr17:61699773-61699803
  hyper

SEQ ID NO: 129185 - DNA, 331 bp, Homo sapiens
  chr17:61776665-61776996
  hyper
tggaggtggaagcctcgggtggagaagcggcacccgctgggttctgcaaggggaagtcagtcgggagggccccgccagcccggccccagcctgcagggtggggggtgttgacaggcaggggctggggggattgcggttgggactttccctaagtcatttcctgttgctcttggtcttgccacttccgcccctcacccacctcccccacccctgctccccaggggccggggtcccgagtggcaccgtccctcggaagaacaaagttagcgggagcggaggggccgggggctcccgcgcagccgccgtgtgcgtcccgcgggctgggaccgct

SEQ ID NO: 129186 - DNA, 311 bp, Homo sapiens; identical to SEQ ID NO: 54471
  chr17:61777762-61778073
  hyper

SEQ ID NO: 129187 - DNA, 14 bp, Homo sapiens
  chr17:61778234-61778248
  hyper
ggtatgcgtggttc

SEQ ID NO: 129188 - DNA, 73 bp, Homo sapiens
  chr17:61778423-61778496
  hyper
cgcacagcaggccggaggcacagccggcgagagacggccactcgctttggagcggcggcgaggccggcgcctt

SEQ ID NO: 129189 - DNA, 233 bp, Homo sapiens
  chr17:61818855-61819088
  hyper
ccgcctctctcgcccggcaactccgcttcagcgtctccccgccaggcccaagcctattctgctctcgggctgcggcgcctcattgcgggagtcgaggacgcgggttaaaaagggggcccgtggagggtgaggtgagcccaggatggccgctccgacgaaggcccgggcctggggagatggaatcggtggcagagccaggagggactggccccggcagcgtaccaggcaccccg

SEQ ID NO: 129190 - DNA, 30 bp, Homo sapiens
  chr17:61850841-61850871
  hyper
ggccgccgcctccgcgatcgcagcggtttt

SEQ ID NO: 129191 - DNA, 290 bp, Homo sapiens
  chr17:61851077-61851367
  hyper
aattacataatccccgcccctgggccggaactgccctcgcctatcccaatcctcctacctaggattccgtcaagttgacgtcacacggaaccggtgctccggaagctaaaggtggccatgctgtgtgggaccacgtggccagaggcaagagtgtcgctctagtagtatatgcaacagtttaaactataggcatgttcatgtaaatatggtttctgtccaacccgttttctcttgggatttttggctagccccttgacgccactttttcttcattcgcagacccactttct

SEQ ID NO: 129192 - DNA, 30 bp, Homo sapiens; identical to SEQ ID NO: 54475
  chr17:61851752-61851782
  hyper

SEQ ID NO: 129193 - DNA, 30 bp, Homo sapiens; identical to SEQ ID NO: 54476
  chr17:61904038-61904068
  hyper

SEQ ID NO: 129194 - DNA, 30 bp, Homo sapiens; identical to SEQ ID NO: 54477
  chr17:61905168-61905198
  hyper

SEQ ID NO: 129195 - DNA, 30 bp, Homo sapiens
  chr17:61919083-61919113
  hyper
ggctccactctgcacgtccagactaatcaa

SEQ ID NO: 129196 - DNA, 225 bp, Homo sapiens
  chr17:61920535-61920760
  hyper
cgccgagtgaggcgcggggtcagaggtctaaggtcacttaggggcttcacagtgaatgagccgttgctactactctctcccggtatagcaccctcaccgaattccgcggccacactccccgaaaatagttttgtcaagtctcctttctgcatcttcggcgttaaagactcaactcagagtcggtagctgtggctcacgcctgtaatcccagcgctttgggaggct

SEQ ID NO: 129197 - DNA, 284 bp, Homo sapiens
  chr17:61920999-61921283
  hyper
aaaaaaaaaaaaaaaaaagactcagctgctctgtggggcagaacagcagccaactcaacttcctgtaaaagctcatgctggtagctcggaactgccaagggacctaggaggctccagacttgacccagctggtgaacggtcgacttggccaaggctgagttctaccgcacatttttaacgtggctccgcctcactttaaggaagcctggtactttactccccagaaaatgcttctagtcaaaagaaatttggcttatgagaaacctccccgcagtttaaaaaaa

SEQ ID NO: 129198 - DNA, 113 bp, Homo sapiens; identical to SEQ ID NO: 11444
  chr17:61926211-61926324
  hyper

SEQ ID NO: 129199 - DNA, 117 bp, Homo sapiens
  chr17:61926507-61926624
  hyper
cgcgctcccctcccgtcgttgtagcttcctgctcgcccctctcatctcagccaaccctgctgagctttcgcgtgggcgtcacgagtttctaggcagatcaggaaaaccgctctccgg

SEQ ID NO: 129200 - DNA, 31 bp, Homo sapiens; identical to SEQ ID NO: 11445
  chr17:62067669-62067700
  hyper

SEQ ID NO: 129201 - DNA, 165 bp, Homo sapiens; identical to SEQ ID NO: 54481
  chr17:62075059-62075224
  hyper

SEQ ID NO: 129202 - DNA, 30 bp, Homo sapiens
  chr17:62075641-62075671
  hyper
acccaggagcacgggcgggctccgcgcatg

SEQ ID NO: 129203 - DNA, 182 bp, Homo sapiens; identical to SEQ ID NO: 54482
  chr17:62103202-62103384
  hyper

SEQ ID NO: 129204 - DNA, 30 bp, Homo sapiens; identical to SEQ ID NO: 54483
  chr17:62206635-62206665
  hyper

SEQ ID NO: 129205 - DNA, 409 bp, Homo sapiens
  chr17:62223210-62223619
  hyper
accagacaactttacgcgcacgtggtcgcaaggtgaacttgctattggttaatggcagtaaagcccgcccatcagcgctggtctgctcctttaaaagaacgccatcgacgctcccctgtctttcagcgcctgcaggttccgggaggtcaggttgtattcctggcgggtcgtctggctgggtgggccccggaggtcgtggctcgggagcagggaggcgtaggggggccggcctgctgtgatgacattccaattaaagcacgtgttagactgctgacgcgggtgatgcgaactggagtctgagcctgcccgagcggagctgggagggggctggcgggcgggcgcgcgcacacccgctgatctatcactctcgttcttgtagctcccagccgaggacgtcggatgtcatcgt

SEQ ID NO: 129206 - DNA, 289 bp, Homo sapiens; identical to SEQ ID NO: 54484
  chr17:62223929-62224218
  hyper

SEQ ID NO: 129207 - DNA, 30 bp, Homo sapiens
  chr17:62658839-62658869
  hyper
agaaagcattcccacgccgatggttccagc

SEQ ID NO: 129208 - DNA, 30 bp, Homo sapiens
  chr17:62773231-62773261
  hyper
ctgctgctgccaagcgcttcgaagccttaa

SEQ ID NO: 129209 - DNA, 168 bp, Homo sapiens
  chr17:62773330-62773498
  hyper
ggagggggtggtcctcgcttgtaagttaagtggctgtcagcagctggcagctgccccagcaaaatccagttcccctttccctagtctcaaaacctgagctctgcattgtaacgagacaggcggagggaacacccagcagcgggcctacggaggcgtgtctccttcgtc

SEQ ID NO: 129210 - DNA, 117 bp, Homo sapiens
  chr17:62776305-62776422
  hyper
ttgtcaagcgttcctcgactaggaaagggtatacacttgagtcactaagcacactgggccccggaggcggggtcatcgagctgcccagagccaacaaaccccaaggtggacactgcc

SEQ ID NO: 129211 - DNA, 1405 bp, Homo sapiens; identical to SEQ ID NO: 11447
  chr17:62776446-62777851
  hyper

SEQ ID NO: 129212 - DNA, 30 bp, Homo sapiens
  chr17:62915041-62915071
  hyper
caccactttgttgacggccgtccggacctg

SEQ ID NO: 129213 - DNA, 63 bp, Homo sapiens
  chr17:62915905-62915968
  hyper
aaatattcccctcccgccccctagggaaactgaagctgaaagagccagcgaaagaaaaaaaaa

SEQ ID NO: 129214 - DNA, 76 bp, Homo sapiens
  chr17:62971850-62971926
  hyper
cggcggccgcggctcgccttttcctgagtagagggtcacgaggggactacaagccccagccgtccgcccccgcagt

SEQ ID NO: 129215 - DNA, 30 bp, Homo sapiens
  chr17:63052055-63052085
  hyper
gttcctgcctcatccgcagcggggaggaca

SEQ ID NO: 129216 - DNA, 30 bp, Homo sapiens
  chr17:63052468-63052498
  hyper
gcgcgcgcgctggtcgaagtcctgcccgtg

SEQ ID NO: 129217 - DNA, 30 bp, Homo sapiens
  chr17:63053187-63053217
  hyper
tccttccccaaggccgggaggccggagacc

SEQ ID NO: 129218 - DNA, 30 bp, Homo sapiens; identical to SEQ ID NO: 11449
  chr17:63119250-63119280
  hyper

SEQ ID NO: 129219 - DNA, 30 bp, Homo sapiens
  chr17:63133244-63133274
  hyper
aggctcgctgctctcgacaggtcctcctcc

SEQ ID NO: 129220 - DNA, 34 bp, Homo sapiens; identical to SEQ ID NO: 11450
  chr17:63341481-63341515
  hyper

SEQ ID NO: 129221 - DNA, 1722 bp, Homo sapiens
  chr17:63555672-63557394
  hyper
gagaagcctcggaaccgtcgcccccgtgcccccaacccacctcccggatccgcgaaacctacaaaactggatcaccagccgtctcacgccactactgcctgtgccaagaatcccaaactctactgatttcaagcctgtcttttttccaaagaaaaaagtcttatctaaccaataaacaagctgctttccctagcacggaaaagatcaaactaagaagggtaggggctgaacggggtgcaaccccgggcgagaagccagggaccccggatctgggatgggtgcacgctgaacccgaccagagcctcgagccgcggggctgggcggcgcggcccacggagaagtggggctgccgttggcaccgcgctacccgggcggtgggaggtggagcggccccgttacctggaagacgaaggccgccgaagccaggctctcatgtcctccgagcccctccggcccggtcccccggcccaaatgcaactgaacgcctccagagccctggcgggcacacctcgaggccggaaccccgggacacgccagcagcgccccgagcccgggcggggggtcggtccccggcgccgccgtttgcagaggcgcccgcagaaaaagcacagaaagcagcagcctagtccagaaatggcgacgcgcggagtctctgcctctccgcaaaaggggccggggcggccacgggcgaggggcccgggccgggaggagggacgcgagggacacgggcgccccggacttgggccggtcctgcgcgcagactgagcctccgccagcgctgtgggccccttagcgcggacccgcggcagggaggggaaaaggggagggggaagagaagtaggaggagaggatggggcggaggagaggcggggggcgggggagggcaagcggggggcgccgctaccctttcatcccacctcccaaaggcactcccgcgcgcactcacacgccgactcacatccataaccgcgacagcgacgcgacccccggggggtatctgccccctctccgcccccgccactgccgccactcggataagtctcctctctgggccccccgccaacccggtcaccgcgctggggagggggctccggcgcagggcgcgcaaggctgcccggccaagccccccggaacgctgggcgccgggtccgccgctcccctccgcgccggcccctagcgcgccccgaaatagccggcctgccaacttcaaagggccgccccgcacatcaaagcgcgcggtccgcccggccgcctcggcctcggcactcaccattgatccccgcgcgcgctcggcggcgagacctcgcaggcgcccctggcaggggcccggccccggcccccggctcggctcgcggcggcagccccgggcccccccgggccggccgcggcgtcggggaacatggggagtcgtgcggcgggggagggggtgcgggaaacaacaatcccgggttcagagcgaaagccaccggccggggagggggaacggcgcgccccgccgccccttttatgcaaaagatccgagcgggcctccgcccccgcccggcccggctttcaacgcaggtcctgtttccagcagtcactcggcgcaccaaatgtcctccgggcgcttccaacaaaaactgcgctgtggatttaactgtgcacttcaaaggcgcgagccgagcgcacggtcctgaaagggaggtacgcgccggccgcgccccgggccgccccccgcagccc

SEQ ID NO: 129222 - DNA, 31 bp, Homo sapiens; identical to SEQ ID NO: 54491
  chr17:63557793-63557824
  hyper

SEQ ID NO: 129223 - DNA, 30 bp, Homo sapiens
  chr17:63558032-63558062
  hyper
agcattatggccatcgcaagaactgcaagc

SEQ ID NO: 129224 - DNA, 688 bp, Homo sapiens
  chr17:64187874-64188562
  hyper
agaactttcccaagtcgtcccggcctggatcgcgctctgcctgccggggacaccacagcgggcagcgccgggaccccaggggcgcgcgccccccaggcccggagaacgggcccagggcctgagggcgacgccccttcccgaacgggcccgcaagggcggggcggcagccaccggcgcaaaattccactcaagaacctggtgggaggggcgggggaaggaaattcagaaaaaaacgagaacctggcaccaccacacgcaagctttccgctcggccgctgccgccaacgccgccgccaccgccgcccctgccaaacggtttcaaatccttgcgggccgctgggtcgccgccgcccagcagcccgggggcggggactttcgcgctcgcatttccccgccccctactccacccctctagcctgcggtgcggttgccatggcgacgttcccggcggcggcgaccaccggcgccccaggctgggggcggagacttccgcgcgggcatttctccacccacaggtggcggcgtgcgcgcggccccgttgccatggcgacgctcctgctggcccagcaaccgccagactcgcaccccagcttgtgggccccttggcgggtccccagtcgaagcttccgggataacccgaccacagtttgaatgctgctgccctcccgcatcccgcgcagagtcgctt

SEQ ID NO: 129225 - DNA, 158 bp, Homo sapiens; identical to SEQ ID NO: 11454
  chr17:64257869-64258027
  hyper

SEQ ID NO: 129226 - DNA, 174 bp, Homo sapiens
  chr17:64298538-64298712
  hyper
tcctccgcactcggtccggtccgctcagcgccgccgccgccgcaccctcgccgcacccccgcgcgcgcccggcccgcgcgcccccgccgctcgtcctcgcggcctcgcgctcggggcatgcgcggtgggcggtgccgctccgggccgcctctgccgccgcgagtaggaagcgcg

SEQ ID NO: 129227 - DNA, 686 bp, Homo sapiens
  chr17:64298988-64299674
  hyper
gcaacgactccacggcgtctcaggacgtggccaaccgcttcgcccgcaaaggggcgctgaggcagaagaacgtgcacgaggtgaaggaccacaaattcatcgcgcgcttcttcaagcagcccaccttctgcagccactgcaccgacttcatctggtaggtgccgggccgggcactcctgccccgctcctccccgcctccgggtcccggcacccggcgctccggcgcgtccgccccggggctggctcactccgataacttggaaccggcgggagtccgaactcttcgcccggagtgacacgcgcgcccggccctgacaccggcgggcaggactcccgggacgtcgccgtcccgccacacacaccccctggcgcgagagggaggctggccccgtacggtggcgaaggggatccctctccgggccgggcccctcacctccccgggcgcgcccacccgcacgcacccagcggagcggccgcttgccggggtgtgagcccaggggacaggggaggaggagaggccctaagggggcaaaggttcccggagaaacgcgccccggagtaacgggggagcggcggcgattgcactgcgcgcggtccaagttgctggcgagccaggctgggcgcgttcggggtgggggggttgtgtttgtgcttcccatcgggctggactgcgctggcatcttggg

SEQ ID NO: 129228 - DNA, 261 bp, Homo sapiens
  chr17:64825646-64825907
  hyper
atccgtgctgacatccgcacagatgaacggatcagatgagatttaatctccctgaggcccatgggcacgagtcactggagttttatggggtccagtaaagagcaaggaaaagtccgggtcttacaaggctgtaatcgcctcttagaaagagtctcccctaaccacctggtgccttagccctgcagggagctgtccagatgctgacccatttaagcgcagcttcctcggccgccttcagaccttccccgccaaggttttttc

SEQ ID NO: 129229 - DNA, 85 bp, Homo sapiens; identical to SEQ ID NO: 54495
  chr17:64831322-64831407
  hyper

SEQ ID NO: 129230 - DNA, 30 bp, Homo sapiens; identical to SEQ ID NO: 11455
  chr17:64877670-64877700
  hyper

SEQ ID NO: 129231 - DNA, 1434 bp, Homo sapiens
  chr17:64960804-64962238
  hyper
ggcggccgcgcagcccgcactcgtcgccgcgcctcggagtttgagccccagcgctgccggagcgcaggcacgcccggggcgcggggtcggagcgcgcagcgcggcgccgccccccggccctcggccccccaaccccggcgcccccggagcggcgcgcggagggaggagggcgggcgggcgcggcgggccgggccggcgggcggcggactatgaggcgcccaccatggtgcgatgcgaccgcgggctgcagatgctgctgaccacggccggagccttcgccgccttctcgctcatggccatcgccatcggcaccgactactggctgtactccagcgcgcacatctgcaacggcaccaacctgaccatggacgacgggcccccgccccgccgcgcccgcggcgacctcacccactctggtctgtggcgggtgtgctgcatcgaaggtacggccagccccgacccctcgccgccccacacacacacacacacacacacacatatacacacgcgcgcgcgcgcgcgcgcacacacacacacgcgcacacactgcccggcgcgcgggccggggagagggtgggcgcggcgctggctccgcgcgagacacaaaggagccggagctggcgggcgggtcccttcgcggccagctgtacatcagctctggtccctctcggctggggacctccccagcacaccgatcccacaaactctccacgcgcacaccccctcgcccacagacacaatgaaacacaccgaaactcaagcacgcgcgcgtagcccgggacccgagcgatccccaggggccgcgccggcacccccgggggaggtggaggctggcgagggggcgggaggaggctggggttggggggagcggacgggagggggggaggggttgcttggcaaccggtgtctgtgctattgctatgggaactggccatcctggggcggggccggccgggggcggggcgcgtcggtgccgctgggcgctttctacaggctcgggctgaggggtgggggcagaagtaggggcagaagtaggggcgggggcgcggtcggagccggggtaggggctgagttcctagcggatctagggtagctgggtaggcccagcccgacgcccgcctcgtctcccacggagtcaccggcccgctcctcgctgtgcggtggggtggtaaggggagcgacaccgagtctcccccaacggagacagcgacctcggtcgcggcccctcagcagggaggctgcggagacctcagtaggaaactagggtgtgcaggaccgatctgcggaccgggaacagactgggaggggcgtggtcatctcgtcggagctgggcgctgcgacccccaaatgcgactggaggctgagtagtaggtgtcatgaggctggaatgctaggggaccaggatttcagccccgggaccgtggggacagctcc

SEQ ID NO: 129232 - DNA, 30 bp, Homo sapiens
  chr17:65241206-65241236
  hyper
gctccgggagctcgcggagcggccccagga

SEQ ID NO: 129233 - DNA, 30 bp, Homo sapiens; identical to SEQ ID NO: 54499
  chr17:65241469-65241499
  hyper

SEQ ID NO: 129234 - DNA, 57 bp, Homo sapiens; identical to SEQ ID NO: 54500
  chr17:65242141-65242198
  hyper

SEQ ID NO: 129235 - DNA, 42 bp, Homo sapiens; identical to SEQ ID NO: 11457
  chr17:65352418-65352460
  hyper

SEQ ID NO: 129236 - DNA, 30 bp, Homo sapiens
  chr17:65361823-65361853
  hyper
tacttctgtagttccgtcttcagtaatgac

SEQ ID NO: 129237 - DNA, 30 bp, Homo sapiens; identical to SEQ ID NO: 54502
  chr17:65362359-65362389
  hyper

SEQ ID NO: 129238 - DNA, 258 bp, Homo sapiens
  chr17:65362658-65362916
  hyper
ctgtccccctgcttcggccaccactcgtcacccacaccggaagttgcccgcgcacccgctcaggcagcccatcgggagcccacgcaaaggacccctcgaggtccccggcgctggttgccactcaggcactgccgcggacagcctgggggtggggcttgaggcgcgcggggcgggactcgccactccagcctgcagcgtcaggttttgtctctgggaacatcagactttttacctaaaatttgcgatgagaaaagcgag

SEQ ID NO: 129239 - DNA, 30 bp, Homo sapiens
  chr17:65373713-65373743
  hyper
ggagagaagccgatcgagcctttgtctgga

SEQ ID NO: 129240 - DNA, 30 bp, Homo sapiens; identical to SEQ ID NO: 11458
  chr17:65374034-65374064
  hyper

SEQ ID NO: 129241 - DNA, 166 bp, Homo sapiens
  chr17:65713843-65714009
  hyper
gcgaggcgtggtctcgggaggcggagtctgacgcaagccggcccagcccacctggctaaattcacagtcgcgctcgctccttccgcccgccagaggtcgcaggctgcgagagcaggttcctggtttggcaagcactcgccccctcaggcccgttcattctcgcgag

SEQ ID NO: 129242 - DNA, 30 bp, Homo sapiens; identical to SEQ ID NO: 54506
  chr17:65820954-65820984
  hyper

SEQ ID NO: 129243 - DNA, 435 bp, Homo sapiens; identical to SEQ ID NO: 11459
  chr17:65822941-65823376
  hyper

SEQ ID NO: 129244 - DNA, 140 bp, Homo sapiens; identical to SEQ ID NO: 54508
  chr17:66434323-66434463
  hyper

SEQ ID NO: 129245 - DNA, 30 bp, Homo sapiens
  chr17:66507801-66507831
  hyper
ccggcgggggagagcggccccagcggagac

SEQ ID NO: 129246 - DNA, 1375 bp, Homo sapiens
  chr17:66596139-66597514
  hyper
ggaaggggctgagagcgtttcttcgctgtgcggctgcaatagaaactttttcctcgtactatctgactccgggactggactgtgaggtctgcaacagctggtggggttcgggtggggaacacactctaagcccagcgccagggctggagccgtgggtggagccgctgcagccctgggccgggggcgtcaggaaactcgagactggggcgcggggaggccccggccagagcgcccgctctcccgcgtcccgggcggggtcctcacctgttccagcgggccaccttcctccggtaataccgcagcgcctcctggctggccaggagcgagtcctcggctcccaggagaggcggctcctccgggacgttgtacagcgggtgggcgaagagggcctgcaacttggagctcgacccgctgtggctgccgccagccggttcagtccggggctcggttcgggaaaagttgtgcacgatcgtgccggggtccgaggcagctgcggccgagtcccgcgccagggaggaggcgcggccggtgcacgggcacccccgcgggcgctcccgaggccgcagctggcgctgtacttggggccagaggtggaagtagaggtcggcggagagcagcgcgcccagcagcagcagagtcagtaggcggtcccggcgcagccccggcatggcgtgctggccaagggggacgccgggggcaggccggctgtctccggggtcccgggaggggtcgcggggtgcgggcagaagaggtgcctggagtcccgcgggtgggccggggtcagtgagaccggaatgctccccgcgcgggctagtcccctgtggaggggtgtcgctcctcaacttggggaccaggtgcacggagcaccggggctctcggagtcagcgggcgtcgcttctccgcgccgagtgagccgagggaatggggttcccggggtgcccgcttcttgcgccttttctcccgtgcgcccgcccgcccggacgctcgcggcaggtgaagggccccggggcgccggcgccggctgccaccgcgggcggacgggcgacggggcggggggcgaccgcggagggcggacggaggccgccggctgcaaagcccggggcgtctctcctgaggatgctgtcgctcggcggcggctgctagtgctcccgcgactcctcctgcgggcggcggagacgccagtgccggcggctggcacgggcggcgcgagtggggagttggcgaagcaggagcggctccggggagcttgtctgtgcgcctggactcctagaggcagaggtagcgcggggcctccccgagcctggcctggcgccggcacccccacccactctccgctggcacctgcctctggcgcagctgacggccaactcccgat

SEQ ID NO: 129247 - DNA, 30 bp, Homo sapiens
  chr17:67322818-67322848
  hyper
tgctgagggtggaacgacagcgtccaggca

SEQ ID NO: 129248 - DNA, 30 bp, Homo sapiens; identical to SEQ ID NO: 54510
  chr17:67323267-67323297
  hyper

SEQ ID NO: 129249 - DNA, 136 bp, Homo sapiens
  chr17:67410685-67410821
  hyper
gacgcaatctttgtcgcacccagttatctcgctcagcgaccggggcgaccacgtttccttaaatcagagccccgtggactccgccggagaactacattacccagcggccttcgcgcccttcgcaggaaggacgtct

SEQ ID NO: 129250 - DNA, 1743 bp, Homo sapiens
  chr17:68164453-68166196
  hyper
caccccgactgcgccgtccacaataccagctagtttgctgaattagttcagcgactcaaggaggccttacgaggtttaaataaactgcacaaaagacacatttgatcgctcgagaaaataaacatttaaaaaactcagtggaaagaaagactcctaaaatatatcctgtcctttaggagcaaagcttcgttaggacaccgaagtactcagaaataataggcacttactcttcggtttacacacacacacacacacacacacacggattagtttataaagttccaggatccagacccggttaacactgaagttgctttttaggggtctgcgcgctctcgcctggctgctgggaaggagggctgggaggcgctgaagcgagggcagatctgagtgtctgtaggagttgctattccaaaaaaaatcattactctctaattgttctgattttagatcagcaaagcgtgccgggcggtggtggagagactgagggcggacaaggcgagagggaacgagccgtccacccttcggagaagcctaggcgccttgtaagtaattcgcgaacagtcgggagaacaaacagccaagcggcgctgcagtggccgcacttgcgcgcgtctcaatcctgggggctctgcgcgcccgccccagtccctcgccccattgactcagtggcttctccgggcgctgcagcctccgcggggggcttcgaagggccgaggggctccggcagagagggagtggagagggagacgcgccgggaccgacgaacaatcctgcccctgcggcaaaggtctctacccggcgctggcacctcgcaggcccctcgaggagcacgcagggcaagcggcccaagagcgggggaaccgggaagtgtgtggggctccagacggagtaggaagctttgcccaaggccaggctgcaatcaggcagccgcaacagccgggcgcggagcttcccacctgctgctgtcccagctgggccgcaacttcctcctccccggcccgggcccgactccccggccgggctccgagggtggagggggacgaggcggcggcaggttccctccgctggcaacgcctcgcagcatcctcccctccccgccgcggttcccggggccggccgcgcggccaggcgcgctgcgattggccggcagcggccgggggcggggccaggagagccggtgtcgcacggaccgcctcaaaagagcccaggatattgcagagcgcactggagccctggccagcgcgcagccttcccggcgccggcgggctgggtcttgggaattctggtttgctttggctcactcgctttttacaaaccactggatcttacatgcctctgtaccccccacttccactccatgtccccatgctcctgcgccagcaacaggtaagggctgctgtgttttcttccttttcgctcgctgccggtgtgtcctggggaatggactctggccgccgtcccctaccctaccctgccccgctgctccagaggtgcccagctgtcacactgctgtagcgctcacccacactccggagtcccagatcatgcctatatagtttgtgtgcgcaccagaacatccccagagctaaaaatactgagacatgcttggaacagttgagcaatagaaacagatttctctgcagcatctgtttgtgctcataacttccaatgcaccagctgtagcgagatactgggtttggaggcaagggcgagagcgtctgtgttcggttctcactctaa

SEQ ID NO: 129251 - DNA, 356 bp, Homo sapiens; identical to SEQ ID NO: 54513
  chr17:70026537-70026893
  hyper

SEQ ID NO: 129252 - DNA, 511 bp, Homo sapiens
  chr17:70113055-70113566
  hyper
tccgtacccccggggcgccctgctgtgttacagccgcccgacgcccccagacccggccaggtcaccagggcagattggaggttcgcgccccctcacccgacacctcccgtccacctcatctttctttttttcgaaaacaggaaagggaagaaaactgaaacgggcctcttggtctgcagttttagcggagtcgggattccacagccctgagtggcacatgccggtcaacttcccaaagtcgggctcccgtgtggggagaaatacacacgcaggaatgcacaagcatcgcgtgttcgcaactgtcgctgggaggtctggcggctgtgatgggacatgcactcactcgggcaacacgtccacaggtgacatctattcgatcagtcaacagatatttattgcgcacctacgacgctatctggtactttccttttccccttagctgttgctgtccagcccagcgccagtccagagacgggcttaccggccgctcccttccacaagaaactcgtgt

SEQ ID NO: 129253 - DNA, 371 bp, Homo sapiens
  chr17:70113647-70114018
  hyper
cggggacctgtccctccagggataggagtcttctacctgcaagggacccggcctggggaactggaatagacaaggggtaaccccttctcccatcacctctaatgagaacattgtccggggctgagatatttgggggacgccgctgctcaccccaccaaactttccctagggacagaaaagcgtccctaccgaaaacggatttaaacaccgtccccacttttgctaaggaagtttggatagggaggttgtggtccttaattcgccaggtaaaaggaaccccatcagctcgcatccctcacccccatcctgagcactgagtgtttgcgagaaactcgccctgcgccagcaactctgggctccggtctcagctc

SEQ ID NO: 129254 - DNA, 485 bp, Homo sapiens
  chr17:70114152-70114637
  hyper
cgcacctctgtgtctccgctcccggcggcagacctcgcggcgcttgctcaagagcgggtatccgaaagcacgtcccgaacacggagaagcgccctccgtctcctgcctcgtgacctgcgccctttccctccctcaccgcatcagatggaggaccctggctcctttcgcccctggcaaaatgctctagccaacactgggtcaacagccttagtttccagatctgtaacctgaacatcaggagcgggttcctttccttctacctgtgtctgaggtcctctggtcggggactgcgcgcgtcttcccaggtcagggaggaggggtcggggcgacctgagaaagacacaacgaagcgaatggagcccctgaatggggaaaggggagtggacaccaggaggcccctgcagaaatgcaggaccgatccactcgcgagctgacaatgccacgcgctagacttggcctgacggtggcaacgcttggcacctggg

SEQ ID NO: 129255 - DNA, 30 bp, Homo sapiens
  chr17:70115024-70115054
  hyper
aaatgtataaatccccgtcgtttatgatgt

SEQ ID NO: 129256 - DNA, 405 bp, Homo sapiens
  chr17:70115368-70115773
  hyper
tctcctaggaaaggacgatgctgttcttacactttctgaaagtaatcacagagccctggatacgaagctattgtatgcaaatctcttaaatttgtaaacgagctatagggcaccagaaacatcccatttgaagaagttacattcgttaaaaaaaaaatgctgttgaacaaggctgtaacttactaccttatgaagagttccatttcctataagaaatgtcgggcttcttccgaagacaacgagagaaaacaagattttaagaaattctcccggaaggacattgatttggatcttgtgatagtgtcctcacttcgcaaattagaaagggaaaaaaaaactagtttttattatgatgtgggccgattcaccacaacaataatttaattgaggcgaatttttgcaaga

SEQ ID NO: 129257 - DNA, 152 bp, Homo sapiens
  chr17:70116067-70116219
  hyper
ccccttcaggtgtttcgtaaatgccagcaaaagcaggcaagcagcatgactccgccagagtggagcgttttgtctgcggtggtgcccatttgtttggtcttttacaaaccaagtgaccggcctgggcctcgcggcccgggacagccgcattg

SEQ ID NO: 129258 - DNA, 30 bp, Homo sapiens; identical to SEQ ID NO: 54517
  chr17:70116666-70116696
  hyper

SEQ ID NO: 129259 - DNA, 80 bp, Homo sapiens; identical to SEQ ID NO: 54518
  chr17:70116990-70117070
  hyper

SEQ ID NO: 129260 - DNA, 30 bp, Homo sapiens; identical to SEQ ID NO: 54519
  chr17:70118543-70118573
  hyper

SEQ ID NO: 129261 - DNA, 645 bp, Homo sapiens
  chr17:70215661-70216306
  hyper
ttgctcccagggcagcagacacgctctcccaaaggggcggacacagacgtcctcacaccgcggcccgaccggccgcacattaatccgggtggatttggccatcttgtgacatagccaatcagttcgagggaggggacggcaggaacgcctctcctttcacgccacaaaaggattttcgtcccttgagagcacaatgaaaaaaaaaaaaaaaaaaagccaatcaaggcgggatcagctgtgggctggtcgctgcagatctgtctctcccagaggggggtgggggcacatattggtccgtgtgggaaacccagagcctcagcttctcacacattgttctcctcctcttcaactgcaccccctccccaccagcccggaccctcccctctcccctccccaaagccgttattgccacaaaagatactttccccattgtgccccggacagctgagaggtccgagttagccatacacagctccgcgtcctctccagggagaaaggggatggaccctgcaagtggagagcgggatgcttatcatacaaaggaattaaacccacttgggctctctcgccatccaggactgtggggggttaaatacggttacattttcattaggtgctaatagcagaagggcagccccgggcagc

SEQ ID NO: 129262 - DNA, 200 bp, Homo sapiens; identical to SEQ ID NO: 11469
  chr17:70216392-70216592
  hyper

SEQ ID NO: 129263 - DNA, 52 bp, Homo sapiens; identical to SEQ ID NO: 11470
  chr17:70270192-70270244
  hyper

SEQ ID NO: 129264 - DNA, 30 bp, Homo sapiens; identical to SEQ ID NO: 54523
  chr17:70400150-70400180
  hyper

SEQ ID NO: 129265 - DNA, 40 bp, Homo sapiens; identical to SEQ ID NO: 11471
  chr17:70553091-70553131
  hyper

SEQ ID NO: 129266 - DNA, 1351 bp, Homo sapiens
  chr17:70587738-70589089
  hyper
ctattcagaaagcccgtccacaccctggccaaacgcgtaccagcgtcagcctgacgggtggcccagtcctcgccggaaagctgcttgccaaacgcccccgctcaccccctagccccaacggtgagaggggctcggctgagtcgcgttctccaaccgctgcgccccagcagcgtccccggtcgccagtgggcggacgccaggagctcacggaggcggcaccgctcccgaagtaacggagcccggagggcgcccaggcgttaaggcaagtgcaaggggccgagcgggtgcgccgaggacgcgggggcgtctcccccagctgaggttcggtccctccaggcagccaaggcttggcagcgctagaggctgaaggacaacggccgagaacgcccaggatggggtggtcgctgaccaccgtgtcccaggtgaatcagctccgcttggaggcagggggatgactaaaatgacctccaagaagatgtcaattacaagaacaaaaatttcaacccggaatctcgagaccttcgaaaaacgacgcggaggaaaaaaggaaagaaagaaaagaaagtaaatcagatcccttccccgaaccgcagggaaacttacctccagcttggcgacccagctgttaagcagaacaaatcaatccacggatggagaagaggtcgtgggtcttctgagcccagctgatacacaccaagtaatccacgttaaggggtccgcagccccccacccaattccccactttccatccaaggccaaagagcagccagaccctgtcctctgcgctccagactcgcggaggtcgcgggcgggggtcctcaggcggccgccttctcgtccccaggggtgggcgcgcgacgcgggcagggaccgggcgcccggaggaccaagcgagcgcatcccgcctactcgtgctgggacatcacccagcctggacgccgctcctcgcctttcttccccgcgcatcgccagcgccaaccaaagatccccgccgggaaagcctctctgccaagctggaaagcgctgaaggcggatcgtctctcagacttgggtttgcaggttcacaaggcccgggaggcttacggtgggcgcctgcctaacagagggtccttgcggagaagcgcagaacgacaaatgccagaggcggtgaccgcgtcctctggataccagcgccgcaccgcgcacccgcgccgcctgcgcgccctgcagtcggctgggccattcggcccttatataccaggcggacccgcgccgggacggggcggagcggggtgggcggggagggggtggggaaggccgaacggcttcctgggagtcgtagttcgactacgtagtcctgtcgtagtcagaa

SEQ ID NO: 129267 - DNA, 82 bp, Homo sapiens
  chr17:71088836-71088918
  hyper
ttccctcccgcacacgtggccctcccgcctccgggccccgcccccttggccgcaactggcaactcccgcctgaagaatagat

SEQ ID NO: 129268 - DNA, 131 bp, Homo sapiens
  chr17:71128277-71128408
  hyper
tattcaagggccagtaaatcccgttcccttttgttttctcctgctgttctgcatcctagcgcaatcaattcccaattgtgtatgaagtgccacggaaaatccccagcggcggttaatgcaaaagcatttat

SEQ ID NO: 129269 - DNA, 425 bp, Homo sapiens
  chr17:71160733-71161158
  hyper
ccggggctggcccacggtaaacacagctttgctaacttgtttggctaaggaaatcacagaggtcccggtataagtctgggtcaccccggccgccactccagctgcctagaatatatgggtggaagggaatcgactctgtgaaatcagagggaaaatagcgcttgtccttgccatgagtcttgaggagaccgaaaacgcttaaccttttacgcccccgcaggcgggtcccctctctccccgctccccggctgtctgtaagctctgcctgcggccacccgcaggcgtttcagccggtctcacccctgtccttctgcaggacccgggaggaggggttgggggggcggagcgaagccgctgtgacgtagcgggaggggggcgtggggaaatgtgccgaggggcccgggctggctgggccagtcccagcg

SEQ ID NO: 129270 - DNA, 250 bp, Homo sapiens; identical to SEQ ID NO: 54529
  chr17:71161183-71161433
  hyper

SEQ ID NO: 129271 - DNA, 951 bp, Homo sapiens
  chr17:71161481-71162432
  hyper
gagatggagggagcgagaagcgcacttgggcacctgtgtgcatctgcgctgatggtggtgtgcccatccgagtgcctgagcttaggtcccggtgcgtgattctccgctcttgtgccttttggggtgattgtagtaggaatgaacgacaacgggtacccttgcctgagtaagggggctgtgggtagagtgtgctggaacggacgtgtcctcgcagcctcatgcccgtgtgcgtggcgtgtgccctttagcccgagatttcaggtagctgcgacgggtgacaacttctctcccagccccctacaaaagagacctggcgcgaggggagcgaggccgtgagatgccagctggggctcctgcgggagcgcacccggagatccgagcctgccagaggcaggcggcgggcgcagagcggagaaagaggggcttctctccctagacgctgaacgatctaggatccgtccccgtcccccacctcgggacagaaaggacagtttgtctaggtttggagagaaaaaaccactgcataggccgtgcccaaaagccgctggccaagtcccccaagcgactgtcttctgcgccccgatgtctctgtcctcagcgccccccccccacacccggcacccctgctgtgcgtttcgatactgggcgtgctggcgccacaatctccgctcttgcctcgtcttcctggaaatggcacagagttctttgggaaacccttgctctgaggatcagcgagttggatggccaggaggaggactttctgtgccagccgggagcaaccggctccgcggtcctgacactcgcccctccatttctcaaccccgtaggccagcaccgccccggcttttcccaggcgctcacgcgccgcggtggccctcaggggcttttgtcaccctgccagtgggggctctcgctctagccgcacagagaccaagccgggttctgcaggcc

SEQ ID NO: 129272 - DNA, 30 bp, Homo sapiens; identical to SEQ ID NO: 54532
  chr17:71188788-71188818
  hyper

SEQ ID NO: 129273 - DNA, 100 bp, Homo sapiens; identical to SEQ ID NO: 54533
  chr17:71227555-71227655
  hyper

SEQ ID NO: 129274 - DNA, 254 bp, Homo sapiens; identical to SEQ ID NO: 54534
  chr17:71228587-71228841
  hyper

SEQ ID NO: 129275 - DNA, 242 bp, Homo sapiens; identical to SEQ ID NO: 54535
  chr17:71306520-71306762
  hyper

SEQ ID NO: 129276 - DNA, 1601 bp, Homo sapiens; identical to SEQ ID NO: 54536
  chr17:71306966-71308567
  hyper

SEQ ID NO: 129277 - DNA, 30 bp, Homo sapiens; identical to SEQ ID NO: 11477
  chr17:71469605-71469635
  hyper

SEQ ID NO: 129278 - DNA, 2088 bp, Homo sapiens
  chr17:71639093-71641181
  hyper
cccctcctgagcctgcgagagtgaaggcctagccctgcgagtcctggagctcggtccaggcttcgtctccctccgcccccagcaggcgccgctcggacaccgctgacaccactgtctggatcggcgaaccccaaagtcgaggaaccgccggtgcagccgcccttcacctcggggacctgcccggggaccagggggacgtctgggcatccaccctcaggaagcgggcagcgcagatcacacctcggatccttcgtagcactcccaaacccaaagccaccagcccttctccaccgcgaggctgctcccggcagccacaggtcacagcagcgagcggctgcacagactatcgagcgaacagcggaggctggaggcaggggcggggatgctgggtgtgggtggatgggtaggaggggaggcctcagaccctccctgtgcaccaccccccggtgggtccgcggctgcacccgcgaccttggctccaggcccgcgcagcgaagcacccccagccccagcggctggccgagcagccaggggcgggctcccgtacgtggccaagccgggcaattgctctccccgggcgagcaacccggcatccagcgctcgcccaccccactccctcgccccggggaggccatcgcctgcccggcaggggccctgcccttccccgcagacaccgagcagggaaccaggagctcggtctgggaagctcagcgtagccgagcgtggagcccggcacggaatgtcgctcccctcccaagccggcgcagggcagccacagcagacggggggaggggagcgcccctcccacttcaccttgggctcttctctgcctccccaggtcgtccccaccttcccccattcggaagccacaagtctcggagagactgccccacccccaaaagagccccaaaacttgggagatggggtgtcttgaaactccctggagagggctctgccacggctaagccgggtgtccaggaggtcaccgtgaggccggccagctcccgccgcccctcccccgcccactctcccagccccctccctgtccccacgtgggggtccctccttaccttgggctctggccgcgcggatctgatgcagagctagcagtgtccagatcaaaagcccccacatggtgaccagcctggagaggggtcctcggggtctcccttccctccgccctgttttataatcctggtggggtccgataccccgtggcttagtcccaggaaacagtcagtctacgcggctccgtgccccggggtgtaatatgcccgggaggggcagcgcttggctaccccaacccttcctcctcttctgtactagtccgagcccggcagcgcgcccggaaggcgaggggcgagcagggagaaagaggccaggccgccctctcggactagggcgcctctctcccttagcaccccaactccgacttctcccaaacagggcggcctctgcgatccggccgggtcgccggccgagctccggaataaatggacaacttcaggaaacttcctcccgtggccacgttgcccgccccctccccgccccctggttgggttctcccggccgacgcagtcaccgccgttccaggcgccgggcccccgggacccggccagagccgagcgcagtggcagacgcgggtgcgggggttcttttaggggcgccggtttcgggggacgcggtgagcatagcggtccgaatctccctggagctgaagttttcttctctctaactttgcaggcagcatctggcggggccgaaccaccccctctgggctccaccgccctcgcgccgaatcgggagacgccgggtctcctccgggggcgctggggccgggcgcgccctcggctccgcgcccagccggctagcaaactttgcgggtcccggagccgggcgcgcagccctgagcgcccatgtccgcgccagccgcggggcggcgggggagggtgctgggcttcgcgacgcgggctgtcgccggcgcccgggcgcagagcctcctgccggcccgaggatggagaccggcggctctgccctccgccgcgccccggccggagctctcgggaagacgcacggagagcccggcgg

SEQ ID NO: 129279 - DNA, 292 bp, Homo sapiens
  chr17:71641392-71641684
  hyper
cggcggaggcggagacgcggagaggggggccgagcgctaccccgtggccgcgactggagagcagcctgcgcgccgggaggggcggcggcggcggcggcggccccgagccaggcccgggagcgagccccgcagaaatacaatccgactgcgcggccgcgggcgcccagcggctctgggacccgcaggggggcagcagtgccaaccttctgccgcgccgggagagatgcgcgcgagcccctccgctctctgcccagcctttccttccagcctcgctcgcgcccctgtctcaaag

SEQ ID NO: 129280 - DNA, 250 bp, Homo sapiens; identical to SEQ ID NO: 54543
  chr17:71897913-71898163
  hyper

SEQ ID NO: 129281 - DNA, 252 bp, Homo sapiens; identical to SEQ ID NO: 54544
  chr17:71898228-71898480
  hyper

SEQ ID NO: 129282 - DNA, 888 bp, Homo sapiens; identical to SEQ ID NO: 54545
  chr17:71948433-71949321
  hyper

SEQ ID NO: 129283 - DNA, 115 bp, Homo sapiens
  chr17:72199625-72199740
  hyper
aggcggagggagggcggcagccaggatggtccattccattcttggagctgcactgttgacttcgaccacaagggggcagggctgctgaaattggaagtgcgaacgcctacatgag

SEQ ID NO: 129284 - DNA, 30 bp, Homo sapiens
  chr17:72200144-72200174
  hyper
ccccggggcgagggcgagagagcctcccaa

SEQ ID NO: 129285 - DNA, 764 bp, Homo sapiens
  chr17:72208473-72209237
  hyper
gcgagcgttttcagtcggtccgcatccacccggtcccttcagccagaaccctaggagccccgccccgtcctcccggggctcctttctcacccgcgtccctgccgcggtggatacgcacccctcaggctggctgcccagcgcggtttccacgcccaatctgccgcgaccccatcactccaccgcacctacccctgactcctgcttgtcctgcagcctgggctcctccctccgctggccaagtcacgccaagcagtttgcggttacaggacgggtgggggcctctgcatatgtgcagagtacggagggcccagggacgcgaggctccccgatgggcaacctcccctgcctttgcttttccccagagccccctcctggcctgcgttcggcatcttctcgggtcgtcatcgccctctgcggtgcctgcgctcggggtgagggtttttgtcggcttttgttacatcaccgatgtaacagtgcctggacgtagtaggtgctcaataaatatgttgttgaatgcgcttcagtctccccgaatgcttgtcccttccgggcgctctcatcgctctcctaccttccccgctacacagctcgaaggtcccctcctccgggaagctcaccctgtcccacttgccaggaagaatcaagcaaattttctgagtgagacaccttgtcctcactcaggcgtcctgcaggcggcttcagcgagttgttggggcagatgcgccgggagctcccgagggcagggacggcgtcttatttctctt

SEQ ID NO: 129286 - DNA, 52 bp, Homo sapiens; identical to SEQ ID NO: 54548
  chr17:72209565-72209617
  hyper

SEQ ID NO: 129287 - DNA, 516 bp, Homo sapiens
  chr17:72209872-72210388
  hyper
cagaccgcagccacgcgcgccccaagtccccgcactaccccctctcccctcgagagcctgcactttcccacgtgcctctcagaccccttctctccccgcgcagccctttcccgtctcccctctccccttttcccccaccctcccaggcccgtggcccgcgtcccctcctgtctgggaacctgggggccgggaaaactgaagagatcagagtgaagcgagcgtggggaaggggaggaagggcgcaagaccgcctgcggggtgaggggctgaacgctgagcgggcagggcggcgcgggggaggggtaaggacaggggcattcgtctcggggtaatcctggcgcgcgaggtgcggggatgctgaggggtgccccgaagttttcgaccgtctgagattccaagatggggcgctctctttccggggctgagtggcctaggaaagtttggcagaaactgagtagagtctcccgagtcggtcttcgcagcacccctcctccccagccccggcctgcagggtgg

SEQ ID NO: 129288 - DNA, 216 bp, Homo sapiens
  chr17:72270295-72270511
  hyper
ggcctgcgcttccgacgtggcaggaaaggagtcacgtgctccggggtccttccgcgtcgccccgcgcgtccggagccaggccggggttgccaagcaaccggtaaacgccgccgtttgaggagcaccggagccgcgaccgtggattgaacgcttccccagagacccagaagcagaaggagcggacccagggtaaggggcgggcgccaggaggacgtc

SEQ ID NO: 129289 - DNA, 517 bp, Homo sapiens
  chr17:72322040-72322557
  hyper
gcgtggctgctggggcgctccctaaagggcagtggcacggggtcgcgccgcgagcagaggggcgcgggtgggcgcgcaggagttagcgaactgacacggaggcgccaggcggacgcacggacgcaccgagggccgcagggccgcacagccgggcacacatcgtcgcgcagcggttcaggctcgggggcctcctcggcggaggcggccaactctcaccctcagcgcggggaggggcgggcgccgggggcggggcggcgccgtccgggccctccccctgccccgcctcgggtcggcgtccttagccgctggcgcgttgttggtttcgggttgtcaggcagcgcgcgaggcggcgggcagctagcagctggcggacgcgacccggaggcggtgggggtgcggctgagccatgcccggtggcgcggcctgagcccctccacctgctgcaatcatgaaggacagcggggactccaaggaccagcaactcatggtgagacccttttagaccctcctccccacc

SEQ ID NO: 129290 - DNA, 12 bp, Homo sapiens
  chr17:72322611-72322623
  hyper
cgccaccccact

SEQ ID NO: 129291 - DNA, 112 bp, Homo sapiens; identical to SEQ ID NO: 11482
  chr17:72353147-72353259
  hyper

SEQ ID NO: 129292 - DNA, 99 bp, Homo sapiens; identical to SEQ ID NO: 11483
  chr17:72353416-72353515
  hyper

SEQ ID NO: 129293 - DNA, 1927 bp, Homo sapiens; identical to SEQ ID NO: 54554
  chr17:72427015-72428942
  hyper

SEQ ID NO: 129294 - DNA, 30 bp, Homo sapiens; identical to SEQ ID NO: 11485
  chr17:72439029-72439059
  hyper

SEQ ID NO: 129295 - DNA, 374 bp, Homo sapiens; identical to SEQ ID NO: 11486
  chr17:72449938-72450312
  hyper

SEQ ID NO: 129296 - DNA, 337 bp, Homo sapiens; identical to SEQ ID NO: 54557
  chr17:72450330-72450667
  hyper

SEQ ID NO: 129297 - DNA, 30 bp, Homo sapiens; identical to SEQ ID NO: 54558
  chr17:72612278-72612308
  hyper

SEQ ID NO: 129298 - DNA, 30 bp, Homo sapiens; identical to SEQ ID NO: 54559
  chr17:72638272-72638302
  hyper

SEQ ID NO: 129299 - DNA, 218 bp, Homo sapiens
  chr17:72667263-72667481
  hyper
ggtgacggagatgcccgttcgctcgggatcaggaacggtgagctcctgggaccgcaatgccctgagaacgcagccgggtgctgagcctccggagtccggtagctgaatgaaatacgcagggatcaccagccggacccaaatcttgcgtccctgccagcatcctggagtcctaagaggcagggattggagcggacaggatctcagaactctggtcccgg

SEQ ID NO: 129300 - DNA, 15 bp, Homo sapiens
  chr17:72667681-72667696
  hyper
cgcagagcgcaggga

SEQ ID NO: 129301 - DNA, 301 bp, Homo sapiens
  chr17:72732897-72733198
  hyper
tattcagatgagctcgggccgggtgacttaacagatgaggaagtgtctcggggccatcggcggaggcgcagcccaggggtccccagctccccgcctcgccacctggggacagcccacggcccggggctcgggcgccgcctgctgtcgcggtgcgcagcgactacgggaactcttccgcagcagacggggtccccgcggcccgctcccccaggggcaagcaagcgaccacaggggaccggtcccggggctggatgtggctcatgtccgaagcgcacggagccgagccggtgttgctcaggga

SEQ ID NO: 129302 - DNA, 533 bp, Homo sapiens
  chr17:72733407-72733940
  hyper
ggacatgacgggcacgccaggcgccgttgccacccgggatggcgaggcccccgagcgctccccgccctgcagtccgagctacgacctcacgggcaaggtgggtgggcctcttccgtgagacccccgccctcctcggcgctagccccttcctggctgcgtctgggttggactcagcccttcccccaggcagctgcgtctcccagaggagggagggagagagggtcaggacacagcctctggggccgtcccaagctctaggtgtctctgctggcttggtgggggcgggtcgcggaagatcgcaaaaactgagtgatccccccgccggccccaactcagttctcttctgccacactctggcaaatatgagcccccgggagcccatgcttcttggtgagggttaagcgcgcaactctcggggctcaggctgggaagggctgggagatggggaccgaacggagactcggagaggacgtcccctgctggcagaggaactggcgttaatgccattttccgagctaagctcttagttgaga

SEQ ID NO: 129303 - DNA, 30 bp, Homo sapiens
  chr17:72745042-72745072
  hyper
ggtccgaacggctacggcttccacctgcac

SEQ ID NO: 129304 - DNA, 30 bp, Homo sapiens
  chr17:72745561-72745591
  hyper
gcccgccgaccaggcgccctgacacatcct

SEQ ID NO: 129305 - DNA, 30 bp, Homo sapiens
  chr17:72771929-72771959
  hyper
gctaagttgacttccgtcattagttccgtc

SEQ ID NO: 129306 - DNA, 30 bp, Homo sapiens
  chr17:72772366-72772396
  hyper
caaccacgcggacccgggtactgccaagct

SEQ ID NO: 129307 - DNA, 1690 bp, Homo sapiens
  chr17:72855928-72857618
  hyper
catcaggctccccccgcgggaggagggggcgcgagcagcgagagccaccgtcacccgcggctcaaggacactcgcgatgcggcggcggcggcggcggcggcggctccgggcggggacccgcgccacgcctcctggcggccaagctgagcaccacgcacccggcgccccccgccccacgctgccccccgccggcgtccgcggctccggggcccccacccccactcccccaagctgggtcgtgaccccgagtcccgcagtggggggaccaagccagcctggcaggcggccccagtaccatcccaggcccgcccgggggccctgggcgaacccaggtgtcccggacctgcctacctgcccctggcacgctcttattcttcgggagtttagaaacaggctcaaagtcactagcaccgccaagacctggacgggctctgaaatacagccagcggaatggtaccctccccaaataagtgtctttcctcgattttcctgtggcccggggtcagggactgaactaagataacgccaccatccgagggctgggggaccgagccagaagtccccttggacgaccagggctgggaaaccgagtggacgaatggggtgggcatcagggcctggcgggaattcccgtcttgctcacccagcagctccttgcagggtcgcgggacgcacctgggggttcaggttgccgggtgcctttgctccgcgtgtccccgccctgcccgcgtaggcaggaaacaggagactcggggcttcccctccccgccgtcggggatcctgggcgaagcccccagagaccggcgcaggcggctggtgcgcagccagggcccagcgccaggtcttgctcgcccagtgccctctctgcctacccttccctttgcgctctggaagcccgggagccgggcacgggccagcatctgcaagatgccactactctggaagcccactccgattctcccaggtcgcaggaaggagagagctaggctggggcaaaggagatggggcagagctggaaggggaagaagcgggactcgcggcgggggaaggggtctgggcgccgaggcgagtgcgcagcaggtgcccagcagacctagggaaactggggcactgggctggggagccgcacagccccctttcaccttctcgactcctttccaacccctcgctctggtggatcccagccccggcccccactcccggccctgttccccgctctccgccccggcggcttccagcagcaacagtttgggtccgcggcagcccagactcccctggtcccgcggtgctgccgcgccaagcgaaggaggaggagggctcggcgaccctggggacgaacgtcttggacgcttcgcccgcgtccttctctcgcgtccgccgcgcgcctgtctgctcggcctcttcttcgccttctctccggccgcccgggtcaaaacccaaggccaggttcttgagggtccgggtcctccagccgccccctccttgagccccgagagtcctgcgtgggtccaaccccccgggtgtcccgcctctgtctccgccgtccttgctcgcgcgccgcgggaacccagccccaagttggcggcgaagttggtgcccctcgcccgccgctcgccacttaccgaggggaaggggcgctgcgcccgcgacgagagcccgcgccggccgcctccctcgcggtgtctgtccc

SEQ ID NO: 129308 - DNA, 30 bp, Homo sapiens; identical to SEQ ID NO: 54564
  chr17:72857996-72858026
  hyper

SEQ ID NO: 129309 - DNA, 30 bp, Homo sapiens; identical to SEQ ID NO: 54565
  chr17:72869046-72869076
  hyper

SEQ ID NO: 129310 - DNA, 633 bp, Homo sapiens
  chr17:72889430-72890063
  hyper
cgcgccgccacctccgccgcaccccgcccccacccgcagcccggccgggacgccgggtccccgcgttcctcacctgccggcaaggcgaagaggctgagcgcgaggatggcgcagtccacgccgtggcgctcccaccaggagctcgtcctcaccacgtcctgcaccagcacctccagctcccgcagcagcgcctcgcccccacggtgcgcgctccgcgccggttccatgggctccgtaggttccatgggctccgtgggttccatggactctgtgggctcgggcccgacgcgcacggaggactggaggactggggcgtgtgtctgcggtgcaggcgaggcggggcgggccggggcggagtcacgcgccgcctggggacacccgcccccggggtcaaggtgcgagacaccctggctcctctgctgcgggcgctggcgacccaggcccggctcaggcgcgcgaccctggcaggcggcatcagaaccgccgcggagggaggagccaggccgatgagctgagagtggctaggcggggaggcgaccctgcggtgagacccagcccaggtagtagggacggaggcgtcaggggcacggagaccccagtggagacaccccccacccccgccccgccccgagg

SEQ ID NO: 129311 - DNA, 103 bp, Homo sapiens
  chr17:72919303-72919406
  hyper
gcagacggagggtgcggagcgccagagccgcgactaccaagacatctgaaacgctcacccgggggcgggggcggagggggcgggggacgaaatctcccgctgt

SEQ ID NO: 129312 - DNA, 30 bp, Homo sapiens
  chr17:72919689-72919719
  hyper
ctaagaaggggcaccgtgaccgaccgcggt

SEQ ID NO: 129313 - DNA, 769 bp, Homo sapiens
  chr17:72920263-72921032
  hyper
atggatcatgtgagcgggactgagagctttatggagccaaactcccgcagctgtaaatcaccctgtcctcctgggtataaagcgcctgtccatctcggcgtgggagagaggagacgctcgccgtcccctgacccccagctcagcgccggctccaagcccagccaggtgggtgccccgggccggagggcagtcggacttggggagtggggaccttggaggggtccaaccgggtgctgccgcttctcctttcttcccatccagcgagaggggcaggttccgcattttctcttcccctttcccagcgcttcctccagcacccgaagccccaaccctgcgggtcaggaactccctagtccccaagtctagggatgagatgggggaaggagagccgtcagggttgacctggagttttgtccgctcctcccctacagtgatccctctagccttctccagtcgcctccgccatgtccgaggagctggcccagggccccaaggagagccccccggcgccgcgtgcgggccccagggaggtgtggaagaagggtggccgcctgctgtcggtgctgctggcggtgaacgtgctgctcctcgcctgcacgctcatcagcggcggagccttcaacaaggtggccgtgtacgacaccgacgtgttcgcgctgctcactgcgatgatgctgctggcaacgctctggatcctcttctacctcctccgaaccgtgcgctgcccctgcgcggtaccctaccgggacgcgcacgctggccccatctg

SEQ ID NO: 129314 - DNA, 129 bp, Homo sapiens
  chr17:72931818-72931947
  hyper
tgcaccctctgggtccgagcccccgggagggtaattaacgagggattaatgagatttccaaagtcaacagaaaaatcgatgggccgcggagcccgagcggcggctgcgcagtcccgctgggggagggcg

SEQ ID NO: 129315 - DNA, 592 bp, Homo sapiens; identical to SEQ ID NO: 54570
  chr17:72932011-72932603
  hyper

SEQ ID NO: 129316 - DNA, 184 bp, Homo sapiens
  chr17:72968520-72968704
  hyper
cttccaggtacaggccgcggggtcccgttccggcgctggccttggcgttacgctcggggcccgcccgtccccccatctcccgacgagccaagttcgcgtacccccggccctgcccagcccccagcccggcaggtggatggggacgccggggcccccgtggcgcacctgcgtcttggtggtgagc

SEQ ID NO: 129317 - DNA, 128 bp, Homo sapiens; identical to SEQ ID NO: 54572
  chr17:72968953-72969081
  hyper

SEQ ID NO: 129318 - DNA, 905 bp, Homo sapiens; identical to SEQ ID NO: 54573
  chr17:72983605-72984510
  hyper

SEQ ID NO: 129319 - DNA, 116 bp, Homo sapiens; identical to SEQ ID NO: 54574
  chr17:73008759-73008875
  hyper

SEQ ID NO: 129320 - DNA, 100 bp, Homo sapiens
  chr17:73009127-73009227
  hyper
ggtgctcgctgtagcgcgagatgtgcaggagcccggaaggccggctgggtatgcttctttcaaggctgccagcttttctacgttcgtgtccttggccctc

SEQ ID NO: 129321 - DNA, 1420 bp, Homo sapiens
  chr17:73029788-73031208
  hyper
ggggcgtcccagtgccgggggctgggggctggtgctcgctaagtaaggatgggggcaggtccctgcgcaccgcggtatcttcccgcccgctcaccaaaagtgcgcgcggcagggacggacccactccatggatcgcgcctctgtcaggccttctctaggaaaaggggacactcgcttatgaggggaagggatggcacggccacgtgccccaagccccagtggcctaatggataaggcactggcctcctaagccagggattgtgggttcgagtcccacctggggtagaggtgaaagttccttttacggaattttttatttcttttctcttcccttctcagggatgctggaatcgaccttggtctctagttcgactcccgtgcaacgtgttgaggaggagccacctcctccaagcgcctaaagccggtaagctcgggtcttgccaagcccttgaatgaacagctttcgtccgggtagggccccacaatttcgaagctggggaaactcgtaagaataaagttgcccaaagggttcccaggacaccccagctccacctggcggggcagccccggagaaccagaggtaaatgaccaccgcgactgcaaacagagggtcctgcaagagaaggcgaggggcgcaaacagggcagaggcaagcaggtagcgggcaggtggtggtggattctgaggtctctggctgccggcaccaaaagaaaccttgcgagcacagcccctctcgacaccccaggtgggactcgaacccacaatccctggcttaggaggccagtgccttatccattaggccactggggcgcggtaagacgctaaacccacgtgctccttgataggtgttcaaccatagtgcccaaacacggccctgctgtgggtcaccgcgctccaagcctgagaagccatggggacgacaggatgaaccgctggctgggcgcggcgtccccaccgggctacacaagagctccatgcggtgacgacgcgcggggaccaggagcccgcggtgccctgtaaccccgagaagaagtgctcggcgagcgcagaggccggtggagcatagctgggaggaatagggatggacgagggcggagggaagaacaaaccctcaaactatgctgggattcgggcaagggctgctcgctccaaaagagcccgaccacaaaggaaccctcaatcttatgatctgacgtcagacgcctcatcccttaggccacgcggtcgcaattcccagggaggctcagagactagtccaggtgccgctccgctcgggggtgactaggcgggcggctggggccagaggaagggtgagcgcttcgctcaacaggcggccagggtgcgagcagtgaagctgcggcacgccggagcgtttaatggccatcaaattggcctctctaggaggtagctgcagccggag

SEQ ID NO: 129322 - DNA, 82 bp, Homo sapiens; identical to SEQ ID NO: 54577
  chr17:73043060-73043142
  hyper

SEQ ID NO: 129323 - DNA, 223 bp, Homo sapiens; identical to SEQ ID NO: 54578
  chr17:73073460-73073683
  hyper

SEQ ID NO: 129324 - DNA, 86 bp, Homo sapiens; identical to SEQ ID NO: 11496
  chr17:73073967-73074053
  hyper

SEQ ID NO: 129325 - DNA, 364 bp, Homo sapiens
  chr17:73084121-73084485
  hyper
ccaggcccgtgcgagcgggtgagcgggccccccgggccccactgcctcggacgcgtcccctcctcgcccagtcccctctagcgctgtcgcagacctcctgccagggccccaggtctcctcccgcctgggcgggctcagtggcggtgaggatctagaaaagtcttcctgtcctggttctgggctgccccggggcctggggtgatgacccgcaagcccaagggcgctcggactcctggcccgaaattccagggcggacacagcccgggatcccagcagccccaactcggaggagctctgccccggggagggagggacagcggagtggaaaccagattccggggcagcactgcggggatgggcaggg

SEQ ID NO: 129326 - DNA, 83 bp, Homo sapiens
  chr17:73105913-73105996
  hyper
tcagcgaagccgctcgccgctggttccagcacaggctaaagagcttcggcatccagaaaaccagaagcgcgccgcgcacgcgc

SEQ ID NO: 129327 - DNA, 19 bp, Homo sapiens
  chr17:73110676-73110695
  hyper
cgtcgcaagcagttgtggg

SEQ ID NO: 129328 - DNA, 233 bp, Homo sapiens; identical to SEQ ID NO: 54581
  chr17:73127280-73127513
  hyper

SEQ ID NO: 129329 - DNA, 253 bp, Homo sapiens; identical to SEQ ID NO: 54582
  chr17:73127891-73128144
  hyper

SEQ ID NO: 129330 - DNA, 30 bp, Homo sapiens; identical to SEQ ID NO: 54583
  chr17:73149989-73150019
  hyper

SEQ ID NO: 129331 - DNA, 249 bp, Homo sapiens
  chr17:73150718-73150967
  hyper
tgccaagcaccatgcggcattacgatgggctgtggcggccacggctcagcctaagcccgcccccttcctggactgggaaggccttgggactctctcccctcccccaccccaaaatctcggcgatgattggacggaaggcgaatctacctcgcgctgggtggaagtcgtgctggctgtcactgtaaaacgttacctgacagagggggaagctctttcttggggagttacaacctcggcaagcagaaggga

SEQ ID NO: 129332 - DNA, 93 bp, Homo sapiens
  chr17:73201312-73201405
  hyper
ttccagcacaagcccgtttgactgtcggggtttggacaagtggctgcgacgacactaaggtggagaccgggatgtagcgaggactcccagagt

SEQ ID NO: 129333 - DNA, 30 bp, Homo sapiens; identical to SEQ ID NO: 54584
  chr17:73201965-73201995
  hyper

SEQ ID NO: 129334 - DNA, 297 bp, Homo sapiens
  chr17:73257642-73257939
  hyper
aggctttccccttccgcctccgccatattgcagccgcccggccccgcggcttcaaaactcgcgagagtctgcacgagctgagacggggcggggcctgcatggggtcctgagaggagtgagtgccgtcaccgagggccgcgccagactgcgacggatacagggagggcaagggtttccttttggcgctcccctttggaccccggagtgaaaaactctaacgtccagatcagtggagagaaacgcagatttaggaccctgaggagtctttttcacccgtttcccgtcactcgctcaggc

SEQ ID NO: 129335 - DNA, 30 bp, Homo sapiens
  chr17:73266627-73266657
  hyper
tgtgtgcgggcggacgttacagttgcttaa

SEQ ID NO: 129336 - DNA, 30 bp, Homo sapiens
  chr17:73268036-73268066
  hyper
gaggaggaagagaacgctcagctgcagcaa

SEQ ID NO: 129337 - DNA, 30 bp, Homo sapiens; identical to SEQ ID NO: 11498
  chr17:73285310-73285340
  hyper

SEQ ID NO: 129338 - DNA, 30 bp, Homo sapiens; identical to SEQ ID NO: 54587
  chr17:73285838-73285868
  hyper

SEQ ID NO: 129339 - DNA, 81 bp, Homo sapiens
  chr17:73401910-73401991
  hyper
gcgccagacctccccgcagcaggtggcctccgcacggctccgcccccgggtcgccgtaaccctctcggtgccagagcgggt

SEQ ID NO: 129340 - DNA, 84 bp, Homo sapiens; identical to SEQ ID NO: 11499
  chr17:73422367-73422451
  hyper

SEQ ID NO: 129341 - DNA, 237 bp, Homo sapiens
  chr17:73452533-73452770
  hyper
ccggccgcatcactcggcacctaattccgccaggctcccagaggggcggttgcagctacagcctagcacgccgcgtagccaataagaagccagaattccccctattctcaaatcctgaccaatcggtggcctgaactttagctctctggccggcgcctctgttgcccggaagggaggcaagcccccttagagttgccagtaacggacatggctgcggcccccggaggaggggacgtg

SEQ ID NO: 129342 - DNA, 30 bp, Homo sapiens
  chr17:73510678-73510708
  hyper
tcaggcacaggcaggcgggcaggggtcact

SEQ ID NO: 129343 - DNA, 484 bp, Homo sapiens
  chr17:73511001-73511485
  hyper
gaccctggactccaccgcagagaagcttacgtcagtttctcggtggcagcgaatttactgccagagtcttgtggcatgagatccgcgcaggcctggggccctggccgggaacccctcactccccaaacgtcccaagcccaacccaggggcactcccacgcggagcccgcggccgacacgggcggagggcgcccttggcagtgcctggggtcgggctggctcccccgccccccggaatgtccctccagcgcctcgcaaccccccagcccagcccagcccagcccaggcccaccggggaacaaagcggcgggagaagccgggcgggccaagcgcccgaggtataaacgcggaggatggaaaaaggggcgcgaggaggacggaaggagcggggagatggaggtgcccgccgaccccgcaagaaaagttagtttgcgcccgcccccaggggcgctgacccccagcgcgggccccgcagcctcacctct

SEQ ID NO: 129344 - DNA, 30 bp, Homo sapiens
  chr17:73513117-73513147
  hyper
ccagaagagggcttcgtggagttgaagtct

SEQ ID NO: 129345 - DNA, 34 bp, Homo sapiens; identical to SEQ ID NO: 11502
  chr17:73521009-73521043
  hyper

SEQ ID NO: 129346 - DNA, 30 bp, Homo sapiens
  chr17:73521458-73521488
  hyper
tctgggaggcggcccgggaccgcaggcgtt

SEQ ID NO: 129347 - DNA, 99 bp, Homo sapiens; identical to SEQ ID NO: 54593
  chr17:73522039-73522138
  hyper

SEQ ID NO: 129348 - DNA, 44 bp, Homo sapiens; identical to SEQ ID NO: 54594
  chr17:73522382-73522426
  hyper

SEQ ID NO: 129349 - DNA, 71 bp, Homo sapiens; identical to SEQ ID NO: 54595
  chr17:73522482-73522553
  hyper

SEQ ID NO: 129350 - DNA, 79 bp, Homo sapiens
  chr17:73584287-73584366
  hyper
ggcggccgagcctgccaccgccgggggccagggaacccctggtggccgcaggaagcccactgcagaggggaacggcggc

SEQ ID NO: 129351 - DNA, 192 bp, Homo sapiens
  chr17:73584937-73585129
  hyper
gggctcctcgggacactgggccggccaaggacgcgagcgacaaccgggcgcagcggggcgccgagccagaaacaatgcaggcctcgacggcccgggctccgcgccaccaggtcggaaaggcggtggggcaggtgccagcggcggcaggcgagggcgaagcgggagccgcagcaggagcggggccggaggacc

SEQ ID NO: 129352 - DNA, 811 bp, Homo sapiens
  chr17:73585690-73586501
  hyper
gctccccgcaggtcccgacaagcccagtccccggcgacccttttgatcaggaggacgagactccagatcccaagttcgcggtcgtgttccccaggatccacagggcagggcgggcgtcgagcagccgcagctctgaagaagcgtccgcagatgcccccacgggggaaggccgaggttggcctcgtgcaggggtgggggggcacagtgaggggtgcaggacgagtggggaaggggtgtccgggcttcgtcgcggctccctccttgccccgactgcacccgacgggccttccctcgacgagagcggctccagcagtgaggcggagttggagaccctcaatgacgagcccccggtgcgctgggcgcagggctcaggcccccacgagggtcctaggcttggcgccgccgtgctgctaccccgactctccttggagacccgcctgcagcaggagggagacccgggcctccgtgggtccctgagggagctgtgggaacccgaggatgaggacgaggcggtgctggagagggacctggagctgagcctccggccgggcctggaggcgccacccttccccggtgccaagggcaggagcctcggagacggcctggaagacatggaggacctggcgcggttgcggttagcgggcgcggtgccaaagctgccatccccggctcacagctcctcatatccaccctgccctcatctttatgaattgcgtgtagacccttattgaatccttagaaggatgggcttgaaccctcctggcaggaaggggcaggtaaggggcaacaggtgctacgtccccaggaccgc

SEQ ID NO: 129353 - DNA, 30 bp, Homo sapiens; identical to SEQ ID NO: 54597
  chr17:73629230-73629260
  hyper

SEQ ID NO: 129354 - DNA, 246 bp, Homo sapiens
  chr17:73663126-73663372
  hyper
aaccggccgtggtccgcccaagaattaaaggctgctggctggttccggaactgttcgaagacccctatacacaaccccaactcagagaagccaaagcgctgggaattcagctttaggcagaacccacgcaatcttatatccgtcgcgcagtgatgacgtagcgcgagcgctggcatgagggcggagccaggcgcaggaaactgccgttttgattggtttccagtgtggcgcgggggtctcctggga

SEQ ID NO: 129355 - DNA, 30 bp, Homo sapiens; identical to SEQ ID NO: 54599
  chr17:73717537-73717567
  hyper

SEQ ID NO: 129356 - DNA, 30 bp, Homo sapiens
  chr17:73746077-73746107
  hyper
ggtctgagttgaatgcgctgggtagagcgc

SEQ ID NO: 129357 - DNA, 31 bp, Homo sapiens; identical to SEQ ID NO: 11507
  chr17:73760184-73760215
  hyper

SEQ ID NO: 129358 - DNA, 30 bp, Homo sapiens
  chr17:73775886-73775916
  hyper
ataggcacgcttcacgctgcgtctctgcgt

SEQ ID NO: 129359 - DNA, 30 bp, Homo sapiens
  chr17:73780605-73780635
  hyper
ccttctcctccaggcgctccagtttcatgg

SEQ ID NO: 129360 - DNA, 30 bp, Homo sapiens; identical to SEQ ID NO: 54601
  chr17:73780896-73780926
  hyper

SEQ ID NO: 129361 - DNA, 122 bp, Homo sapiens; identical to SEQ ID NO: 54602
  chr17:73781200-73781322
  hyper

SEQ ID NO: 129362 - DNA, 30 bp, Homo sapiens; identical to SEQ ID NO: 54603
  chr17:73851684-73851714
  hyper

SEQ ID NO: 129363 - DNA, 36 bp, Homo sapiens
  chr17:73851963-73851999
  hyper
acgcggtgggctggcggcgtcggatcaccccgccat

SEQ ID NO: 129364 - DNA, 30 bp, Homo sapiens
  chr17:73852206-73852236
  hyper
gcacggcgcgaaaccggcatcctgataact

SEQ ID NO: 129365 - DNA, 30 bp, Homo sapiens
  chr17:73873909-73873939
  hyper
tcggtcaccagccccggctcacccgagtgt

SEQ ID NO: 129366 - DNA, 46 bp, Homo sapiens; identical to SEQ ID NO: 54605
  chr17:73874666-73874712
  hyper

SEQ ID NO: 129367 - DNA, 30 bp, Homo sapiens
  chr17:73900698-73900728
  hyper
agcggtcgaagctccggtacttctccagcc

SEQ ID NO: 129368 - DNA, 30 bp, Homo sapiens
  chr17:73901379-73901409
  hyper
ttgagggctgggcgcggtggctcacgccgg

SEQ ID NO: 129369 - DNA, 39 bp, Homo sapiens
  chr17:73937162-73937201
  hyper
tcgcagtcggcggtcgactcacccgccctcacagaggag

SEQ ID NO: 129370 - DNA, 30 bp, Homo sapiens; identical to SEQ ID NO: 54607
  chr17:73937401-73937431
  hyper

SEQ ID NO: 129371 - DNA, 30 bp, Homo sapiens
  chr17:73975106-73975136
  hyper
cgggttgaagctggcggaatcccgctccct

SEQ ID NO: 129372 - DNA, 30 bp, Homo sapiens
  chr17:73975469-73975499
  hyper
actgccctgctgggcgtccggggagtggga

SEQ ID NO: 129373 - DNA, 202 bp, Homo sapiens
  chr17:73993430-73993632
  hyper
cacccccctccccggcgccaccacagctagtccagaaattcccctgcctcacaagaacccacttcctctcctcccctgtccctcccggcttattgctttatgagccagctagaatcgaggccacaggcagccgttcttcctcctaccatcagacactgaaacggccaccgaccatcagacactgaaacggccaccgttagct

SEQ ID NO: 129374 - DNA, 30 bp, Homo sapiens
  chr17:74068419-74068449
  hyper
gtttgccttcgatccggccgaagggcgttc

SEQ ID NO: 129375 - DNA, 163 bp, Homo sapiens
  chr17:74068652-74068815
  hyper
ggctgatgggatagcggcggactccgccgccgtcggcccttgctgcagcagggcgccatgtgctggagcgcgcctgcgcgagggatcctgtcatcccgggtccggaattgtggctggctaggtggggacttgaggccgcagtgagaccgtggctgctgagatc

SEQ ID NO: 129376 - DNA, 806 bp, Homo sapiens
  chr17:74070954-74071760
  hyper
cagcggcaccatgaacgtctcgggctgcccaggggccgggaacgcgagccaggcgggcggcgggggaggctggcaccccgaggcggtcatcgtgcccctgctcttcgcgctcatcttcctcgtgggcaccgtgggcaacacgctggtgctggcggtgctgctgcgcggcggccaggcggtcagcactaccaacctgttcatccttaacctgggcgtggccgacctgtgtttcatcctgtgctgcgtgcccttccaggccaccatctacaccctggacggctgggtgttcggctcgctgctgtgcaaggcggtgcacttcctcatcttcctcaccatgcacgccagcagcttcacgctggccgccgtctccctggacaggtgagccagcgccttggcctccctgggagatgggcatccacgcgggggatggagcgggaggcgggactggggaccaagaagggacgcgcagagtgggacaggacactaagaaggcagtggaagacaagcgggcgcggaggaggaaaaagaggaataagaatgggggaccgtggtgtccctcggttagatgcgtcctggggcctggaagcctggagaatgtggctctccagcgccgcccgtgcctgacaacgcgcagcgtttcccagtacgacgcgtttgtgcgcgttcatctcgcttgagcttaatgccctccgtgagggtgggataggacaaagtgcccaatatacagaagagttgagttcctaagtaactcgctcagagtcgccagccagggatcgggtgcgtgaagtgaccgtctgtctcctgca

SEQ ID NO: 129377 - DNA, 133 bp, Homo sapiens
  chr17:74072090-74072223
  hyper
cctggggaggaaatccgggtatttcccctctccatcctctggaaaaacagagaggcgaggccagactgcccccacacctcctgtagccactgagcgcgaagtgcgttggttccgagcgcgctggtgggatcca

SEQ ID NO: 129378 - DNA, 284 bp, Homo sapiens; identical to SEQ ID NO: 54612
  chr17:74072426-74072710
  hyper

SEQ ID NO: 129379 - DNA, 591 bp, Homo sapiens; identical to SEQ ID NO: 54613
  chr17:74072998-74073589
  hyper

SEQ ID NO: 129380 - DNA, 30 bp, Homo sapiens
  chr17:74099929-74099959
  hyper
gcccaagaacggaccgacggccattttgag

SEQ ID NO: 129381 - DNA, 31 bp, Homo sapiens; identical to SEQ ID NO: 11512
  chr17:74132738-74132769
  hyper

SEQ ID NO: 129382 - DNA, 415 bp, Homo sapiens
  chr17:74136578-74136993
  hyper
ggcctcccggacgcgcgcttccatctcgcgaccccgggggcgcctcctccgaataagtatgtggtgcctgcgaggaccacggtgggagctgagcactaccccacccccgaggggacagtgtgtgtacggggacgccctctctaacatcatccccgcagctggggaggatcttttagtgccgaggtatgggaaacagaagcaaggccctggggtcccacccccatcagatctgcctccctcttcctttcctcttcgaggttttattagccaaatgaagagggtaggggcatccgaggctatccttttctcccgaagagcaggaaatcaggacccccttcctcctcgcaacaaatggaagtggggcgagaagtttgggagggcggtacgacggggcgggggcggtggaggtcctctg

SEQ ID NO: 129383 - DNA, 151 bp, Homo sapiens
  chr17:74137384-74137535
  hyper
ccatggcgacgctccgcccccataaacagcttccgcctctgccattggccagcacgtctccaaggagaccgcgggcacttgccactctccctggcggcaactctcttcgaactccctccttctgccgccctctcccgcgccacccaacccc

SEQ ID NO: 129384 - DNA, 30 bp, Homo sapiens; identical to SEQ ID NO: 54617
  chr17:74137754-74137784
  hyper

SEQ ID NO: 129385 - DNA, 59 bp, Homo sapiens
  chr17:74235821-74235880
  hyper
ggccctcggaccccgcgaggcaggtaggctttgggccgggccggccgggtccgtgcggg

SEQ ID NO: 129386 - DNA, 973 bp, Homo sapiens
  chr17:74235976-74236949
  hyper
cgctcccgtcctcccgtggaggggctcggtgccctcggtgaccctgctagacccggcaggacgccccttgggctaattcgcccggggcgggggagacctcggccttctcgaagacctcccgcgctcgaagaccgtttcggagcgtccgcaaccactgagtccccgaagacccgcggggccccctcaggccgtcccgacccagacccctgcccctgcccctctccctcctcgcggctgcggcgcccgcccgccctcaccggacttgggcgggtagcggtacacggaattagacgggatgtccacctcctccacgcccgcgtgctgccggctcgtcagggcccccatggccgctgcggctgcagccccggcccggccccggtgcccgcgccgccctccgcgcttcaccgcggccgcccgccccgcgcccggtgcgggggccgactgcccgccgcggccggctccgctgcggcgctgcggctctggcggcggggagcccccggcgcgccgcgcaccatcctccgccgggcaccgcggcggcgcctctgccaagggggctgcgggtctgggccgggggcgccgccgccgcctcaggccgcgtgatgtcagcggccgctccgcgcggggaccgcggcggccccagccaatggcgaggcggggcgggagcgcccgcgccggagcagccaatgagcgcgggactgcagcaggagccggcggcgcgtgcctcgcgcggggagccgcggctggactcggcgcgcgtggacgcggcccagggcctcgcggcgggggcgtgggcgtgggcggggactcgcgacggggacgggggcgcggccgggtgcccgcggcggggcggggcgggaccggccggagctgggaccccaggagacgagcgctgcacccggccgggacgcgtcgcccctccgcgcctgtttatcccggctcggattaccgcgcagggagccgccccctcccgcgg

SEQ ID NO: 129387 - DNA, 30 bp, Homo sapiens; identical to SEQ ID NO: 54620
  chr17:74237195-74237225
  hyper

SEQ ID NO: 129388 - DNA, 151 bp, Homo sapiens
  chr17:74261113-74261264
  hyper
ggccaatcagagtgcgcggccccgccccgaacgcccggccgtgaccaaccacgaggccggatgagccaaaacacagcggccggccaatgctggggagccccacggcgccgagctccgccaatgggcgcggccgggcgaaaagagaaacagt

SEQ ID NO: 129389 - DNA, 30 bp, Homo sapiens
  chr17:74349217-74349247
  hyper
cttgagagtggcggcggtcagattcccagg

SEQ ID NO: 129390 - DNA, 30 bp, Homo sapiens
  chr17:74349882-74349912
  hyper
aaactcggcgcaagcggggagagctccgag

SEQ ID NO: 129391 - DNA, 142 bp, Homo sapiens
  chr17:74350253-74350395
  hyper
tccgaggaggtatacgatctagctctgcatgtctatggtagcacagcgcccgccccacgaggcgcgtgcgccggccggagattaatttgaaaagtagagggcgggggttctttccagctggttgaccgcagtactgaagcgg

SEQ ID NO: 129392 - DNA, 173 bp, Homo sapiens
  chr17:74379764-74379937
  hyper
actcgaggtgctcgcggacacgttctgtggcttgccgcgataagtgtatcacaaacacactgacaaacgcgtccctactggcctccaaagaagtgacaacttctgagcgcgtttccggcgccccttcttcacgctgagccagagggggcggggggcacgtaccacatgcttgg

SEQ ID NO: 129393 - DNA, 30 bp, Homo sapiens
  chr17:74380216-74380246
  hyper
gcgcgcaaaaggggcgctgcatcccggcgc

SEQ ID NO: 129394 - DNA, 176 bp, Homo sapiens
  chr17:74381119-74381295
  hyper
cgggcaggggacacggcaacctggatggctggggcagggatcctctcccagaacttcgtgcccagcaatgtccgctcaagttctgggatttttacgcagctggactcccctccccctggcagccccgaggggtgaggagctagtccgtcggagggagccacggggctctgactcat

SEQ ID NO: 129395 - DNA, 262 bp, Homo sapiens
  chr17:74381537-74381799
  hyper
ccgccgcagggaatgacgccggtgctcctgcagccacggctccgggcggggaaggcgagccccacagccggccctgcgacgcccgcctgggcagcaccgataaggagctgaaggcaggagccgccgccacgggcagcgcccccacagcgccagggaccccctggcagcgggagccgcgggtcgaggttatggatccaggtttgtggggttcctgctgggaagggctgtagggggattcctgttcctcgccaggaatgatgga

SEQ ID NO: 129396 - DNA, 30 bp, Homo sapiens
  chr17:74448463-74448493
  hyper
tggtgtaacgccgaacgcgccccagaacct

SEQ ID NO: 129397 - DNA, 30 bp, Homo sapiens; identical to SEQ ID NO: 11515
  chr17:74497094-74497124
  hyper

SEQ ID NO: 129398 - DNA, 30 bp, Homo sapiens; identical to SEQ ID NO: 54626
  chr17:74497638-74497668
  hyper

SEQ ID NO: 129399 - DNA, 688 bp, Homo sapiens
  chr17:74533674-74534362
  hyper
cgcggggcgcggggcgcggggcgccgggagccggggccggctgcgtgcgcggcgggcgggcgaggggtagagcgcggagggagggagcgtgtgtctgtgcgcgccgggtgtgtgtgtgtgtgtgcgtgcgtgtgtgcagggtatatgtgcggggggcgggggacagccagcggtggggcggggatgtggtctgctggaaaatgtttaaaaaaacaaatccgctccaaacccccagccccgtgtgggtaagagccaatgccggcaaggtgaaggctgcgcggggtgggggcgacgcgactgccgcccgcccacccgcaggccacggcggagttgcaccgcggggcggggctcgggtaggtgtggccggggcgctgggggtcccgggaggaatgggcggtcacgcggcgctgggcggcgcgggccgcacaggagtgcgctggggcgggcgcgggccgggagcgctgggttccgggtcccagtgcttgcggcgtcgcgagtgtgcgcgtgcggacccttcccgcggcggggaactgactcaaagtccaacactcccgagctttcgcggcgaggccgaccgccagcccgcccgtgggggcgaacaggagcccctccggcggccgccgtggacctagctgggctcccctcgcccgggcctctccccgcgcccccgagccagccgctgggggcc

SEQ ID NO: 129400 - DNA, 65 bp, Homo sapiens
  chr17:74534387-74534452
  hyper
cgcccaggctctggggggttagcacgggggtcgtccccctgcccgcccaccgccccggctgtcgg

SEQ ID NO: 129401 - DNA, 30 bp, Homo sapiens
  chr17:74554345-74554375
  hyper
aggacggccccaatcggtagttcatattta

SEQ ID NO: 129402 - DNA, 647 bp, Homo sapiens; identical to SEQ ID NO: 11517
  chr17:74581100-74581747
  hyper

SEQ ID NO: 129403 - DNA, 30 bp, Homo sapiens
  chr17:74582166-74582196
  hyper
ggggacttcggcagcggccactcctgccac

SEQ ID NO: 129404 - DNA, 171 bp, Homo sapiens
  chr17:74620090-74620261
  hyper
gaagtaaggagcctggggtgccgcggaggacagggcgccgcgagcagggcgccgagctgccgccacctgccgcccggagctggcactgcacccttttagtgcaaagcaaatccctgtcccattggtcccctccttccctaaccatgaaatctaaagcgaagctcccctctc

SEQ ID NO: 129405 - DNA, 30 bp, Homo sapiens
  chr17:74667818-74667848
  hyper
tgtggccggacatccggggctttccaccct

SEQ ID NO: 129406 - DNA, 16 bp, Homo sapiens
  chr17:74668251-74668267
  hyper
cgctgagcccaaatta

SEQ ID NO: 129407 - DNA, 48 bp, Homo sapiens
  chr17:74707238-74707286
  hyper
ggccaacccctgcccggcctgggcagccttgacgctttggggcacaat

SEQ ID NO: 129408 - DNA, 78 bp, Homo sapiens
  chr17:74722034-74722112
  hyper
aggaagttgactctcgtctggctcctccggggtgggggcagggcgcgtgcgtgaggccacgtcgttcctagagccacc

SEQ ID NO: 129409 - DNA, 30 bp, Homo sapiens
  chr17:74722737-74722767
  hyper
gttgggcaagcggccgccgtcttccccgcc

SEQ ID NO: 129410 - DNA, 30 bp, Homo sapiens
  chr17:74723049-74723079
  hyper
aggtgctacggccacgtggcccgcggcttc

SEQ ID NO: 129411 - DNA, 30 bp, Homo sapiens
  chr17:74723347-74723377
  hyper
cggacgctcagctgcgcagcttcctgcttt

SEQ ID NO: 129412 - DNA, 225 bp, Homo sapiens; identical to SEQ ID NO: 11518
  chr17:74732258-74732483
  hyper

SEQ ID NO: 129413 - DNA, 262 bp, Homo sapiens; identical to SEQ ID NO: 11519
  chr17:74732943-74733205
  hyper

SEQ ID NO: 129414 - DNA, 52 bp, Homo sapiens
  chr17:74733645-74733697
  hyper
cgaaacgctttttccgcctgggaggccggacgatcgcgattgggcaggagga

SEQ ID NO: 129415 - DNA, 190 bp, Homo sapiens
  chr17:74734105-74734295
  hyper
cgcgccggctgctgcggctggcacttggccctttaatccccttcgtgggcccctcaacctggagcggataaattcttggcgcttctccgggggttgtgctcttccgtactcggatcgcttcttaggagtatcctaactgccggtggggagaacttcgccctaaacctggggttccgatccaggaactgga

SEQ ID NO: 129416 - DNA, 89 bp, Homo sapiens
  chr17:74864228-74864317
  hyper
ggtctccgctgggtgcgcatctcttctgtgctctgcgggagccaaagcagctttcggccctcggggctggtggcgccctgggaagctgc

SEQ ID NO: 129417 - DNA, 1691 bp, Homo sapiens; identical to SEQ ID NO: 54635
  chr17:74864602-74866293
  hyper

SEQ ID NO: 129418 - DNA, 599 bp, Homo sapiens
  chr17:74965154-74965753
  hyper
cccgcagccggcctcggctgtttaccaggcacccgttacgctaattgaaatgtgccaaatagctgcccggggcggggccgagcggagcagcgggctccgggtcacctgcggtgttgatgaggtattcaagaggaaaaagcgccggagcggcagcttcatttgcaagggaaatgacttgacgaggcccttcatttgcatctttcggcccagaggttctgattagctgcggaggaaaagcccgcctgttttatgcatgaggagctctgcctggagaccctcggctgctcacccgccccagccctgccttctcctcctaagtcggggaggaggagaggggtccccagagggcaggatccaaggctgaagcctaagaccaacccttggtggtgaaaatagaaatttcttgaggcaaggctgccataaagtgcagtgagactcatcggtgaggggggcactgtgcgatctccatccggggtcttcagggcaattgcatgagctcagcctgctaagagcctggcaggcagcgcgagctcccctggagttccggccgctccgcccagtggctctgtgcagcgcttcccgcccggagaacctagtgc

SEQ ID NO: 129419 - DNA, 30 bp, Homo sapiens
  chr17:74966018-74966048
  hyper
tcaacccacattctccgcagctgcatctac

SEQ ID NO: 129420 - DNA, 114 bp, Homo sapiens; identical to SEQ ID NO: 54637
  chr17:75082777-75082891
  hyper

SEQ ID NO: 129421 - DNA, 30 bp, Homo sapiens
  chr17:75084942-75084972
  hyper
ctggaggcactgaccgggtgaccagagacc

SEQ ID NO: 129422 - DNA, 30 bp, Homo sapiens
  chr17:75136256-75136286
  hyper
aaattggggctggacggtgctctcctgctg

SEQ ID NO: 129423 - DNA, 30 bp, Homo sapiens; identical to SEQ ID NO: 11523
  chr17:75137660-75137690
  hyper

SEQ ID NO: 129424 - DNA, 790 bp, Homo sapiens; identical to SEQ ID NO: 11524
  chr17:75368667-75369457
  hyper

SEQ ID NO: 129425 - DNA, 623 bp, Homo sapiens; identical to SEQ ID NO: 11525
  chr17:75369492-75370115
  hyper

SEQ ID NO: 129426 - DNA, 575 bp, Homo sapiens
  chr17:75370185-75370760
  hyper
cgtgggccgggagcaccgaacggacacagcccaggtcgtggcagggtctagagtgggatgtcccatggcccccatccaggcctggggatatcctcatccgcctcccagaatcgggccgtgggggacagaaggggcctgcgtgcgggcagggagagtattttggctctctcctgtcttcggggtttacaaagtgtgttgggacttgcggggctgctctgtccaagcctgggtctggcgtccgcgtctctgagcctgtgagtgcgtgcgctttcctgcgtcctcttgactgccggtgctggggctctgcgtcctgcgtccgcgggagtaaatacagcaggcgaaggggaagctcacacaatggtctccagcgctctggggcagggcttctgaggggcgggcctgcctctgccgggacctggagcccccgcccctcggagaggctcctaggctgacttgggcagagccctctggtgggccgggagggggaaaggctgtgttgaaatgagcaaactgtccaggtgtcaggccaagctgggaggtgaccagcctgaggtcctccccgctccatggccaga

SEQ ID NO: 129427 - DNA, 31 bp, Homo sapiens; identical to SEQ ID NO: 54642
  chr17:75392295-75392326
  hyper

SEQ ID NO: 129428 - DNA, 379 bp, Homo sapiens; identical to SEQ ID NO: 54643
  chr17:75447462-75447841
  hyper

SEQ ID NO: 129429 - DNA, 633 bp, Homo sapiens; identical to SEQ ID NO: 54644
  chr17:75524568-75525201
  hyper

SEQ ID NO: 129430 - DNA, 30 bp, Homo sapiens
  chr17:75539103-75539133
  hyper
taatttaatggccccgtccactgagctgag

SEQ ID NO: 129431 - DNA, 845 bp, Homo sapiens
  chr17:75953608-75954453
  hyper
aacaaaattgcattgcgaaagtactagtgtgttattatctcctcttcaagacagggacacgtagacagggaatggcctcttccaataccaacttccaagtagcactgctgatcctccactgaacgatgggggaaaagctagcctgcttctgcgaccttgcatgaaaatggagaaaattcttggtttcaaaatcttctcctggcttgaaccgaaagttaaaaagggacttttcgaattgcacattgcgcctgaccttacctaccactaatgaataatggatatcgaggagccgtggaatggaggatcacggcggcgtacggagcaccggggaggaatcgtggggtgcgtaggcgccggagcgcccgggttcggcccggaccgaaggcttgcgcggtgaaggtgtggtgtctgtgctccggggaaagggctgtctccccgggggactgtttcgcagcgaggcttgttttgctcgcagctgggcgctccctggggagcgactgagcgcaagggcgggccgggaggcgcgaggcgagcacgatgctccagggccccaaggactcgtgtgcgtgtgcgtgtgcaaagtggggcggtgcagggcgtgtgcacggcacgggcgagacgcgcgccggtgcgggcgccgggcgccgccgggcgcaattacagcataaagcccgggcgccgcggggcgctggcccggagaacccaccggacgcgcagaaccggatcggcacccctcccgccagcaccctaacgcggagccacagcgcccagggaccggagggcaggcggcggcggtaaaggacaccacgcaagtctccacgtaacccccccgagcagtgcaagct

SEQ ID NO: 129432 - DNA, 189 bp, Homo sapiens
  chr17:75954654-75954843
  hyper
tccggtatgcagatacggtgggagtcacgtgctaggggccgggacgacttcctgttggaggccaacgcggggcggggaagggggcgcgagcgccccgtctggctgaagcggggggaggggggttcttgtcagttagagcaacaagatggccgcggtggcagctccgcacctcagcgcgacggccccggg

SEQ ID NO: 129433 - DNA, 30 bp, Homo sapiens; identical to SEQ ID NO: 54646
  chr17:75955643-75955673
  hyper

SEQ ID NO: 129434 - DNA, 30 bp, Homo sapiens; identical to SEQ ID NO: 54647
  chr17:75955906-75955936
  hyper

SEQ ID NO: 129435 - DNA, 457 bp, Homo sapiens
  chr17:76123731-76124188
  hyper
gctcccagccaccagcgagtcctgccggcctctgccctggactcctcctgcgctcaccctcaggaactcagggctcaaagtcggccgggttgaagggcgctttcctcggacaggcaaagcccgggggcgccccgacagagcagctccttgcaggggtgccagtcacaggaccggacggcgccctccctcagtgtcctgggtgccatcttcgggcccaggccccacaccaccccctccctccagcaggagcaaagacgtgggaaaaccagcccagagctgggtccgaggcggccccacccagcctaacacgggacagctgccgaaagaggggctgaggacgccccacccagtccctagagctggaatcccttcctccagacaggcccttctaagctcagggaacccggggactcgggcacccagcgccccagcactccgccccgaggcccaggcaagt

SEQ ID NO: 129436 - DNA, 30 bp, Homo sapiens
  chr17:76124813-76124843
  hyper
gcgactgggccagtcgcaggtctgccgggg

SEQ ID NO: 129437 - DNA, 30 bp, Homo sapiens; identical to SEQ ID NO: 54649
  chr17:76125137-76125167
  hyper

SEQ ID NO: 129438 - DNA, 30 bp, Homo sapiens
  chr17:76130551-76130581
  hyper
ctacctgcgggtcaacgtactcaacgggct

SEQ ID NO: 129439 - DNA, 30 bp, Homo sapiens
  chr17:76130786-76130816
  hyper
cccactggatattcccgccaactgccaggc

SEQ ID NO: 129440 - DNA, 30 bp, Homo sapiens; identical to SEQ ID NO: 54650
  chr17:76165238-76165268
  hyper

SEQ ID NO: 129441 - DNA, 374 bp, Homo sapiens
  chr17:76227787-76228161
  hyper
acgtgcccagggacccggggccagcccgtggggacgctgggattggagcccaagccccaggttcgccgcgcggctctcgacttcctctcctttcccccaggggcgagctcagcgaccgcagagaggtggggtcgatctccctgcgaccccagggggcccgcgaggccagtgcgcgggcaggagcggggacgtgctcagaagagccgggcgccgccgcgcccgcccgccccccgtcccccggctcccggctccgcgcgccccccgccgcccccggggccctgctacccccgacccgtcccctcccgccggccgcccccatggcccggctgggcgcgctgctcctggccgccgccctgggtgcactgctcagcttc

SEQ ID NO: 129442 - DNA, 108 bp, Homo sapiens
  chr17:76228213-76228321
  hyper
cggacgccggcaatggcagcgcctggcccgggcgcgcagagctgctctcctcgcactcggggctctggcgcatctgcgaaggtaaccggccaccgcgccggccctcct

SEQ ID NO: 129443 - DNA, 30 bp, Homo sapiens; identical to SEQ ID NO: 54652
  chr17:76250627-76250657
  hyper

SEQ ID NO: 129444 - DNA, 59 bp, Homo sapiens; identical to SEQ ID NO: 54653
  chr17:76254667-76254726
  hyper

SEQ ID NO: 129445 - DNA, 79 bp, Homo sapiens
  chr17:76254836-76254915
  hyper
cgccggggaggctgctgctgggaacccagggctggccccgctgagataaagggaggcagcagatcgcagctggagatag

SEQ ID NO: 129446 - DNA, 30 bp, Homo sapiens
  chr17:76310501-76310531
  hyper
cggggagccaagcccgcagccacgccctgc

SEQ ID NO: 129447 - DNA, 165 bp, Homo sapiens
  chr17:76337743-76337908
  hyper
cctgggaggaaggtgcggcgctggggagggaggggagccctgccctggtgtgccctcggtcccgcgccgcacaccctgccgggaagcccggggccgcagctgctcgggcggcccggcccagaatagcctcccttccgggcagggctgccccggcccgcagcgcca

SEQ ID NO: 129448 - DNA, 385 bp, Homo sapiens
  chr17:76338190-76338575
  hyper
aggcctgaggaattcgcagccggcggcgcggccgggcgcgttcccttcccctctctccgttgcccggcgagggagccacagcgcagcggttgccatggccacgggccgggcgtggggctgggggaccaggggccgctgagcctcgatcaccttgtcctgctcgagccaggttggcatggactggaagaaccccgcggcggcgggcgggaggtgctggggccaggggaggccccgagggaccccgccgcccggtctgcgccctgatcccgcagggtcctgtggaaatgcggtgtctgcctccccgcctcctgcgctcacacatgcaggcctggggcctgcgggtcccggggctctgagcctgcacagcccacgggccgcagccgca

SEQ ID NO: 129449 - DNA, 30 bp, Homo sapiens; identical to SEQ ID NO: 54656
  chr17:76348834-76348864
  hyper

SEQ ID NO: 129450 - DNA, 167 bp, Homo sapiens; identical to SEQ ID NO: 54657
  chr17:76349230-76349397
  hyper

SEQ ID NO: 129451 - DNA, 207 bp, Homo sapiens; identical to SEQ ID NO: 11532
  chr17:76355659-76355866
  hyper

SEQ ID NO: 129452 - DNA, 126 bp, Homo sapiens; identical to SEQ ID NO: 54659
  chr17:76356799-76356925
  hyper

SEQ ID NO: 129453 - DNA, 58 bp, Homo sapiens
  chr17:76374527-76374585
  hyper
ccttacggatttaacgggccggcttccgaccccctcctgcggcgcgaccactgttcct

SEQ ID NO: 129454 - DNA, 30 bp, Homo sapiens
  chr17:76375020-76375050
  hyper
ctcccggggctcggcgcctgacctatgtgc

SEQ ID NO: 129455 - DNA, 382 bp, Homo sapiens
  chr17:76588312-76588694
  hyper
ctccccttcctgccccgcgcttctgttgacctttggtcctgtttgcaggaagctctcaagtttaactctgaacttgaagggaaggaagggagtgaaccacatggccctggggtcggggcctctggccgaagggcgctcagcttggtctgtaaaatgaaatgtgttttgaatgtcatgagtcaggaaaaaagaatttgagcgcagtctggaaatgaaatttcctgcctgtggtttgactcacgtctgtctgtctcgaaatctaccccaaggacatttattccactgtgacagggctcatctctgaggagcaccagactcctgcggtggggagggaagattatccgcgctgcagagactagctggcctccggaagccgcctcct

SEQ ID NO: 129456 - DNA, 30 bp, Homo sapiens
  chr17:76836725-76836755
  hyper
gccagcccttcccgcgccccaggcctcgcg

SEQ ID NO: 129457 - DNA, 274 bp, Homo sapiens; identical to SEQ ID NO: 54662
  chr17:76921080-76921354
  hyper

SEQ ID NO: 129458 - DNA, 130 bp, Homo sapiens; identical to SEQ ID NO: 54663
  chr17:76921422-76921552
  hyper

SEQ ID NO: 129459 - DNA, 104 bp, Homo sapiens; identical to SEQ ID NO: 54664
  chr17:76921859-76921963
  hyper

SEQ ID NO: 129460 - DNA, 121 bp, Homo sapiens
  chr17:76967523-76967644
  hyper
gctcaggtgagtagggcgacatctggtggccggttgttgaaggtcattgcagagaggaaggaagccgaggaggggagcctgcagtgagggcgtcctggggttctccggttctcaccaccct

SEQ ID NO: 129461 - DNA, 30 bp, Homo sapiens
  chr17:77005569-77005599
  hyper
cccagcccagtctgcgagtcagggggcaga

SEQ ID NO: 129462 - DNA, 30 bp, Homo sapiens; identical to SEQ ID NO: 54666
  chr17:77005808-77005838
  hyper

SEQ ID NO: 129463 - DNA, 30 bp, Homo sapiens
  chr17:77006171-77006201
  hyper
tctcattctccgagcgagggcccccttaca

SEQ ID NO: 129464 - DNA, 114 bp, Homo sapiens; identical to SEQ ID NO: 54667
  chr17:77020151-77020265
  hyper

SEQ ID NO: 129465 - DNA, 196 bp, Homo sapiens
  chr17:77020313-77020509
  hyper
cgagaaaccgcgcttccgcttctggtcgcagagacctcggagaccgcgccggggagacggaggtgctgtgggtgggggggacctgtggctgctcgtaccgccccccaccctcctcttctgcactgccgtcctccggaagaccttttcccctgctctgtttccttcaccgagtctgtgcatcgccccggacctggcc

SEQ ID NO: 129466 - DNA, 81 bp, Homo sapiens; identical to SEQ ID NO: 54668
  chr17:77070948-77071029
  hyper

SEQ ID NO: 129467 - DNA, 264 bp, Homo sapiens; identical to SEQ ID NO: 54669
  chr17:77071239-77071503
  hyper

SEQ ID NO: 129468 - DNA, 31 bp, Homo sapiens; identical to SEQ ID NO: 11539
  chr17:77099946-77099977
  hyper

SEQ ID NO: 129469 - DNA, 256 bp, Homo sapiens
  chr17:77178615-77178871
  hyper
ccccaacgccccggccggccggcgggcaggcggctgctgatgctctgtgcgcacctccccacggggcatcctggggatctggtggctcagagtcgccgactttcctgcccccacccaaccccaactcgccagccggagcttcctgcgcagcccccaagattgcaaaagtctggccccagccccctccccggccagagctcctggggcctccctcgccaggcgggtggcccacctcccccgcctccccggaggcccg

SEQ ID NO: 129470 - DNA, 101 bp, Homo sapiens; identical to SEQ ID NO: 54671
  chr17:77178962-77179063
  hyper

SEQ ID NO: 129471 - DNA, 248 bp, Homo sapiens; identical to SEQ ID NO: 54672
  chr17:77179081-77179329
  hyper

SEQ ID NO: 129472 - DNA, 102 bp, Homo sapiens; identical to SEQ ID NO: 11540
  chr17:77179380-77179482
  hyper

SEQ ID NO: 129473 - DNA, 159 bp, Homo sapiens; identical to SEQ ID NO: 11541
  chr17:77179617-77179776
  hyper

SEQ ID NO: 129474 - DNA, 404 bp, Homo sapiens
  chr17:77179799-77180203
  hyper
cgtgtgcgcgcgtgtgtagcggtgggagggggagtccctggcgtactccaacatcaaacggagccccgcgcggagggaagagaatccggagcgacggcacaacagctgatcccacacttaacccctcgcccgccggcaccggggcagccctccctcgcgccctcccacgctcgggcccctgcgcgcccctcctcccccccgttgccagcacttgctcctggcctggggggtctggaatctccctttgcccccgctccgttctccggccgctgcggagaggaggagccgctccgccggctctgcggccgaccgaccggaaggcgcctcgtcctgtttcgcgttcagagaagcgcctttcctaagggaggccggctcagtggcggggatgtcggtgatgtaatccg

SEQ ID NO: 129475 - DNA, 227 bp, Homo sapiens
  chr17:77188707-77188934
  hyper
cctggcagcacggaacgagagctggaaggaccgggcacgagagtgagaccgtcagcaccagggacagctccagccagaccctggagccgccgtggctgcctacacctctgtctccctgggcccaaacaagcacgggtgtcagtgaactctctgttttgcaggggtggccagcggctagccctgctgatggccaccttttaccaaaacatcctcgcctgttgagttag

SEQ ID NO: 129476 - DNA, 100 bp, Homo sapiens
  chr17:77189187-77189287
  hyper
gggtgttcacttgctcggtgggggcaggggcaggcatgccggcatggctgccgtttcctccaaagcaccttttatagacctggtccgtgttgcaatttgg

SEQ ID NO: 129477 - DNA, 377 bp, Homo sapiens
  chr17:77216337-77216714
  hyper
ggaagcggccgctggcggcaggttggtgggggtaggggcttggtcccccaacgctggcactcagtttagctgtcacttgcagctgtcttaggaagtgcggctctcctctctgcctcccgctcgctcctgctcactccaggtcctctctccctctccctgtgtctctgcctctcgctttatttccccaggttgctcagctccgtgcctgctctccgctcgcccatcgatggggtcctgcccggcactgccctgtcgcagtcactcctgctgcctggatctctgttcagagttgaactacagcgtcctgattccagcgctcatcaagcaggggacccaggggagggtgtgtgtgtgtgtgtgtcggggggacacaaaac

SEQ ID NO: 129478 - DNA, 208 bp, Homo sapiens
  chr17:77290657-77290865
  hyper
aagcgtgagccaccacgccccgctagatacctttgcttcttggagaaacaggaaagatgcggaatgggggaaggcaggagttcagcaccacggacagcgacctgcgggtgggagacgctgccagccacgcggccgaactccggactgggggccacgtggaggaggccttggttcagctctgccccatgcctcacgggacacacattta

SEQ ID NO: 129479 - DNA, 30 bp, Homo sapiens
  chr17:77387900-77387930
  hyper
ggacagcacacccccgctctgatcctcggt

SEQ ID NO: 129480 - DNA, 191 bp, Homo sapiens; identical to SEQ ID NO: 54678
  chr17:77766024-77766215
  hyper

SEQ ID NO: 129481 - DNA, 30 bp, Homo sapiens; identical to SEQ ID NO: 54679
  chr17:77766673-77766703
  hyper

SEQ ID NO: 129482 - DNA, 189 bp, Homo sapiens; identical to SEQ ID NO: 54680
  chr17:77770286-77770475
  hyper

SEQ ID NO: 129483 - DNA, 30 bp, Homo sapiens; identical to SEQ ID NO: 54681
  chr17:77770809-77770839
  hyper

SEQ ID NO: 129484 - DNA, 175 bp, Homo sapiens; identical to SEQ ID NO: 54682
  chr17:77771455-77771630
  hyper

SEQ ID NO: 129485 - DNA, 30 bp, Homo sapiens
  chr17:77772007-77772037
  hyper
ctttccccgaaccccggcgcccggcccgcg

SEQ ID NO: 129486 - DNA, 30 bp, Homo sapiens
  chr17:77772251-77772281
  hyper
aggctaccggtgacccgtggcgggggcggc

SEQ ID NO: 129487 - DNA, 564 bp, Homo sapiens; identical to SEQ ID NO: 54683
  chr17:77772694-77773258
  hyper

SEQ ID NO: 129488 - DNA, 386 bp, Homo sapiens; identical to SEQ ID NO: 54684
  chr17:77773656-77774042
  hyper

SEQ ID NO: 129489 - DNA, 531 bp, Homo sapiens
  chr17:77774709-77775240
  hyper
cctgggcgcacggcccgcgactgcccttcccgacaaagggtctgcgacctgctcccgggagcccgccctacccttggccccagcctctaaaaggtgccaggactctgccctcgatgctgcagcctcctgagagcccggagtttgggggccctcttaggcctccctgggcccgcggaccacggactcgtcctccgggagggagggtggaggctggagcactccaaggagaggggcggacgggccccagcggggcgctgggctcctgggtcttgggccaggccggcaagccctagcgcgtcctctagcttgaggatgaggccggcccggttctttgggagcgtttcaacttcgcggcttggcgggcgtcggacctgcccggtcttggccgcggacgcgggcagatttggaagccaaccgtttgcctcgggcgggccggcagtgaaatgagcgcgggcggctccgaggcgtggccttgtggccagtggcttacctcccgcggtcccggagccgggcgggcgtcccgcagcgctg

SEQ ID NO: 129490 - DNA, 30 bp, Homo sapiens
  chr17:77776012-77776042
  hyper
gggagttctaggggccgatttaagtcaact

SEQ ID NO: 129491 - DNA, 316 bp, Homo sapiens
  chr17:77776679-77776995
  hyper
gccgcgggccggccccatttccgccccccccccacgcgcccccccatcacacgcacacccaatccccggactgctcgctggtgctgcttgtgagacccattcctaggagccccaggcgcccttggggagcagaaagaggcggtccagagttgggccggacaaccgcaacctggaaggagtccgggagtccttgggtctgggcgctcagttctcacggtctggggagaaggggctcagacgggacggactaggcacagccaggggcggggactgcgagaggcgaggggaggccggcagggtgtggcggcagagcagc

SEQ ID NO: 129492 - DNA, 442 bp, Homo sapiens
  chr17:77777052-77777494
  hyper
cgttatcagaaacctccagccccaacccctgcctggagatgcccggggcgcgctgactctgttctcgcatcaccccgggccctggctcaacgcgtgagcagcctgtggttccagataccccgagtggagagtttgaccccagattctgcctgcactgacaggcttggcctggcggttacgagccacggttgatgagcgcccctcctcccgtgacccagctcatgagaaaggcggggagcaccaaccctcccacgggaaaacacggggagaggctgggcgagtcaaggaatggtggcaccagagcctgggcgcagagaggcagctggacctcctgggctcccttgagccggagctccgccagggtgggcacttctgcctccagcgatgctgggtgccacagtcctcccgcctcctcctggaccacacgcggctctccagagtc

SEQ ID NO: 129493 - DNA, 191 bp, Homo sapiens; identical to SEQ ID NO: 54687
  chr17:77777712-77777903
  hyper

SEQ ID NO: 129494 - DNA, 523 bp, Homo sapiens
  chr17:77777943-77778466
  hyper
cgacgcctttcctcgcagccccggtacagggcttcctcggtgcacccctagccgttgccccgggaggaggcgccgtctgggacacgaaggggctcggctggcgtcgaggctccgcggccagagcgcggcggctccgcgcacgcccagaagccgtgttgccggttccggggctgccggaaagcgtggggccaagctgctgctctgtgcccgcgcaagcgcctcgctacccgggcgggaccttgctctctccggccgccctgggccgaggggtggctcagcatcgtgggggcggacgcagacggccactcggccgggacaccgtcggcccgggagccgtgatgccttttctctctgcagctgaagcctccgatcggtttccccgcccttctgtaggaaatcaaattcagggaacatggtaccgtatttacccgcacaacttcctcccttgacattttgcactctcgaagttggggcagaagtaattatgcaaacatctggggctgtcccgcgccgctaccggcac

SEQ ID NO: 129495 - DNA, 169 bp, Homo sapiens
  chr17:77778672-77778841
  hyper
ggaaatgtgatgttcacgctgagtttctgtatttttctagtttcaacctcagagcttactttttggccaaacggatgaaggggtaagccaccgtggaagtcccagcagatacccccaccatcgccccatccatcctgggaggttcggtggccctcgaggcagagacatg

SEQ ID NO: 129496 - DNA, 31 bp, Homo sapiens; identical to SEQ ID NO: 54690
  chr17:77779042-77779073
  hyper

SEQ ID NO: 129497 - DNA, 30 bp, Homo sapiens; identical to SEQ ID NO: 54691
  chr17:77781709-77781739
  hyper

SEQ ID NO: 129498 - DNA, 30 bp, Homo sapiens; identical to SEQ ID NO: 54692
  chr17:77785625-77785655
  hyper

SEQ ID NO: 129499 - DNA, 30 bp, Homo sapiens; identical to SEQ ID NO: 54693
  chr17:77786033-77786063
  hyper

SEQ ID NO: 129500 - DNA, 585 bp, Homo sapiens; identical to SEQ ID NO: 54694
  chr17:77786282-77786867
  hyper

SEQ ID NO: 129501 - DNA, 61 bp, Homo sapiens
  chr17:77788284-77788345
  hyper
caaggtcctgtccacaacaaccgatcgtatttcctggggacagctcgacccccaggggagc

SEQ ID NO: 129502 - DNA, 232 bp, Homo sapiens
  chr17:77788400-77788632
  hyper
cgtgccccagtctacctagactcccaggagcgtccggccggaagagacagtgggagatgaggaaactgagattgggagggggacgtgatggggtaaggccattcctaaggcttgtggcagagctgcctcttcaccccacccccatttctttcagatgcggagatcaaagcccaggctcactggtgggtcgggagctcactcctccaagtacacttggccaacctcggggagc

SEQ ID NO: 129503 - DNA, 54 bp, Homo sapiens; identical to SEQ ID NO: 11549
  chr17:77789473-77789527
  hyper

SEQ ID NO: 129504 - DNA, 30 bp, Homo sapiens
  chr17:77812607-77812637
  hyper
agcacaacacagggcgccgggctcgggctc

SEQ ID NO: 129505 - DNA, 383 bp, Homo sapiens
  chr17:77813599-77813982
  hyper
cctccccctcgcggcacgttctcagtgttcacggccccgggacccctgctgggggccacggaagcatccgccgccgctcccagttgcaccgaattgcgtcaccagcgccccgggacgcgcgggccccgccggcagggggcggaatggggcaggggcagctcgcgccccactgcgggccccgcctcgcctccaggctccgggcattttggagcgcgaggagggaaagggacagggcggagagaaggccgaggactgggtgccaaggagagattgaagaacgcacgaggaaggggaccgaggagcagccaatcccggggccctggcgcccaagaacctcggcagaaagggctccaaatccgatcccaccccgatcctcaatggct

SEQ ID NO: 129506 - DNA, 1491 bp, Homo sapiens; identical to SEQ ID NO: 11551
  chr17:77814493-77815984
  hyper

SEQ ID NO: 129507 - DNA, 187 bp, Homo sapiens; identical to SEQ ID NO: 54699
  chr17:77816033-77816220
  hyper

SEQ ID NO: 129508 - DNA, 418 bp, Homo sapiens; identical to SEQ ID NO: 54700
  chr17:77816434-77816852
  hyper

SEQ ID NO: 129509 - DNA, 403 bp, Homo sapiens; identical to SEQ ID NO: 54701
  chr17:77817072-77817475
  hyper

SEQ ID NO: 129510 - DNA, 30 bp, Homo sapiens; identical to SEQ ID NO: 54702
  chr17:77818341-77818371
  hyper

SEQ ID NO: 129511 - DNA, 30 bp, Homo sapiens; identical to SEQ ID NO: 54703
  chr17:77904221-77904251
  hyper

SEQ ID NO: 129512 - DNA, 30 bp, Homo sapiens; identical to SEQ ID NO: 11552
  chr17:77982385-77982415
  hyper

SEQ ID NO: 129513 - DNA, 101 bp, Homo sapiens; identical to SEQ ID NO: 54705
  chr17:78009417-78009518
  hyper

SEQ ID NO: 129514 - DNA, 580 bp, Homo sapiens; identical to SEQ ID NO: 54706
  chr17:78009923-78010503
  hyper

SEQ ID NO: 129515 - DNA, 15 bp, Homo sapiens
  chr17:78010737-78010752
  hyper
tcccctactccaagc

SEQ ID NO: 129516 - DNA, 286 bp, Homo sapiens; identical to SEQ ID NO: 54708
  chr17:78010812-78011098
  hyper

SEQ ID NO: 129517 - DNA, 30 bp, Homo sapiens
  chr17:78075582-78075612
  hyper
gacgcgaaggaccccggccacctctaggtt

SEQ ID NO: 129518 - DNA, 30 bp, Homo sapiens; identical to SEQ ID NO: 54709
  chr17:78121120-78121150
  hyper

SEQ ID NO: 129519 - DNA, 90 bp, Homo sapiens
  chr17:78194130-78194220
  hyper
tcgggatcgggatccggctccggctctctggtctcccgctcggccccgccccctgccccgaccccggtcacgtgcgcgccagaccccgcc

SEQ ID NO: 129520 - DNA, 30 bp, Homo sapiens
  chr17:78234784-78234814
  hyper
gggagcggcgcctgcgtccggatgcccctc

SEQ ID NO: 129521 - DNA, 30 bp, Homo sapiens
  chr17:78235079-78235109
  hyper
gcccgggaatcctgcgcctgtacgaatggc

SEQ ID NO: 129522 - DNA, 30 bp, Homo sapiens
  chr17:78237821-78237851
  hyper
tccctcgttcaggcccggcctgagtgagcc

SEQ ID NO: 129523 - DNA, 179 bp, Homo sapiens; identical to SEQ ID NO: 54711
  chr17:78388503-78388682
  hyper

SEQ ID NO: 129524 - DNA, 91 bp, Homo sapiens; identical to SEQ ID NO: 54712
  chr17:78389460-78389551
  hyper

SEQ ID NO: 129525 - DNA, 497 bp, Homo sapiens
  chr17:78428376-78428873
  hyper
ctactgcctccagagccgcttcggggccgaccccggggactcttcccgcctgcggcctcgcgccagcccggccggctcgcctagtgcccggcgcccagaaacgcgtggagctgggagaggccacacaacccacgccggaagcctaaccccgtcggcccccgcggccggcaccggccggaagcccgcgaagcctaactctcgcgagacgcctcctgagtcccgcctctccgcggttccgccagtcgccgcgctcctgtctgcgttgctgtggcagccccgccgtgcgtccgcgttcccggagccagcgcggcggcgcgcctgtgctcggggcttggccgtagcttttcctcaggtcccgcgcggcgcgcccctgtgtcgcaggcgccctgccgctgcccgcagcttttggggggttcgggggcgggggaagcagggccgcagaaggcccaatcggagccttctgacacccgccccggcccgccgccctcccggagctt

SEQ ID NO: 129526 - DNA, 30 bp, Homo sapiens; identical to SEQ ID NO: 54714
  chr17:78429123-78429153
  hyper

SEQ ID NO: 129527 - DNA, 1346 bp, Homo sapiens
  chr17:78449590-78450936
  hyper
gcggtcccctctgggcgactgcgggggcggcctggcagggagctggggcgagtggccgccgcggggcctcgcaggcgcggggaggcaccggccgggcacccgcgcggctgaggcgagggcgggggatgcctggccgggtagggaacggggtgggggagggcagaggggcgagcgagccggagggggaaccggagccgagggcgcgcgcggacctcgaggttctccaggcgggttttgagcgattgcaaagtttgcccgagttggctgagcgtctcggcggccggtgtccgggacaggtcgcccatggtgttcttgcccgagccgggctgcttgcggccgccgcccgcccgggcctcgccggctccggggtccagcgtgctctggctctcgcagcggcccagcttggcggtcagctcgcggatggtctccttctggctcaggatggtctccttctgctgcagcaccgtctcgcggagctgcagcacgctgctccggagctcctcggcgccgccggcggccacggacgcggcgcacatgtcggcgtccacgggcaccgaggtgcagatgaagcgcgtcggcccgaaatcctgggccccggcgcccaggaggcagagggcgagcagcgcacaggtgcgcgcggcgcggccggccggcatggctgcgggcaccgggcgctccgggcccggctcggctcggctggggctcggctccggctgggacccggctcgggctgtggctccgcgagcggcccgcgctctgggcgccgcgctcttcggccgcgcggtccacaccgccgcgctatcaggcccccactgccgcctgcgctgcggagcccgcgccttttatgccgccgcgggaggggcctcgagccgccgacgtcagcgggggaggaatcccgctttaattgtccgcggcccgggcccgcggcgcggcgggggtctcacgagcgcgccaccggggctgcctccgctcgcgtcccccccgcccttctgggagctgccgcggccccctcctcccccgcccccgcctgggccggcgctgctgccccgaaggctccgagagctcagggggaaggaagtcgggctccggccccggactcgaggatggaccacctgcgtggtgtccccgaacctccgacggggctccaggcgggcgggaaaccaccgcgtccgggagatagaattcggttcggccctcctggctgcactgaacacccttgggccggggtcgtttggagccgggctgggtgcccaaggacccaggtcgtcaacacccgagtgcccggtggtcaacggctcggagtggggcctcgcggcgccactaagtccagagcgggggtcaccggg

SEQ ID NO: 129528 - DNA, 994 bp, Homo sapiens
  chr17:78450959-78451953
  hyper
cgtgtgctattgagaagccgccgggcagcctgggtacagggacttcccacgggtcggggcccccggcgcctcccctcccccagctcccgggctctgtggacccggccccgtccccgggggactgtcagtccccaccccgtgcgggcggggcgctggggacttctcggaggcagacctagctgatcgagcctttcctgtccgcggcgccggcccgatcgcgggcaggcggcgtcgccggggctggacgttcgcagcggcgcttcggaagggggccccgcgggagcagccgcccgcgtctccagcagcttccccttgccaggcgccgcgcgcgcccggtatccccgggtgtccacctgtgcgtggggggctgtttcccgtctgtccagccgcgcccacttctcaggcccaaaggccagcaggaagggtcccggaggtggctgggggcgtccacctgagaagctccgctctcgctcagacaccccacccggcacccgcgcactcgcgccttcatctggaccgcggggctcggctcccgagatcgcggtccgggttccggcgccgggctgggggctcaggaccagggctggcgcagccgccccgccccgccccgccccggggctatcagagcggtcaaagcctcggaaatccctccgtccacgctcccgtggtacagagaaggaaactgaggctccgagactgcggggccgggctacagccgtggccccccgacccctccccgccgcccccggcttctctggtctctgcgttctgcagcctttccctgcgcgcagccgggggctgggggtccccagccagcagggacccacgggcagtcccgggtgccgggatcgggcgtccgcccctcgggcgggagcagaggccggctcgatggagacctttttgagaaatggcggcctctacccgccccccagcccccgagcgcccgccgtctgcgttcagcatctcagcttttaagcctccctgagccggggct

SEQ ID NO: 129529 - DNA, 459 bp, Homo sapiens; identical to SEQ ID NO: 54718
  chr17:78452108-78452567
  hyper

SEQ ID NO: 129530 - DNA, 30 bp, Homo sapiens; identical to SEQ ID NO: 54719
  chr17:78518598-78518628
  hyper

SEQ ID NO: 129531 - DNA, 30 bp, Homo sapiens
  chr17:78519067-78519097
  hyper
gagagcagggtcatcgtgaggcctgaagtc

SEQ ID NO: 129532 - DNA, 189 bp, Homo sapiens
  chr17:78720008-78720197
  hyper
cagcggtgctttctgcgggtgatccccaccgcccccacagcggtgctttctgcgggtgatccccaccgcccccacagcggtgctttctgcgggtgatccccaccgcccccacagcggtgctttctgcgggtgatccccaccgcccccacagcggtgctttctgcagggagcggacggcaggcctggggc

SEQ ID NO: 129533 - DNA, 48 bp, Homo sapiens
  chr17:78954935-78954983
  hyper
ccgtgcccccgcccccgcgcccccgcgggtttccgggaccccagtctc

SEQ ID NO: 129534 - DNA, 31 bp, Homo sapiens; identical to SEQ ID NO: 11558
  chr17:78955670-78955701
  hyper

SEQ ID NO: 129535 - DNA, 30 bp, Homo sapiens
  chr17:78965433-78965463
  hyper
gaacatcccgggcccgaacatcgcgggccc

SEQ ID NO: 129536 - DNA, 30 bp, Homo sapiens
  chr17:78965693-78965723
  hyper
tcccgggccaggggcgggcgccgccatggg

SEQ ID NO: 129537 - DNA, 723 bp, Homo sapiens
  chr17:78977737-78978460
  hyper
tgcgcctttctcagccgcctcccgaggccccaggcgctctgcgggggctctggcggggttggtgggggtgggcgttctcgttgtttcagcggcgctgccccaggccctgcgggagggaccgtgggacccgagacatccccgcctggcctccgctccccacccgggagtggggctcgcacccccccaacctcgggtaaagacgcttctggaaggaagggcgccccgcggaccccgcccaaccctgcccagcccagcccagcccagcccagcccttcccggggcggcggcgcgggaagcaggcggcggcgcacgggcgtcgtcatggcaaccccaccggctccgggggccgggaccgctgccccctccgcccctcgacccccgcccccccgcccttcctggctgcggctggacccggctgcgcggggcgcgaggctgcctttcccgggatcaccagggaccacccggcgcgctccccgggaatccgcacccctggccccagcgctccggagcgacccgggtcagcccctggctgcctgcaatgggcccccgggcgaaccccgggcggacccaggagtgagcacccggtgcgcggcaacgatgatcccgcaagggaagctcacgggaggcaggagctgtggcagccgccccaggatggggcgcggggagcgcgctgagctgtcctttcccgcagcggccccgcggttgaagcgtgggcttgggttt

SEQ ID NO: 129538 - DNA, 1048 bp, Homo sapiens
  chr17:79007513-79008561
  hyper
cagccagcacaactgcgtctcccccaggggcctgactcgttgaaggaatgaatgaatgaatgattttgcagggatgggaggctgggagactgagaggtttcattaaacggaaacgctcagatctggtgtttcacaacgtaaaacaaataattcctctatgttagcctaatttatgtaaatatttctccacgggaattgtaccgggagacctgtgtgccaactcggccagcttccccggcagaatctccccttgggaggacccttaagcaggacccttcctaaaaattggaggcagctctgactcctccattcctcctacaaggttcccccaccccctagggctttccaccgcatgagagtcctccgggcccctcgtttcctactgccctcgacccttccttcccgagacctctctctctcagtaaactgcctccaacgagaatcttctgacggcaggagggtcctccccgtccctaagggtcgccctgtccccaggccttccagcaggacactcccctgtcccctctccagatcctccttcccagggccctcctccaagatcctcttccccaaccctcctctcccagggtcctcccctctccagaatcccggccccaagcccccaagcgctgtctgcctgtctggggtcctccccagagttcaccttctgcaggatcctccctccaagtcctctcctcacgatgctcccccgaaatcctccttctccaagtcgtcccccactccagggccgagctctctccagggtcctcctgcagcaccccctcccccagggttctcctctctgccccgaggggccggccggggggtcgccgcccgcccggcgggcttacctgcgaagcggcggggtcggggcctctcccacctgtaagcccggcccgcggcgtcctgcgtccgagccgctccccgccccgcagcgccaggccgcgacccggcgggccgcccgccccgaagtgccacttcgcgaagtgccgcctccacgcgcgctgccgccggcgccccccgctctcctccccgcaccttctgctcc

SEQ ID NO: 129539 - DNA, 908 bp, Homo sapiens
  chr17:79008840-79009748
  hyper
gtcgggggcggtgatgcgggcgcaacgggggcgggacgcaggggcggggactgccgcggggcggggcctgaggcggctataaaggtggccgccgccggacgccgggctctgtggttcgggtccgctttcgtctccgtcctgctgccgttaccgccgctgctgccgccgcttgcgtcccccgctccggtctgtggtgcagccgggacccaggaccatgtctctgtctcgctcagaggagatgcaccggctcacggaaaatgtctataaggtgagcgccccccggcgccgagctgagcccgctccgtgtgcgcctgggtcgcgcgccgcccgcgcgcccgagcccgaccagggcggccccggggccgcgcgccgggccaggaggctgggactttgggggtcttcccggcgcggccacccgggacccgggctgctggggtggtgagcccggcgccggccgctcacaggtggccacccccgcccgggcccccccatcccatgcgcgccgcggcccggtcagtccccagccccaggcccggggagcactccccgctccgacggccctgctcggcccccgcgcgctcgccttggcgtcggcgggaacggagccgcgcgccgggccccggaagccctcggaccggtcggggtcgtagcacacccgggcagggccggggcggcgggggcggcgggcccaggggttgcggcggccaggacggcatgggggctgtctgaaggccgcggtcggcgcggtggcaccgtggggctcctccaggcgcggttgcgcgagcctcgggcacttcattctcaacaggctttcccttcccacaactcctgcccggcgcccatgctggggcctaaggtgggaggtcggagcgcgggcaggctggatgggtggacggataatctatcat

SEQ ID NO: 129540 - DNA, 30 bp, Homo sapiens; identical to SEQ ID NO: 54724
  chr17:79184838-79184868
  hyper

SEQ ID NO: 129541 - DNA, 30 bp, Homo sapiens; identical to SEQ ID NO: 11561
  chr17:79196662-79196692
  hyper

SEQ ID NO: 129542 - DNA, 31 bp, Homo sapiens; identical to SEQ ID NO: 54726
  chr17:79197096-79197127
  hyper

SEQ ID NO: 129543 - DNA, 30 bp, Homo sapiens
  chr17:79197383-79197413
  hyper
ctccaaagttttaacgctgcgccccgtgcg

SEQ ID NO: 129544 - DNA, 259 bp, Homo sapiens
  chr17:79205173-79205432
  hyper
ctcccgcccgcgtgtgcagctcaccagctgcgtgcattcactggtcccacgcaggtggcaggtcagcagctgcagcacggcctcacagttgagcagtccacacctgcacagaggggacacctgggtggcgggtgcggcccgttccctcctccctcgcccacggttggggctgaggcagagcagggcgggtccgggcgcactcacgctttgatgaagtgctgtgcctcctcgcggctcaggaaggcgcgtggtccccgag

SEQ ID NO: 129545 - DNA, 30 bp, Homo sapiens; identical to SEQ ID NO: 54728
  chr17:79268973-79269003
  hyper

SEQ ID NO: 129546 - DNA, 30 bp, Homo sapiens; identical to SEQ ID NO: 54729
  chr17:79283113-79283143
  hyper

SEQ ID NO: 129547 - DNA, 215 bp, Homo sapiens; identical to SEQ ID NO: 54730
  chr17:79317324-79317539
  hyper

SEQ ID NO: 129548 - DNA, 403 bp, Homo sapiens; identical to SEQ ID NO: 54731
  chr17:79317846-79318249
  hyper

SEQ ID NO: 129549 - DNA, 30 bp, Homo sapiens
  chr17:79318765-79318795
  hyper
gccacccggcctcctcggaccccgctcagg

SEQ ID NO: 129550 - DNA, 181 bp, Homo sapiens; identical to SEQ ID NO: 54732
  chr17:79319123-79319304
  hyper

SEQ ID NO: 129551 - DNA, 30 bp, Homo sapiens; identical to SEQ ID NO: 11565
  chr17:79519273-79519303
  hyper

SEQ ID NO: 129552 - DNA, 30 bp, Homo sapiens; identical to SEQ ID NO: 54734
  chr17:79519688-79519718
  hyper

SEQ ID NO: 129553 - DNA, 30 bp, Homo sapiens; identical to SEQ ID NO: 54735
  chr17:79520364-79520394
  hyper

SEQ ID NO: 129554 - DNA, 30 bp, Homo sapiens; identical to SEQ ID NO: 54736
  chr17:79604192-79604222
  hyper

SEQ ID NO: 129555 - DNA, 30 bp, Homo sapiens
  chr17:79633256-79633286
  hyper
cgcacacaggcgctcggcagatactgagaa

SEQ ID NO: 129556 - DNA, 21 bp, Homo sapiens
  chr17:79650801-79650822
  hyper
cggcacccgtagctcggcgcc

SEQ ID NO: 129557 - DNA, 71 bp, Homo sapiens
  chr17:79650872-79650943
  hyper
cggacttctcattggttcttagggctcattgttccaagggcgcgtccaattagcgcgcagcgttagcggga

SEQ ID NO: 129558 - DNA, 30 bp, Homo sapiens
  chr17:79670033-79670063
  hyper
gaggatgtcgcctgcggctgcgaaggcgcc

SEQ ID NO: 129559 - DNA, 30 bp, Homo sapiens
  chr17:79670395-79670425
  hyper
cgtcatttccggctcgaatgcccggcagcc

SEQ ID NO: 129560 - DNA, 30 bp, Homo sapiens; identical to SEQ ID NO: 54738
  chr17:79670795-79670825
  hyper

SEQ ID NO: 129561 - DNA, 58 bp, Homo sapiens; identical to SEQ ID NO: 54739
  chr17:79677825-79677883
  hyper

SEQ ID NO: 129562 - DNA, 30 bp, Homo sapiens
  chr17:79679455-79679485
  hyper
catggcagccgaggcgcgcgtgtcgcgctg

SEQ ID NO: 129563 - DNA, 251 bp, Homo sapiens
  chr17:79761561-79761812
  hyper
gcgagaacccggggacgcgagaggaagggggcgagggggcgcccagggaggcggagggagcgagaggaaggggggctgagccacggcccccacgcccgcgcgcccctccgcgtcccagggcgtcccctcccggagctgggacccaccgcgaccaccacctgctgggccagggtccgcgggctcaggggtctgcaggattagggtctgcggaaccaggacccgtgggacaaaggtctgtggggcgcgggtcc

SEQ ID NO: 129564 - DNA, 921 bp, Homo sapiens
  chr17:79761833-79762754
  hyper
cgagtctgcgtatggccggggtacgaggcgctccctgcgcagggtgggcaggaccgaagctcgccgggaggctgcgcggagggcgggcggggaccctcggctgccgctcccacccccgcggggccgcccccgagcccgccctccgccgccgccctcgccctgcgtcgccgccggaaagtttgcaccgaccccgatctggcagcgccgcgaagacgagcggtcaccggcgcccgacccgagcgcgcccagaggacggcggggagccaagccgacccccgagcagcgccgcgcggtgagcacctgggccgcggccccgaggggacgttggggagtcgacccggtggggacagagaccgcggggcgggcgcggcggggccgggggcgcggggagcggggagccggccgggcggtctccggggtccgggctggtgcgctcctcagtcccgtcagacacccccgttcccaaccccggctcggacaccacccggtcctgcaccgtcgggcaggtccaggggtctcagcccctcccccgttctctggtcctggggggcgcggctgggggcgggggtgtcgctggccgcctggcgccctgcggcggccacactgcagcggccacactccccactcagggccccgggccccgccgccctggggagcgcacaaagcgccgcggacgcgtccccgaggcgcggggtctcaccagcgctgtctcccctcggtgggctcctgccccgaggactgcccggtggcaccggcgcggcccaggatggggtgaggggtgtctgcgccccgcctggccgctcctcttccgcggcccacactggcgactttgaccccggcaagcgggtcactgccctgcccggctccggcccccccggcgccccaccacccggccgactcggccaccgggcttatgctccg

SEQ ID NO: 129565 - DNA, 112 bp, Homo sapiens; identical to SEQ ID NO: 54741
  chr17:79791490-79791602
  hyper

SEQ ID NO: 129566 - DNA, 30 bp, Homo sapiens
  chr17:79818711-79818741
  hyper
taattggtggctttcgcctgcaccttccac

SEQ ID NO: 129567 - DNA, 30 bp, Homo sapiens
  chr17:79819022-79819052
  hyper
tggccgcctagggtcggcggtgggctcggt

SEQ ID NO: 129568 - DNA, 30 bp, Homo sapiens; identical to SEQ ID NO: 54742
  chr17:79828341-79828371
  hyper

SEQ ID NO: 129569 - DNA, 30 bp, Homo sapiens
  chr17:79830119-79830149
  hyper
cccagccccgggctcgcctctcctggaggc

SEQ ID NO: 129570 - DNA, 43 bp, Homo sapiens
  chr17:79849414-79849457
  hyper
catgtccattttgtcggccatggcgggcgcggaatcgggcatc

SEQ ID NO: 129571 - DNA, 30 bp, Homo sapiens
  chr17:79875443-79875473
  hyper
tggagctcatactccgtcctggggtacgcc

SEQ ID NO: 129572 - DNA, 30 bp, Homo sapiens
  chr17:79875970-79876000
  hyper
ctttgcgctcggagcggctcagacccccgg

SEQ ID NO: 129573 - DNA, 48 bp, Homo sapiens; identical to SEQ ID NO: 54743
  chr17:79884792-79884840
  hyper

SEQ ID NO: 129574 - DNA, 81 bp, Homo sapiens
  chr17:79885578-79885659
  hyper
gccgccgccgccgccgctccacagacgtcacatgatgtttggtcacgtgggctccattcatgaagcggcgacgcggccggc

SEQ ID NO: 129575 - DNA, 188 bp, Homo sapiens
  chr17:79885889-79886077
  hyper
gcggacgccggcggcgttttccagctcgagtgctcagcctagggcaggctctgcgtgcgccccctcgagtgccggcctgggccctgccaggcagaggcgctcttgcgtcaggacggcgccgccggggccccgcgattccaactcgggggtcccggagcggcgcggggcggggacggcctggcagctcc

SEQ ID NO: 129576 - DNA, 31 bp, Homo sapiens; identical to SEQ ID NO: 11567
  chr17:79889370-79889401
  hyper

SEQ ID NO: 129577 - DNA, 30 bp, Homo sapiens
  chr17:79894991-79895021
  hyper
gagggagggcccggcgcctaggggtccccc

SEQ ID NO: 129578 - DNA, 30 bp, Homo sapiens; identical to SEQ ID NO: 54746
  chr17:79895342-79895372
  hyper

SEQ ID NO: 129579 - DNA, 192 bp, Homo sapiens
  chr17:79917288-79917480
  hyper
ggcgcggcttcctcccgggcctcacgtcgagacgccttccccagggcccgccgctgacctgtgcgagtgcgcggccagtcccgggagctcatgaggcgccgcatggtgtcgtatctggagtcgcagttctcgcggttgaagcagtaccagccgcctgcggacacgaccgccgctcaggcccgcgcgcacaga

SEQ ID NO: 129580 - DNA, 796 bp, Homo sapiens
  chr17:79918207-79919003
  hyper
aggacgccagcagagcggctgggcccagaggccgaggggtcagtgcccgagctggccggggaccagcccttccagcgccgctccgctccccacgcggagagtcaccgaaccgggcactcctcggggccaggaccgcggggcgcccgacggaagccctttctccccggggagagaacggccgcggcccgcagggaaggtccagccggagaccgggcgcgtcgggcggggcggggaggtgcagggcgcgggccttacccggcggggctgccgtcgttgcaggtcaccgaggtgttgagtaggaggtgcaggcgcaggtcctcgttgagctgctgcgcggagcaggggtacagggactgcgccaggctcttgacttgcgccatgaagctgtccatgttaccctccacggccgtgaagtccagcgggaagctctccacgggctgtccggccgccggcgccgcctcggtccgcgggggaggaggcggctgctgaccccggcgccgccaggtcttcctgccctcgctgcccccggcgcagtgcagcaggctcagcagcagcagcacgcgcacccctcggcccatggccgcgtccacctgcggggagcgggcggccttgaggcggcggcggcggcggcgggggatgccgggccgggggtgccgggccgggggtgtcgggggcactggccgctcctgctccctcgcccccgctcccgcccgccgggcctggcggagaaggcgcgcgcggctcggcgtcgaggcgctcggggccgggtgccgtcggcctccgcagctggggctcc

SEQ ID NO: 129581 - DNA, 31 bp, Homo sapiens; identical to SEQ ID NO: 11568
  chr17:79926113-79926144
  hyper

SEQ ID NO: 129582 - DNA, 30 bp, Homo sapiens; identical to SEQ ID NO: 54750
  chr17:79934855-79934885
  hyper

SEQ ID NO: 129583 - DNA, 34 bp, Homo sapiens; identical to SEQ ID NO: 54751
  chr17:79946603-79946637
  hyper

SEQ ID NO: 129584 - DNA, 37 bp, Homo sapiens
  chr17:79981249-79981286
  hyper
gggctgggtgggggcgcgcgacgcacctgcctgcttc

SEQ ID NO: 129585 - DNA, 1269 bp, Homo sapiens
  chr17:79988349-79989618
  hyper
agacccttgtcctcccgccgcccactggtgggacgtgaggccagccagagagcggggctggccaggtctcccgtgctgaggccgtgccacggtgcgctggggctgcgtccgctcactgcgctccttgccctgcagtgatggcgagcgaccaccgagaggcgctgctggacagggagagcgagaacgcgtctctccgggagaagctgcggctccgggaggcggagatcgcccgcatccgggacgaggaggcccagagggcgagcttcctgcagaacgccgtcctggcttacgtgcaggcgtcccccgtgaggaccctgagccccccaaagtgagacaggccgggaggacccgggcgcagtaggagtgcatcaggcggcgcccgagatggaccaggggctgcgtcccgcccgcgccgcctctttgagacccgggtcgtctgttccacgcggcggttgcggcgactgttggtggtgtcgcggctgcgggggaaccccgtgggaggcgcctgggaagggctccctaccggccccttcttcccggtcgacgccacgtgggagcacaccgggaaggggtcccgcgggcgcgtctccccctcgccttttgcgatgtcaccgtgaacgctgcggccgcctgcgcgcggcggggtttggaaatacagcgcgtttgcactttgtgatacattctggccccgcctctccctccaaacgcgcgaccgtccgtgcctctccaaacgcgcggccctctgcccccagccctgcagggagggcctgccggggtgcggctgttcgcccctcctcgccgctgccttgaagggacgggagggccgcgggggctgtccgtctgggggttcgggcggctgcagaccccggagttcccagctggctcccggcggcagggggcgggtccccgagaaagcgcagcgcgcggagccctccccgccgggtccaggtcgctgggctctctccggcctgcgctgcgccccgagggacccgtaggagacccccgggccggggtcgcgctggaggcgggggcgccgcagctcgcgcagctctgcccgggttcgggcggccccgccccgccagccgcgcggccgggcgccccccgcccgcccccgcccccgccccccgccccccgccggccgcgctcggctgtctccgcgcccggcgctcggcggcgctcggctgtctccggccgatcgctcggcgctcgggtccgcggccgctgcggcgccgggcatttctccgcagctcggctcgcggccgcgcccgc

SEQ ID NO: 129586 - DNA, 41 bp, Homo sapiens; identical to SEQ ID NO: 54754
  chr17:79989899-79989940
  hyper

SEQ ID NO: 129587 - DNA, 30 bp, Homo sapiens; identical to SEQ ID NO: 54755
  chr17:79995729-79995759
  hyper

SEQ ID NO: 129588 - DNA, 181 bp, Homo sapiens
  chr17:80009036-80009217
  hyper
gcgtcggggcctccccgggcctcgggagcctgggcagagaaaggcacccacagcagcgaaggggccgtggcttcggagcgagaaaggctcggggggcagatcccgcgggcgccggggagtgggggacactcaccgccctggagctcgagctcagggtcgtccccgtcggtgaagataaacg

SEQ ID NO: 129589 - DNA, 30 bp, Homo sapiens; identical to SEQ ID NO: 54756
  chr17:80009830-80009860
  hyper

SEQ ID NO: 129590 - DNA, 31 bp, Homo sapiens; identical to SEQ ID NO: 54757
  chr17:80010342-80010373
  hyper

SEQ ID NO: 129591 - DNA, 30 bp, Homo sapiens
  chr17:80023838-80023868
  hyper
ggctagagaggggtcggggctcgccgggac

SEQ ID NO: 129592 - DNA, 31 bp, Homo sapiens; identical to SEQ ID NO: 11572
  chr17:80156992-80157023
  hyper

SEQ ID NO: 129593 - DNA, 30 bp, Homo sapiens; identical to SEQ ID NO: 54759
  chr17:80170607-80170637
  hyper

SEQ ID NO: 129594 - DNA, 1107 bp, Homo sapiens
  chr17:80186329-80187436
  hyper
aggcagcgcaggccgcgggccgctcccctagccaggaagagccgccgtccgcaccgggaccggagaggaagcggaggtctgaagggggacaggtcggacgtggcctcagagagggaggatgtgggccccggagctgagccaggcggccggaaccccacgggacccgcgcgcacctccccaccaaaggggccccggcgttggggggcgaggggtcgctgccctggaggacgttgggacctgccgcgctgcgctccgaggcggggaaacggagggacggcggggcggaggggcgaagcgagcctggactccgggggaggcgaggccgggaagacccagtcccgaggagcagagggggcgggccagctccgggccgggggcgccgacggggccggttccggttgggggggtccctgggcccggcggggttgcgggacgcgccgtcggggagctgcggcccgggagcccgtccggaggcggcgcggggtccgggcggggcgcgcaggggcggcgccaggcggtgacgtgcgcgggggacgtgccgcgccagcgacccgagcacttaaagtcgcccccggcgcggagcggaccggcagaggcgggcagaggcggcgagaggcggcgagaggcgggctgaggcggcccagcggcggcaggtaggcgcggccgcgatgctcgcgcgcgggccggggcccaggagctcccccgtgccgggcaagggggcgacctcggggtccgcgctctcacccccaccccgcccactttgtccatcaggtccgggggcgcccggggcatggactagccttctcgaccccgagcgggccccaccgagggctcccgagagccagccgcgcccctccgcgccctcgcatacctggctgcccagtctcgtctcccccggtccggcccggcgcccacccgtcgggctgccctcaggggctgggctcgggccaggagatggctgcgccggcggccaagcccggtccgggtataaatagctcggtccgcggtggcggggggcgcgggctatatttggtggggctgctgcagccctccctgtatgggtggcctccccgagggagtggggagcacttgcgctcgggccgtggc

SEQ ID NO: 129595 - DNA, 30 bp, Homo sapiens
  chr17:80188801-80188831
  hyper
cgagtcccgagccgcgcccactggtcccac

SEQ ID NO: 129596 - DNA, 760 bp, Homo sapiens
  chr17:80189390-80190150
  hyper
gggtccaggaggcctcggaggtgggggacggcggctctggaccagctccggcccccaccacctcccggccccagggcggtgacagccttgcggagaaggggtcttcaaagctctgagaccccgcagtgccagctcaggattgaagcctgcggcggcacatgcagccttcctttcccaaaggggacttgcgcccagccccacttggggcaccagtgggggctcctggccctggccctgggtgggagtggccaatccgcaaatgaggcctgtgtgtctgccccgccggcccctgccgtcgtgatgtaagcggacacagagcggcagggcacgggctgcgcgaggggtctgcgggggtcagaggtggggcgcagggcccaggcctggggcagccccttgcgcagcgtccaccccctgcaagctcggccccgacacctttgcaggcgcctggggcggggctgccgggagttgctcactgctccttccttgtttgcacaacaggggctgcgggggaagaagggaactgagggaggcccctcccccggtgcagcgccctcccgccctcggcacccctcggcagccaggcgctggccacagaggccgcttccttggtcctcaggcagctcatgggatccaggaaggaaacgaattacccttttcctgccccgcctcctgcctgggccacaaaggcagggccaaagcccatccttcaagggctggagtcagttaggtaacaggccacgggccccgggctcaggccact

SEQ ID NO: 129597 - DNA, 114 bp, Homo sapiens
  chr17:80277697-80277811
  hyper
tgcgtgtgtgcagagacgggtgcgcgactccatgcgtgtgtgcagaaacgggtgcatgtggacacgtgtgtgtgcagagaagggtgcacgtgactcacgcgtgtgtgcagagat

SEQ ID NO: 129598 - DNA, 30 bp, Homo sapiens; identical to SEQ ID NO: 54765
  chr17:80279415-80279445
  hyper

SEQ ID NO: 129599 - DNA, 175 bp, Homo sapiens
  chr17:80291219-80291394
  hyper
aagagtcgagcctggcgcacagggcagggacgcgggtccccacaccggccggcagctcgttcccgcccatactcgggtacgcccgctgcgaccccgcccgcctggcctgcgacgcacgctcagggccagcggggggtgacggtcccagaggcagaggcgccgcagccccagagtc

SEQ ID NO: 129600 - DNA, 352 bp, Homo sapiens; identical to SEQ ID NO: 54766
  chr17:80291596-80291948
  hyper

SEQ ID NO: 129601 - DNA, 651 bp, Homo sapiens
  chr17:80329349-80330000
  hyper
ccctgcaaacacgggcgtgaggggcgcaggggtgaacgctggaggcggagaacccaagaggggctgcggggtcagccttggggcagccgggctggaggcagcttcgctccgcagacgcagacgcgagacccgcctgggaccctccgccgaccccgctgcggccccgcgacccccgcgtcttcccggcgccgcgcggtcagcgccgccccctagacacccggcgccgtcccctccgcgcgcctgctgcccgctggggttattttaataccgggccctggcgcggggcgcggcgcattcccagctggcggcgggcaggtggcggcggcgcagagacccggcgcggggcggggggcgcggctttggtggcgggactggcgggcgcccctgccgtgtgctctggaagccgaggccaccgcggagcccctcgcgccccctctgcgctgggacaggggagcgcgcctcggaaagttccccgcggccccgctgcgcgaggagtttggagccgcgagcggctgcccccacgcgcgaccccaggctcggcgggcaggtctggccgctcagtgaccggaggcaggtgggtcctcggtgggtgaccgggagcgcgcggggactgccgggtctgtgcccttcggggccctccgcagggctggg

SEQ ID NO: 129602 - DNA, 541 bp, Homo sapiens; identical to SEQ ID NO: 54768
  chr17:80332161-80332702
  hyper

SEQ ID NO: 129603 - DNA, 76 bp, Homo sapiens
  chr17:80333153-80333229
  hyper
caccaggaactaccgcgaccacctgcgcggccgcgtgcggggcccgggcagcgggggaggccgggggcccgttccc

SEQ ID NO: 129604 - DNA, 30 bp, Homo sapiens; identical to SEQ ID NO: 54769
  chr17:80408771-80408801
  hyper

SEQ ID NO: 129605 - DNA, 30 bp, Homo sapiens; identical to SEQ ID NO: 54770
  chr17:80416030-80416060
  hyper

SEQ ID NO: 129606 - DNA, 30 bp, Homo sapiens
  chr17:80416439-80416469
  hyper
ggcccgccccttcccgacactgtcattggc

SEQ ID NO: 129607 - DNA, 30 bp, Homo sapiens
  chr17:80417233-80417263
  hyper
ggctggcacttctgcgcgtgacgccgtggc

SEQ ID NO: 129608 - DNA, 388 bp, Homo sapiens
  chr17:80452514-80452902
  hyper
tgacacaaacagggacgttattggggcctggagaagaattatgggccacaggctgcccagtcaggaaagaaaagggagtctatagcagaggatggtttcgatccatcgacctctgggttatgggcccagcacgcttccgctgcgccactctgctggctataaggggggagcctgagtcagatcatgaccacaggagtcatctccctgcaggcggcgacccctactggccaagaggggccaacagaggactggctgggcaaggcacatgctcaattataagcctactcctcctctctcaacttcttgtagataaaactctctgaattcatgtccttttctgctgttaaaacattggctggaggccgggcacagtggctcacgcctgtaa

SEQ ID NO: 129609 - DNA, 30 bp, Homo sapiens
  chr17:80455616-80455646
  hyper
gccgcttgacgcggcgatgattgaaggtgc

SEQ ID NO: 129610 - DNA, 30 bp, Homo sapiens; identical to SEQ ID NO: 54771
  chr17:80476995-80477025
  hyper

SEQ ID NO: 129611 - DNA, 217 bp, Homo sapiens; identical to SEQ ID NO: 11574
  chr17:80503129-80503346
  hyper

SEQ ID NO: 129612 - DNA, 30 bp, Homo sapiens; identical to SEQ ID NO: 54773
  chr17:80550891-80550921
  hyper

SEQ ID NO: 129613 - DNA, 36 bp, Homo sapiens; identical to SEQ ID NO: 11575
  chr17:80551802-80551838
  hyper

SEQ ID NO: 129614 - DNA, 30 bp, Homo sapiens
  chr17:80605493-80605523
  hyper
gactccaccaaacacgaagaaaaatcccgg

SEQ ID NO: 129615 - DNA, 30 bp, Homo sapiens; identical to SEQ ID NO: 54775
  chr17:80606220-80606250
  hyper

SEQ ID NO: 129616 - DNA, 1706 bp, Homo sapiens; identical to SEQ ID NO: 54776
  chr17:80655504-80657210
  hyper

SEQ ID NO: 129617 - DNA, 30 bp, Homo sapiens
  chr17:80674666-80674696
  hyper
ctctgtcagggccacgggccactcgggggg

SEQ ID NO: 129618 - DNA, 979 bp, Homo sapiens
  chr17:80692874-80693853
  hyper
cttaaaaacacaaaaaacaaacaataaaaaaacctcacgtcaaatgacttcagcacggactgggctcaggtgcgcacctgctcgtgtgcacgcgtgtgtacccacgtgtatgcatgcatgggcgcgcgtgggcattcctgtgtctcaagtccctttcccaggacatcctggaatcagcagccccaccctgggccgggtcagcgcgtgccatcggagcccccacgtcagcctctctctccgatcggcacctggcgtcccagtgcgcaagccccacgtcatcacgggggccgctgggcccggcctggtctgcagtgtgggaagccggccaggcctgtgaccagcgcccgggccgagggccggacctgcgtccgctgcggggcagggataccgggtccctgcagggagctcaagccccagcgcgcccgcgaagagctgcgcggactcccggctgcttcccccgaatcccgggcgcaggaagcgcgaagccggacgaacgcggggagcgcgcggcgagcccgcctgaggccgcccctcccgccgcccggggtcacgcgccgcgcgctcccgccccgccccgccccgcagcgcctcagccgacaggggcttccgagcgagcagagtcccgcgccccgcactccatggagcagctgctgcgcgccgagctgcgcaccgcgaccctgcgggccttcggcggccccggcgccggctgcatcagcgagggccgagcctacgacacggacgcaggcccagtgttcgtcaaagtcaaccgcaggacgcaggtgctggcccgtgcgcaggcgggggctctgcgggtctctgcggggcctgggaaggcggaggggtcgggggcaggcgcatttcctggggctgggcctggggaggggtcagctttggcccttgggaggtggcacctgctgggtgagcccggctcaagcgttctgtgaaggtttgtgtctgcacgatccgtgaccttcctttg

SEQ ID NO: 129619 - DNA, 31 bp, Homo sapiens; identical to SEQ ID NO: 11580
  chr17:80840580-80840611
  hyper

SEQ ID NO: 129620 - DNA, 237 bp, Homo sapiens
  chr17:80876556-80876793
  hyper
tccaccgctgagccccgcgtgccgtttcgtgagaggctgaggcaccgctgagccgcgcgtgccgtttttaacttgattataaaatacatttaaagttcacatgcaggtgcatctccaagaaaattattttaaaaactagttaagactttcatttcccagtcctcaacacacatcagagcagtactctgttcagagctgaaaggattcgcgctgggacaaaggcgtgtcacttgagtg

SEQ ID NO: 129621 - DNA, 37 bp, Homo sapiens; identical to SEQ ID NO: 54779
  chr17:81009161-81009198
  hyper

SEQ ID NO: 129622 - DNA, 143 bp, Homo sapiens
  chr17:81009743-81009886
  hyper
ttggtgcagagcggcgtccataggggtgggcctcccggaggggcgtggaaggggcggggctgctcggcgcggggcggggccgggaggtcgccgcctcagtcttccgccctgggccacgccccggtcccgggtcacctctcgga

SEQ ID NO: 129623 - DNA, 457 bp, Homo sapiens; identical to SEQ ID NO: 54781
  chr17:81036701-81037158
  hyper

SEQ ID NO: 129624 - DNA, 602 bp, Homo sapiens
  chr17:81038241-81038843
  hyper
ccagagcgggaagggacggccgcgggagggagcggcggtttcggggatcgggcgcggaccgcagcgggggccacttccgtctcggggagccgcgggcgggcacctgtgagccgggccgagtgtggctccggccgggccccccgcccctgccccgtgaaggtcaggccgcccttggccgcggcgcgcgctgcgctgggcgaccccccccccccccacccgcggtggcggccgaggactttttttttttttttttttttttgactcaagcgtggccgccgagagcggcgccgaccgcgactgcccctcgggagccgccgccgctcccacgcgaagcccagggcgccgagggcaccgcggccgaacccgccctgcgcgagcctcgcagtcgccagttccggggttcgcagatgcgcggggacccgagtgacgcgcgcctcccggagagccgtggccgggctggcccgggcctgggtcccgcttcccctcggcgcggcccccgcccccgcccccgcccccgccgcgggccgagtcacgcggtgatgtcgagcgaagctgttttccgagaaggtcggggcagagccggtgcggggcgggtggtgtcc

SEQ ID NO: 129625 - DNA, 522 bp, Homo sapiens
  chr17:81038865-81039387
  hyper
cgcagccgcagcctccgttccgggtccccgcgaagccacagtcgccccccagcgcccccggcggagcctccccgggggaaggggcgtggcgctggggggcagagtcgccccgagggccgtgggcggtgcccggctgtcccgggagcggccgcctcccttctcggccgagcggggccgcgggcggatggaggtctggggggggtcggccgggaacgccggcgccgggagcctccgaggccgacggctcttctggggccgcccctgcccccgcggagtgattcagccccggctcgctgcctctgcccggcgggtcggtgcatccccgaaccgaggcccggggcgttccgctccagcagaccgaagccagaaacgccgcccccgccacccaggccgagtgtgtcgagaaggggccggcgcccttttcagggtgtcaggggactgtgtgcccggtaggagggggcgcctcccggagcccgaagggagggcgcggtaggcagccgagggtggcggggaggccacccc

SEQ ID NO: 129626 - DNA, 30 bp, Homo sapiens
  chr18:158536-158566
  hyper
tcatcgccagtggccggtttgaatgagact

SEQ ID NO: 129627 - DNA, 30 bp, Homo sapiens; identical to SEQ ID NO: 54784
  chr18:267622-267652
  hyper

SEQ ID NO: 129628 - DNA, 83 bp, Homo sapiens
  chr18:268116-268199
  hyper
tggcctgtgaacaccggtcgggcgagctggcagttgggagtttccctagcgactcagttcgggtgggcgttgggcgcctgagt

SEQ ID NO: 129629 - DNA, 1811 bp, Homo sapiens
  chr18:499313-501124
  hyper
cccgaggtctcccgacgtggacacctaacgcccttggaaagggagtgaattggtaggatatcatcgctccggttagttccgcgggagctgcccttcagaaaaaaaactttccagagccaaaagttactttccaagcgccttggggcttcccgggcgcctccctcggacggcaaccctagaagtcaaagcgattgcatcgccaggtctgtggcggctggaagcggggtgaccgcggtcagatggcatttcgcacccacgcagggctgtgttatcctagcacagaaccagcaactctcacacgaagccttgtgtaaacaccacgcgggcccattcctgaacgactctttgatgcctccgctgcggttacttatctcatacataaatcaggattccgctgacaaatctccgtgtttccactaaacagaaggctgccctgcagtccttctcgtgcttctttctaaagtacgataacatctgacacttccataaaccggcctgcagaggacaccgcgcagggggcgactaaccagctgaggtgtgtcaccccaaaacaccagtgggcacaccccaaggcgggcacgtggaagggacgcggaaccgagggcaactattttccagtcggtgaatctgatggagaaagatgccaaatgcacttcccgagccagctgaactcctcgggcacctaatcattgccagatgtggcgagggcgcacggagaacatccccagtcccggagaaaacacccggccgccagcgcggggaccgctcgggccgggaaacggctagaggcgggaggagagaggactgggcgagcgtggggagcgctgcggcgtggaaaagcgaccgggagggatggcgatgcctccactctcctcggcaggttttttcaattaaaaagttggaaacgggaatccgtaaacaacgacttagggcttcaaactacttgcaaagacgcgatggggaggggaatacttgcgcgcttcaaaaccccaacctcgaggtctccagccgcgcctgacccgggagccgggtgcgcccccagtgtccgcgcacgaacccggcgccctggcagccccgactccccgggcccgcagcccaagggaaggttcgcgcgggaggcacctccgtggcctcccgcgcgccccgaagcccgttccccccgcccagagccccgcggagctgccgccgccctacctttcatggtgaccgtggggacgcaccgccggccggggagctccgcgcgagcgccgcgcagccgaggaagtcgtcccgagcggctgctcaccgcacgcccatggtagccgcgccgcgcgccggccgtctgcgcccccgtcctccctcgccgccgccggcccgcgctccccgcgctcccggctccgcgctctgctgcctcggggctgccgcgcgcgccgctctcgctctcccagcgcccctccccctggcccgacccggccgagcgagcggccgcgcccacgcccctctcgcgccctcccgcgcccgccccgccctcggcccgcgcctgccctcgccgggcactttctcgcccgccctctcctgcgcgccctggccccactcgcgcgggctctctctttttcccgttgcaccagcgtcgggatgaagtcgggagcaaagcccttcccggggcggtccagcgttcaccttcggcgagcacctaaggtgccgctgctgctggggtcgcttctacaccccaaactacctagcaagtgttgggcgagaggatggggagctgctgtgccccgggggtggcggggggtaaggtgggcccttccccaaacggctctggggcatgg

SEQ ID NO: 129630 - DNA, 30 bp, Homo sapiens; identical to SEQ ID NO: 54787
  chr18:597060-597090
  hyper

SEQ ID NO: 129631 - DNA, 142 bp, Homo sapiens
  chr18:657234-657376
  hyper
aatcaagtagaaaagctgcattataccacttgcttcggttgcttcagtgagaacgaagaaatggaaatgcaaatcccttattagttgtaggaaacagatctcaaacagcagttttgttgacaagaccgcaggaaaacgtggg

SEQ ID NO: 129632 - DNA, 32 bp, Homo sapiens
  chr18:658430-658462
  hyper
agcactgaagctggcgcgggaacttggtttcc

SEQ ID NO: 129633 - DNA, 423 bp, Homo sapiens; identical to SEQ ID NO: 54788
  chr18:712015-712438
  hyper

SEQ ID NO: 129634 - DNA, 9 bp, Homo sapiens
  chr18:712722-712731
  hyper
attggccgc

SEQ ID NO: 129635 - DNA, 1572 bp, Homo sapiens; identical to SEQ ID NO: 54790
  chr18:811502-813074
  hyper

SEQ ID NO: 129636 - DNA, 182 bp, Homo sapiens
  chr18:903662-903844
  hyper
tgggggtgatttaggcgatgaatcgccacgttaatagcactactgccaaatcttcaaatttagaggctctggtgaaaaattaaaccggtggcaattttcaacgtttgtagcatctgttaccctacacttcagcacccggagtctggacagctccgcaggccgcgctccggaggcagcatgag

SEQ ID NO: 129637 - DNA, 1089 bp, Homo sapiens
  chr18:904526-905615
  hyper
cacctctgtaaccagcggtagcagcagcagaagccgcagcttcagaggcagccggagagacctcggagcagagaaggcgccgccgaccctcgcggctgcctggcccgcggctcctacaaaggcgggctagccgcccgccctctcccttgccttcctccccttcttttctgactttccctctttcccttaatcgcctgcttcttcctccgggtggacttacggccaccttgctcctccgcgcttcacctcatcgccccctctttctttcttctgcctctctctctgcgcccccttctctccgtgtcacgctccctcctggttctgcgcgtctacaaacttttgagcagaacacgagcctcggcaaacgagtcccgcagctcctcctgctgctcccgctggttcctgcggcttctgctcagacaccaacgccagacggcgatgcctctcgggtggtgactccagcgcaggaacttgaagaagcgctttgcccgccgtcctacctggcagctctcctggcagcgggaggagttgaagggtaagggagggaaaatcttaccaaagcgaccggctcactcgactgctgattctttcgcttggcatcgcgtcaggggagttagctttccttcagccgggtctggctagttattgggcgccgggtagatgcatatatatatatttttttctaactatagcaagcaagaagtggcagggcgcgcaccggctgtcgccaagtgctgttcaactcagggagccggggcttcgctccgtccctcccccggcttccagagctttttggggttggagggtgggaggccaggggcgttctcacagctgtgtgtcctctttcccatcctgcgcagaatgaccatgtgtagcggagcgaggctggccctgctggtctatgggataatcatgcacagcagcgtctacagctcacctgccgccgccggactccggttccccgggatcaggtaggtgctggctgcctggcccaagcaggagctggggcttcccaggcacagacgcttcctcacggtctccttcctgcagtcctttgggtccagactactagcatcgccctctgcgccc

SEQ ID NO: 129638 - DNA, 2001 bp, Homo sapiens
  chr18:905692-907693
  hyper
cggacgcctcccccagccctaggcagctcagggtcccgggtagagccagtgagcttctggccgctggagaaccccccctcccccaacccggcccacaggatgggggcagggcacggcccctagcttggtttcttttacctattcttgggacgagttaggagaacttcagctctggagcctggccgggggttgagcgtgaagctccctcggactttgctttgttactgcttgttctggactatccgggtggggtctctctctctcctccaccctttcttttcatttcattccaattctttcccctgaagagctttctttcaagtgatccgtgttccaactgcattttgaatcccaggctgtcttggggggcgtgcggtggggagggtgttggcccggtgtgattgaggaaaagcgacttaagagagggaagaacaaggacgagactgcgaaggagggggaaaaacaggcgcaaaggaggaggaagggaaagccagcaggcaggcaggaccgggagagcagccctgcctggcccgggatggaggaaccttggcttttttcttaaccccgggtttctaaccggcaggcgcggcccaggttcccggaggcagccccagagtcgcggaccgatgtgccaggctgtggatgagccctgggtaggggagggttcgtaccagcggcgcctggggcagcgaggagcgcgcgttctgcctgcgaagctgccttctccgagccccgcccaggaacattagctctggggggccgctgatcattgatttggacggagagatgggttctgggttctgtattaggattccagcatctgggctcgaggcagggcaatatccagaaagaccccagggttcggggtacccgggccagggctgaggcgcatcgccgagcaaaggctgggtgcgaggcgtgcggaatgatgcgcttgccttgcccgggcctctccaaggatggagaaaaggcgagtgaagcagcgaagtacgactccaaccccgcccagagagtgctactagcgctggctgcacgccaagtctctccaggggtccaaagcgagagggatttgttttaacccatctctacccgtcctgtgtcaagaacggaggctgtagagggcgactgcgaagtcgccaggcactcgctggatctcggtccccctcctcgtgctctggggttgagatggggcaccgccatcgataacagatcagcgcgaactattcgtttagtggccttaaaacaccctggtttcaccctcagctattttcaagttcccgtgtgcctggcactttctccgtgcgagaagcaccggagggtgcggacgcgccacagtctgagccgccgccgaactggctaagtttaggggcatttattattcatgttcctgccagatcctcgcctgcccaaaatagaaaccgaggttctccgtgacctacatctgctcggagaagggctcccctgggctcggaggctggggtgggggtggctgaggagttggcccccgcacgccccacgcatcctctcctttgctttctgggcctccccattcgggtcttcgcgtgggtcagcgcccggtctcccagggcctttctcgtccccgcccgttgctgctttggggaggctcgggagccaggcggggaggggggcggtccttttccgtagacaggtgtgcgcgatcggcggagacgcctcggtttcccagcgcttgttgaggccgtggcccgcaggacgaccctttacccgcgaagggggggtgggcgggccgcccggcggggtaggagtggttgggtgtcgttgcctcctccttacctctgctcccacccccagtcctgggagaagagacaattctcagcggaggacttttatcacctgtgaaaatccgcgcgagccccttactttggatcctcgccgagctggggaggaacttgcactgaccacaccttctgtccccggccaccccgcaggccagaggaagaggcgtacggcgaggacggaaac

SEQ ID NO: 129639 - DNA, 549 bp, Homo sapiens; identical to SEQ ID NO: 54797
  chr18:907721-908270
  hyper

SEQ ID NO: 129640 - DNA, 221 bp, Homo sapiens; identical to SEQ ID NO: 54798
  chr18:908299-908520
  hyper

SEQ ID NO: 129641 - DNA, 40 bp, Homo sapiens; identical to SEQ ID NO: 54799
  chr18:909044-909084
  hyper

SEQ ID NO: 129642 - DNA, 105 bp, Homo sapiens; identical to SEQ ID NO: 54800
  chr18:909183-909288
  hyper

SEQ ID NO: 129643 - DNA, 315 bp, Homo sapiens
  chr18:909318-909633
  hyper
cggtgggcagtgcgagccccgggccctccccgaaggctcccgcgtggggtggggcccgcctgctccccgcggcgattgaacctgtgtctcccgccccgccaccctcttcccgacccctttgcttgcagtgggagcctcggcggcggcgcgggggacgacgcggagccgctctccaagcgccactcggacgggatcttcacggacagctacagccgctaccggaaacaaatggctgtcaagaaatacttggcggccgtcctagggaagaggtataaacaaagggttaaaaacaaaggacgccgaatagcttatttg

SEQ ID NO: 129644 - DNA, 184 bp, Homo sapiens; identical to SEQ ID NO: 11591
  chr18:961751-961935
  hyper

SEQ ID NO: 129645 - DNA, 30 bp, Homo sapiens; identical to SEQ ID NO: 11592
  chr18:1664281-1664311
  hyper

SEQ ID NO: 129646 - DNA, 30 bp, Homo sapiens; identical to SEQ ID NO: 11593
  chr18:1777065-1777095
  hyper

SEQ ID NO: 129647 - DNA, 30 bp, Homo sapiens; identical to SEQ ID NO: 54805
  chr18:2105039-2105069
  hyper

SEQ ID NO: 129648 - DNA, 286 bp, Homo sapiens
  chr18:2571377-2571663
  hyper
acctaactttaggggtcgtgccagtcttcgtagagacggccacactggcccacagaccccagttcctggggtgacgcagctgggcgcgaccagcacgcagccttccagcgacgaggcggtcgcatggaagttactgcgcgcgtcgtgcgtaatgacgtcagcgccggcggagaatttcaaattcgaacggctttggcgggccgaggaaggacctggtgttttgatgaccgctgtcctgtctagcagatacttgcacggtttacagaaattcggtccctgggtcgtg

SEQ ID NO: 129649 - DNA, 30 bp, Homo sapiens; identical to SEQ ID NO: 54808
  chr18:2655164-2655194
  hyper

SEQ ID NO: 129650 - DNA, 1881 bp, Homo sapiens; identical to SEQ ID NO: 54809
  chr18:2846544-2848425
  hyper

SEQ ID NO: 129651 - DNA, 742 bp, Homo sapiens; identical to SEQ ID NO: 11596
  chr18:2906054-2906796
  hyper

SEQ ID NO: 129652 - DNA, 167 bp, Homo sapiens
  chr18:2907033-2907200
  hyper
gaccgggagcggcaccgtccccggcgcagaaggcttcgcgggcgcaccaggtgaggcccggggctgcgcggggaggagcgcggggctctcccggaacttccgcctgagcctcggggtctgctgaggggcgtggcggttcggggtccagccttcgggggggcaagttc

SEQ ID NO: 129653 - DNA, 165 bp, Homo sapiens; identical to SEQ ID NO: 11598
  chr18:3012398-3012563
  hyper

SEQ ID NO: 129654 - DNA, 30 bp, Homo sapiens; identical to SEQ ID NO: 54813
  chr18:3012979-3013009
  hyper

SEQ ID NO: 129655 - DNA, 30 bp, Homo sapiens
  chr18:3013385-3013415
  hyper
cgccgagcgccaggcgtgcggcttctcacc

SEQ ID NO: 129656 - DNA, 30 bp, Homo sapiens
  chr18:3245923-3245953
  hyper
tttttctattcctcccgcccccatccccaa

SEQ ID NO: 129657 - DNA, 420 bp, Homo sapiens
  chr18:3246158-3246578
  hyper
tggagaggacgctggcggagctggtgctctcgtggtggcaggccaccaccctgtggaggtgtccatgcattgcaagtgctcgcaagctccaggaacaaacgcatccgcgcagccgtctggggtttgtcccgtcgctgccagccctctcgctgagtccccgccctcgccgataagagcccacttaggacccccattacatggatggcttcccaggacctgcccttaaagactccgatttagtaggttggaaatgacgcaattatttttatttttaattagtaccccaagtcattctttaccatcaaggaagtttgggaaacagatcacttttgtttcaatcacctgtggaactggagcagttatttttttccccagcgactttaccacgaagttaactttggaatacgttagtggttaata

SEQ ID NO: 129658 - DNA, 818 bp, Homo sapiens
  chr18:3246851-3247669
  hyper
acaagtcttccttatcggattctgggcggaaaaagataaagtcggggaggactttctctttttaataagattcatcgttacgaattgttctaggcaagcagacctcaggagaaataggcccaagttttgattcctgttttcaccaagtcgcaagtcctaatcgtagcaagaggtgcggggaagagtcgccttccttcctgcatagtgggatccaagtcaggctgtccttgttagccagggtcaaaggggctctgccagggaaaaacgacggcaaatgtttttcaagaggaagtctccagccacttgtgacctgggaaatccgtctgggccaaaaagatagtggaggcttggctgagggccccagggacacacgtttcctcccgtatggagggggcgggactcttaataaaattacactgcacacagagctagcatcaagatccgctcccgggatacgcgcactgctccggggccctcaggcggagacccagaccccgcgcggggcgtcaagcgcaggcgcactaccgcccacaagctggagcccggcttcggggcggggcgagggtcagtcacgtgggcccgcagccctctcctcgatttccctacaaggacttgggccgacgggccccgcccttcgccgtgccctggaatgtgcggccaggcaaagccacaggacggacgcaaccatctgcggaaaggataggggggaggaagacttaacactgcaacaacaggtacaaaaaagaaggaaactcagtaacaggacccagaggaccattatatattgctctatattctaggtcgcccactttacactt

SEQ ID NO: 129659 - DNA, 45 bp, Homo sapiens
  chr18:3248118-3248163
  hyper
gcttcgctcactggcgccttgagcttgggcgactgccgggcccgc

SEQ ID NO: 129660 - DNA, 30 bp, Homo sapiens; identical to SEQ ID NO: 54817
  chr18:3248839-3248869
  hyper

SEQ ID NO: 129661 - DNA, 33 bp, Homo sapiens
  chr18:3261694-3261727
  hyper
ggcaactcagggttcggcgccaggggaccccaa

SEQ ID NO: 129662 - DNA, 30 bp, Homo sapiens
  chr18:3261997-3262027
  hyper
ccgctcggcggacacgcagaccccgccggc

SEQ ID NO: 129663 - DNA, 36 bp, Homo sapiens; identical to SEQ ID NO: 11600
  chr18:3262088-3262124
  hyper

SEQ ID NO: 129664 - DNA, 60 bp, Homo sapiens
  chr18:3262504-3262564
  hyper
gctggagaagtggccgggtcccggccgtgcgtgggccggccctgcgccacctgggtgacc

SEQ ID NO: 129665 - DNA, 632 bp, Homo sapiens; identical to SEQ ID NO: 11602
  chr18:3447897-3448529
  hyper

SEQ ID NO: 129666 - DNA, 36 bp, Homo sapiens; identical to SEQ ID NO: 54821
  chr18:3448759-3448795
  hyper

SEQ ID NO: 129667 - DNA, 3100 bp, Homo sapiens; identical to SEQ ID NO: 54822
  chr18:3449164-3452264
  hyper

SEQ ID NO: 129668 - DNA, 29 bp, Homo sapiens
  chr18:3453396-3453425
  hyper
gtgcagggctgggcgcggtggttcacgcc

SEQ ID NO: 129669 - DNA, 89 bp, Homo sapiens
  chr18:3453724-3453813
  hyper
tcgctgcttagggcggtgggatcctcaggccatgttgtggctttctccacaacatttccttgtatgtggatagcgtgaaagaagcttgt

SEQ ID NO: 129670 - DNA, 401 bp, Homo sapiens; identical to SEQ ID NO: 11606
  chr18:3498977-3499378
  hyper

SEQ ID NO: 129671 - DNA, 30 bp, Homo sapiens
  chr18:3594158-3594188
  hyper
gaaacctaccaagccggaggactgtgctgt

SEQ ID NO: 129672 - DNA, 30 bp, Homo sapiens
  chr18:3771555-3771585
  hyper
tgccgtgtgtactgcgggacttgcataata

SEQ ID NO: 129673 - DNA, 1037 bp, Homo sapiens; identical to SEQ ID NO: 11607
  chr18:3879109-3880146
  hyper

SEQ ID NO: 129674 - DNA, 30 bp, Homo sapiens
  chr18:3887090-3887120
  hyper
taaaggaagggcctgcgctggccccatagg

SEQ ID NO: 129675 - DNA, 896 bp, Homo sapiens
  chr18:4453794-4454690
  hyper
agcattcacctcccacgaccgggagtcagtctctgtgtcaggagtaaggagtgaagagtctcgcctggatccacaaaagacgtgacatctcccacccagcgtcccactgcttgccgcctggctacctttaaccccttgccctccgcacatcctccccttctctagcagaaaattccgcagcgctacggtcgggctggaggcaagccctgcagccgggggcgagcgcggcactcggacacaggcactcagtgtctccggcgccggcagccgagccacgggccaccccttcccacggcctcccggtgccacccagcgaggccgggacagcgcgccttccgcaaaaagcgcagcagccgaagtcctgaaagcagggtcttcatcgccgcgggccctccgaaggtgcctctcccagctgcagccgcccctcaatgaaagtgcaatgtgttatctcgcccagcccagaggagaggtccctgtttggccttggttccagcccggctcattcaattcgctgaatgtcgggtctcccggcccgccccgcgattctccgggaattggccttggccgcgggcagggggcgactctccagtgacctcctccttggaccccatttctctctctctctctctctctgtgcctgtctttgtgtctctgtttctttggctttctcttacaaacgcacgggggagttggtccttttccacaatgccaaaatgtcacccaaaaagctagtgcaacaacttgctttgcaaacgacccaggagcctgccgagaaagccctgcggggagcagccccctcctcccctgcaaggtgcatcgggggtggggtgggggtgcgaatttgaccggtggacatgaccgggacaggggaccggtgttctcctcccctccccctt

SEQ ID NO: 129676 - DNA, 253 bp, Homo sapiens; identical to SEQ ID NO: 54827
  chr18:4454777-4455030
  hyper

SEQ ID NO: 129677 - DNA, 13 bp, Homo sapiens
  chr18:4455258-4455271
  hyper
cggaggctgagcg

SEQ ID NO: 129678 - DNA, 167 bp, Homo sapiens
  chr18:4455561-4455728
  hyper
gggtgggaagtgcgctcgccccggaccgaggggaaagcccaacatccccgggatggaacagagaggcggccacccgtgagtgggcgtgacccattggttcccttgcgcagcatctgtggagaattaagctttcccctcctctcttgccagccgttgttcctaatctt

SEQ ID NO: 129679 - DNA, 8 bp, Homo sapiens
  chr18:5196250-5196258
  hyper
cgttcaca

SEQ ID NO: 129680 - DNA, 696 bp, Homo sapiens
  chr18:5196575-5197271
  hyper
cgcctccttctcctcgggaggccaggaggacccgggtcactttgccaattctgcggagggggaagtagcagtgagggagattcccacgcaagtagcccgaagcccactactctttgccccacctctccactctcttgcccgtgtaggtgccggtgctgctggcgaaagtcccagttcttaaggctcctgagctcggaaggggtgtggaggagccagatgggaagagaagcagcgggacgagggcgaggaagggctggagattgttagaggacagatggggcgggactggggagaggggcgaaggcgacgcgccgaggcactcctccgccccatgagcacagacagtaactccgaaacgcgcagatgggccgtaaggtaaagaggccttttttccctctcctctccgtcctctaccctgctcccctcctagacacttggtgaaaaagcaaggtgcggtgtacctggagcgaacaccatgatttcttccagccgctacgcccccagattaagagagaaagacaggcagacggaggatgggaagaaggccggacttggcggggtccggtgcaggagggcgcgctgggcgggcggcgggcggggcggtcagcaccccggacagctcccgccgctagatcctggggccgcagctccagccgccgccgcgcgctctgcctccacaatgcggccacagcggcg

SEQ ID NO: 129681 - DNA, 319 bp, Homo sapiens
  chr18:5197329-5197648
  hyper
cgacgtacactgctgcttagggagcaaagcacttccaccgctttcacgcgacgaaggtcggaagagcaagagagagaaaggtaaacttcccggcaggggacagtgaattgcttttaattacctgctgtggctcgtcgccgtggatattggactgacatttaagatagatttgtcaaaaaaaaaaaactctaagagctttctttactctcgaggatgactctgagttctccgagttgggctggctcgaatagaggggcgggtctgtcaagttaataggtcctggaggtccgtgagtcctctctcgcgagtcccagtcctc

SEQ ID NO: 129682 - DNA, 1486 bp, Homo sapiens; identical to SEQ ID NO: 11610
  chr18:5237297-5238783
  hyper

SEQ ID NO: 129683 - DNA, 44 bp, Homo sapiens
  chr18:5295776-5295820
  hyper
gccccagccccttccgcaccctggcccgcgcttacctgcagcct

SEQ ID NO: 129684 - DNA, 30 bp, Homo sapiens
  chr18:5296126-5296156
  hyper
ggtctctaagtgggcgagcaaagaaagggt

SEQ ID NO: 129685 - DNA, 30 bp, Homo sapiens; identical to SEQ ID NO: 54835
  chr18:5297083-5297113
  hyper

SEQ ID NO: 129686 - DNA, 429 bp, Homo sapiens; identical to SEQ ID NO: 54836
  chr18:5542728-5543157
  hyper

SEQ ID NO: 129687 - DNA, 116 bp, Homo sapiens; identical to SEQ ID NO: 11613
  chr18:5543430-5543546
  hyper

SEQ ID NO: 129688 - DNA, 362 bp, Homo sapiens; identical to SEQ ID NO: 11614
  chr18:5543899-5544261
  hyper

SEQ ID NO: 129689 - DNA, 1282 bp, Homo sapiens
  chr18:5628201-5629483
  hyper
tagaccctgctctaccgggttagaatctgtttctaatcacgtggaatttagatttaaaccacagttagatttgggatttaccatcgtttctactttcattcatttagtggcttccagccctctcgcggcccagtcttaatccatcgcacttcagagggaattacgagggagttgcggactggcgggggcgggggtctgtaactaacaccaggtgcctgtgagagagccccaagggcgggggcagcacctcctggctgggttgggtccgcctggcctcgcctcgcctccgggatccttggcgctcagcgccgccctcccgctactgcgctacccgccagagcccggcgtcttccctttccttgtcttgtggacgccgcccttcgctcccgggaggatttcgcctccagcacctcaggcttttctggcgcaaaggtcgccagcccgagcgagcccaggcggcggcttcacttctgcagagggaaagcgaaagacgcggccggcgggccgagggggcggccgaacgcgccgcgtggttgctgctcccgaatccgcagcggcggcgccagggcggtcaccgagccctgcggaccccggctcaacttccagcgccactcgggtgccccgagcccgccgcagctcccggcgcgccctccagccgcggcacgcagcccctgacgcgcccggggcgccctcccgcagcaccagccaggccaccccacctcccgcgccgcgcttccccgccagccgccggccaggagctccccggcttctgagcaggacgcgccaaagggagttgggaggctcagcagcccccagcgtcgccttctcgggtgacgtgacgctctctctggagcgcgggcccgcctccgccaagcctccaccgcaggtccttacagccgagccacgggaagatgcaacgccgggcgaggggcgcctcccggattttgaaaaacagcctcattcgcctcgggaacgcctcgatcccccacccgcaccctttggccagatgattttaatcctgggattccgcgttggtcgtgggggtaccgggagctggagctggaggagaggagccggcagcgcggagttgccggggtgcagctgcgcgcagctggcggcgaggggaggcggtccctgcggctccgccgggctgggggaactggctcctgcgcctctgcctcccggaggatcgcactcgctcatccttacacaccacacacacacacacacacacacacacacacacactgccgctagcgccccccacgccacaagccggaat

SEQ ID NO: 129690 - DNA, 256 bp, Homo sapiens; identical to SEQ ID NO: 11616
  chr18:5629569-5629825
  hyper

SEQ ID NO: 129691 - DNA, 530 bp, Homo sapiens; identical to SEQ ID NO: 11617
  chr18:5630124-5630654
  hyper

SEQ ID NO: 129692 - DNA, 112 bp, Homo sapiens; identical to SEQ ID NO: 11618
  chr18:5630693-5630805
  hyper

SEQ ID NO: 129693 - DNA, 46 bp, Homo sapiens; identical to SEQ ID NO: 54843
  chr18:5891336-5891382
  hyper

SEQ ID NO: 129694 - DNA, 295 bp, Homo sapiens; identical to SEQ ID NO: 54844
  chr18:5894650-5894945
  hyper

SEQ ID NO: 129695 - DNA, 1228 bp, Homo sapiens; identical to SEQ ID NO: 54845
  chr18:5895017-5896245
  hyper

SEQ ID NO: 129696 - DNA, 48 bp, Homo sapiens
  chr18:6414078-6414126
  hyper
gagagcaggcgagggcgactgtggccggcgcgccccccgcagttccag

SEQ ID NO: 129697 - DNA, 241 bp, Homo sapiens
  chr18:6414203-6414444
  hyper
cgctcccgaggctgggcagaactcgcagaggaagacaagggcagaaagcgggtggagggaggcagcgctcgcccgtccgggcacacgacacttgtcggctgagggggacacgcgggcagacgggggcgttagccccagaggaaacaaaagccaaatgcccaccgccgggcgctcgatggccggaggactgcctgggggccctcaggagtcccgtcccgtcccgctcccccggtcccaggct

SEQ ID NO: 129698 - DNA, 760 bp, Homo sapiens
  chr18:6414507-6415267
  hyper
cgaggcgccgggctctgcggcggccgcgcccgtccaaagtaggcgacaagtgaggcagcgcctctcgcggggagcccggcgcgcgccccggcggcgaaagagaaagagaaagagcctgggccgggaccggggctatccccaaccgccaccgcccccaccggcccggccctcgccgcgggagtcgtgcaggcccctctacctgcccggggatggggccaccccgcgcggcggcggccgtgggcacccacgcgggctcgcgaccatcccacgcgggcggcggcgtccttcttacccccagcggagcggcgcctgcccgcaacgccgaccgagctacaggcggggggcgagtcggagcgcgaggttccgccagcccaggctgcggcgccgctgccccgcggtgcccggcgggaggggcgcgagggtgcacgcgcggggtgggggcgcgggagccgccccctgcccgccccgcgcgcatgctcccgccgcacctgcctcgctcagtgttccacaccccggggagccgggtggcgctgggcccgccgaggtcggggctttcccatgggagggaggtggctgcggcggaattttcagatgcgtccttctctgtattcgttccctgggaaggattcccccaaatcttggctacttcctgcctgccagcttgctccctggcagcgaagtcccagtagctcacccatgcttcatcccagctcttggggttcaccgtctgaaggctctctcctccggatccctctcggtc

SEQ ID NO: 129699 - DNA, 30 bp, Homo sapiens; identical to SEQ ID NO: 54849
  chr18:6646431-6646461
  hyper

SEQ ID NO: 129700 - DNA, 30 bp, Homo sapiens; identical to SEQ ID NO: 54850
  chr18:6659987-6660017
  hyper

SEQ ID NO: 129701 - DNA, 1005 bp, Homo sapiens
  chr18:6729208-6730213
  hyper
aaaaacaaactttactagagccgctagcaggagccccaaaggatcccggccggtttccagtttcctagaagcggggatcacacctccccgcgcactcccgacacatgcgcgcgcacgcacacacaggcgcacacacacagacacacaggcgcgcgcacacaggcacacacatggacacacgggcgcgcacacacaggcacaaacacaggcgcacacataggcgcacacacacacaggcgtgcacacgtacacaggcacacaaacaggcacacacaggtacacacgcacacacagacaggcacagacgcacgcacacacacaggcacacaaacaggcactcacacaggagcgcgcgcgcgcgcgcgcacacacacacacacacacgcactatgcccgcccccactccagcccgtgggcgtggttcccagcgtctgcgaattcgcgcgcccggggcggggcgggcctgcccgggggcccctgacagccgcgggagagagcggctggtcgcacctcgggccgcgccgcccagctgctgacagcctcccggcgcgccggtccatgctggtcccggtctttgttctggggccggcgccgagacatgcgcggctgacgatggaggtggaggactcgggcggcgtggtgctgaccgcctaccactcgtacgcgcgcgcccagccccccaacgccgagtcgcgctgcgcgccccgcgccgcagccagccacccgctcagcaggtacccggagccgctcccaccagggcggcgcagtcgcgctgggcttggggggttcgccgtgcagctgcgccttgtgcctgagcgcacgaccgccgtcactggatgttgtttcaagttttggtggactagatgagtgagcctggggttctttgcattgtctttgactggaggtgggaaacgctcgaaggctccaccagcctgggctgaagtcgttggctagcagagattagcaagcagcaggattgcattcttgatacgatttgaggataag

SEQ ID NO: 129702 - DNA, 30 bp, Homo sapiens; identical to SEQ ID NO: 54852
  chr18:6795203-6795233
  hyper

SEQ ID NO: 129703 - DNA, 30 bp, Homo sapiens; identical to SEQ ID NO: 54853
  chr18:6950931-6950961
  hyper

SEQ ID NO: 129704 - DNA, 30 bp, Homo sapiens; identical to SEQ ID NO: 54854
  chr18:7037492-7037522
  hyper

SEQ ID NO: 129705 - DNA, 322 bp, Homo sapiens
  chr18:7116449-7116771
  hyper
cgtttccagctccggtccagtgcttccatcatgaatgcttgaatgaatgagatggtcgcgtttctgcagagctcacaactcagcacaatgcccaaacacacgtttcccacgagggcactgcaaattccgcccactacttttgactcgaatttttttttaatgaagtttatattcgtgggaatacgcccattgtcatgtgctgcatacattaagatgttttcaacaaatatttgtgactgcctagccaacacgaagccacgctgcgaagacagctctaggggtggcgtgggtgactagggttgtcccccaaaagggaaaagaa

SEQ ID NO: 129706 - DNA, 56 bp, Homo sapiens; identical to SEQ ID NO: 54856
  chr18:7116826-7116882
  hyper

SEQ ID NO: 129707 - DNA, 260 bp, Homo sapiens; identical to SEQ ID NO: 54857
  chr18:7117059-7117319
  hyper

SEQ ID NO: 129708 - DNA, 185 bp, Homo sapiens; identical to SEQ ID NO: 54858
  chr18:7117374-7117559
  hyper

SEQ ID NO: 129709 - DNA, 475 bp, Homo sapiens
  chr18:7117615-7118090
  hyper
cgcctgcgggggacagggaccctaggacccgggccgggctcacctctctgccggcactgcgcggcgacacacagcagcaagaccaggagcacgcccccgcgcatctcgcctccgccgccactcggtgggtctggggagaaagccgcgcgcccgcctggaacgctccacgggacgcgagtccgcgctgccctggccccgccgctcctggagtcctgccgcccctccctccagccgccctcggacacacccctcggctgcgccccgccccgccccgtcccgccccggcttggccccgccacccagacccctcccccgggggcgcccagcttggcctctgggtcccggcgcacgcggaccccaagtcggggaggccgggctgaccgcggccgcctccccggctccgggtaggaggtgggcagagaaggtgggctgaggggaggagaaactgggctgcgggggtccgggagggtggatt

SEQ ID NO: 129710 - DNA, 44 bp, Homo sapiens
  chr18:7118131-7118175
  hyper
cggccctgcagtccccgggccaggacccacgcgcccctgccagg

SEQ ID NO: 129711 - DNA, 30 bp, Homo sapiens; identical to SEQ ID NO: 54860
  chr18:7127507-7127537
  hyper

SEQ ID NO: 129712 - DNA, 30 bp, Homo sapiens; identical to SEQ ID NO: 54861
  chr18:7204771-7204801
  hyper

SEQ ID NO: 129713 - DNA, 30 bp, Homo sapiens; identical to SEQ ID NO: 54862
  chr18:7419870-7419900
  hyper

SEQ ID NO: 129714 - DNA, 30 bp, Homo sapiens; identical to SEQ ID NO: 54863
  chr18:7542474-7542504
  hyper

SEQ ID NO: 129715 - DNA, 212 bp, Homo sapiens; identical to SEQ ID NO: 54864
  chr18:7566543-7566755
  hyper

SEQ ID NO: 129716 - DNA, 1937 bp, Homo sapiens; identical to SEQ ID NO: 54865
  chr18:7566780-7568717
  hyper

SEQ ID NO: 129717 - DNA, 114 bp, Homo sapiens; identical to SEQ ID NO: 54866
  chr18:7568792-7568906
  hyper

SEQ ID NO: 129718 - DNA, 30 bp, Homo sapiens; identical to SEQ ID NO: 54867
  chr18:7605703-7605733
  hyper

SEQ ID NO: 129719 - DNA, 30 bp, Homo sapiens; identical to SEQ ID NO: 54868
  chr18:7647070-7647100
  hyper

SEQ ID NO: 129720 - DNA, 30 bp, Homo sapiens; identical to SEQ ID NO: 54869
  chr18:7789601-7789631
  hyper

SEQ ID NO: 129721 - DNA, 30 bp, Homo sapiens; identical to SEQ ID NO: 54870
  chr18:7926629-7926659
  hyper

SEQ ID NO: 129722 - DNA, 30 bp, Homo sapiens; identical to SEQ ID NO: 54871
  chr18:8003570-8003600
  hyper

SEQ ID NO: 129723 - DNA, 51 bp, Homo sapiens; identical to SEQ ID NO: 54872
  chr18:8016760-8016811
  hyper

SEQ ID NO: 129724 - DNA, 30 bp, Homo sapiens; identical to SEQ ID NO: 54873
  chr18:8129093-8129123
  hyper

SEQ ID NO: 129725 - DNA, 30 bp, Homo sapiens; identical to SEQ ID NO: 54874
  chr18:8249539-8249569
  hyper

SEQ ID NO: 129726 - DNA, 200 bp, Homo sapiens
  chr18:8367258-8367458
  hyper
tgagatggggaggaccggattcgaaatgcctgggccgcctgttctgggcccgccccgccaggtgcctgtgctcgggaggggccttgcccagcacgcattctagaaggaagcggccccgcgcctcctccctcgcaattaccgccgggtcggaggcatccgggcggtgcgaagtcagcaccgtgccgagcagttgagagcag

SEQ ID NO: 129727 - DNA, 81 bp, Homo sapiens
  chr18:8367503-8367584
  hyper
cggcacctgttccgcggaagcgcggccaaagttggaagccctggcggctgctgcctgcagccgacgcgcgggggcgcccgg

SEQ ID NO: 129728 - DNA, 30 bp, Homo sapiens; identical to SEQ ID NO: 54876
  chr18:8379043-8379073
  hyper

SEQ ID NO: 129729 - DNA, 30 bp, Homo sapiens; identical to SEQ ID NO: 54877
  chr18:8383007-8383037
  hyper

SEQ ID NO: 129730 - DNA, 30 bp, Homo sapiens; identical to SEQ ID NO: 54878
  chr18:8470342-8470372
  hyper

SEQ ID NO: 129731 - DNA, 31 bp, Homo sapiens
  chr18:8608806-8608837
  hyper
gaccgagcagtgccacggcccggtagagggt

SEQ ID NO: 129732 - DNA, 39 bp, Homo sapiens
  chr18:8608901-8608940
  hyper
cggcccggcggcgcggcctcaggtcggggcctttccagc

SEQ ID NO: 129733 - DNA, 30 bp, Homo sapiens
  chr18:8705685-8705715
  hyper
ggaggtgccccggacgcgaagctgcagccg

SEQ ID NO: 129734 - DNA, 200 bp, Homo sapiens; identical to SEQ ID NO: 54879
  chr18:8705986-8706186
  hyper

SEQ ID NO: 129735 - DNA, 44 bp, Homo sapiens; identical to SEQ ID NO: 11630
  chr18:8748271-8748315
  hyper

SEQ ID NO: 129736 - DNA, 30 bp, Homo sapiens
  chr18:8755160-8755190
  hyper
acgactgtggctcagcgccaccaaaggact

SEQ ID NO: 129737 - DNA, 68 bp, Homo sapiens
  chr18:9102406-9102474
  hyper
taaatccaggcgggcgcttcgttacccaggagcccaaggtgcagctccgggacgcttcttttcaaggc

SEQ ID NO: 129738 - DNA, 30 bp, Homo sapiens
  chr18:9102738-9102768
  hyper
gccatgttcttctccgcggcgctccgggcc

SEQ ID NO: 129739 - DNA, 39 bp, Homo sapiens
  chr18:9136541-9136580
  hyper
cggtgacactagtccgagtggggcgtggagaccgaccag

SEQ ID NO: 129740 - DNA, 30 bp, Homo sapiens
  chr18:9335087-9335117
  hyper
gcgcacaggccggacgccgggagccagcag

SEQ ID NO: 129741 - DNA, 71 bp, Homo sapiens; identical to SEQ ID NO: 54882
  chr18:9474875-9474946
  hyper

SEQ ID NO: 129742 - DNA, 169 bp, Homo sapiens; identical to SEQ ID NO: 54883
  chr18:9475346-9475515
  hyper

SEQ ID NO: 129743 - DNA, 30 bp, Homo sapiens
  chr18:9615078-9615108
  hyper
cttggaggaagcgccgcctccccacccgcc

SEQ ID NO: 129744 - DNA, 650 bp, Homo sapiens
  chr18:9707861-9708511
  hyper
tgggacccagaatgtcgcttgaggatgggacccccgcagacctccacgcgctgccacgcaaacggcctcggccgagagcattcgctttccagatgagaatggcatcttcagggacccgctggtagtggggccaggtctccacagggccggtccagtccttcctacccacccgggccctgcggccaggcggggccgggaggggcggatgccggagggcgctgggggaggccgacccgcgcggggctggtccgagggcggaggcaatccgccggcgacgccgcaggtcccgggtggctgacgccgtccgggggcgttcctgggagctgggggccggcgaggctggacccgacgcgcccgggaggagccggccggcggccacgtgacccaccgcggcggggccggcggcccagaaatagcagcggcggcggttccgcccgcgggcggcgcgagcgaggggcagaggcgagagacgccggcggggcgcgggcgcggcggccccggaggatgctgctgagccccggcactgcctggctgcgagcacatgatggcgatacgggagctcaaagtgtgccttctcggggtgagtcctggccgccacccgccggcggaccccggcccgcgctctcgcgccccttcgctcccctattccc

SEQ ID NO: 129745 - DNA, 826 bp, Homo sapiens
  chr18:9708783-9709609
  hyper
tccccggatccgcggcgacctcgcggggacccccagcggggacggggcagtggcggcgagtctggggccccgagggctttctcctccgcttttgatagtttccttccggcagaaagtttaagttgctcagccaagtcgctgagtgctcttttgcctcctgggggcaattgatttactcacgtaaaacagaaaaataaaaccaaaagcgaacccagccaagggggtgaaagccgagggcgcggccggggtggaaggtgaggcagtgacctgtgcggagcgcgccctgcaaacttccctgctgcgggtgaaagaagctgcctgggaaagtcctccccaccatcactcccctaaagtggggttttctccgcccgaagaagccttaaagcagccagaaacaaaaaagcagtcaatccgtgcggcccggggactgcagacaggggacccggcgaggacgcagggagccgctggcgaaccgcccctgggaattcagataaacgtagggtcgcttcctttcgggggcccactccgcattccagaattccttcttctaaaagaagagccggttctaagggcgttttcagcagccattagcatctggtgtacccgcccgtgtcattggcaaagctggtctcatgaaaaccatttcctaaaaaagggcagcgaaagggtcgcattcttgtgcgaactgatctgtcaagatgggggtacaagaactgtagaaagaggaaatgatttcggtgaggactgaattgtgccagcgtctctaggcttcctctaggctcttgtggaacctccggcaggctcccatcatcggctcccatcaccg

SEQ ID NO: 129746 - DNA, 106 bp, Homo sapiens; identical to SEQ ID NO: 54886
  chr18:9771586-9771692
  hyper

SEQ ID NO: 129747 - DNA, 101 bp, Homo sapiens
  chr18:9913710-9913811
  hyper
ggaagagtgtgatgcgctgccagagcagtttctctagttccgtactcggagctcaaggtgacagaggactgcgcttccagccctgcgctgcgcatcgcgtc

SEQ ID NO: 129748 - DNA, 30 bp, Homo sapiens
  chr18:9915083-9915113
  hyper
gcgtcagccgcaaacggagagttgtaggtt

SEQ ID NO: 129749 - DNA, 95 bp, Homo sapiens
  chr18:10032589-10032684
  hyper
cgcaggccccaggaccgctctaggagcccggaaggcctgcgcaggtggggggcaccgtgttccggaagcctggccccgagcgctgtgcggggcgc

SEQ ID NO: 129750 - DNA, 36 bp, Homo sapiens
  chr18:10032841-10032877
  hyper
cgacttcatgcccgggagaagcggccaaggccgggc

SEQ ID NO: 129751 - DNA, 855 bp, Homo sapiens
  chr18:10454623-10455478
  hyper
ggaaatatgaagagacgctgcagctgcggtggcggtggcggccactgcagctcagagcggcgcacgcggcggccggggcgggacgcggggccgggcgcggagaagtcggggcgggcggcagagaggccgggacgcggaccgggccggggcgcccacagccgcccgacggcgcccagagagcgcgcgccccgcagccccgcgcctagcccgccgggcatggggcgcgcggcagccgcctgaagccccggcctggcccggccgcacccggccggaggcggagggcagagcgcgcgcccagttgcccgggcaccaaatcggagcgcggcgtgcgggaggccccagagcaggactggaaatgtcctggccgcgccgcctcctgctcagatacctgttcccggccctcctgcttcacggtgagttcccgagggccactcgagcgctcccagccggcggaggcagcccgggcgccgcggagcccgcggaggcgtcgggtctggatcgcggcacggcctacactgtccccttggcggggcgggtccgaggggagccccgcgcctgccgtctcagccctgggagagggggctctgcccactttccgaggcttgggaccgctctcccccagggcgcccggagctctttgctgcgggactgttctttttggaagggtggaagctctcccacgcagacaccttttatgtccagaatccgttgcatccagtccgagggaaactttcgtccgctctgctggattttccaactgtacactgccatgaaatcgccggctctgcgagcctttttccaaaatgccagaatgcagcaggctcttgatgtgttccaagcgtttaggagagtgga

SEQ ID NO: 129752 - DNA, 69 bp, Homo sapiens
  chr18:10525827-10525896
  hyper
catcagtatctcaccgcgcctgcgctagatgccctaggtggggccagccttgacgcgctgcgcctgcgc

SEQ ID NO: 129753 - DNA, 30 bp, Homo sapiens; identical to SEQ ID NO: 54892
  chr18:10526123-10526153
  hyper

SEQ ID NO: 129754 - DNA, 30 bp, Homo sapiens
  chr18:10526417-10526447
  hyper
gcagtgctgcggggcgagggcttctctact

SEQ ID NO: 129755 - DNA, 130 bp, Homo sapiens; identical to SEQ ID NO: 11637
  chr18:10647663-10647793
  hyper

SEQ ID NO: 129756 - DNA, 218 bp, Homo sapiens
  chr18:11148406-11148624
  hyper
gctggcctcccgaatcgaaccccagagcaccagagcccttcactttgttaagaagtcccccacccaggcgcccccctcgtcctcctcaagtgccctcggaaagcggaccagactcacctactgccaggcagatgggcagcagcagcctgaagatgagcccgcacaccacttctgaggccatcgcgtcggtccggcgagtcggagcagaggggcgaggc

SEQ ID NO: 129757 - DNA, 352 bp, Homo sapiens; identical to SEQ ID NO: 11639
  chr18:11148741-11149093
  hyper

SEQ ID NO: 129758 - DNA, 158 bp, Homo sapiens; identical to SEQ ID NO: 11640
  chr18:11149115-11149273
  hyper

SEQ ID NO: 129759 - DNA, 461 bp, Homo sapiens; identical to SEQ ID NO: 11641
  chr18:11149298-11149759
  hyper

SEQ ID NO: 129760 - DNA, 220 bp, Homo sapiens; identical to SEQ ID NO: 11642
  chr18:11149779-11149999
  hyper

SEQ ID NO: 129761 - DNA, 1037 bp, Homo sapiens
  chr18:11689066-11690103
  hyper
ctgtccgcagctgcgcgccgggctcagacggcattatttacggtacagaatactcgcccgcgcgacggtatttacggtaacggggaccagcctgggcggcagtatttacggtaacgaaagccagctgtatttacggtagcgagggctggaccggcggcggcatttacggtaacgggggccgggctcgcggaggcccgtcggttcggtccgctctgggcgttagcaagtgatctccagccaaggcggccgccaccccttgcacacagcagaaaatgcaaaatgaccctctggggcagtgaggggctgtggccctcggccccggcctgccgcacccccttcccgcagctggcggccggcagcgccgaacagggtccgggtgcagccccctcccgcccctccgctgaggcgccggcctgaactgggcgcgggaaccaggccgccctcggcgcccagcctgccctagtcccgcgcgccgcccccgctgtgccgcgcccacatgggtctgtgctacagtctgcggccgctgcttttcgggggcccaggggacgacccctgcgcggcctcggagccgccggtggaggacgcgcagcccgccccggccccggccctggccccagtccgggcggccgcaagggacacggcccggaccctgctccctcggggcggcgaagggagcccggcatgcgctcggcccaaagcagacaagccgaaggagaagcggcagcgcaccgagcagctgagtgccgaggagcgcgaggcggccaaggagcgcgaggcggtcaaggaggcgaggaaagtgagccggggcatcgaccgcatgctgcgcgaccagaagcgcgacctgcagcagacgcaccggctcctgctgctcggtaggtcccggccgcgaggtcggctgacgccccggggacagcgcgccgggcccgcgggggcggcgggcaccggggagcggtggcgggcaccggggagcggcggcgggaggggctcctgaatcccgggactggacccggacgggcggcgggcgcggacgggctaca

SEQ ID NO: 129762 - DNA, 131 bp, Homo sapiens
  chr18:11751500-11751631
  hyper
gtgactggtgagcctcggagggatcctcctccctgctagaatatgcatgatcctccgcgagtcttcgcccgccaggagcagggacgcgtccgagccaacacggggcgcgcgcccagacgcactttcccggc

SEQ ID NO: 129763 - DNA, 477 bp, Homo sapiens; identical to SEQ ID NO: 54899
  chr18:11752127-11752604
  hyper

SEQ ID NO: 129764 - DNA, 204 bp, Homo sapiens
  chr18:11752640-11752844
  hyper
cgccaggctgggcgggcagggccgggcgagggtcgcgcgcacctctgggccgcggagcccagacggcggccggggcgagctcctccagccaggaacccgcgtgtaggaaatccccgtgctgggggaggaggattgctcagacccggctagtggtgagagatggcagcgatatccggacacagatcacagcgttctttctgtttg

SEQ ID NO: 129765 - DNA, 30 bp, Homo sapiens
  chr18:11851311-11851341
  hyper
aggccccaccccggcgccttccgtcccgca

SEQ ID NO: 129766 - DNA, 30 bp, Homo sapiens
  chr18:11851974-11852004
  hyper
aatggcagatgaggcgggcctcgacctcaa

SEQ ID NO: 129767 - DNA, 30 bp, Homo sapiens; identical to SEQ ID NO: 54901
  chr18:11908166-11908196
  hyper

SEQ ID NO: 129768 - DNA, 805 bp, Homo sapiens
  chr18:11947243-11948048
  hyper
tcctaaggaggaaccacaaaccgcgtagactcaggccagccgctgggcctgggcctgtgtgtccctcaggcggcgacctttggcccacttcaggccggccgtatttaccagcttagaggcgccgcggcgttggcgagtcctttttcacccaccccttccctccgttctcaggcttgaacttgaacaggcactcatgactcagcaaacggtacttgatagggttctttacacgtcagtcaggctattttttaaaatcactcttcctggagatcttcaaaccagaagcaccgcgggccctccccaacgggcttctgcttacctccactacgtgatgcagtatggcccccgggaggccgcccccagattctagaggggcttaccccagacacacccgaaggaccacctcgtgacctcagaggaacagccctagacccaggagagactgccagacacccccgtggcagcccgccagggcccagctctacttgtcgcctggaggtgctgcctcccttccacgccgccccagggaatggccgcccctctggggctcctcccaatcccccttcccaggactgacaatggcccggcgccctgctttgggccaggatcggcctcgagccttcctcactagcggccaagagccggaaaccttgcgtctcagattccccgggtctgtgcacccccaccccaaccggtcttcccacccaggccccccctgatgccagctgcgggcctggacctagcccggggccctgcccctccgcccctctcgctggacagcccaggccggcgcccgagggatagg

SEQ ID NO: 129769 - DNA, 30 bp, Homo sapiens; identical to SEQ ID NO: 54903
  chr18:11980675-11980705
  hyper

SEQ ID NO: 129770 - DNA, 30 bp, Homo sapiens
  chr18:11982048-11982078
  hyper
ctctccaggggtagcgtacggggctgttga

SEQ ID NO: 129771 - DNA, 30 bp, Homo sapiens; identical to SEQ ID NO: 11645
  chr18:12038703-12038733
  hyper

SEQ ID NO: 129772 - DNA, 412 bp, Homo sapiens
  chr18:12253734-12254146
  hyper
ctcctttcccctcccgttctgcatgcccttctcactgtccccaaatgctcatgacatggccttgagagcagcgcagcgggcaggaagcccaggcgcctcggagaacctgaagggctgcaggtcccggtgtctgcggcagcttccgcatccctgcagggaaccagcggctcgctgagcctggggctgggctctgggggactccagagctggaggcaagtggcgctcacatccgtctcctcacctgccccacccgtggcctgggtttaaaatccacatacccgtctttccgcggccaaagtgatgctgccaggattggttatgaccccaactgccccgacccccagaagtgcaaaacgaacaggctggcaagtgaccaaaagagacccggggagcatctgggcttccaaggtcc

SEQ ID NO: 129773 - DNA, 310 bp, Homo sapiens
  chr18:12254304-12254614
  hyper
cgggcgggggcggggccgccgcactttaagaggctgtgcaggcagacagacctccaggcccgctaggggatccgcgccatggaggccgcccgggactatgcaggagccctcatcaggcgagtgccccgcgtccccctgattgccgtgcgcttccaatcgccttgcgttcggtggcctcatattcccctgtgcgcctctagtaccgtaccccgctcccttcagccccctgctccccgcattctcttgcgctccgcgaccccgcgcacacacccatccgccccactggtgcccaagccgtccagccgcgccc

SEQ ID NO: 129774 - DNA, 30 bp, Homo sapiens; identical to SEQ ID NO: 54908
  chr18:12271788-12271818
  hyper

SEQ ID NO: 129775 - DNA, 56 bp, Homo sapiens
  chr18:12287381-12287437
  hyper
caccgtgctcccgcccgccctgcgcccagacctccgcctgccctggaggtgaagga

SEQ ID NO: 129776 - DNA, 676 bp, Homo sapiens
  chr18:12287452-12288128
  hyper
ctcccccgagtgatggtgcagaggcgtactccctctcggggtccccactccacattccggcgtcctcggaacagccggcacaggcagggcgggcgtcagctgtccggtcgcacctccctgcaggggcattccttggcctgctgctgcctgccaggctgacccaggcgcaggcgctcaggtaaaggcagtggccagcccaagctgccgacccagccgctcctcccagcagaggccaggtgaggaggcgaggatggtgggggtcgcccagggagaaaaatctcatccgacaaggaaagcctggtgaccccctgtctgcctgggcagaactcccctcccaggaatgagctttggacaacgtggttcctcccgttgaatcaggttctgaccgagtccgctgcagctgcaggcgggggcgccctgccgagcagatacccagcggagctccggggccccgtttctactgtaagcagctgggggccaaatgtgcgcccgggcacgtctcttggcctctcccagactcggcaccctcatctgtaagaacgtgaacgatgtccgccctggacaggactgcggtcgcgagaggtgcccgggccaggcaagggacacagcgcggatctgctggtttcccccttgattccatgcgtgggcgtgaagcgtattcttgggagtcaggcac

SEQ ID NO: 129777 - DNA, 1454 bp, Homo sapiens
  chr18:12307602-12309056
  hyper
cgcgaggagtaggctgcatagacccggcgcaggaggtgttcattttcggatccagccctgtagtcactttagctaaacccggttccaaaggggtgggagtcgtcggagaggaatggcctctgtatctccggagacggaaacaccaggacgaagaggccctaagaacgtgtgcccggggtgcgaccggggggtggggggcagggggcagagaccctgaaaagctccaccgccgaaccccagggcagtgtcccggcttggctggactgggcgcgggcggctgcaatgctcccgggcgcggcgctgggaccccgcgggccacgtcggctccgctgccccgacgccagggcccgactcgcgtctccctctggcggggcaccacaaggggcagcgaaacggtggtgggggcgggcgccgcgctccttcccgtctcctccccgccagctccgggcccgtccttttccgcccggctcccggcaagggtcccccgactggcgcccgcgcgtcctccctcggctgctgcaggccgggccgcggcgtcgagcgggggcggcggggcggggcccgcagccattggcgagcggcggggcgggggcgggggcgcggagggtcggccccgggacgcgcgcagccggcccgcagttgccgctgtcgtccgcagagccagttcctagcgcagagccgcgcccgccatgagggagatcgtgcacatccaggcgggccagtgcgggaaccagatcggcaccaaggtgggcctggcgcggtgcagggcctctccgcgggtcggctgctggcgggccccgggtctcccggcgcgacccccgccggggcgcgcacccgctgtgcgcccctgggtcctcggagcccggtgcggacccgcgagggccgcagggagggagcgcccggggcgtggccggccggggaccttctactcttcgctccccacccccatcccaactgggagcggctgccggcggctcaggcgcgcctggaattcggccgccggggcgcctggggtgggcgcgggtggcggcgtcccgggctctgggttctgagcgtctgtccccccgccttgccctgcccaagttttgggaagtgatcagcgatgagcacggcatcgacccggccggaggctacgtgggagactcggcgctgcagctggagagaatcaacgtctactacaatgagtcatcgtgtgagtagcaaggccgccgcgccctgcccggccgggacccgcgtggacgctccggcgccgcctcttagcgcggcgagtttgcttcgggaaaagttctctcggggtgtagcaggatgcccggccactcccttcgctcctccggggcgggaaatccgccgtcagtttattcaaacagctcgattcagcctatcctgagggtctgagcgcttgaacgggaccacccgttagcgttgtgaaatcaacgtagcggttcctgcccagc

SEQ ID NO: 129778 - DNA, 31 bp, Homo sapiens; identical to SEQ ID NO: 11650
  chr18:12376269-12376300
  hyper

SEQ ID NO: 129779 - DNA, 30 bp, Homo sapiens
  chr18:12376524-12376554
  hyper
ccccattcaacagacgggaacacggagact

SEQ ID NO: 129780 - DNA, 615 bp, Homo sapiens; identical to SEQ ID NO: 11651
  chr18:12407707-12408322
  hyper

SEQ ID NO: 129781 - DNA, 42 bp, Homo sapiens; identical to SEQ ID NO: 11652
  chr18:12408339-12408381
  hyper

SEQ ID NO: 129782 - DNA, 262 bp, Homo sapiens; identical to SEQ ID NO: 54915
  chr18:12656809-12657071
  hyper

SEQ ID NO: 129783 - DNA, 55 bp, Homo sapiens; identical to SEQ ID NO: 11654
  chr18:12657374-12657429
  hyper

SEQ ID NO: 129784 - DNA, 30 bp, Homo sapiens
  chr18:12657677-12657707
  hyper
tagcacacggcccacgcctgctcctcgttg

SEQ ID NO: 129785 - DNA, 440 bp, Homo sapiens
  chr18:12658129-12658569
  hyper
gcctcgcgccgtccagcgccgcccagcgcccgccccttagggggccgcacgggccgggggatgcacgctctggaggtgaggaccaggcaggagggcctcgcctcgaggcgagatggccgcacggtctctagcccgcagggctctcagagtcgcaggcggtgacgcccggtcggggggcccggtcgcaagggacacacagctgggggcgcaatggtgagggcggcgacgcacggtccggaggggatgcgcggccgggtagggcgtgcagggttgtggggcgtgggggacacgcggggccgggcgcgcggtcggggggcgcaggggcaagagggtgtcgcatttatcagggaagtccccggccgactctggcggggaactgggcgcgccaacccgggtcaccgccctgcacagcgggagaagtcacccgcattgacgttccc

SEQ ID NO: 129786 - DNA, 113 bp, Homo sapiens
  chr18:12702644-12702757
  hyper
caaagcgccgcagccgttcgcctagcgcagctcccgggggacgcaacgccgcgtcaggccgggggctgacctggaaatgaggccccggcggcggcggcgccaactgttttcaa

SEQ ID NO: 129787 - DNA, 31 bp, Homo sapiens; identical to SEQ ID NO: 11656
  chr18:12859860-12859891
  hyper

SEQ ID NO: 129788 - DNA, 30 bp, Homo sapiens; identical to SEQ ID NO: 11657
  chr18:12883588-12883618
  hyper

SEQ ID NO: 129789 - DNA, 30 bp, Homo sapiens
  chr18:12884552-12884582
  hyper
ccctgagaagtcgccggcacgctccgcctt

SEQ ID NO: 129790 - DNA, 144 bp, Homo sapiens
  chr18:12911076-12911220
  hyper
caggttggggcaggccgggtggggcccagcgagtgggcgggggcgcgagcgggagcggaagcgggcccgggccgcactgctgccgcgtctagccgcctcccaggctgcctgcgccgcgtggctcgcccccgggacttgccagca

SEQ ID NO: 129791 - DNA, 30 bp, Homo sapiens
  chr18:12947502-12947532
  hyper
gaaacacatccaaacgtcgacttaaatgat

SEQ ID NO: 129792 - DNA, 31 bp, Homo sapiens; identical to SEQ ID NO: 11658
  chr18:12991134-12991165
  hyper

SEQ ID NO: 129793 - DNA, 1068 bp, Homo sapiens
  chr18:13217135-13218203
  hyper
tactaagtgtcctgccgcccgactgcacgtctctaggcggctgcccgaggtcccgcggcccgtggtgcacacgcagcccgcgaggtactctgtgctggaacgcgcccccagcctcccgaaaccgcccccggcctgcgggcagcgagccggctcctccgggcgcccctgcagcgtactctgcgctcggcttggagttccccgtgcggccggcggtgggcgcgcgccacgcgggcccgagccctgggcgggagtgcggccccgggtcccgcggcctcggcgcccgcgcgcctcccccactgcccacccccggcctccgggcccgccccccgcaggggtcggcgcagcctgtgagccggggacccctgagcccccgccacggcggccccggtacccgcggcctggccgcgcgccgggtccccaccgcggagtgggaaggaggaggagagactggaggagttggagacagacacagccgcggcgcgcagtcacggctggagacagacggcggcgacggcggcgggaggcgggacactcccccctccggcgactggaggcgggacacctccccggcggccgcagcgccgcgtcccctctctccccgcgctgaggctgcggaccgggcccggcgggattagcaggcgagtgcgttggccctgcccgctccgcgcgccgccgcggccggccggggatcccctgcaagccactgagccgctgccgccgctgcagccagacaggctgcgggtgcctgggaaagtggaagcagggcggggagcgcgggggaggcccgggggtgaggtcctcagctcttaaagaaccccggcgcgccgcgctccccgccggcccgccgcgcgccccctgccgcgccccgcacagcgcccctccccctggccagcagggccggtggccgcggagccgcactgcgggcagtccccgcctccgctccgggggggcggcccaggtgagtgcggacccgaggtggccgcagtggtcggggcttctggcccaagttcaccgctgcgctccggagggaggggtggcgggggactcgggaaccggacgctttgggaa

SEQ ID NO: 129794 - DNA, 30 bp, Homo sapiens; identical to SEQ ID NO: 54924
  chr18:13218428-13218458
  hyper

SEQ ID NO: 129795 - DNA, 30 bp, Homo sapiens; identical to SEQ ID NO: 11661
  chr18:13218869-13218899
  hyper

SEQ ID NO: 129796 - DNA, 19 bp, Homo sapiens
  chr18:13312124-13312143
  hyper
tgcccggccaaatctgaaa

SEQ ID NO: 129797 - DNA, 30 bp, Homo sapiens
  chr18:13564700-13564730
  hyper
cccccttcctcctggcggggccgtgagtct

SEQ ID NO: 129798 - DNA, 30 bp, Homo sapiens; identical to SEQ ID NO: 54927
  chr18:13725908-13725938
  hyper

SEQ ID NO: 129799 - DNA, 30 bp, Homo sapiens
  chr18:13726491-13726521
  hyper
ggccccgccagccgcgcccactagcaacgt

SEQ ID NO: 129800 - DNA, 30 bp, Homo sapiens
  chr18:13726724-13726754
  hyper
gctggtgagtgtgacggctggaactccggc

SEQ ID NO: 129801 - DNA, 30 bp, Homo sapiens
  chr18:13727215-13727245
  hyper
cccggcggccctggcggcctgctcgctcgt

SEQ ID NO: 129802 - DNA, 346 bp, Homo sapiens; identical to SEQ ID NO: 54928
  chr18:13823934-13824280
  hyper

SEQ ID NO: 129803 - DNA, 408 bp, Homo sapiens; identical to SEQ ID NO: 54929
  chr18:13868511-13868919
  hyper

SEQ ID NO: 129804 - DNA, 314 bp, Homo sapiens; identical to SEQ ID NO: 54930
  chr18:13868946-13869260
  hyper

SEQ ID NO: 129805 - DNA, 106 bp, Homo sapiens
  chr18:14431302-14431408
  hyper
ctgctactccgccgccgccttctcacagccacaacaacactgcagcagcggccacacagagcgcgctcccgacgccgagccgggcgaagagcggggacgcgctcgc

SEQ ID NO: 129806 - DNA, 46 bp, Homo sapiens
  chr18:14450359-14450405
  hyper
acgcgcccgcgcccgcgcccgcgcccgtggccgcgcgggccccagc

SEQ ID NO: 129807 - DNA, 54 bp, Homo sapiens
  chr18:14450816-14450870
  hyper
gggcgattggcttcccgcagcagcagcccgtcactggggcggcggcgggaccgg

SEQ ID NO: 129808 - DNA, 30 bp, Homo sapiens; identical to SEQ ID NO: 11663
  chr18:14726130-14726160
  hyper

SEQ ID NO: 129809 - DNA, 124 bp, Homo sapiens
  chr18:15197983-15198107
  hyper
gggcaaaaaggagcggcggcgggggaagaagccgcggcggccgtggaaaaagtcgcggcggcaaaaagccgcagagtagggggcgaaaagacgcaaaaagccgcggcggcaaaaagccgtgacg

SEQ ID NO: 129810 - DNA, 97 bp, Homo sapiens
  chr18:15198163-15198260
  hyper
aagcagcggtggcgctgacaaaaagccgcaaaaagcagcggcagcgggggtaaaaagctgcaaaaagccgcggaggcgcgggcgataagccgcggcg

SEQ ID NO: 129811 - DNA, 30 bp, Homo sapiens; identical to SEQ ID NO: 11665
  chr18:18691690-18691720
  hyper

SEQ ID NO: 129812 - DNA, 2091 bp, Homo sapiens
  chr18:18821313-18823404
  hyper
tttaaaaatggagccgcatctctaataacaaaagcctccagctgtgaaaagtggagctaaatctctctaccgggccgcagcatctctcaagaaccttttccccgcagcacccgtcaaggcccagggccagctggacgcggctgccctggggtggagccgtccccgtggtcccgggaggctaccgacgagccggggcccggggccggagggcgtgctcctccgggaggtgcaaaagtcggcttgggcccggagctcccgggtttgtttggttttgtccgcgccctgcccccaccctacccccttcatgcaaaaggccaagggtttccgagccaccactgcccaggccgagttcacgcttggggctcttcagccgccgtccagtgaacagagaaagcaattgcgcagaggcgagagcaggctgaatgaacgcgggctccaggggaaataatttttcctcctggcttcgcgcgtcagcacactggggtgcagccctccctcacagaagaccccccccccgcacgaccccctgtacacccccgcggggctgcgcgttcgtctgtgcggcggggtttgggaatggaggcgtgaggaccgcgcatcgagggctccacaggctgggcggggggcgtcgttggaggggggtaggggagaaatgcgcgcccaccaccctcacagagggcgagggacccccaaaagccactcgcggacgccgaggcagcgggaaggcgcgaggcggggcggggggagggggcgcgggggtccccgctgcggaggccagggcgggcgggaggggcagcacctgaggaatccgcctccggctgcggcggccgccgcctcgctccgccccggggaactgagcgcgcggaccgcgcgcctgccagagagacgccagccgccggcggcgctagcacctcggagtcgggcggccggagcagcggagcgcagcgcggcgcagggaacggcactgggggtggggagaccagcccggccgagccgagggccaccccctggtcctctgccctcgcgccccgctagggccaggtgagcggccgcggggactccggggcgcgggcaggaggtgagaggtcgcgaaccgggcgcgggagctcgcctgtgaccggcaggagctgccctttggcgggctggacgccctggccgcgcggggaagcgccgcagcggacttttccggagggatgggaagctcagcgggggtgtgagcggagcgcgtgcgggtggcgagggagcgccagtgccaacctgggagccgtgcctgccttccctgccgcctcgcgtcgcccaccgaagggacccggccgtgctgtccgcgcccagaggccgaaggcctgtcaccgggctctactcgctgcctttgtggcgggagcgagacggcccgggggtgggacgagggagctgcggcgcgccgagtagcgcggggtcccccggcggaggcggcgagggggcacctggttcgtctccccgagcccaggggcagtgagggggtgccgggcaggcgggcgggcgacaggtagggcgccgcggaggtggcggggagaggatggatggagttcagcctgggaaagttgagaacgtccagaggtggctgggcgctcgctcggcgtctgtgggtttttttcctcaacaccaaatgtcacttcgtcacgagcgggcgcgcgtgtcttccggccagcatgtccatttttctgtgcatggctgaggaccactcttattccgaatgagacacaaagagttgtgttgacagctgaccctgacacaagcagacagcgagtgaggtgcgccctggccggggagggtgagggagactcgttaaaggaaatccattcccgccgtccctcttcccagctccattaagaggaaactccatgtggagattcagtgcgtggggtttctcagttacatgagtccaaggaacgtccccgaacgcgactcgtttgcccggaactgccgctgcctctaaccgaggctgcgggtcctggagaaactcctcagtcttgcccctttctccggtgaacgtgacggttccaaggtccttatcctccccacccactcctctggccccggctgagaggatag

SEQ ID NO: 129813 - DNA, 30 bp, Homo sapiens; identical to SEQ ID NO: 54936
  chr18:19181010-19181040
  hyper

SEQ ID NO: 129814 - DNA, 30 bp, Homo sapiens
  chr18:19192369-19192399
  hyper
gagggtgacggcgccgctaggatgaagctc

SEQ ID NO: 129815 - DNA, 30 bp, Homo sapiens; identical to SEQ ID NO: 11668
  chr18:19284433-19284463
  hyper

SEQ ID NO: 129816 - DNA, 30 bp, Homo sapiens; identical to SEQ ID NO: 11669
  chr18:19284816-19284846
  hyper

SEQ ID NO: 129817 - DNA, 30 bp, Homo sapiens
  chr18:19320523-19320553
  hyper
ggccacatcacagccgcacagctccagcag

SEQ ID NO: 129818 - DNA, 33 bp, Homo sapiens
  chr18:19321115-19321148
  hyper
ttaagcttgctccccgccgcccccctcgggcta

SEQ ID NO: 129819 - DNA, 77 bp, Homo sapiens
  chr18:19577704-19577781
  hyper
ttgctgacttaacaacgtcctgtttctacttcgtgagatggcactgactcaccactagtggtcgctattattcacac

SEQ ID NO: 129820 - DNA, 3 bp, Homo sapiens
  chr18:19745471-19745474
  hyper
cgg

SEQ ID NO: 129821 - DNA, 111 bp, Homo sapiens
  chr18:19745613-19745724
  hyper
cgccggcggcgcacgggggtcggccgggggctgcgccgggcaaggggcctccgggccgggcctggcctgcgcaacgcgccgggcctcgattccgaccgcccggggaccccg

SEQ ID NO: 129822 - DNA, 341 bp, Homo sapiens
  chr18:19748120-19748461
  hyper
taactgggaaaacacgaaaatagaaacaaaacaaaaaaccagagcctaaacgctttctaggagaccgaccttcagaaaatcatttacttggatttacctgggcggggggtagggggtggggtcggggtaaagtataaaaattcattctcacaaaaacaacgcctcttgtcctaaagtctccctcggcagccttctggggtcacgtctgtcggaagaaatcctttctgtaagcgaaagggagcgagacatatatcacggctcctgcagcggacgagcctgcggccgcgcgagttgccgctgacagatcggcgctgataaccccgcgacgttcatttccagtc

SEQ ID NO: 129823 - DNA, 2524 bp, Homo sapiens
  chr18:19748741-19751265
  hyper
cctttccgtacatgacgacccgagttaaagttcccaaaggtcagctggggaatgttgtcttgaggttcccgaaaccaccacgacctgagccgtagcatcccgagatagggtcggagaaagtttaaggtcggtctcacacaacttcagggcaaaaagcgcatttgctgtgaaggggctaggcgggggttggggggcgggggggcgcagagcacgttcccccttccttctgggggcgtgctgacccaaggtctggagcgcccctcccgccgcggcggcggcgcgggactgtgcactgccaactcctcccgtgccaaggctccctccccctccctcgtgtgggtgtgtgtgtgcgactgcgggagcgggagggtgcaccgccgctggatgggtgcgggtcgctagccaggtcaggcgttctgtggcctccgcccctcccccggggtccctgggctcggtgccccccgggtggactcgcccccactccggggacagggcttgcggctcagcccacgcccgcaggcagcgcggctctcattgtctgcctgggcggcgcgctcccctcccccctcgccgtcccctccccaccctcttttctctcctcccctcgatccctcctcctcctcttcacctccagcgcccagctgctcgctgagcgcagttccgacccacagcctggcacccttcggcgagcgctgtttgtttagggctcggtgagtccaatcaggagcccaggctgcagttttccggcagagcagtaagaggcgcctcctctctcctttttattcaccagcagcgcggcgcagaccccggactcgcgctcgcccgctggcgccctcggcttctctccgcgcctgggagcaccctccgccgcggccgttctccatgcgcagcgcccgcccgaggttcggctgcttcctcctcgcgcgatctccccgctttcctcccctccacccctactcgtcgcgggcccctggcctccggctctccggccctctccaggccgcggtcggctccgacggtgtttccctccttccctccgggcgggctgaggcggctcccaggctcccgggacaccgcggaccaacttctagtctctttttctctcctcgaagcgcttatctgcgcgcagccttatctccgagttatctcggcgcaaaggggcgggagccggtagttaggcaggcagagaaacttctttcttgctatctagccaggtctgtgtgtgggcattaattttagtgtggtaatctccgatgagccgaggcgatttggaagagcagcctggaggaggccagcccggctgcatttcacctccctcccccactcgctccgagtctccctgtcattcttcctgctctcccatttggggtcgcctcggctctggggcggtctcacgctcccccctccccagcccgttgcgttccccctccttttctctgctctccgctccaccccgctacgtccgattccggaacggtccggcgtttctgctgctggagatgaccgcggggtgggccgggtggcccggccggcgtgagcgcgcacgctggtggctgcaggcgcgggccgtgtctaaggtgtgcggcgccgcggggacgccggtggggctggcgattcccgccccacaagctctccgcattgcctctgctgggaaggacccagactgctgcccccgccctggcgtcccactttccctgggccgagttgcatttctctctggggctcgcgttcgggctggtcagcgcagtccgggaagctctgggagagccaatataggagaacgcggcggtttcgttttcggggacaggttgccttccttacgcgaagggttttcccgtggggaaccctcaccccgaggcatttcgggagaggggcatccgcagagaggcgggatgcggcggtgccgacacgcacagctacttaaattcttttgtgtgtcatcagcccgggggagacactttagggcggaaggaaagcctcagccagcttctgcagatcacccctgggatctggcgcgcgcacggagaaaggatgcggccgagggggtgggcggggaggacgcggggaccggagcggtgcctttgagggagggctggtatcccagcccttccagggccctgtggcggctgcgcaggctcccttcccctcccttattgatctccacgcccggggcagaaataggatctttgagaagtctcaaatgggatctttgagaagtcagatcccatttgaactagaaaaaggagtggaggcgaggtagcgtgcagcctacgctcttgttaacccgtcgatctcctaccatacccgtctcccccaccccacctcaggagctagacgtcagcttggagcggcgccggaccgtggatggccttgactgacggcggctggtgcttgccgaagcgcttcggggccgcgggtgcggacgccagcgactccagagcctttccagcgcgggagccctccacgccgccttcccccatctcttcctcgtcctcctcctgctcccggggcggagagcggggcc

SEQ ID NO: 129824 - DNA, 61 bp, Homo sapiens
  chr18:19751774-19751835
  hyper
ggctggcctcaggcctcggccgacagccctccatacggcagcggaggcggcgcggctggcg

SEQ ID NO: 129825 - DNA, 168 bp, Homo sapiens
  chr18:19751869-19752037
  hyper
cgcggcgcacgtctcggcgcgcttcccctactctcccagcccgcccatggccaacggcgccgcgcgggagccgggaggctacgcggcggcgggcagtgggggcgcgggaggcgtgagcggcggcggcagtagcctggcggccatgggcggccgcgagccccagtacag

SEQ ID NO: 129826 - DNA, 495 bp, Homo sapiens
  chr18:19928404-19928899
  hyper
acccccaccaagcgccgtacccacctccctcgctatcaaacaaaagctccaggcattggaaacgtttccccgccgggagcgccagggtccggccgcgctgcggggtcggtctgcgcgcgcggcggggtggtgggcgcgtctggccgcccgggtcttcaggcgcgcagcgacgccggcccgggccgccggtctcagcgcccggctccggctgggcggccccggacgcgccgagccaggctcgcgggggtcaagtccaggttgcggcgcaggaaggcggcgggggaggggcgggccggccgcgccctcaccccctcttctccgcgcccagtgcggaatgatgggccggttccctcggtgtggtatgtctgtataaacatcgttagcctccgggccgacacgtggtgcatttttaatttcgccttacaaattgcggcctcctggcgctggagaagcggtgggggaccttgactccccgcctttcgggtgcattcctgg

SEQ ID NO: 129827 - DNA, 30 bp, Homo sapiens
  chr18:20032205-20032235
  hyper
gaggccctgcgtaaacggcaggggatccat

SEQ ID NO: 129828 - DNA, 230 bp, Homo sapiens; identical to SEQ ID NO: 54942
  chr18:20139427-20139657
  hyper

SEQ ID NO: 129829 - DNA, 30 bp, Homo sapiens; identical to SEQ ID NO: 11671
  chr18:20261870-20261900
  hyper

SEQ ID NO: 129830 - DNA, 210 bp, Homo sapiens; identical to SEQ ID NO: 11672
  chr18:20512627-20512837
  hyper

SEQ ID NO: 129831 - DNA, 1246 bp, Homo sapiens; identical to SEQ ID NO: 11673
  chr18:20512902-20514148
  hyper

SEQ ID NO: 129832 - DNA, 243 bp, Homo sapiens
  chr18:20715394-20715637
  hyper
gcgcgagcgcggggcgcgcgcacctataaatacggacacccggccccggagcccgcgagccagcggccaggcgaccggcgggcggccagccagcgagccgaactagccgagctaggtagcgaggcgtgcgcgtgggccggggcggcggcgcccccatccccagcaccgaggggcgagcatggcccgcccgcgggggggctggaccgccgcgcacgccgcccgatccccgcgccctacccagcc

SEQ ID NO: 129833 - DNA, 1040 bp, Homo sapiens; identical to SEQ ID NO: 54947
  chr18:20715850-20716890
  hyper

SEQ ID NO: 129834 - DNA, 30 bp, Homo sapiens
  chr18:21017601-21017631
  hyper
acacggaggaggttcgctctccatctccat

SEQ ID NO: 129835 - DNA, 384 bp, Homo sapiens; identical to SEQ ID NO: 54948
  chr18:21033057-21033441
  hyper

SEQ ID NO: 129836 - DNA, 176 bp, Homo sapiens
  chr18:21083480-21083656
  hyper
gcagccgcagccgccgctacagtccgggccgggctccaccgcgcatcctgctccactctggcgaccgcccccggggcccccgccgcgggcgcggcgcccgccatgggcgaggaggactactatctggagctgtgcgagcggccggtgcagttcgagaaggcgaaccctgtcaactg

SEQ ID NO: 129837 - DNA, 30 bp, Homo sapiens
  chr18:21166158-21166188
  hyper
cgggcctgagccgtcgctgggcccgtcgcc

SEQ ID NO: 129838 - DNA, 30 bp, Homo sapiens; identical to SEQ ID NO: 11677
  chr18:21166683-21166713
  hyper

SEQ ID NO: 129839 - DNA, 769 bp, Homo sapiens; identical to SEQ ID NO: 54951
  chr18:21242240-21243009
  hyper

SEQ ID NO: 129840 - DNA, 886 bp, Homo sapiens; identical to SEQ ID NO: 11680
  chr18:21269065-21269951
  hyper

SEQ ID NO: 129841 - DNA, 183 bp, Homo sapiens
  chr18:21270126-21270309
  hyper
ggcaccaccggcccgaggcgaggagggggagcacgcgaggtgacatgaggctgtggtcaggttcgggctggtggaggggaaagtgtgaggctgcgctctaagagatgcaggcgcctcggcccttcccgcctccgtcacccacggagcgtcccgccaggcttgagtcctcgagggttcaggggc

SEQ ID NO: 129842 - DNA, 31 bp, Homo sapiens; identical to SEQ ID NO: 54954
  chr18:21393784-21393815
  hyper

SEQ ID NO: 129843 - DNA, 30 bp, Homo sapiens; identical to SEQ ID NO: 54955
  chr18:21405537-21405567
  hyper

SEQ ID NO: 129844 - DNA, 212 bp, Homo sapiens
  chr18:21594006-21594218
  hyper
gtggtaccgggatccgaggggctctgccttgcagtcccgcagcgcggggctccggggagctgcggggcaggtgccagagaccccgcccccgccgcccacctcctcgggaattggctgccctggtcctagggggcggccccagggtcgggatgaagtctggggtcgcgggcgcgggctgcgtggggtttcagttactcgtggagtttcagtta

SEQ ID NO: 129845 - DNA, 248 bp, Homo sapiens; identical to SEQ ID NO: 54957
  chr18:21594466-21594714
  hyper

SEQ ID NO: 129846 - DNA, 85 bp, Homo sapiens; identical to SEQ ID NO: 54958
  chr18:21851439-21851524
  hyper

SEQ ID NO: 129847 - DNA, 759 bp, Homo sapiens; identical to SEQ ID NO: 54959
  chr18:21851561-21852320
  hyper

SEQ ID NO: 129848 - DNA, 961 bp, Homo sapiens
  chr18:21977163-21978124
  hyper
gtagaaccgaccacgcggtacattgggaaacggtcacatgaacaatgcgtgacttccattgtgcatcaatcctcctcttgttaggaggaaattaaaaagtcacatggacacacgaaagtaccgagaaggcacgcagctgaagatctggtaggggatgcatgcggcaccagcatggtcgtggcacccgagtgggaagtgcaacaaacgccaacatcttgttacttttaacgcctaacttcctgcagcgctggagcagccagcggccgccgggaagccgagctcggctgcagccctgcgtcgccgcgccacgacccgaccatcctctgagacgcccgggacgggagcgcccacccccaaccaggcgcggacagacctcccgagcgcagcccggcgggaacccgtcagcgcgggaaccggcctcgaactccaggcgtggacagccgcgagaaactgacctacgcggtcacccgggctcccagagctcccgaggcggtggccacgaccccaggcttcccgtccgcccgccccacgtcgaggaagtggtcgtcaccaactctggctggcactccccgaggacgctcgagcccgcgtaacgtctgtctccgggacccggcgccgggaccacggcggagcgcgaggtggcgccgcccctccccgcagcccgcccctggaacgcgcatcctcctggcgagctggcatccctcccgacacgtgaccgcagcggggacacgcccgttccccgcccactccccgcccctgcctggcctgcccacgcccccggcccgctcctgtcccgcctgggccaccggcgctggttccaggttttgccagctactagggacgcgtaaagccttcgcgctcctcccaccacaccccgagggaagaagtggcaggccttacccggagactacaaggaaccgcccgtgtgagccagtggaagactcgcgtccccaggcaaaat

SEQ ID NO: 129849 - DNA, 248 bp, Homo sapiens; identical to SEQ ID NO: 54961
  chr18:22006300-22006548
  hyper

SEQ ID NO: 129850 - DNA, 169 bp, Homo sapiens; identical to SEQ ID NO: 54962
  chr18:22006774-22006943
  hyper

SEQ ID NO: 129851 - DNA, 148 bp, Homo sapiens; identical to SEQ ID NO: 54963
  chr18:22653838-22653986
  hyper

SEQ ID NO: 129852 - DNA, 532 bp, Homo sapiens
  chr18:22929186-22929718
  hyper
cgttactttcaagaaagccggggtctcgggcaagtctcgccggcgcgagcctggtccaccgttaccctgacacccgcgcacgcccgtggcgtttcttttttcactgtcgacacttggatctttcaggccctgggtctaggtttcccccagaaaaatgaggggcccatgtgacggaaaccaccagacacactgtgtggagacacatgccaatgattcacctcgttcccgaactaaaacttctgcgctttaggaaaaaagcaagcgttccaatctgcgaggccctcccccaccccgtcccttcccaggagaagaaagaaagggctttgtgtgtgcggtgagggctccgttcatcgagttcaaaaatgcacagcggccgggggccgggaggcgtggggcgccgggccctgcccaccccttttccccgggccggcggcgagtcgggaagctggtgcgggaaccggggccacggggcgccgcggcccggcagccaggaggaagaggatgctgcgccgccggggaccagagggcgggg

SEQ ID NO: 129853 - DNA, 1428 bp, Homo sapiens
  chr18:22929926-22931354
  hyper
ggacctcgcggctcccctcggccgcccgcccccgatttcctcggaaggaggctcgcgaaggtggaggaggcggccgaggaggaggaggaggccgccacgtgactctcctcgccacattccaacacagccatcagatcgataacttcagggacccccgcccccgccgcagccagctagtgcgcccccaaaatcccgcacgcacgccccgcaacttccctctccaacagggacgacggagagctggaccccaccgcgaaacgcaaaggactccaggggcggcggggagaagtaggggcgaggggcggtcaacttctgggaatggccaagaggggtgctctgaggcccgagccggggtccggtgcccgcggccggcggccggggtctgtttactccggcgacgtgcggagaggacccaagcaggacgcgggcgggcgggaggcggcggccgggaccccgggccacgtttgtcacgagcgggggctgctccccacctccgagatgacttttttcttcttccaaagaaaaggaaaaaagaagcaccgcacggttttgcatatttattctttgcgaaaacacacaacagaaactttttcctccagcccagatgtagatctcagacgggatatttttttttcctccctctccggataatttcgtttctttctctctctctctctttttttttttcggttgttgttgtcttttctcgcccactttctaccgccgccccattcggggatcctcctcccgtcttcgtctccccccaccccgacacctcaccctcactccacctaggggctcagcggggaggggagcgcgcgcgcccccgcactcacactcacactcacgcgcgcacacgcctcgcagccacgcagccctcgctccgctacccacagtgacactcgcggatgggggaaagcggggagcagggggttcctccttacctttgagggatctcggtttcgcttgcttgcggcgagacatcctaaaagcaaacagctgaagttgtttcaattcagccctgaaagaaactatacttcctcgtggccgcgcgcccctcgggccgcggcgcctcgcgccctccgctcggcctccctcgcgccctcgctccgcgctccgctcctcgctccggctccggctcgcgctcgcgcgcggggctcgcggctgcccgagctccgcgctctgcacgacggcggcggcggcggcggcggctgctgcaccaaactttcccagccttcgacccccacccccaatctccaagaaaaaaaaaaaaaaaggaaaaagaaaaaaggaaaggagggaaaaaaagctaaaaaaaaaaccccaaagacaatgtttgaagagccgtcagctacactaaaaagagaaaatccgttactatttccacctcaatcaaaattcacatagttcatgcgaatagaaaaaaac

SEQ ID NO: 129854 - DNA, 30 bp, Homo sapiens
  chr18:22931559-22931589
  hyper
catccgaggcagatgcgaacgggccacgaa

SEQ ID NO: 129855 - DNA, 40 bp, Homo sapiens
  chr18:22932061-22932101
  hyper
gggggcccctaacccgcagggactcgctctgtacgtaatc

SEQ ID NO: 129856 - DNA, 253 bp, Homo sapiens
  chr18:22932435-22932688
  hyper
ggggctcttctgctcgctttttttcctcttcagaaattaaagcagaggagcatctgaaagtggaaaggtcccccttctggtaggatggatgtaaaaggaggcaacaatttgttcttgagggggcaaaaaaaaaaaaaaaaaaaaagaaaaagaaaaagaaaaagaaaggaggggggaaattcattgcttggcttttgcattgtcggactttaaaaaagtgtgtctgctgttgttgcccggactcgggaaatct

SEQ ID NO: 129857 - DNA, 30 bp, Homo sapiens
  chr18:23670282-23670312
  hyper
ggttcaccctcttccgccacccactcaggc

SEQ ID NO: 129858 - DNA, 30 bp, Homo sapiens
  chr18:23671249-23671279
  hyper
cagtctcgcacgcacgcacaaagtcgtgcc

SEQ ID NO: 129859 - DNA, 1125 bp, Homo sapiens
  chr18:23806174-23807299
  hyper
caaggagaggaacacggatgccgcagttttccaagtgcagcttgcccctcccacgtgataggtttctggcatcgcccctccttgctggcgattctggggaagattttaacgctccctggagccgtccccagtgacgtcacgggcgcggctccgctccttggccaatcacgcggccggatcccggggaaacccggggcggtggcggcggcctgggcgcgtgcgcgaggtctccgcgtggctatataaacatggctggcgtggccgcgcggcggggccgtgccaatcgcgcgtagggggctgtgggcactcggggttcgtagttttgaaatttctggcgggggagcagctgcgcagttaggctcgaggtgtgagcgacgaccttccgggagccgcaagtccaggctcccccgcagcgggacccgagcctgaggcgcagggctgaggcagcgcacgtgtgagcgccgctgaggaagctgcgagaggtcgggcgggtgtcgctccgggggcagcccaggctcgcgcggacgagaggaaggtccgggacgcgcgtgtcctgccgtgcagcgggcgcccgtcactgacttcgctgctgcggcccccgcgcctctccccagcgatgctgtggaacccgaaccgcaccggagtcggctgccgcgcgccaagcctcccctcacctctgctcccggaaccgcagcgccaaagctgccgctgagcccctgggggatgcccgccggcctcaccgaacccgccggcgccgctcccccggctgctgtgagcgcctcggggaccgtgaccatggccccggccggggcgctgccggtgcgggtggagagcactccggtggccctgggcgccgtgactaaggctcctgtcagcgtctgcgtggagcccacggcgtcccagcccctgcggtcccccgtggggaccctggtgaccaaagtggctccggtcagcgcccctcctaaagtcagcagcggccctaggctgcctgctcctcagatagtcgccgtgaaagcccccaacaccacgacaatccagtttcctgctaatttgcagcttcctccaggtatgttgataaccctttccagccttgtctgtcggtccagctggcggcgacgggaaaat

SEQ ID NO: 129860 - DNA, 525 bp, Homo sapiens; identical to SEQ ID NO: 54969
  chr18:24127690-24128215
  hyper

SEQ ID NO: 129861 - DNA, 32 bp, Homo sapiens
  chr18:24128608-24128640
  hyper
gctcttaaaggagccgcgctccaattgtcatt

SEQ ID NO: 129862 - DNA, 30 bp, Homo sapiens
  chr18:24129300-24129330
  hyper
agccacatccctttcgacttttccaacagc

SEQ ID NO: 129863 - DNA, 269 bp, Homo sapiens; identical to SEQ ID NO: 54971
  chr18:24129547-24129816
  hyper

SEQ ID NO: 129864 - DNA, 161 bp, Homo sapiens; identical to SEQ ID NO: 11690
  chr18:24130252-24130413
  hyper

SEQ ID NO: 129865 - DNA, 302 bp, Homo sapiens; identical to SEQ ID NO: 11691
  chr18:24130644-24130946
  hyper

SEQ ID NO: 129866 - DNA, 96 bp, Homo sapiens; identical to SEQ ID NO: 11692
  chr18:24131098-24131194
  hyper

SEQ ID NO: 129867 - DNA, 165 bp, Homo sapiens; identical to SEQ ID NO: 54975
  chr18:24235703-24235868
  hyper

SEQ ID NO: 129868 - DNA, 60 bp, Homo sapiens; identical to SEQ ID NO: 54976
  chr18:24236253-24236313
  hyper

SEQ ID NO: 129869 - DNA, 30 bp, Homo sapiens; identical to SEQ ID NO: 11693
  chr18:24367819-24367849
  hyper

SEQ ID NO: 129870 - DNA, 30 bp, Homo sapiens; identical to SEQ ID NO: 54978
  chr18:24443329-24443359
  hyper

SEQ ID NO: 129871 - DNA, 30 bp, Homo sapiens; identical to SEQ ID NO: 54979
  chr18:24570651-24570681
  hyper

SEQ ID NO: 129872 - DNA, 695 bp, Homo sapiens; identical to SEQ ID NO: 54980
  chr18:24764492-24765187
  hyper

SEQ ID NO: 129873 - DNA, 290 bp, Homo sapiens
  chr18:24765230-24765520
  hyper
cgcgccgggagcggggacagctcggagtcgggcgctcaccctggccctgaccctcccgcgtccggcccggctggggctgcggcgccgcctccgcgcccgctcccgcccgcgcccccgcccccgcccgcccgggcagctccgcctccctctttttctctccctcgcccccgctgcccgccctgccttctccagctctgcctttgtggctctctggtcccctctttcctctgactttctggcctcgcctccgctggcgactcgccctcccagccccgcgtgccagggctcag

SEQ ID NO: 129874 - DNA, 106 bp, Homo sapiens
  chr18:25755345-25755451
  hyper
gaaagggaaaaggaacgctgggaccctggcctgggaggcaggggtggggagagacaaagtgagagagcacgacccgggaggagagcgtggagccgggcagggacag

SEQ ID NO: 129875 - DNA, 2416 bp, Homo sapiens; identical to SEQ ID NO: 54983
  chr18:25755555-25757971
  hyper

SEQ ID NO: 129876 - DNA, 357 bp, Homo sapiens
  chr18:25758128-25758485
  hyper
cggggggtcgccggagggaagcctagagtgcgccgagcaccgccccggcaggtggaggggctgcgggaaataaaataacttgggcaggaacttgattggtagcaggttcatctttggtccgcggtagggaatctaatggagatgaagaatggtggggaagggggggcggtgtctccttgggagcctaacgtacgcttctttattttgtcattctttggagatgggtaatctttcctggcaggggcagacacagcaaactaaggacgcaggccaagctcatcctagctattgttgtctgaggcgctcgccgggagccacctgcgggcgggggagggcggaggccgcggctcctctctg

SEQ ID NO: 129877 - DNA, 56 bp, Homo sapiens
  chr18:28620899-28620955
  hyper
tttctgtgcactttccggtatttaagtctccagatacagcatttaacctaaactca

SEQ ID NO: 129878 - DNA, 172 bp, Homo sapiens; identical to SEQ ID NO: 11700
  chr18:28621033-28621205
  hyper

SEQ ID NO: 129879 - DNA, 1529 bp, Homo sapiens
  chr18:28621468-28622997
  hyper
ggccaggaagcagtaagaatccgcgagaccagactcggctcactgccgacgcgggtatagacctcgctcccatcggaccccatgcgcatccatggatgcgggtaagtcgcgggtccgcggctcctttctgggcgtgcggaatgaaactctgttgaagcctgaagcttcgcgtgtaaccgcgccgccagagttccgaacacttcaagtctcccgtgttctcagagcatcgtctctaacttcctctcctagaggatttcgtcctgggcggcaggtttccgtagactcgaaaccccaggctgtgctccggccgcgcagtcctccccggagccggagtaagtacgacgcaaccccaccgcatccatcatcccccaccactgtcaccctctacccgcctccacacctcggcagcatccccaaaacacaacacgaccccaacccccattctggcccggtcttcccacactttcgcgcccccggcacatcccgcccccagctgggtggctggcgggggtggaccgcttgggtgagcttctgaataccctttaggggagataccgagaaacccacttctcaggggcagccccaccaagggacccagggacacagccccggctccactcactaacgaaccaatccgggtcaactgcgacccagagctggggagggggcagcccctaaatcccttttcaagtctgtgctttgagctctcagggatcctctccacccaaaggcgccctccaaccaccatcaccaccagctccaccacctggggagaagcgtgaatcccaaccccctgcccaacccgcgacggcgcccgccagagcgcagcgaagcctgagcgcgactcagaattccaacaatcgaacaccttgtctcaaaacaaaaagctcagtccagagtcgacccgcaaacacacgttttctctcctcactcctgcaggcccgaacttggggctgctaccagacccgcagcattgatctgagccgcggttgtcacgtttcggcccgctttgtccccagctccgtgcagcgtccagggcggatccacccccgtccccaccccagccctatccggcgagatctggcttaccacgagggtcagcagcagatgcaggcagacggctccgcgcacggagcgccggggcccagcggcggccatcgggatgccgggcagggccaggagaacgcgggcgccgggagggtgccgagagcgagacctgccgaggtgcagggcgcgggaggtgcttttctcgccgctgcttgtttttaagtgtatttggcctctctcaggcttgcctgcccgggagcaacttcacttctgaaaccggattggacccagaggacgcggagaggccactccttgttatttctcaagttttatcatcgccggcgcggctgaggagctgcccgagcctgcccctctgctccccagcagccacccgggcgttcgcgctcgggaaagcggtctctggcgcaccctctgccagttctcccacgcccctcggctgccccgcggcgctgccgccccgc

SEQ ID NO: 129880 - DNA, 24 bp, Homo sapiens
  chr18:28623039-28623063
  hyper
cggccccatcgccggcgctgcgcg

SEQ ID NO: 129881 - DNA, 1359 bp, Homo sapiens
  chr18:28680886-28682245
  hyper
cttcaggctccccaacgagatcccatcggtcaagcctgggaaaggggctgtcccgccccaaataaggccaaccacttaggctcccagctctgggaaggggtagggtcattgctgtagtgctctttaaagaaagaaagaacctggggcaaggggcggtggcgcggggggcgggtggtgagcagaaaaatcgagtcgcctctggggacaagaaatcagaaagacccttccttcctccgaagatttagggaactgaagcctcgcacgttaagaaaccactgaaactgtacaaatgctcacctagggctcgccggtcgacagtcctcaggagcaaagggtcaagatcccctcccccacccgccacttccccccgcccttctctcagagtaaacaattcccagaaaggcgagcagttccctttttcacccaaggacactcgctctccgtcccggccgcccagcggttcccctttccgtggcctgggcaggcgctgaggcacagggagccgcacgttcccgaggcacagggagccgcacgttcccgaggcacagggagccgcacgttcccggggaaggtgccagaggccagctggacggccccggcgcactcccgccccggcgcactcccgccccggcgcactccgaccccggcgcactcccgccccggcgcaccctgctccccggcgcgtacccaggggccacgattttggctgggcgaaagcggcccgctcccgcctctccttgagtgcgctgattacatctaccggagacaccttcccttcccttggggatcccaactctcaggtcgcgatcctcttcctatctgccctcccccacccccgccaactccattttctagccacccagaggccccttcaccccagcttttcccgccacccccacctatccccgttcccctagttttcctctgcaccctaggcgatcgcccccttccccggagcggtggccgcggctacactcaccgcgagggtcagcaggagcagccggcagagggctccgttccaggagccggaggggcgggctgcctccatggagagggctcggggcaggtcgcgggccgagcgtcgggccggggtaggagggctccgcggggcgagggccgcggccggagcgcagtctgggcccgctgctcaggaggagcgcgaggcggaggaggtggggcgcgcggagaggtgcttttcttagcttctctgaagcgcctgcctctcatccaaggggcttttcctttggcggagggaggggctccagacgcgtccaaaagacaccgatcggcccctccttgttgtctatttaagacttaagacttcatttctctaagaaagccacgggtgggaactccctc

SEQ ID NO: 129882 - DNA, 73 bp, Homo sapiens; identical to SEQ ID NO: 54990
  chr18:28682286-28682359
  hyper

SEQ ID NO: 129883 - DNA, 901 bp, Homo sapiens; identical to SEQ ID NO: 54991
  chr18:29077772-29078673
  hyper

SEQ ID NO: 129884 - DNA, 37 bp, Homo sapiens; identical to SEQ ID NO: 11704
  chr18:29265159-29265196
  hyper

SEQ ID NO: 129885 - DNA, 171 bp, Homo sapiens; identical to SEQ ID NO: 54993
  chr18:29598281-29598452
  hyper

SEQ ID NO: 129886 - DNA, 52 bp, Homo sapiens
  chr18:29598682-29598734
  hyper
tggcttctgggctgcgcgagctgggagagctgggaggcggcgatcgcagctg

SEQ ID NO: 129887 - DNA, 30 bp, Homo sapiens
  chr18:29598972-29599002
  hyper
gacccgctgtggccacgtgtaagttccagg

SEQ ID NO: 129888 - DNA, 212 bp, Homo sapiens
  chr18:29599217-29599429
  hyper
tgcgctttcagctcccgaagcccaggtgcggaactccagagaaggggatccaggcacgggtcccgcccagagccagggctcgccaactggggagggtgctcttggctggagaaccagcgctcgcccaggcacggaaaggaaacgagctccagctacaaggcaggggctcccgcaaagcgcagttaccccgctgaacacggtagaacgggctg

SEQ ID NO: 129889 - DNA, 222 bp, Homo sapiens; identical to SEQ ID NO: 54995
  chr18:29599654-29599876
  hyper

SEQ ID NO: 129890 - DNA, 30 bp, Homo sapiens
  chr18:29671969-29671999
  hyper
gacagagctgctggcggcggcgggcgaatc

SEQ ID NO: 129891 - DNA, 1426 bp, Homo sapiens
  chr18:30050220-30051646
  hyper
tggagacggctgtcctcgcccgtctgccccgcgccccagctgggactcaccgttgtccaggcgcgcgatctggggcagccggtaagtgctgaccaggaggtcgagcggcacggccaccgagctccacttcacatccttgaggctgcagcccagcgagggcgccgggtccatcttccccgaagcctcctgtcccgcgctcccccgccgccgccaccggcaccacccgcgcctcggcggccgccgctgctcgcgctcgcggtctggggcgcgcgggaggcgccgggcagctccggccgcgggcagccgggggggcgcggcgactggggcggcccggagggagggggccggcgcccggctcagctgccgctgcggggcatggctggggcgccccgcgtgccctcacgcccggagaagactcagagcagccgcgcggctgcgggcggcggcggcggcccgggtggctgcggcggctcccgctccgcctcctcctctggccctgggtctgcagctgcggcggccgcccgctcgcctcctcctcctcttacccctccttccctccgcctcgagcgtgtgaggaggagccgcgggtctgagaaacgccatagcagcgctcccagcactgactaatcaacaaggtgcgagcaacgcctgcgcagctctgggagacaccgcctccgcctcccaggcgccgcccgctccgcccccagctcggcctccgcctcccgcagctcccgcggcccggcaggctcgcgtcagctccccggccggggccgccagcgcccgcggctcggcgcgctccgcaagctttagctctcgctcccccgtccgaccactcgggcgccctgcagtctcgccgggtgctgctgcgcgccccggctccttccccgcccaggcccgtccccggagcccgggaattgccgagcgagctcaggtatcgctccctgagtcgtggtgtcgggcaccgtccgcctccactcccatcctggcaatgcggtggctaaatacaaggcacaaaagatacctttagtggcgctccctcttgcttcccggtgacccagactttggtcagaagagtaccacagcccaacggggctgcggacggcaggcgtggagcacgccttggcgtttcccctcaaccctactcctctaccatcggagctggaaatgactcccaacagtctcagctttggctactagataagataaaaagggcaaagcaccgaaaagcggaaaggtggtgggtgatgagtacccacatacaggaaggtggccattcggtctaggaccttcactgagtgaacgagctgctggaggcgacgggagttgatgaggccaccaaacaccgtagacacggagatgggaagggaaaactaggttactgggaggctgctggggtcagctgttctcacccgcttttcccattcag

SEQ ID NO: 129892 - DNA, 1930 bp, Homo sapiens
  chr18:30349740-30351670
  hyper
gggccgggatgagggcgaagcggaggcgcttcatgaggtcaggcgcatactgcatgcgggtctcgcggtcgtgctccagccacagcacggacatctggaagagcgccagctccgactccacggggggcggcagcgagtccagcagggcgcgcatctcctcgaagttgagcagcagcacatcctccaccaggtacttgttggccagcttcttggtctcctccaggccgtgcagcgcggcgatcttgcacacctgcttgtagttctgcaccgagatctggtcgttgaggaactgcacgcagagcttggtgacctgggggatgtgcaggatcttgctgaccgacagcacctcctccaccgtgtccagggacagggtcacgttggccgtgtagaggtactcgagcaccaggcgcagcccgatggacgagcagccctgcagcaccaggttgttgatggcccgggggctggtcagcagcttgtcgtcgggggaggaagaaggagtcccgggctcctcctgcggcggcggctgctgctgctgtgacggctgctgctgcggcggctgctgctggtccttgggggcccccaggccgtcctggccgccgacccctcccccgagaggggggtggctggagaagagcgatcggaagtactgcgagcaggaggccagcacggccttgtggcaatggaactgctggccctgggccgtcagggtcacgtcgcaaaacagctgcttcctccacagcaggttgaggccgtgcagcaggttgtcgctgtggctggggtcgaaggtggaggtcctgtccccggatctggacatggcgagctgactcggtgcacctggctttaaaccctcctccaacctggcagacaggggtgggggatgggagggaggggagcagggtggtggagcgggtggggtgtggtcggggtggggaagggtgtggaggggaggggagggcgaagaacaagaatcaaggctcagcttgactccctcctggcgcgctccggaccccgaccctaggaggaaagtccgaagacgctggatccgtgagcgccaccagaagggccctgtctggggtcccggcgccggttctgcgccctgcggctcctctcgccacctcccacacacttcgtccctcactttcctaaaaccaaccacctcagctcggctgttggcagcaacagcagtggcagcagcgacggcaaagtggcggctgaggccgaggcacctcgtgggctcgtgtccatgccgggccagatgaagggaaaggccgggaagtggggagccgggggtgccctgaaagctcagaggcgaccgacggcgaaggttccaggtcaacttgtgcccgaagctttgcttttcgcagttggcccagtttgggggagggggtaggaacaggggcccgaccagcgtgcggggtgtgcgaatcttagctctccaaaagctgggacccccttcgattatccatgctgccccgagaaactcctaggctaatagtctgagggaggagataaagccctttcttctcccgggaaagtgcagcggagcgcggtgaggacccgctcagtggaatcggcagaggcgggagctgtccttatcaattcgagctcatttccctcaacctggccctgcccgcttccccgcttcgcaaactgttggcttccccgtcaccactcagtttggctaattttccagagatggctttaaacctggcaggagaatccttccaccaccgccacccccacccggtggccccctctcccccgtctcgctcatttcaaagcgcggaagttcaggcatcaatctccccttccagcgaggggcggcaccgaggactcagggggaggaagtggggctgcgaggacgcgtttggagagggagccgggaggcctggaggccgggagggattcgtgtgcacggtttcccctcccg

SEQ ID NO: 129893 - DNA, 553 bp, Homo sapiens
  chr18:30351967-30352520
  hyper
gaggcgaaatcgatacgccaggtccttaacctgtaattgcaccttccagggctgagcagaaagggaccctctgcttgcatcccgcccgcgcgccggcccgccggcccgccggcccgcccgcccgggggagagccgccgccgccgcccggctcggagggatcccggcggacctgccccttccactgcggctcactctgccctgcctggcgccggtcctggatcgccggcttcctatttataccggactgggctcctttcgactcactttaccatcccgttccaggtggaccctaccctccctcgcgctccctccgccggcagcacccccacgcccgcccccaaagctctggcttgcctgaaacatcttacagagtctctctccctttaagaggacccggtcatacctctctctagctctctccgcttcgttgtctccccccgccccatcttttcctattccccttccttcttgttcttctcccttgcctttcctcctcatctgcttatttcttgcaataggagttttttctttatgagcgtttgccatacaact

SEQ ID NO: 129894 - DNA, 288 bp, Homo sapiens
  chr18:30781529-30781817
  hyper
cacagacttcagaggcggggcttcagttggctggctctgatgtctttgatgtgggatgtgaaaaaatcagttctgcaagcgttgcaaaagccgtgggttgtattaaggtgaagctgtgggaaggaactgctgctccctaggaagacgctgacaagagccacaaacagacaggaagctaaaggaagcaagcagtaaggaacaagtttcttttttctccttaaattttccagtctccctctagtgccccctattggcaaagcctaacttagagcccggtgacaaaggaga

SEQ ID NO: 129895 - DNA, 317 bp, Homo sapiens
  chr18:31020193-31020510
  hyper
cgaagttcctctaggcggccagcggagggagactctgcttcccttcccccggcagtggggactgggggactgggggactgggggactgggggactgggggactgggggactggggacaggggttggaggactgggaaactggaggacggagaacagggggacaaaacgactgggggactggggaattatgggactggggatttggggaattgttttcaaacgcgcggggcaaggactccccaccgcctctggaaggggtgaagaactagtcgactctaactccctcagggtggccagggaattgcatttggttctcc

SEQ ID NO: 129896 - DNA, 1518 bp, Homo sapiens
  chr18:31157629-31159147
  hyper
tacggtatggcatcgcgtggatccacggtgacggctctttggtcctgcattgtttgagatgctgtaggtggttcaacattgtgttaagttgcacgtacattattagttctgtatccgaagacactggctctgtaccctttcaacaaggctctgggagttcccccagccaagcagagacagggttaaggcagtccaacagaggagagtagtgcggtgtgtgtgtgagtgagtgtgcacgcgtgagcgcacaggacagaggcgtcgaggtgcggggcggactcctacacaagttccaaaggccaccgtgtccgcggctttcggcctgagcgggacagcgggaagcgggtggaacggcctgcacggagtgggcagcgccccaggaatttgggggctgagttggagggagaggggtctcgcgagggtttcagggcgtggctggagtagggggcgcgcggcgagtgtgcacgggtgtgcgcgcgcgagagggcgagtgtgagcgcggcgagtgtgagcgcggtgagtgtgcggccgcgtcgccattccccgtgacgtcagagtgtattgttgtgagcggggccgagcggagcatccccggagctgtcaccgcagcggccgcggcggtggcgcagcgcgagccccgcacgagcgagcccggccggcgccgcccccgcccctggcccgggccccgctgctgccgccgcccccgcccccggcccgcccgccgcgcgccgccgccgccgccgtcgcgcgcccccacccactccaccccaccccctcgctccatccctcccacccgccgccgccgccgccgccgccgccgccgccgccgccgccaccgcccgcgcgcctccccccgcggagcgagtgcgggtcaccgggtcactgggtcattgtctccgcgcccgaaccccgagcaccccgtggaatcccccacgtcatcatcagaaccatcaatgagatgcaaacatgaaagacaagaggaagaagaaggaccgcacctgggccgaggctgcccgcctggtacgtaccgccccccacacgccgcccgcgcctcccgccggccccgccgctcgccccgcgccggtccgcggcggcggagacggccacttccagcccgagccgccgcccgctcgccgggctcctgctctttgttattctgcgggagtgggctcgcccgggggcccctgtgtgtgtgcgtgcgcgcgcggaggggcgcagcgattatctccgggagccccgcgtccgggaccgcccgggacacttctccccgtacttcgctctcggggctctgctgtgccttctccacgggtgaatttccgagcgctcggcgcagctcgacttccctctctgccgctccggagacctttgtgtggcaattaccactccctcccggcccctccaccccccggaatttcatcaataactctgtgcacagtctgtgtgtatgttcggcgtttgtgagttcaaacattttacacgtgcatgcatggtgtgtgtccgacacggacttgtggggcg

SEQ ID NO: 129897 - DNA, 531 bp, Homo sapiens; identical to SEQ ID NO: 11715
  chr18:31739004-31739535
  hyper

SEQ ID NO: 129898 - DNA, 1613 bp, Homo sapiens
  chr18:31802046-31803659
  hyper
ccatcttcttgtgaagaaaatcgacgctgctgcggctccccagccccactggcttctgcagcgtgaggctgagatgcattgggctctcaatgccagtgcctcgcggcgcctgggctagagctttgtggccatgagactagagccaccccagaaaaaggaacaaatacacacaccattcgatagcgcctaaacccatctttctttgttgttcatcttctagctgcggctttatttgtggaagagggaagtgaggaagggaatgggggggcggggaggaggaatctccaggaccttatctacaatctcaacagtcgcggcaacgatctctgggagtgatcgaggcattcgggctgccccgtgcctcccgggcagcgatctaacgataaaacctgacagtgtcctggggaaaaccccacatccaccgctagcgctacattcgggctttatgccaataaggagacactgtagactatcgatcagactcgtctgctctcagagcgtgcggccgggcttccagcctggcctttaggcgcggtggcggcggtgggacacgcgccaggcgcccagagaaggacatgggacaatggcccagcccgaggacgccagacgccgccgcccgacccggggaaggaagctcctgcagccggtccgggaacccgaggcggggagggaggccagctctggaggtgcgctgccgctttaaaataaaggaccacaaagactgtacagtggggaaaacgcgcctggctaatgcgagtggggacgacttggggagggggttgaggaaggtagggggcacacgagccaacggcggctcacggctccccctctctcccgcctctctccttcctccctccccgccgggctgctccggcagacaaataacagaggaaggcgagtcactcaccgtggtcttgacaggcacgtagagcacttgcttggcgccgccgcctcccccgcggacctcgtccggctggcccagctggaagcccttcgatttgacccagaatttaaatttggcgttgtccgtggagctcgactcggagccattgaggagctggacgatccgttcgtattttttacgggtcaccgtcttggtcttgcctgagtccccgtaagtcctgaggcaccagtcctggaactggcggtacatgtcgcgctcgctctccatgttccccgcgctcggccgctggccggatgctcccagcgcacttcgcacctgttcaccctaggctcatgaaaaatgcagccccggccacgttgcagggatgcgaggtcccggccgcagcgggagcctgctttgggtgggggaagggatgggaagaggggaggagggtccggttgggcaccagcaatcaatgccccgtgctaccaagtctggtccattcgtaattgcaacggctgtctcggacgtttttcctgttcccttagcggtcggtctctttaatattttgtgaccaggaccatcccaacaccattctggcccagaggagctgggttttcaataattaaaatcccattccttggtttattaaaaatcccaatattgaattggggtggtccctagacgcctcgcccccgggctgcgtccggggctgggcaggtggagcgca

SEQ ID NO: 129899 - DNA, 178 bp, Homo sapiens; identical to SEQ ID NO: 55008
  chr18:31803673-31803851
  hyper

SEQ ID NO: 129900 - DNA, 30 bp, Homo sapiens
  chr18:31804114-31804144
  hyper
gcaggccgctggcggcgggtatcccgaata

SEQ ID NO: 129901 - DNA, 665 bp, Homo sapiens
  chr18:31804501-31805166
  hyper
cctctttattctactctcacccgaggcccgcgcccgtcccggggagcggctctgccaggaaaacggcccgaccagtgcccggcgcctgggctgcgtccgagcccaccttcttccctcgtcgtcgtctcccagactaaatcccggaaagggaaagcgggatgtttgcgcccaccgcgctgtagctggtcctgacacttgcaaaatggtcagtggctcctgctcggccaggctgagtgtgtgcgtgtgtgtgagcaagggagcgagggtgtgcggtgtgcagggggtgcgctgtgtgtgcgcgcgtctccgggaaggtctcgcggcggctggagccgggactgacagcccgggcggagcgcaggcagctccacacgctaaacctctcgcctctcccctcacccccacccctcccactcccctctccttcccccaccctccccggccccttccaagctctctgattggccaatgggacaaaagtttctgtggagacggctgggcgctgacgtcacgggcagaattgtcccatttagggatcccgggggcagtgcgcatgctgcaggctgcaggttagaggcagaaggaggtagcagcgggcccggcggcagccaggtggcagaaaggagcacgcagcatccaggtggggggacgactccagcagggtt

SEQ ID NO: 129902 - DNA, 30 bp, Homo sapiens; identical to SEQ ID NO: 11720
  chr18:31902859-31902889
  hyper

SEQ ID NO: 129903 - DNA, 733 bp, Homo sapiens
  chr18:32073097-32073830
  hyper
ttttttttcaatgacgagcgtgcccactatttccctagaggaatatttcggtccaggaaggaagatagtgcattcagcatgagtgtgtgtgtgagtgtgtgtgtgtgtgctgtgcgtgcgcgcccgcggagagaggggcgggggaggcggatgaggaggatgagatcatagtttcaggatcctcaggaaaccctggtactggcagcagccagcctctgctgtgcccacatgacccacaactctggcagcggacccggcacttccaacattattaaataataagaaagcggctcctactccaggctcaaacctccctgcagaccaatggacaccttctaagagtttggcgagtcagtgactgaagcgcccgtccattccaaggtgtgtgcacggcgttttcttctttgacagctccggagtgggggagggcgcgggggtggagggggtccgtgtgccgggcgaggagtgggcgcgaggccgggctgccgcgctgcccccggccgcccggtgcagaggagcccgccgcggggcgggaggtgcacatgacgcgcagccccggctgcgcagggaccgcagccgcccacggcgccggggcgcggacacaggcggctcggcgctggagcaagggcaggcgccgcgcaccgagcaaagtcaagagtggaagcgggcggagagcgccggcgggggcagggattcgcctcaacgcccactcacggggttcccacctgtgcgc

SEQ ID NO: 129904 - DNA, 413 bp, Homo sapiens; identical to SEQ ID NO: 11722
  chr18:32073907-32074320
  hyper

SEQ ID NO: 129905 - DNA, 102 bp, Homo sapiens; identical to SEQ ID NO: 11723
  chr18:32074337-32074439
  hyper

SEQ ID NO: 129906 - DNA, 1865 bp, Homo sapiens; identical to SEQ ID NO: 11724
  chr18:32556604-32558469
  hyper

SEQ ID NO: 129907 - DNA, 30 bp, Homo sapiens
  chr18:32558683-32558713
  hyper
gtaagataagaggtccgggagctcaccgag

SEQ ID NO: 129908 - DNA, 30 bp, Homo sapiens
  chr18:32609279-32609309
  hyper
cccttgacacgctgtcgaggagccatccag

SEQ ID NO: 129909 - DNA, 30 bp, Homo sapiens
  chr18:32609801-32609831
  hyper
atagacacgttttaacgagagcactcaaat

SEQ ID NO: 129910 - DNA, 613 bp, Homo sapiens; identical to SEQ ID NO: 55016
  chr18:32621209-32621822
  hyper

SEQ ID NO: 129911 - DNA, 30 bp, Homo sapiens; identical to SEQ ID NO: 55017
  chr18:32622086-32622116
  hyper

SEQ ID NO: 129912 - DNA, 30 bp, Homo sapiens
  chr18:32820664-32820694
  hyper
cgcctcggccaccgcgcccggccgaaaatc

SEQ ID NO: 129913 - DNA, 30 bp, Homo sapiens; identical to SEQ ID NO: 55018
  chr18:32821177-32821207
  hyper

SEQ ID NO: 129914 - DNA, 30 bp, Homo sapiens
  chr18:32870070-32870100
  hyper
aagataatggattccgacattcacctcaag

SEQ ID NO: 129915 - DNA, 30 bp, Homo sapiens
  chr18:32924137-32924167
  hyper
ccaagcaggcctgccgcctacccctccccg

SEQ ID NO: 129916 - DNA, 30 bp, Homo sapiens
  chr18:32924557-32924587
  hyper
ctcgaacagcccagcgtcctctggaccgtt

SEQ ID NO: 129917 - DNA, 226 bp, Homo sapiens; identical to SEQ ID NO: 55019
  chr18:33077286-33077512
  hyper

SEQ ID NO: 129918 - DNA, 79 bp, Homo sapiens; identical to SEQ ID NO: 55020
  chr18:33077969-33078048
  hyper

SEQ ID NO: 129919 - DNA, 539 bp, Homo sapiens
  chr18:33530036-33530575
  hyper
cttgagtcctaagcccgacgaccctgccccagaccctggagacgctggacgctggctcacctggatcccactcagacccgggcgcgggctcacctggtcccccgcgggcttgggcgtacgctcatctggatcccactgggacccgggcgcagcctcacctggtcccccgagttcccgggcgcggccacactgggtccccctcctgctcgcgccgccctgggcgccccggaggaagctctgtgcggctgcaaccctgagtcccaggcggagcggtcagcggagagttccagccaacttattccgtgcgcctcgaaagggagggttgctgggcgtatagatattctatttcgcggggcctttgcgctccgagtggcccctctaggccagttcctccgaacgctaatcgggggctccgcgctctcccctcgcttccctttgcttggggaattggcagcggggcgcagggatccatcggaaacgcaaaactactttttccccctgctggtcactgtgaggaactgcacgtggtggaactaacc

SEQ ID NO: 129920 - DNA, 30 bp, Homo sapiens
  chr18:33552854-33552884
  hyper
tacacttcgtcgcacggtaagaagaacgcc

SEQ ID NO: 129921 - DNA, 30 bp, Homo sapiens
  chr18:33647527-33647557
  hyper
ccggccggcagtgacgtcacagggacccac

SEQ ID NO: 129922 - DNA, 30 bp, Homo sapiens
  chr18:33708905-33708935
  hyper
ctagggtgagtgggcgcctgcggcgggctc

SEQ ID NO: 129923 - DNA, 41 bp, Homo sapiens
  chr18:33709429-33709470
  hyper
ccgcgggggcgtggcgcggccctagcgcattgtaagcagtt

SEQ ID NO: 129924 - DNA, 1292 bp, Homo sapiens
  chr18:33766768-33768060
  hyper
tttaatagagagggcccggccacacccacgtgcgggaagtgcggggcgggatgcagggttggggaggcaagggcaggaagtagggcccaggacgcggttgggagggcggggaagctcagctcacttggatcccagctgcagggcccgctccgggggaagcccccgagcttcccggttccgaaagtgtgcagccactgagaatttattagcctcgtggatccctaatctttccccttttctaccctttggtcagccgcattctaacaaacggcaagcacacgccccgctgggtagcagcaacccgagaacgcccccacccccgcccccgccagacgccggttcccgcttgagagggtgagggtcccgagacccctgcgaggaggagggtcgcggggttccaggatgccgatgccaagcaggaaagatcacctcgttgcttcttccaccggcctctccgcgagacatagctaaacttgaacttggcattccaagggtctggaaacatcttcgtgggacccatcgagaggttgtttaaagactggcacccgctcccgcgcccaggtggggaaagggctggccagaagtgaaagtccggtcggggcgccacacctaggctgcggattccgagagactgggaggctggaggcctgggaggcgtggcgggggcggagtcgccgggggccggcttcgcgcacttcccgggcccggccggcctggatggactagccggggccatggccggcgcggcggcggagtcagggcgggagctgtggaccttcgcgggttcccgggacccgagcgcaccgcggctagcctacggctacggcccgggcagcctgcgcgagctgcgggcgcgcgagttcagccgcctggcaggtgaggcgggcgggcaggcttgggggacacgaggtttctggaaccgacgtggacggatcttttgctcctagtgagagcggcgctacctcattcgggcgcattttgaatcgaaactccaggagggacgtgtccacgcgtcctcctagtagacacggctccctgaggtcccacctgcagccccaaggcttcttgctactcttactcttccgactttccggtgggcaggaccaacctagccgtcttccccttttcccgccctccgcgagcggggcttaggatggttcttgccctctcttgcgggagacccctcactgtaaagggcctgctggggccggggttgcaaaagacagcatgtccagcggccgtgacccttcggatgtcctcccgaggtaggagcggtgcgtggaccgccagcg

SEQ ID NO: 129925 - DNA, 562 bp, Homo sapiens
  chr18:33876588-33877150
  hyper
acgcgttatagagtcgccttgaaaacactcggatgttaagagagactgggtgttatgagggcgatctatataaggggggaggaaccaggaacttggctgtggcctgggaatagggagaaccgtgaatttttcttgaaaacgaagggggtcgcccgtgagcagcgaggagagcggtgggaggcagcgccgagtcttgccgctcccgcctggcaggggcgggcaggacgcaaaccttccttcccagtccctcggttaccagggcatccccggctctctgcaattcgggaaccttgccagaagggctcccacctccccaagcccccgcggccccacaaggtccaattagggctttcggcggcctaactggggagaggccgtggtgatgcagaggtttaaccagcatccgccgggagccccggggtccaggcccggcgctggagtcccgcagcgaagcctcgcagcccccacgcctctcgactctaggcttgtgccctaaaagcggcctgggttccctggcgcaccctcctctttcttagcttctttgtccctaagggaaacctcc

SEQ ID NO: 129926 - DNA, 1350 bp, Homo sapiens
  chr18:33877206-33878556
  hyper
cggctccctggccacctggtgccctgccggggtattccaaatctgggcagcagaagccggccgccgccgccttcatctggaaaggcttaagccttctccgggtggggaagaagtcagaaggccgcctgtctccccgtcccccaaccccccaactccccaactcggtcctccaggctccgaggggtgcagctcggccctgggccgcggggcgcacgtgcagcagagtccggccgcccggcctccccgccccgcctccgccgccggcctttggcgcagggctgcggatgccgcgcgagccgtctcctttgcactttcccggctgcggtccggtcgttcggggcagcccggccgggggtagaggacccggaggaggggaggagccggagggagaggggaaggagggggcccgccggccccgcccccgccccgccccccgcggccggagcccgggctgcagcccggcgcgcctgagcctgcgagtccgcgagccagcgagctgcggctgcggcctcccctgcgcgcagctacccgggcgtcccggcccgcggccccgctaaccccggggcccgcgcccccgcggcagggatgcatcatggccacgctggcttgccgggtgcagttcttggacgacacggaccctttcaacagcaccaacttccccgagcccagccggccgccgctgttcacgttccgcgaggacctcgcgctcggcacccagctggcgggggtccataggctgctgcaggcgccgcacaaggtacgacccggcggggtgggctgggccccctggactcagccccctgccgcggtgcgcgccggggtgggtcccggggcttcgtgggccccctgggctgggctgggcgcggcccggggggaccatcgctcgagggcaaatccccctccccgttagacagaagggctcgaggcacccgctggttggcgcaggaccctccggggcgggcgggaaggaacagctagagccgggggcgggcgtggcagagcaggtgccgagccggtccgaggcgggatggagaaggctcccccgagccgcgccgttagctcggccgggtgggcggggtggggctaggacgcgggcagtcggcctcggcactcgggcgggcaccaagcggggcgcgggaagaagcggagcgccgcgagactcaggtcccttggagaggagagctctgagcgacggccgggacaaaacctccctcaggcctctggggccgctgcgggcggccacgcgaccctcgcgacaaagcacgcttcccggcgacaccgcctcctccttcccccgggggcgccgccggggacgccggccgcacactgcgatagcgctcagggtatccc

SEQ ID NO: 129927 - DNA, 63 bp, Homo sapiens
  chr18:34408853-34408916
  hyper
tgatgatgggggcccggggttggtctgacagcagcagctccgtggggcgccggttcccgcggc

SEQ ID NO: 129928 - DNA, 30 bp, Homo sapiens
  chr18:34409177-34409207
  hyper
acagggggcgccggcgccctccacgggacg

SEQ ID NO: 129929 - DNA, 30 bp, Homo sapiens; identical to SEQ ID NO: 55026
  chr18:34409509-34409539
  hyper

SEQ ID NO: 129930 - DNA, 20 bp, Homo sapiens
  chr18:34823757-34823777
  hyper
agttcccagttctcccttgc

SEQ ID NO: 129931 - DNA, 31 bp, Homo sapiens; identical to SEQ ID NO: 55028
  chr18:34823862-34823893
  hyper

SEQ ID NO: 129932 - DNA, 20 bp, Homo sapiens
  chr18:34823977-34823997
  hyper
gcctggcccttggggacaac

SEQ ID NO: 129933 - DNA, 34 bp, Homo sapiens
  chr18:34834309-34834343
  hyper
gagggggcctggcagcgcgcgggcacagggtgcc

SEQ ID NO: 129934 - DNA, 149 bp, Homo sapiens
  chr18:34855018-34855167
  hyper
ggtctccctccgcctcgcccctccctccggggcatccctcccggccccgccccgcgcacccttgctgttgccgtcgggcccgcgcaggatggtgcactcctcgatgttcccaaaggcctcgaaaaggcggcgcacgtcgtcctcggact

SEQ ID NO: 129935 - DNA, 30 bp, Homo sapiens
  chr18:34855367-34855397
  hyper
ggggcttagtcggagcgggaggggcgaggg

SEQ ID NO: 129936 - DNA, 30 bp, Homo sapiens; identical to SEQ ID NO: 11727
  chr18:34973989-34974019
  hyper

SEQ ID NO: 129937 - DNA, 151 bp, Homo sapiens; identical to SEQ ID NO: 55032
  chr18:35064994-35065145
  hyper

SEQ ID NO: 129938 - DNA, 299 bp, Homo sapiens; identical to SEQ ID NO: 55033
  chr18:35065516-35065815
  hyper

SEQ ID NO: 129939 - DNA, 48 bp, Homo sapiens
  chr18:35067532-35067580
  hyper
cagaggcccccgtgacgtcgtccctcgtgctgccgcctgcttctcccg

SEQ ID NO: 129940 - DNA, 85 bp, Homo sapiens
  chr18:35104465-35104550
  hyper
tgtgttgacttgacgcgccctaatccctgactcagctcccacttcttgttaaaccaaaggtaaattttcggccggcggggcagcc

SEQ ID NO: 129941 - DNA, 21 bp, Homo sapiens
  chr18:35104934-35104955
  hyper
cgccctcggccctccctttct

SEQ ID NO: 129942 - DNA, 50 bp, Homo sapiens; identical to SEQ ID NO: 11730
  chr18:35144886-35144936
  hyper

SEQ ID NO: 129943 - DNA, 892 bp, Homo sapiens
  chr18:35144968-35145860
  hyper
cgtcctgggctcgaccggtgcagccttccccatccccatctttcaggtcgctgtacccaaaaatccaagccccgtctcctcgatcccctctctctttctcttcatcggcgcccgctgctctctccatggcatcgttcctatcagcacctcgcccaaaacccagtcttgccccagcgaacagctccccacgcaccccagctctggtctccgctgcccgagcgcctccctccaccgcgcccgcccgaggcttcctctcgcttagtccgccgctcgtcagtcgccggccggccggtcggcccgccagcccgctcctgctccccggcaaagttgggagggaaaggtgtactcacctttgtgcatgcctgtgaacctgtccttcagaaccgtaagctcgtagattttgccaaactcctcgaagaggggcttgaggtccttctcatccaggttgcgggggatctgcccaatgaacagcttgatggcatcgtggtccttcatgggaatggtcgacgggttccccgggctgtggcttaatccgttcatgtgcccggcactgcccgggctgctgccgagcccgttggtactgaggcttgcgttgtcagcctgtccgtttgctaacgtggccatctttatatacatagagaaaatcttctttccttttattctttctcgctcacactctctcgctcctctctctcgctcgctcgcgctcacacacgcacacgcatacacacactcgggttctctccccctcggtttctctacacctcgctctccgctcgctctctgctctctctctttctcctcttctctcgctcgctcgcgctcgcgctctctctctgctctcccccctctctctctccctccctccctctcctctctctctccctctctc

SEQ ID NO: 129944 - DNA, 111 bp, Homo sapiens
  chr18:35145925-35146036
  hyper
cttttttttttttttttttttttttttacattgaacagacaggatctctgtcctttccgtttaaacaggctggaccggttcaagttcccagccagaccaggggtgggggtg

SEQ ID NO: 129945 - DNA, 703 bp, Homo sapiens; identical to SEQ ID NO: 11733
  chr18:35146061-35146764
  hyper

SEQ ID NO: 129946 - DNA, 273 bp, Homo sapiens; identical to SEQ ID NO: 11734
  chr18:35146895-35147168
  hyper

SEQ ID NO: 129947 - DNA, 558 bp, Homo sapiens
  chr18:35147245-35147803
  hyper
cgttcctgccgtggggaccgggggtcgagccgcccggtccggaccccgccggactccccgccaggcccactggggctggcatctcggctgcgcgggaaagggagtggcaggcgcggagccgggagcagggtccgagcggccccgcctgtaggggtgaatactggtggtgaacttggctggggtagcagattttcacgttaatgatatttacctgcaccccgtcctctctcatgtttgctttttcagggcagcctcttcgcttcagaagcctggcaaattgaaataacgcgcccgctcccccgcgggctgcggggctggggagctggggcggcggggctgagcggctggcctaacccccgccggccctcggctagccactttcgggtttcagggtttctcttttcttgccctcggattacattacgttactagaggatatgtctgcaattttaattaaagaaatgagaccccagctgcctgcaaacccaggccaaccccatttggtacaagcacaatacggagctctccagcgccggaggaggcccggaggcccgaggt

SEQ ID NO: 129948 - DNA, 30 bp, Homo sapiens; identical to SEQ ID NO: 55042
  chr18:37421813-37421843
  hyper

SEQ ID NO: 129949 - DNA, 30 bp, Homo sapiens; identical to SEQ ID NO: 11736
  chr18:38242390-38242420
  hyper

SEQ ID NO: 129950 - DNA, 99 bp, Homo sapiens; identical to SEQ ID NO: 11737
  chr18:39172187-39172286
  hyper

SEQ ID NO: 129951 - DNA, 238 bp, Homo sapiens; identical to SEQ ID NO: 55045
  chr18:40857241-40857479
  hyper

SEQ ID NO: 129952 - DNA, 2283 bp, Homo sapiens
  chr18:42258978-42261261
  hyper
aaatgcgcccagtttcgagagcctatcacagctcacgtctgggcgcgcagtacccccccgacactgctcctgttgtgtcagatagtggcagtgttgagcccaggaatacgcgcggagcccgcggcgatccccgcggccgctcagtcttcgcggcggactccggcgcgcaggagccactgggccgcaagggcgccggggagcgggaggggcgctgggggcggcaaggggtcccagatcccaggccacgaactgttttccttttccccgggcaagagccccgctcccttcaactgacagaaattcactggggcaggggggcgagtggggagagaggtcgctcagggctcgctactggctgcgcctcccccggctctggtctgggaagcggctctgggccctccgggcgagcagcttgggcgccggcgccccctgcgaggaagatcgcggggtgacggtcggtacccgttcggctgggccgcgctgccgctccgatccacctcccttccgcgcccgcgccctcccccttcctttcactaggagtccgggattcggagagggcgcgggaggcaggcacacgggcccgaccccactccagcgctcaccggggacgcgggcgggcggcgacgggacgcggcgggggcgcggggcgggcgcggccatggagcagcagcggcggcggcggcggcggcggcggcaacactagcgaccgcgggcggacgagcgggcgggcagggccgccgggctcagcggaccgaactgcacagctcagcaaaagcgccctcgccctccgcgcgccgcctcctgcgagcccaaacccaccaacattttttaacgctccaacccatcctttgaagaaaagcaaaaaaaaaaaaaaaaaaaaaaaaaaaagcaaaaaaagaaaaagcattgatcggagagacggggatatatatatatatatatatatatatatatatataaaattttttttggctcctgctaaaattagcagggctcgccgcgcgcctgtgtgccagtgtgtgcgagtgtgtgtgcgtgcgggcgtgtgtgtgtgaatgtgattactccaggactcctcgggctccggagacgccattttcccccttgatatctctctccataaatcggtggcgcggcggaggcggcagagtcgggcgggaagcgcggggccggccggggcgcccgccgctcgccgccgcctccgcgcgcccgggggccccggcgccccccgagctagggcggccagctcgcggctcgccgtttgacagatgctcatcgccatggagttgccgcagcagcacctttgggggctcgggcgagcgacgggagccgggatctgagcgagcgccggggccagcggagccggagccgccgggacatgggtgagcacgcgcggcgaccttggcccgggagcccgggcgcccagcctccctccgcgccgcgggcccccgcactcccggaaccgggggcgacgtgtgtgccctgcatgcaaaagttcacgtcgccttgctgggtctttgactttgcacccggcgggaagggggagaccgggccgagggggcgggatgccggtccgggcgaggttgcaggagatgggcgcgattccggcgggccggcgggtgggcggcgatgctggctcaattggagtggctcgttggtggcggcgatggtggaagctttgggctggagggctgggagcttattgagtttcgcctaatctgatctaccccccctccgccccccgccttttgcaccctccctcggtcctgcagccggctggcggggctggcgggtttggcgttggtggagtggactcgggagggggagggggtaaggaaaggggtgggaaggcaggattttttttttctctctttgtaacttgcaggttaagtggagctagagagctacattgtaacctagttggatttttttggggggggaatgtatcagaatctaacgtgtcgttaatagaaagaagaacaggcaagaagtggtccagccggcgaaggttggtgtgtgcttgtgttgtgcctgtgtgttagtctttttcttaaaaatcttaatcaatggatttgagtctctttcttgtgctctctggttttgggactctgaaaagataggaattcccttaaaagcagacgaatgcctttttgaaagcacgcattgtgtgcgtttctagaggagccgtgggcttgggaatgaacggcaggcttccccgttcggtggtttccagtgggaaatcactccggaaagggaacccttcggtatcgatttattgttttt

SEQ ID NO: 129953 - DNA, 30 bp, Homo sapiens; identical to SEQ ID NO: 55048
  chr18:42399574-42399604
  hyper

SEQ ID NO: 129954 - DNA, 68 bp, Homo sapiens; identical to SEQ ID NO: 11740
  chr18:42531891-42531959
  hyper

SEQ ID NO: 129955 - DNA, 30 bp, Homo sapiens; identical to SEQ ID NO: 55050
  chr18:43309895-43309925
  hyper

SEQ ID NO: 129956 - DNA, 30 bp, Homo sapiens; identical to SEQ ID NO: 55051
  chr18:43316950-43316980
  hyper

SEQ ID NO: 129957 - DNA, 30 bp, Homo sapiens; identical to SEQ ID NO: 55052
  chr18:43547237-43547267
  hyper

SEQ ID NO: 129958 - DNA, 143 bp, Homo sapiens; identical to SEQ ID NO: 55053
  chr18:43547677-43547820
  hyper

SEQ ID NO: 129959 - DNA, 30 bp, Homo sapiens; identical to SEQ ID NO: 55054
  chr18:43652157-43652187
  hyper

SEQ ID NO: 129960 - DNA, 30 bp, Homo sapiens
  chr18:43652415-43652445
  hyper
aagccccacagcgtcgggccacgatcaata

SEQ ID NO: 129961 - DNA, 30 bp, Homo sapiens
  chr18:43677857-43677887
  hyper
cccccttctagggccgctgtcagccgaaga

SEQ ID NO: 129962 - DNA, 229 bp, Homo sapiens; identical to SEQ ID NO: 55055
  chr18:43678498-43678727
  hyper

SEQ ID NO: 129963 - DNA, 30 bp, Homo sapiens
  chr18:43684190-43684220
  hyper
aatgccagagccttcgaccagccttgcaca

SEQ ID NO: 129964 - DNA, 30 bp, Homo sapiens
  chr18:43684677-43684707
  hyper
tatgaagccaaacccgccttccggttcgct

SEQ ID NO: 129965 - DNA, 37 bp, Homo sapiens
  chr18:43753516-43753553
  hyper
gcagatattggtgccgctgcccgagaagagctcagcc

SEQ ID NO: 129966 - DNA, 187 bp, Homo sapiens
  chr18:43753874-43754061
  hyper
cgcgggttccatcgcgccagatggcgctgtctggcttttctcgggcctcgggcgccagtctccagaggtctccggcgcagctgcctctctagccggccgacgcgggctctgtgtttccgggcggaagtgaggcgcccagcggaacggcctctggtgacattttcttgggggcggcgcggacgactga

SEQ ID NO: 129967 - DNA, 30 bp, Homo sapiens; identical to SEQ ID NO: 55057
  chr18:43754771-43754801
  hyper

SEQ ID NO: 129968 - DNA, 314 bp, Homo sapiens
  chr18:43913440-43913754
  hyper
ttggcacgcgtcctgcgttaacaaggcgtttggtgtgtgcatgtctgtgtgacagtgcctgggtcctgtttgcggctgcttgttcgcattccagcttcccttgtgcccgcagtcaggctctacacgtgcgccagcctccgagcgcacgtccccgagtgacccgtgcgcggtgtgcagggacctcagggtcgtgtgcactaagggcgctcgtgcccgtctctctgcactaaggaacgcacctccacatgtctgagtgcacgtccctctccatgtgtgcacgttccgtgttcacgccgcccatgtctgtgcagggg

SEQ ID NO: 129969 - DNA, 1137 bp, Homo sapiens
  chr18:43914155-43915292
  hyper
gccgcccgcgcccgcgccccggagccgcgccacaaagggcccgcgcgcagccgccgccgccgccgccgcgcgaggagccaggatggtcctggtccacgtcggctatctcgtgcttccagtgtttggctctgtgcgaaacagaggtatcgctttttcctttcggggtctgcttcggagcgtggatcgccgcaggcaccggggcgggggcgggcgccgcgggcggccgggggctcagggcacacccgcgaggacgcagggcgagcggtggcttccccccaccccattttagggggacccccgagggtgggggcggccgccctcgtgggagcttttgtagtgaagttagggtttggcgaatttgggtcccttcctccccagccccattttttattttttgcggcggacgtggttcccccaaatcacagccccttcccctaatacctagccctgtatgatcgaaaggagaaagatacatgaccgtgtgtgtgtgtgtgtgtgtgtgtgtgtgtgtgtgtgtgtgtgtgagagagagagagagcgcgcgcgcgagagcatgcttggttttctgtggtttgctttttttgaggtatatgtgtgttttgtgttatgtgtgttttgtattcattttttgttcattagtaccgatggctggctagctgggacctgggtctctgccctatcccatgccccagcccccaccctctcgtgggcacttgcacgattttccatcccatccttttttcgtctttaaccctttttgtgcatcgcccttgtgctattgccctgctcaccccgccccccgcaactgtctttgtatgacagttgcatacacgggttcaagatgcttgggcgcgtgtgtgtgtgtgtgtgtgtgtctgtatgtgtgtgtgcatgtgtgcgagtgtgcgcgcgcgcctcggagagtcagacctgcgctgctgtgccctccttgggtccggctggagcggggcgtccggcccttgggtgttgtgctgtgtgtgaggatgaggtgggaagctgcccccacgccaggcctttgccccgggcagcggttgacaaagcagcgggccggcgcgggctttgtttttaactgtgataaatggggtgtgtttgcacggtcccctttccccacatccc

SEQ ID NO: 129970 - DNA, 34 bp, Homo sapiens
  chr18:43924113-43924147
  hyper
cacctaggaaaggaagcggcggctgctgactcag

SEQ ID NO: 129971 - DNA, 30 bp, Homo sapiens
  chr18:44077291-44077321
  hyper
ccacggtgctgaacccgcctctttcagatt

SEQ ID NO: 129972 - DNA, 509 bp, Homo sapiens
  chr18:44335940-44336449
  hyper
aaacaaacaaacaatcgatacgattttgagccctccgaccccggagtccaaacaaatggccatagaactgtgggtctggaggacaccgctccgatccatgcggtctctccgggtattaaatggatttatcgtcagcctggttgcttggaattctattctgtccttcatttttcacagcggaacaaagttgtctggaccctccagccagcgctgggcagaagcaagcaaggatgctcttggaaacgcggtggcccaagcctaagcggccatgctcggggctaggagcggaccccacggccactcaccccggggcgctgcgaccgaagctgccgcggccactgccacccgggggctcgccggccggctccgcgcatcccgccctctcaatggactttcttacctcttaatgtagttcctgccatacaggatctgttgcagcaaggtcaccaaggcaaaggcgcagatgaagatgaagagcaaagttcggctccccaacaaatcccggttgg

SEQ ID NO: 129973 - DNA, 151 bp, Homo sapiens; identical to SEQ ID NO: 11745
  chr18:44337012-44337163
  hyper

SEQ ID NO: 129974 - DNA, 155 bp, Homo sapiens; identical to SEQ ID NO: 11746
  chr18:44337462-44337617
  hyper

SEQ ID NO: 129975 - DNA, 192 bp, Homo sapiens; identical to SEQ ID NO: 55064
  chr18:44337649-44337841
  hyper

SEQ ID NO: 129976 - DNA, 30 bp, Homo sapiens
  chr18:44496896-44496926
  hyper
aatagccacagacacgtacaccccggtgaa

SEQ ID NO: 129977 - DNA, 30 bp, Homo sapiens; identical to SEQ ID NO: 11748
  chr18:44581294-44581324
  hyper

SEQ ID NO: 129978 - DNA, 30 bp, Homo sapiens
  chr18:44676406-44676436
  hyper
cagggccttaaaaacgccaaactgaccagg

SEQ ID NO: 129979 - DNA, 53 bp, Homo sapiens
  chr18:44676977-44677030
  hyper
tgcaccgccgctgacggaaagctaggcccttctggagacccgctttcccaagg

SEQ ID NO: 129980 - DNA, 196 bp, Homo sapiens
  chr18:44677055-44677251
  hyper
cgaggaaaaataatcccctgcctttcttcggtagctgttttccagtccacagcaccactgctgaaccgagcgttactgagtagcgttctttgccttcacccctcccttcctctaccacttgtccactctcgaggtttaactaagaagtcatactttactagacaacccaatctcagaagtcgtcatttccccctta

SEQ ID NO: 129981 - DNA, 30 bp, Homo sapiens; identical to SEQ ID NO: 55066
  chr18:44677538-44677568
  hyper

SEQ ID NO: 129982 - DNA, 242 bp, Homo sapiens
  chr18:44702530-44702772
  hyper
cagcccgcgccccgcggtcccactcactgttcttgaggaatcgctcctcgtgcagcactgcgatggcgttgacgcagagcagggctgcctgcagcagtgagtacagggtaaaggccatggccgtccgaggccgccccgaagtccaagcgatttctctcccgccgccgcaagggacgtggcgcctccacggccggcgccttcctacggaagccgatggggcccaaaacgaactctccgggaag

SEQ ID NO: 129983 - DNA, 47 bp, Homo sapiens
  chr18:44773069-44773116
  hyper
ggtccccgagtttcccgtcttcctgcagcagcctggaggagttcagg

SEQ ID NO: 129984 - DNA, 500 bp, Homo sapiens
  chr18:44773466-44773966
  hyper
cggcggggccgggtggtggcgctcggaacccggctcgtcgggctgcgggggcagcagcagaagcggcgacggcggctgcggggggtggtggtggtggtggtggtggtgagggtggtgatggtggtggggatgcgtctgggccgagtggggcgcgcccgccgacgccccgtgcagcttggccaggctctccgcgtcgtccttgccgcccactggccggaaggcgctggaatggtggtagctgccaccgcccgctttgcgcccctccagaaggtgcggatggtggggcgccggaacccgggagcccgcggggccagacccggcggccgcggcccctgccccggcagctgccacagagtccgcgggcggcgtggagcccgcgctgcagtccccgccgctgccgcccgggggcgactcgaagagcgcgtcgcgagagccggcgcccccggcaggaggaggtgggccggagcccgggccgttggccactacctgcgggggctgcc

SEQ ID NO: 129985 - DNA, 581 bp, Homo sapiens; identical to SEQ ID NO: 55069
  chr18:44774201-44774782
  hyper

SEQ ID NO: 129986 - DNA, 30 bp, Homo sapiens
  chr18:44776908-44776938
  hyper
ttcggccacgtacagcgagttcgctattac

SEQ ID NO: 129987 - DNA, 32 bp, Homo sapiens
  chr18:44777318-44777350
  hyper
ctccccagcaaggcgcgcggctggccagccgg

SEQ ID NO: 129988 - DNA, 130 bp, Homo sapiens
  chr18:44777661-44777791
  hyper
cgcggaaaatcctaccgctggggatctcaaataggtgcccagcaagctgtgtgccggattggggcggccggttccggcaatacctggtaacctctgggtgtctttaggcgtgtggctgccggcccatctt

SEQ ID NO: 129989 - DNA, 444 bp, Homo sapiens
  chr18:44777862-44778306
  hyper
cgcgaagatccgggctctggcccgagcgaatggcgctcaaaccccggcctggggagaatgacggcctgaattgcggcggggcgtcccctccaccgcagaaagtgtgggtacgcagaaacccgcggcaggagagccccaagtggagcgcagtctgacagcgtctgtctctgaactcgtgtcggaccgaggggacgccacccagcgggcagggtgacgtcaccgtctccctgacactccacattaaagggctggcatgttacagggagggagggggagagcgaaagccagcgcgagcaacagagagatcctttctcagcaggcacgaaagctaccaacctaaccaactcgcaattgacaacaacctcctcagccccggagtaaactgcagcaatggtgctggagccgcagatctgatttaggagtggaaagcgaacagtctgcctg

SEQ ID NO: 129990 - DNA, 614 bp, Homo sapiens
  chr18:44780643-44781257
  hyper
cgagaggaggctggtcgagcccgagttaatcaatgctttcctcttcgagctgacatgcattttacacgtcaggactctcctcagccggctaattgattcaaattgttttattggttaaactggtgtcacccattttcatgatctatcaccacatggaggagagcatttccactcccatctccgttccgggcggctgcggttcacccaggccaaggacaggtaaaggagcccagacgcgggacccagaggaaaaccacaaaccgagctggcctcctcataactggagaggcgacgtctggaagtaagaggaggaggccggcacagcagcgcatatgggcttccagctacaaatttaaactggttgaagagaacccacgctcagccgggcctgggcccagtttcctccacctgggacacagtcggtttccgagccggcgttgaactccgcggtataggaggccacaacaaaacccgggtgggaactgtccgcggtgctgacgagatgcatcgttccaaagcacagcgaatcctactgtgttcaagtcgggaagaagcctcccagcatgtaattgagccctagattcggctctgggcgggctcgagcagagcctcat

SEQ ID NO: 129991 - DNA, 30 bp, Homo sapiens
  chr18:44786534-44786564
  hyper
cgatctctctttggccgctctggctctcgc

SEQ ID NO: 129992 - DNA, 181 bp, Homo sapiens
  chr18:44786783-44786964
  hyper
tggttgggccggagacggggctaggggtgcacccttcgtcccggtcagctcttgcggctgcctacgttccttcacctgccaggaccgggaagttactaggctcgcccgcgggagtcgctgtccgagcttggcagtgctgaaaccgccggcgtgagctagggagctgcgggctgcggaggtt

SEQ ID NO: 129993 - DNA, 79 bp, Homo sapiens
  chr18:44787332-44787411
  hyper
gctgctgggctgtgccgggggctagaaattcctggagtccctttggtccccgtattctccaaaggaagggaggccgagg

SEQ ID NO: 129994 - DNA, 1050 bp, Homo sapiens
  chr18:44787491-44788541
  hyper
cgctccacggctcctccgcgctctgcctcccgcggcgcctgccgcctcccctgcgcggatcagccgccgccgcccgccgcccgccgtcctctgcgttcctgctcgcgatccggcccttcgccgcgaccctgtcctgtcccacccctccccttctcggcggttcctgcagcggctcagctcttcctactctcctcctgggcaagtttgtaagtttagggtgagggtcggtctctcctcgcgccctgcttctcggcttagcttgctcagatccgcacccccccactccccacctcagacctctctgacgccgcctgttggtcaggcagggcagggcgaggagcgcagcgccagccccagccccatcaccccacccttcacccctccatgcccagtggtcgaaggaggacagatatgaggcgagggctggaggcctagtaattgaagtaggaccaggggcaggagggagcaatccgccctgggggcgcgcagcctgggccggcagcttgaactcccttgccagaagggttgtcccaggacgcgcaggtgcgcttctcctgtgccgccctagggcagtccactaggagggggcaccatttccacactttcccggggaacgaccacctgaggtgagatgagaacctattgtgcgtctccaggaggggagctgggaagattggatacggaagactgagcccttctcagcatctccaggaaggaaagctttagggccaaacataggctgctttaaaaaaaaaaaaaaaaaaaaaaagttagtcgaatccgtctcataacgaagtgtcagactgcgtgtcagggagaccgcgggccaggggttccagttggagcccagcgttccaggaggggatgaagaccgagttcggtaaaacagcgtggtattacaaagtttgcctttcaggctccggcctagctccttccttggcaactttgcaagtgccggcaaccctcactggatcatcctacccttggaacttcttgggaagcctcggtttagccttgggtccaccaagacttcggcgaaatggaggcgtt

SEQ ID NO: 129995 - DNA, 289 bp, Homo sapiens
  chr18:44788908-44789197
  hyper
cgttgttctagtccaacaagactagaacccccgctctgccagacacactgggctttgcaggtccaagctcccgggataacctttcccggcttgagtccctcgggcttgaaacgtggtttagcaaacctgttgggtggggtggcggtggtgtggggccgggccacagttgagaagcaaatccccgggttaaaagagcttctcttgcctaaggccagatccagtcgcccggtgtggcacgtatccaccctccttccctggttcttctttcattttgcgacagtctcatgaa

SEQ ID NO: 129996 - DNA, 587 bp, Homo sapiens; identical to SEQ ID NO: 55074
  chr18:44789527-44790114
  hyper

SEQ ID NO: 129997 - DNA, 329 bp, Homo sapiens
  chr18:44790144-44790473
  hyper
cgtcggggtgtctccggcttgtgggtgtgcggttcgaaaccttagctggggtgggggaagggatgtctttaaccttctgtctaccgtccccctcttccctctctcagcctagaggcaggggatgctgcggaatcagactgggtgcaccaaggcggagggccatgccgggcttcgcccttcctgggtgtcccggagtccgttccggagaaaccctggcattgccagaactgggtccccgcactcactcctccataattcgcggcggatcagcgggaggagggcagagggcgggggcgaggcagcttcctggcgggtgtggcgcaaagtgt

SEQ ID NO: 129998 - DNA, 284 bp, Homo sapiens
  chr18:44790495-44790779
  hyper
cggacccgggtcctggaccgaagatttagcccagggtttcgtgtgtgttgctccctgttgctttctacggggtctgcgctggcctcctcctcgggcgactgggccctgaggcaacagcgccttctcgagccccgaggattgaccgccccgagcctgcttggagcagggcctctctccagcgcggtgtgatgaaagtaagaaaatcgggcccctgccccaggcaataggggaggcctaaaatgaagggggcagcgatggggtcggaaatgcgtgcaagttgagag

SEQ ID NO: 129999 - DNA, 30 bp, Homo sapiens
  chr18:44801498-44801528
  hyper
gcccacaactatgtgcgcgtgttggcgacg

SEQ ID NO: 130000 - DNA, 324 bp, Homo sapiens; identical to SEQ ID NO: 55075
  chr18:45275508-45275832
  hyper

SEQ ID NO: 130001 - DNA, 30 bp, Homo sapiens; identical to SEQ ID NO: 55076
  chr18:45456728-45456758
  hyper

SEQ ID NO: 130002 - DNA, 241 bp, Homo sapiens
  chr18:45534405-45534646
  hyper
catctcggccgggagtcgggtctctgccagcccagcgctcggaatggagctttgtggggctggggaagcaacctttgccaatgggaagggggtgtcacagcgcctcattccctcccagcttgcgctcctcggaataatctccaacagcgtgcctagaagcacagctgcttttgtttcgggcgtcggtgcttcccagaatcccggtgcccggacccagccgccgaaccgaccccgccccgcc

SEQ ID NO: 130003 - DNA, 344 bp, Homo sapiens
  chr18:45534675-45535019
  hyper
cgagcggcggccacgcgggggcgctgggccgggggcgggggccagggctgggggtggggcgcgcccccgggccacctcccccgcccctcccggctcctccccgctcctcctcccatgccccggcccccgcctcgcagctgggctcggactcaggcttagccgcagtctgtgagcctcctccccgcacctggccggccaggccagcccagcctacttgtctcgctgcgcccggctgctgcctccgctccaggggtcggcgccgggacctcctcctccgccgccggcccgcccgcgtctacaccgcacacccgtggcgcgccctccaggggcggtttttctcccgg

SEQ ID NO: 130004 - DNA, 1180 bp, Homo sapiens
  chr18:45662345-45663525
  hyper
cacagccaggacaacggaagccaggaacagaaaggagcgaccctggagccctcaccacagagcacggcgtgggggacccgacgctggatgctccgcgcggggtgggcggcgggcaggggggcgtgggtgctgggttagggggaagctctctccatcgtccttcccaggccagccccgcggccgctgcgcccgcctgcaggaactcaggcgctccagtgggtgacgccggcccgggcgcccgcgggagtggggacgcacggggtcagtccttttgcgccacccacaccgggccgtctccggagctgagagactatagctcgactcgcctgctcgggtgggagtgctccccatccactcacccccaggttggagtccagggaagagccccccacccacccagctcagcgcgcgatttgagcccagggacctgacagggctcccgccgcgcgcctagctggacttctgccaatcgctcctttaatttctgcccgtatcgccggccctcgacttttgccaagttgccatggcttttgtcccccctccctcccgtccccaagttttgcatctgactctcaggaggaccaagcattcttgggggagacaatttaaactaccaaggtacacccgcaactccctctcggagtgcccttacgttccttcggctggcccctcgccccaaaggagcccgctggcgtgggccggcggcaatggggcagtggcgagagttgctctctgcagagttccagatcctctctcctatttcggaagaggtgcgtggccccacgccccgcaggagctccggcgaggctgggggagttgaacgctttgcggacgccgccacccgcgccagccagagccgccccgcggccacccggccacagggtccccgcagcgcgtagcgagaatgcccgcagcgctctcccggccgcccggaagggcttcctcccccaccccctccccacggcccggccgctgggctccccagagccccgatcctagcccagaggcgggccgaggccgccgcagacccacctggccgccccggggacgccgcgctcgtgcccgggccgtgtcctgagcgccgccagggtcccgggctgggaatccacgcggccgcgctgctcgcgggagcctgccgcagccggcgggaggttgtcattgattcgtgctgggcgagtta

SEQ ID NO: 130005 - DNA, 813 bp, Homo sapiens
  chr18:45687756-45688569
  hyper
agacagggtggggccgggatgagaggaaactgtaaaaccaacggggcggattcacgaaaaattcccgagcgtggtgagggtagagggtgctgggcagcaccccagttcgccgggcccacgctcctccagttgcccggcctgttcagactggttcgcccacctttctctccctgccggccccactcgcctgacctctgagaaagcagaatccgggacatgaagcaaccacagccgctccgcccggccacaagcgccccggactccgtgcctgcccgcagcccccttcctgcagcgttcactcggctgcccggcccggcccggcccgggcgccccgccccagccccgccccgctccggaggcccctcctctatccccgccccttcccgggcgccccgccctctccctccactctgcgcccccgcggcctctctctcctcctgcgggagccatcgccctcctcccgggcgcccctccccgcggccgcagcctgtttcccgggcctctcctccgcattctcacatcgctccagctcgacctccccacccgcccgcctccccgggaggccgcggcccggcgcggcaccgcccctgcccacggttacccggttaccgcctgagaggccggcgcctgcccgggcgggcgggacccgcactgaccccgcagggggcgaggcggggctgagaggggcgaacgcagagccagaccccccgccgccgcaggccgcccacctccaggcagggcttcgtgccagacccggctgtagttatcagctgggtggagggcagtgccagctgcaggcgtccccgaggcgca

SEQ ID NO: 130006 - DNA, 2578 bp, Homo sapiens; identical to SEQ ID NO: 55082
  chr18:45934609-45937187
  hyper

SEQ ID NO: 130007 - DNA, 65 bp, Homo sapiens
  chr18:45938868-45938933
  hyper
atttggatccaggttcgtgagttcagaagttcacgagcatcctcccctgcgatgctgcctctaga

SEQ ID NO: 130008 - DNA, 274 bp, Homo sapiens; identical to SEQ ID NO: 55083
  chr18:46065115-46065389
  hyper

SEQ ID NO: 130009 - DNA, 2254 bp, Homo sapiens
  chr18:46065663-46067917
  hyper
gcggccagaggaaccccgaggtgagcatctcctcgcccgtcctcctcttatagtcatctcagcttgctgatcgattcggggacccgggaggagggctgcgtgacgtgggcgtgcttatagataaatccgggaaaaccgccccaaacaatcagcccccttccccccatccctgctcctgggccagcggggtgtccgcacccatctaccatcccctcctccccctcggtggggaactgcactccacagtgtcgccccctccctgggtttgtcccattccctgccgggttccccgccccgcggggtgtcgtggccctggagctccggcgccaaggggggctcttgggggacgcacggctggagcccggctcgctttggagctgcgcggtgtagccgctgtcatgtgccgggttccgacctgggaggaggaaaagagcgagcgcgattcctctcccttttgttttgaagcccgcatttgctgcatcgagcagttggtttagtatcagccaaacttgcagctgttcagaccgcgctccgccgaggtagggagcccgtctcggggtggcgtttgggggccgggggctgcggcactcggggctgcgggagggaccccgagagtgtgtcgccacgccgcccctcccttccccggtgactgattgtgtctgtggcagcgggcgtgtgtgagtgtgcgcgcccgtccccgcgggctcggggatgtctgtggatggctgtcgtctagacagggcgcagccccctccctgcgtccccggtgagcccgcgggccgcggggggagcgggggatgggagcagaggaagaaaccaaatcggtggacccgttgcggtctcccctttggttattcccaacggttgtggttctgttggctttttttattattcctgtcgctgcggtgcaatcgggcctggggaatagatacgcccggcggagaggggttcacttgacaggctctgaaaagccacctctgggtggcgagtgacccgagaggccgtggggtgggctccggctcgggttcatcaggacgacgagcaggtaactgtcccgggcgccggtcatgggggagggcgggcgggggggcgatggcttgggctgcggcgaaggtctggggcctcggagggccgcgtgccggtgcctggatgtggccggagggggcgtccgggacaccgcgcgcctgagccgagtgtttctctattgatggtaaaagacaatcgggaggggggtggtccgagcccgttatctgggcggcgttggctctgtttggttccgcggagttttcagggttggggctggggggtgtgagcaccgcggggtgtgcggcgtgtagaggggagggctgactggcggcgccgcgtgcgtctccaccccgaggagtgaggcgtcgcctcccccgcccggctgtttgtgtgtacacacggctccggtgtgtgtggggggcggggaccgcagaccgcggcgtagtggggacaagcgtgggccccgatcctccgcgcgacctgtcccgccagccccctccttgtctaagtcggggtcgtgtgtccccgcgcgcgcgcgcccgagttacttggagaggggaccgtgcggctgtgggccggggaagaccgtagggtcgcgtgtgctggtcttcggtgcaggagtcccaggtccgctgtgcggccggagtcacacagcccctccctccgcgtccgcgacgccccgtgacccggcagactgggggtccacccggcggcgcggggggttggtttggctgcgccgcccccagtccacgctggggtgaccccgcaccgaggcgttctatgggtgtgcgtgcccgcgctcgccgccgctgccttcgcagaccggggagagagtcagcgactgccaaccgcagccccggctcttcagtctggggacagtgggagcccaagcccagcgcgccccagcccggcccaggccgccgcccgcccggcgctgtgtctctgcggcccgaggattatcccccagtccaggggcccgcgcgaccaaggaggaagccgctggagccgccggctcggccgcggctagagcctccgtagggcgaaagtgacacagcgcgagagagcgccgccgctgctggagccagggccgagaggaaggagccgcccagagcgcagggaggggccgccggctgtccgttcccagttcctcctgcccagggcccgatctgggctgaaaacctcaggaatccaggctcctagcaggctcgggctgcgcgaggagatggcc

SEQ ID NO: 130010 - DNA, 83 bp, Homo sapiens; identical to SEQ ID NO: 55085
  chr18:46186358-46186441
  hyper

SEQ ID NO: 130011 - DNA, 30 bp, Homo sapiens; identical to SEQ ID NO: 55086
  chr18:46450960-46450990
  hyper

SEQ ID NO: 130012 - DNA, 30 bp, Homo sapiens; identical to SEQ ID NO: 55087
  chr18:46453447-46453477
  hyper

SEQ ID NO: 130013 - DNA, 30 bp, Homo sapiens; identical to SEQ ID NO: 55088
  chr18:46454032-46454062
  hyper

SEQ ID NO: 130014 - DNA, 30 bp, Homo sapiens
  chr18:46476093-46476123
  hyper
gatggctgcacaaacgcactgccctagggg

SEQ ID NO: 130015 - DNA, 31 bp, Homo sapiens; identical to SEQ ID NO: 55089
  chr18:46476386-46476417
  hyper

SEQ ID NO: 130016 - DNA, 145 bp, Homo sapiens
  chr18:46476807-46476952
  hyper
gcgaggagaaaagtcgtttgcctgctaaggagcgaacatgacctccgcacaccatgaagaagtcgggcgccgagttggggcagcaggcgcaggcgacagcagcagcagcaggggcccgggcaggagcggcggcggcccgaggggc

SEQ ID NO: 130017 - DNA, 30 bp, Homo sapiens; identical to SEQ ID NO: 55091
  chr18:46477955-46477985
  hyper

SEQ ID NO: 130018 - DNA, 30 bp, Homo sapiens
  chr18:46478910-46478940
  hyper
cgcgctcgccctagcgcttcattcattggt

SEQ ID NO: 130019 - DNA, 186 bp, Homo sapiens; identical to SEQ ID NO: 55092
  chr18:46501831-46502017
  hyper

SEQ ID NO: 130020 - DNA, 584 bp, Homo sapiens
  chr18:46502486-46503070
  hyper
gctcaggttccagccgccaggcttggccctcagcgggcgctgtcagagggcgggcccgcgggagcggggcggcggcggcggcggcagaggagcgcagggcgggcggagaccgtcggggtcacctctccagccccccgcggtggccgagccacccgcagttgcgctcgaggcgccgaggcggggtggccgagcgagacccgggccgggcgcggctcgggccgcacagccgcggcggcggctgcagacctgtaaaccttaatgacagcaatcttgcccgtctgcgcctctgactcacgtggtgacccagcctccagtcacccggcggccgccctccggcctcagtttcccccgccgccgaacaatgaagccactgtgtcgccgttcatttctgagcgccgtttcacacgcggagcgccgccgcctccctggggaagggaccgaggcgtccggcttttaattatccccggtgggcgggcgtggggaggccgcgctctgctggataattgaaccctgggactattccctcgtcagcccaagctctttatcttaagccgtcctttcctcttcatcgtatttaaatttta

SEQ ID NO: 130021 - DNA, 30 bp, Homo sapiens; identical to SEQ ID NO: 11767
  chr18:46986861-46986891
  hyper

SEQ ID NO: 130022 - DNA, 30 bp, Homo sapiens
  chr18:47018250-47018280
  hyper
ggcgtaaaatgactcgacgcatccgcaggg

SEQ ID NO: 130023 - DNA, 30 bp, Homo sapiens
  chr18:47018932-47018962
  hyper
aggaaggcggaaagcgaagggagtgtagaa

SEQ ID NO: 130024 - DNA, 1692 bp, Homo sapiens
  chr18:47087066-47088758
  hyper
gtaatgaggcgaggtcggaacaggatctgctggctccggctcggtttcctcgcacaggtctctccagctggatcctcgacgctagggaggaaggggcgcgggactgctgtgggggttttccctccccaggcaggggcaggacctgttccgggcgactgcagggttaagggtatcgtcttaaagagccggatcctcccggctggagcgaggctggatggcgggacgcagcctctcagcctctcgtacccgccctgcgtccgcagtggttgttggcgcagccgccccgtcggtgttccgggctcagtccccgctccccagcgccagacgcagactccgggccaagttctccctccgctcgctgctttctgccgcaggacccggatcaataaagggaaggagagccgggaggaaatgatggagaacagagagaaaggagatgcttgatttcactcgccaaggagtgagtgctcatcggcagacactgggctctggccacgcgtcttagactccaaatctcggctcactggtccctttgaggaggtcgcctggtgttcccgtagccctccaccccaccgtaggagagcgcctgccacgagctccgcgcctcgctaagtgctttgctacgtgaactcttagttttcccaacatccctaagccgccgatacattatcacccacgtattgcggacgagagaaccgcctcggagaagctggctggctcgcttggagttttgcagctagtggcggagcgagcattccgagcaggtactgtgcgatcctccagcgccggccgcagctcacagccccttagctccgccgggttattgtgcggccgcgccttctgcacctgttgcggccctcgctaggcgggaagggagggagaagaggaggacaaaggggatgaccaggtggctctcccccgacggactcccggcccagggagcggatagaccactcccagagagagtgtggctttgagccttggagaggatgctctccttctccagggatcgcctccccagcggacgcagagtttcagggaaatgtccgcctccgccacttgggatggcagtggggagaggaggatctgggtgtccggaggagggcagtgggagaaagctggagctgctggagtcgcagctgcctgcggagcgggcccgggaggaagcggggccgagcgtgcggcgtccacgcggtgagtgtgcagcgctttcattcaaactttctccagtctcggttccggcgtcagcaaggtgtgaccaatcagagcccagagacgggaataaattatgcaaatcaccatctggcgatgggtcagatgactcccatacttttaaaaactacctctataggagcgtgacagcagcgagtccttgcctcccggcggctcaggacgagggcagatctcgttctggggcaagccgttgacactcgctccctgccaccgcccgggctccgtgccgccaagttttcattttccaccttctctgcctccagtcccccagcccctggccgagagaagggtcttaccggccgggattgctggaaacaccaagaggtggtttttgttttttaaaacttctgtttcttgggagggggtgtggcggggcaggatgagcaactccgttcctctgctctgtttctggagcctctgctattgctttgctgcggggagccccgtaccttttggtcc

SEQ ID NO: 130025 - DNA, 767 bp, Homo sapiens; identical to SEQ ID NO: 11769
  chr18:47339390-47340157
  hyper

SEQ ID NO: 130026 - DNA, 1774 bp, Homo sapiens
  chr18:47719962-47721736
  hyper
cccgggcgggtgtcccgggaatcgcatacccacgcaacgcgcgtggacaccacacgcacacacaactctgcatggaggcgtgtgcataggcactgttaaacgtgttttggccacccaagaagacgaacaggaaaaccaggcattggactatccaaaacttgttttcttaaaggtgcatagggcacatgtgaagaaaaggcctttgcccctctcactactgactccaggttgaaactcgaggggtcccgggcggctgcagcgctgccgcgagctcccctggaagcggtggcttgtccctaactttaaccacagcaactgctgcggaacgcgggcgtctccgcccgggctgcacctgttcccgattcggagcacccagcctcacacatcccttctgaccttgaaggcatcctgaaactcacaccctgctcccggttcgactttactccaaccccctccccgcagtcactgaagccctctttgtaccaaagaggccgcgtcaaaacatccatccccagcaaattcacaatgctcttccctggggtctccggagataacggcgcacccctctacccattgcttaccctcactccatccagccgccgcgccctcacgccaggttgtctcctccctctccaccaagtccagaacccccacctctcccaagtccagggttccctgttgtgggtatgcgggaggaaaggacgcctcggaggcgcgccctcgagagccggcgccgcagagcccctggggtggggtccacggcggggacaggggacagcagcgggagcaccgcgggggcccgtcccgcgcacggcgctcagagctggcagggtcgccctgccgttcggggaactcggttggagccgagcccaggcaacgaaagtgaggggcgcggcggggagggggcgacagccctggcttggtgctgagccgtggcgctgcggaacctctaggagccgggtggccggtcagtgcgggcgttcccggaaccgccaaactttctccgccaaccgaagttagggactccgaggacagtgacgaggaggacaccgcggaggggggtctcccgtcacctcccgcctccagtagccgagggagaaggcgaccctgagtactaggtggccccgagcgcgccaccccggccccggggcgcctccctcgcggccgcgctcacctggctgtagagctcgcccaccgacatggcccgggccgggcggggctcgggccccggctcctggctgccccgcggctctcagtccgcggctggcccgcctggcgccatgttcccgggctggcctggagtttctcgatcttctcgctcttctccgacctgccccgccggcttcccgcaggcgccgcggccggctcgctcccggcggcgcgacctttactcccgccgcggcggcgcagctacggccggacaggagttgcgagcgccgggggaggaggccgcgccgcaccactcccctcccaggtgtggggaggaggcgagggccggcgaggagggaggacccgctcgcgtcagagcggacggcccgtgcgccgccgcgcctctgagccctgccggtgcccggcccgacgcgccctcccgcgcccccgctgccacctgggcctccgggccgggggcggggcgctcagagaggagctccgggaccggcgcgggccgccccctgctggacgccgcgcgcgcgcaggcacaggtgcgccccggcgcccgcacctgccctgccgcgctccgcttccacccgcaccgggccccgcggagtccggcatg

SEQ ID NO: 130027 - DNA, 411 bp, Homo sapiens; identical to SEQ ID NO: 55098
  chr18:47792568-47792979
  hyper

SEQ ID NO: 130028 - DNA, 30 bp, Homo sapiens
  chr18:47807913-47807943
  hyper
tgcctctcgggctccgcctctggctaagca

SEQ ID NO: 130029 - DNA, 30 bp, Homo sapiens
  chr18:47808306-47808336
  hyper
gtctatcctgtgttcgtgggtccctccgaa

SEQ ID NO: 130030 - DNA, 222 bp, Homo sapiens
  chr18:47813481-47813703
  hyper
atggcgaccctccatcgtggcgcctcacagaccccgcgtaactcactgcggacttcccatcgcggttctccacgcacccctccctgtttatctcatagacccacctggcacccgcacccacccccagtcgcggctgtccacggatacccggacacggactcctcgtcacggctcactacagaccactcaatgtgactccttacaacccgcttatccctctgc

SEQ ID NO: 130031 - DNA, 30 bp, Homo sapiens
  chr18:47814449-47814479
  hyper
ttcttcacgggcgccgccatcttggtggtt

SEQ ID NO: 130032 - DNA, 30 bp, Homo sapiens; identical to SEQ ID NO: 55100
  chr18:48345891-48345921
  hyper

SEQ ID NO: 130033 - DNA, 30 bp, Homo sapiens
  chr18:48346578-48346608
  hyper
ccaagcagcctcatcgtggctgattgttgc

SEQ ID NO: 130034 - DNA, 35 bp, Homo sapiens; identical to SEQ ID NO: 11772
  chr18:48346823-48346858
  hyper

SEQ ID NO: 130035 - DNA, 30 bp, Homo sapiens; identical to SEQ ID NO: 55102
  chr18:48405357-48405387
  hyper

SEQ ID NO: 130036 - DNA, 229 bp, Homo sapiens
  chr18:48494203-48494432
  hyper
tctggtcctcagggcgatagctaccacctgacacacagcgacctgggaaagagggaaactcaatcactgccctcgcggcccggggggagcccggaagcgcgcccagagccaggtcccgcgcgggcgccaccgagcgcggacctccctcgcatcctagagcggccgcgcgggacccggccggcggcgcacttccgcccgggcgcattgtagccccgcggacagctgggcc

SEQ ID NO: 130037 - DNA, 30 bp, Homo sapiens
  chr18:48556497-48556527
  hyper
gaggcgggggcagccgggagaaaggaaagc

SEQ ID NO: 130038 - DNA, 30 bp, Homo sapiens
  chr18:48557317-48557347
  hyper
tgagcgcgttgggtcggctggaatgtgttg

SEQ ID NO: 130039 - DNA, 297 bp, Homo sapiens
  chr18:48723994-48724291
  hyper
taaccagcccccggcgcgcgcggcggcggcggctacgccccacgccgctctccgaatgaagccggcgcgctctgattgggtgcttttaatctctgggagcccgccttctcctcccgcagccttccaactcctttccccagccccaccccccaccctccttcgggccccgcccctcccctccccagagctctctgattgggtgaccgggaccagccagttcccgaagcctactccttccgtcctctccccgcccacctccctctcattcctcccggcacgcgcggagagggactgtga

SEQ ID NO: 130040 - DNA, 70 bp, Homo sapiens; identical to SEQ ID NO: 55105
  chr18:49866289-49866359
  hyper

SEQ ID NO: 130041 - DNA, 634 bp, Homo sapiens
  chr18:49866411-49867045
  hyper
cgctcttttttccctaagccatagtctgtctgcccccacccccttcccgtggaatctttgcctgatccagttcgtttccctccggtctccacattttcccttccagccctccacttctccggatcaatgtgtagtacggttccaactcccagctcgcacaccgctggcggacaccccagtaacaagtgagagcgctccaccccgcagtcccccccgcctctcctccctgggtcccctcggctctcggaagaaaaaccaacagcatctccagctctcgcgcggaattgtctcttcaactttacccaaccgacgacaaggaaccagcctcaaccttttaatgcacagcccggccacaggattgccttccatctcctcttggtccctcctggatgtggtttattgatgacttgcgagcccctcagagagctgtcttccctcctctggctccctccgtttccttgagttagttttctaaggttttaccggggctcgggatctcttggaccgaatggaactttttgctgcctgcttttgctgctgattctgtcagtggacaaggaaaaaggcttcgaaggcagcagaggcgcaggggaggtggagaaagaggtggaggaagaggacgaggaggaggagg

SEQ ID NO: 130042 - DNA, 275 bp, Homo sapiens
  chr18:49867104-49867379
  hyper
tgtgagtgctgccgctgcccgcgacccctggccccgaaggtgttggctgaaatatggagaatagtcttagatgtgtttgggtacccaagctggcttttgtactcttcggagcttccttgttcagcgcgcatcttcaagtaaccggtaagtggctctttcctttcttctcgtcgcacccccttccgtaccccacttcccttctcatttcatttggcgagtagtagaattggggtgggggatagcaagagatttggcgcttgcgctgcccccatttg

SEQ ID NO: 130043 - DNA, 709 bp, Homo sapiens
  chr18:49868094-49868803
  hyper
agctggcggcttcgacggccaaaagaatagaaaagagcaaaatgactcatgataaggtccacttgttttgcgggacctcaccgcaagtgtagatgggcactggggtacagtgagcggtcctggcaaagaaggagaggagagcggctggatgagcattcagagagcccttcggaaacgacctttttccaaatccaaaggaaaaacaggctcaggcagagaccgggcgttgagtaggagctccccagttcgtgcctgggaaattaacagggaatggcacatcaatcgcggccaagcccccagcctccccggagtccgcagctccggctttctcttctctgctaagtgctgcatggccaagggttgcgaacgcgagcagaaaatgcgcctctcactgtcgcgagggattcagacagtcaagcgccaaggcagcccgaggctccccaaagcctcgctcggccgcacgcgggcaggaatctgcgcttgcactcgggctcagctcctcatcttcctttggccagagacagagagagcaggcaggaggggtgtgtgtgtgtgcgtgtgtgtgtgtgtgtgtgtgcacgcgcgctgtcctgtgatgagcgcgtacccgcatccccgcgcttagccgctggtgctccctccctccgtctgtccctcccgggccggtcccctcctcccctggctcttctctcccggagctttgtcctca

SEQ ID NO: 130044 - DNA, 30 bp, Homo sapiens
  chr18:51751070-51751100
  hyper
ccggggcgtggccccggccaccgcctctta

SEQ ID NO: 130045 - DNA, 80 bp, Homo sapiens
  chr18:51795697-51795777
  hyper
gctttcaatctctccgcttccggcctccacccggcgggaaaaaactcccgcacgtgggcctccacgattccttggcatgc

SEQ ID NO: 130046 - DNA, 30 bp, Homo sapiens
  chr18:51884960-51884990
  hyper
ctgctggagacgggcgaccttcgctggccg

SEQ ID NO: 130047 - DNA, 559 bp, Homo sapiens
  chr18:52495526-52496085
  hyper
ggagacttcatccccgagaggagtgtgtttctcactgcagcagttgagtcaccagcaagacttgcctgaggtgagctccgcacatccgcgttgggacttgcagacacgccttcttctcacacaaaccttacccagccccgccgccgcggcggactccgagggtggtgccaccagccctgccactcgcagtcctgacgggcaggggctgcggaccgcccggccttggacccatccggagccacaggttggaggagataagtagctgtccccgtgctcatcgccctgtggagcagatcctgtctccttgctgacggtggagcccgggagttccagggcttgggaaggggaaggaaacctctctgaaatctgacacctgctctcccggcaaggaaacttcgcaggctggtgagttgggaaggcgggctgctgctgctggaacgcgttcccacccacccgggtgctgcagcgccggcctgcgccgtgggaagtgaggcctctgtgtgtgtgtgtgtgcatgtgtgagtgcgtgtgcaccttcgatcgcggtttccagcagaaa

SEQ ID NO: 130048 - DNA, 468 bp, Homo sapiens; identical to SEQ ID NO: 55112
  chr18:52988830-52989298
  hyper

SEQ ID NO: 130049 - DNA, 387 bp, Homo sapiens
  chr18:52989588-52989975
  hyper
gctcccagcattgtacgcagctgcctgagaactcgactcggagaaaggggagggaaaggggagggaagaaaaaaaaaaaaaaaaaaaaaaaaacaccacgtctctgacctcgctcaaaaggagagagggggcagtgttttctgactgcttggtcaacaacctacaaaacggggttgcggaatgaaacagagtagcagtgcggcccgccccgggctccgcgggccccggcctccccggagctggtgggaagcgcggccgcccatgaacttcacctcgccccgccgcagacagccgcatgggcccagagcctacggaggggctggggcgctgctcccctcgctggcgctgggcgccccaagggcgcacgttctccactctggagttggg

SEQ ID NO: 130050 - DNA, 1860 bp, Homo sapiens
  chr18:53254613-53256473
  hyper
gtatttccaaagagacgatcaaactggtaacatccactataaaaccaaatcagggaaagaaaaaaaaaaagccgctcttcagcgcatcattttatgcaacaggaggtagagcgagaaatgaatggatcacagagaaaagagaaactactgagaacgatccgatctcaactttccccccaccctgcaccccacccccctcgcacactcacactcgcacacgcacacacactcgcacacaccactcccctccgcttttcaaagtagctatcaagaaattaaagatgagcgtctctggagtgaaaacacgtccaaagggggaggggtggggtgacagggttggggggagcggagtggagggtcgggtcctctaattgtccagcaccctaatttgtgaaagaaaggggttataaaaattaaagtcaggcccctggcaaagtcctcggtccctccgagggggcatcaaggggaggggcgggggggctggcggcgagggggagggaagcggcgggaggggaaggggtgtctcttctgggagcgccgggcgccgggagcccgcggcgcgggaggcgcggagccgcgtgcggggccgccgagcccgaaccccgcgccgccgggcgcctccgccccgccgagccccgcaggcgccggtacctaccgcccgcgcgcgagaaggggctctccgtgcaccgccggcgccgaggcggcgttcatgtctaaccgccgccgccaccgccgccgcctgctcctgcgcccgctcccgcgcctgctgcctccccgccgccgccgccgccgccgccactacagatccgcagacacacagccaagatccctgactcttaacaccaactctcttctccggggaggggaggggacggagggaaggggggagggggaaacacgccgaggcgcacggaattgcaagttcagcaaagaaatgggtgggggggctccggcggggagacgcgacttgctccgggtcgggcaggctaggatgcatccccctcgcacccaccccgaggggaaaaaaaaaaaatctcaacacctcccccgcctcgccaaaaaatacaaacgaaaattcatcgagcacctcatttttcctcagatcgtcagttacaatctgaagcctgaacagttcagtttttgcccgttgcatccctcggaggcactttgaaatttattcgagtttacatcccctcacttctttctttctcttactctcgttccctctcactcacacatccacacacggcaaagcaagtttatactaggctgcaaatacacgtgatgcaaaaagactttgccaagaggaacaatatttttctttttcgtctataaatcaagccacattttcctggggagattttcgtttcggtagttttgcgttgggggcgaaatctgaattgcatactttctttcccctcccttttaagtcacagaatagtataactgcaaacttcgaaaaaaaaaaagggcaatttttgggggtggatgttgttttgtttttgcacttgagttcctaggcacgctaagtccctgttcgccagcactgtaagtttttaattcaacatttaccattataggccctgcatgctcttaaaacatactttttcacatcactttttaggataaaatttaagcttcataattctatcgtttcgtaataacaagcgtgctttatccggtatatgcaacataagctattttaacgtgtgtttgaaaaaaaaaacacacattctacaaatcctggtattgctagatgtgcgagtacatacacaaaatgcatgcacacactttttcccattggcaattatttaataggttgtcccttttgttttaataaaacatcgggatcgacatttt

SEQ ID NO: 130051 - DNA, 399 bp, Homo sapiens; identical to SEQ ID NO: 55115
  chr18:53256997-53257396
  hyper

SEQ ID NO: 130052 - DNA, 41 bp, Homo sapiens
  chr18:53257760-53257801
  hyper
gtgtaaagcaaataacgcccactttacgaattttatagtgg

SEQ ID NO: 130053 - DNA, 706 bp, Homo sapiens; identical to SEQ ID NO: 55117
  chr18:53446768-53447474
  hyper

SEQ ID NO: 130054 - DNA, 64 bp, Homo sapiens; identical to SEQ ID NO: 11786
  chr18:53447798-53447862
  hyper

SEQ ID NO: 130055 - DNA, 30 bp, Homo sapiens; identical to SEQ ID NO: 11787
  chr18:54305272-54305302
  hyper

SEQ ID NO: 130056 - DNA, 30 bp, Homo sapiens
  chr18:54306105-54306135
  hyper
ttggcatatgcatccgcgtttcccagatct

SEQ ID NO: 130057 - DNA, 355 bp, Homo sapiens
  chr18:54318600-54318955
  hyper
tgcagtggcggcggcggcggcaccggcaccttgcagtatcactggggagacggcggctgtatagcgcttgccgccccacggattatcccagcaggatctacgcaccccgcatcctccgtagttccgccctatccttgtcctccttggctggggcgcccaccggcggtctgataggctacatcgcggcatgagatgaagctgtgacaggtaagggggctttcaagcttctccatgggaaaccacagggcgggatgttcctgcaccgtggaggtcaggggtcaggggtcaaaggtcacaaacccgctctagccgggggcggtgctagctgtcagatcgctgcggctgcaagcctgca

SEQ ID NO: 130058 - DNA, 30 bp, Homo sapiens; identical to SEQ ID NO: 11789
  chr18:54724442-54724472
  hyper

SEQ ID NO: 130059 - DNA, 357 bp, Homo sapiens
  chr18:54789042-54789399
  hyper
atgtgcgttgctgagcgtggcctgagcccggtcagcggccgggcgccggtggcagcccccggtcccgcggcgaccccggcccaggaaggagcccggtagggggtgcgctttccctggcctcccgaggcgggatcggggccgggctccactcggtgagaggatcctgccagccagctgggtgaaagacccacagaaatcccgaactggctgcaagatgcattggtagctggcgcctttagtcgggttcctacagttttgcagagaagtctatgagtgatcgttttcataaatcccaaagtaggagtggaagcaacctcccttcttcctagctgcacccggaagcgcaacccagcaaag

SEQ ID NO: 130060 - DNA, 31 bp, Homo sapiens
  chr18:55019744-55019775
  hyper
gggagcctgagccggcggccggggacgcacg

SEQ ID NO: 130061 - DNA, 532 bp, Homo sapiens
  chr18:55020166-55020698
  hyper
cgtgtccctgaaaaaggagaacatcttcaccactcccaagtacgccagcccgggggcgccccgaatgtacatgttccacgcgggattccggtgagtgcgggcctctgtgttagtgccctcgggaatttggttgatggggtgtttggggaagggaaggcgtgggggaggggtgttttggcctctccgagactctttgggccagataactgcgcggtccttccactcctctctctaattctcccttccccctccctgttattttttttttaacccaaagcccctagaagccgctgtccaaatcgatgtgattgcatttctcgtattcttcctcagcatcccttccctcatttcagaaatgggggttgggggaggctttcaggagggtgagggtggagggaaagacggtgtgtttgttcgggagggggcggcgagcagagatggacaggcgtgaggggagcgccctccccgcgccctgtccgcagactccgcgggccgggcccggggcggtgctggcggtttaatggcgcaggcg

SEQ ID NO: 130062 - DNA, 140 bp, Homo sapiens
  chr18:55020804-55020944
  hyper
cgcagccaccgccccccaccagctttccgggatttctgcaattcccccgccccctgcgggaagcgagcctcggaagggccgcccaccctcgccaggtcggagtcaccgctccgcgctgggccggcctgtgaaggctccag

SEQ ID NO: 130063 - DNA, 582 bp, Homo sapiens; identical to SEQ ID NO: 55124
  chr18:55020965-55021547
  hyper

SEQ ID NO: 130064 - DNA, 179 bp, Homo sapiens
  chr18:55101490-55101669
  hyper
tcaggctggccggggcgctggtcttttcagaaacaaggtttgaatatgcaggtgtcagccaggattccttgtcgtctgcccaccgccgtttctctcccgggatttgagagaagcgggagtgtgtgtgtgtgtgtgtgtgtgtgtgtgtgcgcgtgtgtgtgtctcgtgttaggagaaag

SEQ ID NO: 130065 - DNA, 40 bp, Homo sapiens; identical to SEQ ID NO: 55125
  chr18:55101950-55101990
  hyper

SEQ ID NO: 130066 - DNA, 1406 bp, Homo sapiens; identical to SEQ ID NO: 55126
  chr18:55102007-55103413
  hyper

SEQ ID NO: 130067 - DNA, 119 bp, Homo sapiens; identical to SEQ ID NO: 55127
  chr18:55103761-55103880
  hyper

SEQ ID NO: 130068 - DNA, 243 bp, Homo sapiens; identical to SEQ ID NO: 55128
  chr18:55103897-55104140
  hyper

SEQ ID NO: 130069 - DNA, 203 bp, Homo sapiens; identical to SEQ ID NO: 55129
  chr18:55104166-55104369
  hyper

SEQ ID NO: 130070 - DNA, 1423 bp, Homo sapiens
  chr18:55104738-55106161
  hyper
ctgaaggcacagccttgcccccgcggggaaccggcggccaggatacaacagcgctcctggagcccatctctggccttggcgttggcgcagggactttctgaccgggcttgaggggctcgggccagctccaatgtcactacctacagcgagggcagggtgtaaggttgagaaggtcacattcaccgctttgggaggacgtgggagaagagactgaggtggaaagcgctttgccttgctcaccggccgtccttgccccggtcccagcgtttgctgggatttgccaggatttgccggggctccgggagaccctgagcactcgcaggaagaggtgctgagaaattaaaaattcaggttagttaatgcatccctgccgccggctgcaggctccgcctttgcattaagcgggcgctgattgtgcgcgcctggcgaccgcggggaggactggcggcccgcgggaggggacgggtagaggcgcgggttacattgttctggagccggctcggctctttgtgcctcctctagcggccaagctgcgaggtacagccctctattgttctaggagcacagaaacctcctgtgtgggcggcgggtgcgcgagctagagggaaagatgcagtagttactgcgactggcacgcagttgcgcgcttttgtgcgcacggaccccgcgcggtgtgcgtggcgactgcgctgcccctaggagcaagccacgggcccagaggggcaaaatgtccaggtcccccgctgggaaggacacactataccctatggcaagccagggtgggcgacttcccatggatcgggtggaggggggtatctttcaggatcggcgggcggtctaggggaacaattcgtggtggcgatgatttgcatagcgcgggtcttgggatgcgcgcggttccgagccagcctcgcacagctcgcttccggagctgcgagctcaggtttccacccccgatcccccgggctttcctcgcaccgctgagcccagcttgtggggtgcactcgaccaacgcccgacagggctggggaatgtgacaggcagcaggttcacccgggcttggggagggggagtttccgctttgacagcattttcctttgccgtctgctggtggattcctattcccagtcggtaatcgccccgcagtgttgatctaagaaggtaaagaaaactaggtttccctgcaaagagcctcccccaaatcggcggactccggatactttgagtggatttagaaatttatgtaatctttctcctttagtttatttttcatcctctcctacagttttctctgatttgctgttggttcggggcaagataaagcagccagtagagagcgataataatagcggcgggaaatgaactggagactggctgacagttcttaacattttgtcatagatccccccgaatgtcccaggct

SEQ ID NO: 130071 - DNA, 79 bp, Homo sapiens
  chr18:55114512-55114591
  hyper
cagcaccacgaacagcgccatggaggaacgctgtttgagcgaattggagatggaccctctactgcggttaaatccaggc

SEQ ID NO: 130072 - DNA, 66 bp, Homo sapiens
  chr18:55254077-55254143
  hyper
cgtgaaaatgggcccgggggctgagctagaagcccgctccccaccaccatcgcaggtcactgcaaa

SEQ ID NO: 130073 - DNA, 30 bp, Homo sapiens; identical to SEQ ID NO: 55132
  chr18:55288983-55289013
  hyper

SEQ ID NO: 130074 - DNA, 66 bp, Homo sapiens
  chr18:55289329-55289395
  hyper
cagctggaggcgtgcgggtcctcttgcaaaccagaccaaggatgtcgccccgatccccagatggtg

SEQ ID NO: 130075 - DNA, 863 bp, Homo sapiens
  chr18:55469471-55470334
  hyper
caagttgcccctcctcgtgcacacagcgaggtgacagcgcagggcaccaaactgctgagggaaggagatgcctgcagccatctcagcggggctggcggacgcgacccgacagtcaccggaaaaacagtggtgtcggtcttccccatcacctcccctccccatcccacaataaagcgcacggaagatgtctgggagtacctggccctgccacaggagctggggaggagagcgatctcaccccctccatccctcccggcaggtgggccgcggtcagatacgtttggcccgcaagtccttttcggacacgttggcatctgctcccaaagagcgccccagcaggacccggtcaccggggtcttccagaggggcggtagccaccgcacaggagccagcggcatcccccaaggagccgcaagccctacctggcttaacccccggacatgtgtgtcgctaccgatcgaagaacccaaacaccccgagatttccctcctctaggcaggtgaaaaccccacggaactctccgcagcgctgcctgcccagccggccgtgtctcgccgtccccgaggcctcgggggctcccagcacctccacccaaatcccacctgtgcgggctcgggagtccgagggcgctgacagctgctgccgccgcatcccggatctccaaagtgcggcgggagcggccagggaacctgcaggacaccgccgggccaaggggcttgggaaggtctgggggcccccggcgccgcacccctgcttacctggcgttcgctgggccccggctggggcatccgcctggtgcgcgccgctcggagcgctcgctgcgcacctggccgctgccgccgcccgcccggccccagccctgg

SEQ ID NO: 130076 - DNA, 249 bp, Homo sapiens; identical to SEQ ID NO: 11796
  chr18:55470591-55470840
  hyper

SEQ ID NO: 130077 - DNA, 305 bp, Homo sapiens
  chr18:55470898-55471203
  hyper
cgtcaccccgggtcgaggactgagccagcctggaaagctggcggggccgcggcgcgcccgggacctgagctccctcggtaaggggagctgtgtcctcttgatgccaagtcatgtttggggaccggtcaccgaatgcgcgtcaaagttcgccgcgtggagggtgaagaaagaggctgcgcctcaagacttccagaaacgtatcctgtgattgcagccagcaggctttctgccgagtccaaacgctatcgagtttttttgggtttggagtcaaaaggagttaaggtgcggcccgtgaaccacgcggt

SEQ ID NO: 130078 - DNA, 246 bp, Homo sapiens; identical to SEQ ID NO: 55137
  chr18:55710764-55711010
  hyper

SEQ ID NO: 130079 - DNA, 30 bp, Homo sapiens
  chr18:55712961-55712991
  hyper
tctggctcccctttcgagaggtgaatttta

SEQ ID NO: 130080 - DNA, 30 bp, Homo sapiens
  chr18:56124085-56124115
  hyper
ttttggcacatttagcgcagtcaagagcta

SEQ ID NO: 130081 - DNA, 30 bp, Homo sapiens; identical to SEQ ID NO: 55138
  chr18:56338243-56338273
  hyper

SEQ ID NO: 130082 - DNA, 236 bp, Homo sapiens
  chr18:56807203-56807439
  hyper
ggctcatctccccgcgtccggcttggatatcttcggggacctgaagaagatgaacaagcgccaggtgacggaggagggtggtgagcgcgccgtggccgggaccgcctgtgctagcggggagtcggggcttcccagtcagggctccggctcccagtgaatgcggccgggcggccacccgaagctcccgcgctgggctctcaggccctgggttctacgcctacgtgtgggcatgggtg

SEQ ID NO: 130083 - DNA, 386 bp, Homo sapiens
  chr18:56887082-56887468
  hyper
ggctggaggcgccggcgagcctggagagggaggagttcactaaattgtgttggatggaaggcgtcgaggaccggaggaattaatccgatgtggggaaggcggacggggctacgaggaaaaaagagggggcaatgtacactcagccttttcatcactcggcggggagatggatggttttccggaccgggcgtcccagcgccccggttagctatagggagacgtcagagcgctctggtccgcgatagaagagccccccagcccccccgcccgggcttccatataaagtaggggccctagtggaggccgcagcagtagcaccagcggctgcggcggcggagctcctccgaggtccgggtcaccagtctctgctcttcccagcctctccg

SEQ ID NO: 130084 - DNA, 356 bp, Homo sapiens
  chr18:56887502-56887858
  hyper
cggccgtgagctcccgctggtcctgctggcgctggtcctctgcctggcgccccgggggcgagcggtcccgctgcctgcgggcggagggaccgtgctgaccaagatgtacccgcgcggcaaccactgggcggtgggtgagtgtcctggccgcgggagccgcgcgcttgtcctcctctggatcagccagccggaggggacctgtctccccatttctttgcgtttccctggcccagctttgggagctgggtttgttgtgacctttctatcggcaaacaccttccccgttctcctaaaactccaccccacctttccccattctagggagcccatgagtccctagtcagccgcaggctggt

SEQ ID NO: 130085 - DNA, 420 bp, Homo sapiens
  chr18:56887906-56888326
  hyper
cgagctcccaacagccaaccccggtgcagatcaccttccctctgcgcccatcctacatctccttttgtccgcctagtctcaacctgtctggcacggtactctcctagaataatcttggggagcgttgtcccttgaaagcatctcagaaccctggtccagctcggtggcctcaacagcgactggcatgggctgaaatctaagctgcgcctatgctccccgcaaagccacaggtgtggggacctagggtgcagcgctcccgccccgggtttcacatctgttcagtgcgcagtgccctgaatcccgcctgtctgtgactctctggagtttcctcagtccttctcttcgctttgcagcgatattcttttccctgcccttttgccctccctctttccagccagcaggctctgagcttggggaatc

SEQ ID NO: 130086 - DNA, 271 bp, Homo sapiens
  chr18:56888384-56888655
  hyper
cgcccttcttgacccacgacttcgccctttcccctcgctcctttcccattccctctgcaacaggtcctgctctctaggcaccggcttggaggctccctcgccatggcccctagaacccaggcggagaggacggccgcgctgcgggtgcggagggcgcctgcgggtggggtcaggattccgccctgcgcgcactcgctgctttcgctcagctgggaggcaggaagcgcctggcagcctcggctcacccagcatcaccccagggctctcggcg

SEQ ID NO: 130087 - DNA, 51 bp, Homo sapiens; identical to SEQ ID NO: 55143
  chr18:56888686-56888737
  hyper

SEQ ID NO: 130088 - DNA, 30 bp, Homo sapiens
  chr18:56931191-56931221
  hyper
agggtcgggtgcgtccgtctggcgctgcgg

SEQ ID NO: 130089 - DNA, 30 bp, Homo sapiens
  chr18:56931586-56931616
  hyper
gccctcaccgtacgccgaccgtgtggggaa

SEQ ID NO: 130090 - DNA, 343 bp, Homo sapiens
  chr18:56932077-56932420
  hyper
ggaccggtccagggccgcagtgcctaaccccaggacaccgagcgagggcgcctccgcggtcctacgggaacctcaggacactgagcgagggcgcctccgccatcctacagctgttctcttaacgtcgagcctctggagcccagcaatccagagaggccgagccctcagtcccctgcgtccgtgcaggaaagaaattgggctgcgagcatcgccaacagaagccgggagccgtggcgcgcattatggacacgccgccctcgcgcgcagagactgctccagaaagggaaaaacgcaaaacttaaaacgcggtggctcacgcctgtaatcccaacactttgggagt

SEQ ID NO: 130091 - DNA, 342 bp, Homo sapiens
  chr18:56932659-56933001
  hyper
ctgtctctaacaaaacaaaacaaaaactgccgtggggctggctgatggtggccacggggtcgcgggggaggtccgctcccggcaggctccagctctctgggtcagcggaggtaccccgaggctcaaagagcggtcagctccccacctccccaaaagtgcctgactccgcccttctctcggcgcggtccaattcgcggcgtccttcccctccccgccttcgctatctgagagccccgcccaggccccgcccaacctggttcgcaagagcagaagaggatcccggtctacagacccgcttgctttcctcctagggcgggtcagagcagacgtcgtcggggtttg

SEQ ID NO: 130092 - DNA, 30 bp, Homo sapiens; identical to SEQ ID NO: 55146
  chr18:56933297-56933327
  hyper

SEQ ID NO: 130093 - DNA, 587 bp, Homo sapiens
  chr18:56934819-56935406
  hyper
tcatcctgaaagcacgcttagggacgggggttgtggggtggacgccccccccccccccgtgccaggacctgttggcgggcatccaggttctgctggcggtcgcccagcttccagtgtcaacggtggatatcgagcacgctcaggcgggagtccgggactctccttcttcagagagtctcaggagattgtgaagcgggctgagatttcgagattccttcctcgccctagagccggcgccaaagaactgcagatactgtccagggcacgcccgcaagaactagctctcggggcggtggcgtagggcgctccaggacactctccgagcgcggcacctcaccagacgcgccttttaccgaactctgggttggcgagtgtggagcgagttggggaggttagagagtctcgcggctccgaaaaggaaaagcatctctttgcctcagttcttgtaccgctggtgatcaaccttgggtgttagggactggcaccgaaccggagatctgcttggtgaactgagaggagtccttaggagagcggggacgccaggggccgggggacacttcgctctcgccctagggaaggtggtcttg

SEQ ID NO: 130094 - DNA, 101 bp, Homo sapiens
  chr18:56935479-56935580
  hyper
cgcgctagcatctgagccttagccccatccactccggaccccaagcgcgcacgccggctccagggaagggcgcctctggtctaggccgccgaagcgttcgg

SEQ ID NO: 130095 - DNA, 881 bp, Homo sapiens
  chr18:56936004-56936885
  hyper
gaggtccgcgaagtgcgttgaggcggccagagggcctctcctcaggcctgaaagtcgcccttctccccgtgcatcgggagcaggcgcgtggccctgaactatgcttggcgggtggctgcaggcgacagggaaagaggggccgagctggggaggggggttgtccctgggagagaggatgcgggtacggtgcggtcggcccggggtcggatcccaagacgttccccagtgcccctagagggcctgccacggcttcccgatggcctggatgtgctccttggctttcagacgcagcgccgcgatgctgctgttgcgcgggtccgcctcgtccagcgggaacttgtccccgaagccgggcccgcacgggtaggagggcggcggcggcgcgagaggttgcaggccggggcccaacggcggggagttcaggaagggcggaggcggcggcggtggcgtgtagctggcaggcaggctctgcgccggcggcccgaagcccggcaggctctgcagcgccgtggcgcccccgcccggcagcggcggcccgagccaggactccagcggcagcgcgcccccagccggcccgccaccgctgcccgggcccgccccgaggggcgacagcgtcgcggagggcggggagcggctgaaggagaggaggggcgagtcctgcagcttcatggaggacacttccagcttctcctgccgccgccacttagcccgtcggttctggaaccacacctgcaggagagagcacaggggccgtcgggcagcagcggaggctgcggccgcgtccccaaccctgagccggttcagctcggcgggctccactccgtccccctcaaataaaactaggggcgcaactgttatgcatgtgccgagagaggcccgga

SEQ ID NO: 130096 - DNA, 30 bp, Homo sapiens; identical to SEQ ID NO: 11804
  chr18:56939181-56939211
  hyper

SEQ ID NO: 130097 - DNA, 153 bp, Homo sapiens; identical to SEQ ID NO: 11805
  chr18:56939498-56939651
  hyper

SEQ ID NO: 130098 - DNA, 407 bp, Homo sapiens; identical to SEQ ID NO: 11806
  chr18:56939763-56940170
  hyper

SEQ ID NO: 130099 - DNA, 679 bp, Homo sapiens; identical to SEQ ID NO: 11807
  chr18:56940565-56941244
  hyper

SEQ ID NO: 130100 - DNA, 474 bp, Homo sapiens
  chr18:56941557-56942031
  hyper
gggccaaggagatggcccagagctggctggggaaggaccttctcccggggaagaggcctctcgcctccccgagggttcaggagtaattggcttgcagttctttctcctttggaccccctcgaggcttccgtggcccacagtgactgatcggccacttggaaagatgattggatagggtgagtgtgtttcacctccagcagcgcggatggacaatggcgctgtgaacgtctcacccctcaaatctgaggcgagacccgaggcgagcgcttggccttccctgaactggtggcctgaaccgtgaattaaaatgctttcctataaaagctcaaggacctagaggacaatatccctaaaatctccttttcagtaggcgctctgatctccacagcaggggtgtcttctttatcccgcttgcgttcagacaagcgtttgctgcgtccctttagagggcaaggcaaccgtcgagggccacgt

SEQ ID NO: 130101 - DNA, 177 bp, Homo sapiens
  chr18:56976024-56976201
  hyper
acgtgtctgtcccccgcagcctctttttcgccacatgggccatcgaagggtccctgtacccagagcctcgtcagtgcggggacgcgggcgggagggtaacgtgcgacaagtgacagcgcgggaggcagaggaggcgcccaagggtggggctggtttgcaagcgcaaagtgttgcact

SEQ ID NO: 130102 - DNA, 30 bp, Homo sapiens; identical to SEQ ID NO: 55155
  chr18:57026678-57026708
  hyper

SEQ ID NO: 130103 - DNA, 389 bp, Homo sapiens
  chr18:57069711-57070100
  hyper
agcccccaagcggttcggtgttgaagccaaatctcagtctgtgttgtgacactgccattgctgccgcctgcagtaccactgccgcatctgactcacattctagaaggaaggtaggtttgtcccaatgaatgcagcttggggcagctgccttgtggagaggtgactgaggccgctgtgctgaggctccctgggcgattcaactacaccatctgccgtgtcagcttggaactgcaggagacgctagaggggaagacggagaaaggaagggaaacaaagattgatatgaccatatggtctgcatattgagcttgctgtcttttacatttgtgacttagaggaacctgtatcaagaaaatgtcattattcttattccacggttgaggagactg

SEQ ID NO: 130104 - DNA, 527 bp, Homo sapiens
  chr18:57363522-57364049
  hyper
acgaaagcagccacccgtgtttgctatgccccactgtttacacccaaaatccaatccaatctccttcacagacttccacacaagtatttcagggagcggcaaccatcctcaggatctcagggcacacaccctagacgcaaagtcagttgctcagtgttgctctgactccgatccaaccaaccctcaaagattcgcaccgcgcggcacgcacccagcaggttccagcgtaaaagctgctccggtcccaagcgcgtctccaaacccctcctttacagcgccgcctccccagccagccccggtgcgcagtggcgaacagcccgcagagcccccaggcttacctgtagcatgtggtgagctcgcctgaagacttcagacacgggtatttagtcgtcgcgattttgctctctgagcagatttctctatgaaaaagtgcagaggaaatgttcgattctcagcgggagagcggaggcgggcagcgcgcgctggggaatccctggcgcgtggggatcgccaggctccccgtcccg

SEQ ID NO: 130105 - DNA, 562 bp, Homo sapiens
  chr18:57364448-57365010
  hyper
gccgtcctccggctcctctctgtaggtccacgtgtgtcccaacgccaggagcagcagcagcggacccaggctcctgcccagctggcccctggcagctcctccccggctcggaggcggcggcaccatcagggaagctcccggcttcttcccagcgccgagctccgtccggaccaagcgtcctgctcctccgcggccgccgccgccttccctcttcccggcagggggcgccggagagcaggggcgtttgcaccacctgcacggggagcaggggtccggaatattatggggctggggggaaaatgaggctaggagttggggtatcggatgcaaacccagcagagaagcaggtaaagggggtacctgcggtgtccggctggcgcgagggccctgaggttcaagttgtctcgtcgggacgttcacgtccgattgacagacttgctggactcggcttggggctgcgccctcgcctcttccctctccctcctctgggagaagcgcgcagggtggggaaagcgggcggttgtttgcattttgcaccagggtctcacgaccgggaggagga

SEQ ID NO: 130106 - DNA, 161 bp, Homo sapiens
  chr18:57365410-57365571
  hyper
atactgtttccacgccgcgcacatcagagctggaaacgcccccccccatcaaatgagacacgtgggggcaaattaattacaggtgctgctacctgctagtgtatgcagccgcgttgataggtaacaagaaaacggaggaggggggccgtaaatcggctccc

SEQ ID NO: 130107 - DNA, 100 bp, Homo sapiens
  chr18:57566992-57567092
  hyper
ggccgagcgctctgcgccccccgccgcgggtcggcgccgccgcgggtcgggagcgtgtccgggcaggtcgcgctcagcggggtacttccccgcccgcgtc

SEQ ID NO: 130108 - DNA, 255 bp, Homo sapiens
  chr18:57567153-57567408
  hyper
cgggcgtctagtttccctacgtcaccagggaagttctcactggacaaaagcgtggtctctggcgcggggatctcagagtttcccgggcactcaccgtgtgtagttggcatctccgcgcgtccggacacccgatcccagcatccctgcctgcaggactgttcgtgttcagctcgcgtcctgcagctgtccgaggtgctccagttggaggctgaggttcccgggctctgtagctgagtgggcggcggcaccggcgga

SEQ ID NO: 130109 - DNA, 164 bp, Homo sapiens
  chr18:57567941-57568105
  hyper
atcttgtaacatttaaataatcgatattgtgggaggtggggataggagaataggagttagtccgctcctttttttcattcattcattcgcactccccaccccgatacatacagctccatcgtaagttttcaggccagcgccccggccccatgctttttctaaat

SEQ ID NO: 130110 - DNA, 713 bp, Homo sapiens
  chr18:59000630-59001343
  hyper
gggaatgaggacccgcggtacaggcaggcagcagccactcctgctagggaaggcgcgagggaggggaagcggaccgcgcgccacgctcgggggacggtgaccgcgaccagggggctcttctcactggacaggccgaacgcggtggccgcgggagggcagggcagggcatcggcggggttggtgcacttggcagtaccccccaactcctggcaaccgcacggagactttgcgaaacatccgaaggcagaaaagctgtgacacttctgacagagggggtaggggggtggggggcggggacagcgccgcgagcaggggtgaagagacccagcggggcaccagccgcccagtgggggaggcagctacgtgagcagaacgcccgccctggagcagttaggaccgaaggtctccggagagtcgccggcggtgccaggtaacgcagagggctcgggtcgggccccgcttctggggcttgggactccgggcgcgcggagccagccctctggggcgaaatccccgggcggcgtgcgcggtccctctccgcgctgtgctctcccagcaactccctgccacctcgacgagcctaccggccgctccgagttcgacttcctcggacttagtgggagaaggggttggaaatgggctgccgggactgggggagctgctctctggaagcagggaagctggggcgcaccggggcaggtggaggacgtggc

SEQ ID NO: 130111 - DNA, 360 bp, Homo sapiens
  chr18:59001497-59001857
  hyper
cgcacagagatgtgcgccgggaaggggaccagagagccaggctccggggaggcgcaggcacctacggggccgatccctggtccgtgcctcgcgccgcgcccccgccggagctcggctgtgggaggagaatgtggtgggtactcgagtccccgccacctgccggacttcgccaactccccggatttcctgtcctcgggccctgacactcccaaggaaagctctgaattgcgctcgctgtttggtttttgcttgttgtagttactctgggggaagagccgggggcaagggggtcaaatggggctaaagtttcagatttgcaaagagaacgttaccgaggactctcaacgtgtccttagcaat

SEQ ID NO: 130112 - DNA, 163 bp, Homo sapiens
  chr18:59500716-59500879
  hyper
tgatggttttaattgtcgaaactcctctgcgtttccctctaatggaatatcaatgaaaccacagaaccacagacacacacaaacatgatttcctgaggaagtgattctagggctaacataactgaacacgagggccgtctgttagtctcgtctgtttgttttt

SEQ ID NO: 130113 - DNA, 1161 bp, Homo sapiens
  chr18:59560075-59561236
  hyper
agtggaaatggtacacgtttaggaggcaagaggctgacaggcaggaaacacaattgagactgagctttcttcagcctgcagtgaaatacatgcaggaagggttagatacgcgccgcggagaaggaaatccaagcgccctcctgggcagacggggctggagcgggtgcactagggaggtggagcaaggcagatgaggtgtggagggctggcggccgagaagggggcgtcacggctcctaattgtctctacaggataaataaccacctcccccctcctccgcagtctcccccgcccacgagttcccctctggtggcagagcgcctactagcaacagtaagccctaggaaagaaagaaatcggagcaggtggggaataacatcttggggcaaagacacactggcaaaatctaccaggtaacccggtcatatgggaatgcggggcgcctagtcagccgcgcagacaggcacacagcgcggcaatcccgagcatctttctttcgtttgcccctgtccgccacctcatcaagtcaccgccacctcatcaagtcaccgtcacctcatcaagtcaccgtcactctgctttggcgatttctctactctctccagacccaggcagcgctccccaagccatgccccgaccccaggcgggattggggaccgccgcttcccgagcagcgccccacgagtccagctggctttgtcctgccgctgtccttccaggagcaagcgccccaggcgcgtgtgtctgcacaaaagacccccaacatctggcccttcacagcgctctctaatcccgggaggggccctggggcaacttctagggctggagaaggcgcgagacaaggggaccgggagaagatgagccggggtgtgtgcgggccgggggcgcaactggggcgggcgcgcgcgcacgtgcacacccaggggcgcgcgcggcgcgggcacgaggaaagctccctcggaccggagctccagggggcatccgaggactcggccgagcagccgacagcgccgctccccgccgcggccgcccgcccaactccgccagctctcaggagacacgcaactcccgggaccacctcccccgtgccccgccagaccccgcgctcccctccccgggaccctgcggccccgccaccccctccgcggtccagaagatctc

SEQ ID NO: 130114 - DNA, 30 bp, Homo sapiens
  chr18:59853963-59853993
  hyper
ctggcagcaaatagcgagaaaaagtgcagc

SEQ ID NO: 130115 - DNA, 165 bp, Homo sapiens
  chr18:59992237-59992402
  hyper
gcaggagccagtgccgtgaagggcaacccagggctggtctcccgccaacctgtctgcagcccgagcacctgggccaggggcggagaccggaccaaggaggcaccgggcgcggcgaacacccccggggcccctccccgagcggggccccgcgtcccaccgcaaacc

SEQ ID NO: 130116 - DNA, 40 bp, Homo sapiens; identical to SEQ ID NO: 55167
  chr18:59992690-59992730
  hyper

SEQ ID NO: 130117 - DNA, 114 bp, Homo sapiens; identical to SEQ ID NO: 55168
  chr18:59992967-59993081
  hyper

SEQ ID NO: 130118 - DNA, 13 bp, Homo sapiens
  chr18:60173666-60173679
  hyper
tttcattttcctc

SEQ ID NO: 130119 - DNA, 501 bp, Homo sapiens; identical to SEQ ID NO: 55169
  chr18:60189546-60190047
  hyper

SEQ ID NO: 130120 - DNA, 1612 bp, Homo sapiens; identical to SEQ ID NO: 55170
  chr18:60190084-60191696
  hyper

SEQ ID NO: 130121 - DNA, 96 bp, Homo sapiens; identical to SEQ ID NO: 55171
  chr18:60191978-60192074
  hyper

SEQ ID NO: 130122 - DNA, 31 bp, Homo sapiens; identical to SEQ ID NO: 55172
  chr18:60193831-60193862
  hyper

SEQ ID NO: 130123 - DNA, 98 bp, Homo sapiens; identical to SEQ ID NO: 55173
  chr18:60194121-60194219
  hyper

SEQ ID NO: 130124 - DNA, 51 bp, Homo sapiens
  chr18:60263492-60263543
  hyper
ggctctgggcgggttcgcgttcagatcctcgaagtggctccctccgggacc

SEQ ID NO: 130125 - DNA, 540 bp, Homo sapiens
  chr18:60263660-60264200
  hyper
cgctcccgcgcgggtcagcaattcgaagtccgccccagacccctgggccttcgggcgcccccggaagccgcagggactgtcggactgagcggcccccttgcttgggtgggagctggggtgcagagaggggctgttctcgcacccttccgctgcatcggtccccgggccagtgcggagactcctctttgcgtttccaaatcacttttacgaacaaaagaggcgcccagaggatatcaccccgggcgcaccgccctccaggggtgtttgaaacgtgagctgttgtcaggcccagggccaaggatgctaaatgtccgggaaaatgcgcgcggcagccggccacactcaggacgatggtccgtccccgagagccagcagggctgcggagaggaagatccagccgccgagcgcagcgcgcacggagcgggacgcctgcggcgatgcctgcccgggtggccgctgtcctctgcccgggcgccgctggagccgcgcgtccccatcgccgcgccggctagtcccacaggtgcccggagagggaggcac

SEQ ID NO: 130126 - DNA, 54 bp, Homo sapiens
  chr18:60382504-60382558
  hyper
tgccgtcatgccggcgatgaatatttatgaggcacacgcggccctcccgccctg

SEQ ID NO: 130127 - DNA, 1436 bp, Homo sapiens
  chr18:60382938-60384374
  hyper
cggtacagcgactccccgagctcggcagggaggaccgagcttcggctccggcggccgccgctgcggcagcagcagcagcagcggcggccgcggcggctctggcggcggcggccgggggcggccggagtccggagcccgcgctgaccccggcggccccgagcggcgggaacggcagcggcagcggggcgcgggaagaggccccaggcgaggcgccgccggggccgctgccgggcagagcggggggtgccgggcgcaggaggcggcgcggggcgccccagcccattgccggcggggctgcccccgtacccggggccggcggcggcgccaactccctcctgctgaggagagggcggctgaagaggaatctgtccgcggccgccgcggccgcctcctcgtcgtcgtcgtcctcggccgctgctgcctcgcactcccccggcgctgccggcctccccgcctcctgctcggcctcggcgtcgctgtgcacccggagcctggacaggaagacgctgcttctgaagcaccggcagacgctgcagctgcagccgtcggaccgggactgggtgaggcaccagctccagcgcggctgcgtgcacgtcttcgaccgccacatggcctcgacctacctgcgcccggtgctctgcacactggacaccacggccggcgaggtggccgcccgcctgctgcagctgggccacaaaggcggcggcgtggtgaaggtgctgggccaggggcccggagccgccgccgcccgggagcccgctgaaccgccccccgaggccggcccccggctggcgcccccggagccgcgggactcggaggtaccgcccgcgaggagcgcgccgggtgccttcggggggcctccgcgcgcgccccccgccgacctacccctgcccgtcggcggcccgggcgggtggtcgcgccgcgccagcccagcgccctcggactccagccccggcgagccgttcgttgggggccctgtctcttcgccccgcgccccacggcctgtggtctccgacaccgagagcttcagtctgagtcccagcgccgagagcgtgtctgaccggttggacccctacagcagcggcggcggctcctcgtcgtcgtcggaagagctcgaggccgacgcagcctcggccccgacgggggtcccgggccagccccgccgtcccggccaccccgcgcagcccctcccgcttccccagacggcttcctcgcctcagccgcagcagaaagccccgagggccattgacagcccgggcggggccgtccgcgaggggtcgtgcgaggagaaggcagcggcagccgtggccccgggaggcctccagtctacccccgggaggagcggggtgaccgcggagaaggcgcctccgccgcccccgccgcccaccctgtacgtgcagctccacggagagaccacccggcgcttggaggcggag

SEQ ID NO: 130128 - DNA, 151 bp, Homo sapiens
  chr18:60805529-60805680
  hyper
ttccccccttatcatcggctcggcaggatttcctccacagccacattgtgctgaatgagtctagagggttccgtctgcagagcagtgtggctttggcagctgcatgcttgcttctgtcccctgtgactcttcctcccgcaccctcccttta

SEQ ID NO: 130129 - DNA, 132 bp, Homo sapiens; identical to SEQ ID NO: 55177
  chr18:60985400-60985532
  hyper

SEQ ID NO: 130130 - DNA, 470 bp, Homo sapiens
  chr18:60985592-60986062
  hyper
cgtcgccggcctggcggagggtcaggtggaccacaggtggcaccgggctgagcgcaggccccgcggcggcgccgggggcagccggggtctgcagcggcgaggtcctggcgaccgggtcccgggatgcggctggatggggcgtgtgcccgggctgggaggagaagatgcccggtgcgggggcggcccccgggggcgcggcgcccacatctcccgcatcccactcgtagcccctctgcgacagcttataatggatgtacttcatcactatctcccggttatcgtaccctgttctcccagcgtgcgccatccttcccagaggaaaagcaacgggggccaacggcacctctcgccccagctcccaccccacggcccccagagaaagaagaggagttataatccagctattttattggatgtgctttgcattcttggacgagggggtgtcttcaatcacgcggaacacttgattc

SEQ ID NO: 130131 - DNA, 287 bp, Homo sapiens
  chr18:60986639-60986926
  hyper
agatctcaagagctcgagaaaaaaaaaaggcagcggcggcggcagatgaattacaattttcagtccggtattcgcagaagtcctgtgatgttttccccttctcggcaatttacacgcgcgcacacacgcgcgggcacaggcatgaatctctatccacgggaccgcttcacgcctccccaggagagagacaggggagaggggacgatgaaggagccggggacggaggcaggaatcctcttctgattaaactccgaacagcaaatgcattttccgaaaagctgctggat

SEQ ID NO: 130132 - DNA, 30 bp, Homo sapiens
  chr18:60987414-60987444
  hyper
ctgcacagcccgaccggtttcctgtgcgta

SEQ ID NO: 130133 - DNA, 22 bp, Homo sapiens
  chr18:60987889-60987911
  hyper
aaagcgccgggaaccgcctgga

SEQ ID NO: 130134 - DNA, 141 bp, Homo sapiens
  chr18:60987970-60988111
  hyper
gtctcgcctggaccttttctagccgtgtatgtgggagtgtgtgtgtcgcctggaccctttctagccgtgtatgagagtgtgtacacgcgcctacacacacacacgttgtgttaccggcgctcggccgccgggggaagaccc

SEQ ID NO: 130135 - DNA, 30 bp, Homo sapiens
  chr18:61034568-61034598
  hyper
accgccaccgccaccgccaccactgccaga

SEQ ID NO: 130136 - DNA, 30 bp, Homo sapiens
  chr18:61089248-61089278
  hyper
caaagccagtagctcgggagaccccaagag

SEQ ID NO: 130137 - DNA, 30 bp, Homo sapiens
  chr18:61089933-61089963
  hyper
cggaagcacagagccgggttttgttgtttg

SEQ ID NO: 130138 - DNA, 801 bp, Homo sapiens
  chr18:61603404-61604205
  hyper
gagcgcaatgcagcgcgcgttcctcctcctgggcgcccatcctcggctgctgcctcttcctttcgggccccgggacctgaccttccttccgggtccgcacagaaggcctgagcgcgtcgcctctaacactggtccagggcgggggaacgcggtgtgcctcggctgccacctcctggtgactaattctagtggacgtggagagcgaaccacagcctcaacaacacctaattctaattacagctggtgatcggtgaggtgacggaaataaacggggcgctatggcgggaactaatagatggtctccttagggtgtatgaggtgtcccttgacccttctctccccgaagtggacatcaaggtgatcctccccccatgacctcctacccgtggcatcctgcgacccccacccccgctgccagcccagtcctcccaggagccctcgaggggagcacggggttggctgaggggatgggggagcttccgcggacacagtccagccccgcagaatgcaagcggcgcagaatccttgaaagagcttccgagtgaaacccacgcccgcccgtggggcggagccctagcaggggcgggcgagttcccgcaaggccagcgcggaagggaagaacacggtgtggggaggcaggggctcaggagggcgccatcagctggtgctcagagcccggaggaaggaactccccccggagttggggggggtggccctagggatgcctcaccggccccatctctccacggagctacgggtagcatcgcccatcgctcctacaccccacgcgccctggcccag

SEQ ID NO: 130139 - DNA, 30 bp, Homo sapiens
  chr18:61637284-61637314
  hyper
tctgagtcatctgccggaagccttgccctc

SEQ ID NO: 130140 - DNA, 30 bp, Homo sapiens; identical to SEQ ID NO: 55182
  chr18:63411688-63411718
  hyper

SEQ ID NO: 130141 - DNA, 30 bp, Homo sapiens; identical to SEQ ID NO: 55183
  chr18:63416927-63416957
  hyper

SEQ ID NO: 130142 - DNA, 526 bp, Homo sapiens
  chr18:63417369-63417895
  hyper
aagggtcctctgtcccgcactgcgagtaaatcatacactttggaagtttagcattagagagcccagcaggggagaaaattgtctgcaagttaaaaaaaaaaaaaaaaaaaaagtagaactagggcagtccgaggagattgaaagggcaaaactatcaagcaagaaaactgtaagttctgattagttttatgactttgccttcatgcctcaggagctcaactgatcacggctttcacgacaggctaaggtgggtgttggaggggcagcttgaaaataccctcaaaactctcctccagctccgtgctttcagatgcaaatgcctcacggagagatggatgggctgcagcccctcctactttcacccctcttctttattttcctgcgaaggaatccatctgtacagatccgccaggcgggaggtggaggagggtgcgcgagggtgcgcgcgtgtgtgtgtgcgcgcgtggcggccgagcggctccgtcttcgcgttcttttccagtagcccccaccgggtctctgggag

SEQ ID NO: 130143 - DNA, 650 bp, Homo sapiens
  chr18:63418336-63418986
  hyper
cgcccgggtccctggcgtctgacgccgtggggagggcagcgaggccccaggtgagtgtgtctgcctgcgcggggctggggaggcgccgctgggcagatgtgcgcccttgctgtgcgcctttggaagcaggactaatcagtgagcggagagcgggcggggatgtccgtgtggagtttcccttggcgtccccaagttactgcgtgttgcagtgagatgtggctctgcaaggcaggacaggcttgtggacggaggcgggggcgtttggcccggaaagccggtgttgacagacaccaggtgcgacacgaggagtagtagttgagggtaagagcaaatcccggcactctccaggtgcagcggcaaacatgggcaggctggagcactctcctcaaagaggaccacaagcaggctcctccctcaacctcggactgatgggggcacaactccgcgccggctgtgccgccgggttctgcagaggtctgaggctggaagggggtatgcgccgctttgggcaggagtcctttgaaccattcgctctggacaccttttacctttcgtgaaggtggagctcacttcagggtgctttgcttttttcccctgtaattagtattctgctgatctggttcatctgcatcctgcgtcccctccgcctg

SEQ ID NO: 130144 - DNA, 30 bp, Homo sapiens; identical to SEQ ID NO: 55186
  chr18:63421750-63421780
  hyper

SEQ ID NO: 130145 - DNA, 30 bp, Homo sapiens; identical to SEQ ID NO: 55187
  chr18:66382544-66382574
  hyper

SEQ ID NO: 130146 - DNA, 482 bp, Homo sapiens; identical to SEQ ID NO: 55188
  chr18:67067488-67067970
  hyper

SEQ ID NO: 130147 - DNA, 118 bp, Homo sapiens; identical to SEQ ID NO: 55189
  chr18:67067995-67068113
  hyper

SEQ ID NO: 130148 - DNA, 783 bp, Homo sapiens; identical to SEQ ID NO: 11831
  chr18:67068592-67069375
  hyper

SEQ ID NO: 130149 - DNA, 409 bp, Homo sapiens
  chr18:67872731-67873140
  hyper
ctatcctgacaaagcgggggtgaaagagggagcggtcgcggagcggccggccgcggaaacgtgacacgaccattctcagcaagtggccagagcgcggggggtgccttgggcgaggggcaagctgacagttaccgagtttcctgatgagccctgccaggaccatctcgtcccgtcaatctgcagccgccggagaattaaactgccgcgccactgcgtccagccacaattaatgtacccccggaaacacgtcctgtgggacggtgagttccgcaacgcctgcgctcaccaggagtaggagtcattacgtgagcccttcgcggccccagcgtcgccaggagagcttccagcctctctagaatcactactgcgcacttcctggacagcagtctccgtcgcaagaagcggaggg

SEQ ID NO: 130150 - DNA, 150 bp, Homo sapiens; identical to SEQ ID NO: 55192
  chr18:67955796-67955946
  hyper

SEQ ID NO: 130151 - DNA, 550 bp, Homo sapiens
  chr18:67956669-67957219
  hyper
acccctcggcctcttcggccgcggcgcgccggcctgggccgccgcctttgttgcccgcagctcgccggggagaggccggggctccgcgaggcctgggcagcggcgcggggcctgcgcggctctgcgccccggccgggtccctcctcggacctccgcgggctcgggctcgggctcggggtcggggcgcggcgaggccgcaggcgcgagggcgggcctggggcgcggcgctgggactcggggacgcccccgccccaccgcgaggtcgcgccggcgctggtggaggtgcaggccggggctgctctgcggctgaaggtgccgccggccggctgcgcactcacccgggtgtagggaccggacgattgtggaatttaaaccgctcctgggaccgacacgggcctgaattttcagtttgcttcgggagttggcaacttcaggtacacccttgtggctcacggagcagaattatggacgtttctcaggggcagatcctggcacaaaacttgggatatgtgcagtagtgtgtgtgccaacttaacgttcagttggaatg

SEQ ID NO: 130152 - DNA, 84 bp, Homo sapiens; identical to SEQ ID NO: 55194
  chr18:70208928-70209012
  hyper

SEQ ID NO: 130153 - DNA, 284 bp, Homo sapiens; identical to SEQ ID NO: 55195
  chr18:70209101-70209385
  hyper

SEQ ID NO: 130154 - DNA, 463 bp, Homo sapiens; identical to SEQ ID NO: 55196
  chr18:70209493-70209956
  hyper

SEQ ID NO: 130155 - DNA, 1544 bp, Homo sapiens
  chr18:70210266-70211810
  hyper
gattcctctcttaggcgaaggaccgattccaacgacggaatcccaggcttgggttattctccagctctggtttccagaccacggggattctctctttctcagcggggcggcagcccctgcaggtttctgcgaacttacgcgcccgtctgcacttttgccccgtccccgctcctcccaggaaagcagacaggccatttcaataccagcccagagacacgcagagaagccgccccctcgccgcccacagcctcccattaactcttccagtattctttctaagaacagagaagttggctcttgataaatatccgctgtccgcagccccgatcctacatgatttcccttctctctctccacctcctccacccctcgatctggaccagggagagtcttcgttaaaatccacgcagaaggcgcttgcatgcggaggggagggcaggtcgggggtggttacctggaacatccatgctgggcgagctccgctgtccgcgaagttgctctgcttagagaaaatgaggcgagtgggagctgtcgggaggaggacacggagcgcgaccctgctcccagcgcgtggccaataaccgcgccgccccgccctgccgctttcccgcgccagcctgcgccgcttcaggggtgcaccacgccccgcgcgcccgcttaggcgccgcgcccgggaccgggaaccccgcgtctcgcccggctcagcgccccgcgctgtgcgcccaggtgcctccaacccctgggcttcgcgcccgcaccgctgcctggggcccctcgagctcccgcgctcagcgcgtccgcagcgcggctccctcgcgggtcccctcggccccgcagccccgccagtctccagagggcatagccgagcgctgccgcctccctaggactcggaaccttccctgctcccaagcccgccgcaccctccaacgccccggtcctgctcacccaaacgcccagagcaaaatactcccagacgtctcttttgaaaattagacacccttaaaagcaccggtcgcttctcttcttttagattctttcttttctttccccaattccctccaagtcttaatattgaatggcgtgaccactttcataatgacaggagcgaaaaaaacaataagttaaaaaaaaaaaaaagaagaagaagactgggatggctgggacgaagagagggaaaaaaaaagcttgagaatttgatgatttaggagctgtggttccagagtcccagttggggaactgtccggttcccgcagggctagaagaggggcctccggcccgggtctgtgtgtctgctcctctggacctcggactggtggagcggctggcgcttgcgcttatttattaaattgcggtgtccgcgctcgctcaaaggacccggggagacgcgctgggtttcccagctgcgcctggagctcggctgagggcgcaaacacggacgtggggcgccacctgcgggtgcccgggcctccctgccgcaggctgcggaccggcggactccgacagaagacgggggagtcctggccgcaaggctgaggtttgctgat

SEQ ID NO: 130156 - DNA, 282 bp, Homo sapiens; identical to SEQ ID NO: 55198
  chr18:70534033-70534315
  hyper

SEQ ID NO: 130157 - DNA, 304 bp, Homo sapiens; identical to SEQ ID NO: 11835
  chr18:70534427-70534731
  hyper

SEQ ID NO: 130158 - DNA, 129 bp, Homo sapiens
  chr18:70535425-70535554
  hyper
gaggctgcgcgcggccggcgccccggggctggtgcgcggcagaatggggccgcggcggcggcagcaaggacatcccagccgcgcggatctgggggaggggcggggagggggtgaggacccggctgggat

SEQ ID NO: 130159 - DNA, 508 bp, Homo sapiens; identical to SEQ ID NO: 55201
  chr18:70535575-70536083
  hyper

SEQ ID NO: 130160 - DNA, 676 bp, Homo sapiens
  chr18:70536187-70536863
  hyper
cgccgcaacggcacctcctccctttcccggctccgtcccgccctccctcggcctctgcggacgcgacccacgcagaccacagccgagcccgccggaccccgggactacggaagccatcccgtccggccacccacacccgcgccgcggctggggcttgggttggggactgtggcggcgaagaagccggggtaggaagagctaatggcaatggcggggtcgccggggggcggggggtcagcagcagacgctgagctgtgaagactagggtggccccgaaaggccgaggaaaggagaaagggccatgagaagagtctggcgagcgctcgaggccggggggctgcctcccggctctggcccggcctccgcttcccggcacctgctgctggggcgcccacgtgcgcgcggggctgcgcggggcgttgggtgctcgtcgcagtcctgcccacgcctagcgcagcggctgtgagtgggtggaggtctcctgccagtaagttgggatgagggacgatgaggtgacccccaagtctggaagggattcagagtctcacacgcgcccccaagcctcctaccaccacaccaaagtgctggttcctcgatttccagggtggggtaaagtgaccgagcaaaggggatggtgtgtttgtgtgtgcgcgcgcatatacgcgcgcgcgtgttg

SEQ ID NO: 130161 - DNA, 212 bp, Homo sapiens
  chr18:71815058-71815270
  hyper
aaacgaagagtgcacgcaccgcccccacgcccgcacgtcgccacaccccttatgcgcatgcgcgcgtgagcaaaagtaacggtatgcccacccttgcgcagacggcaccgcgccagacacccgctcacagagcgggcttctagaaacttccgggcctcggcttccttacccacccctaacattctgccgcctagggcgccaagccaagttcg

SEQ ID NO: 130162 - DNA, 101 bp, Homo sapiens
  chr18:71815683-71815784
  hyper
gcgcgcctctttgccgtatcccagttaagagcgaggttttcaaactactattcccaggaagacgggggtttcccaggtgactttgcgaaggcatggcgggg

SEQ ID NO: 130163 - DNA, 30 bp, Homo sapiens
  chr18:71958282-71958312
  hyper
aggtgaacgcgaacgcgagtgggtgtggac

SEQ ID NO: 130164 - DNA, 223 bp, Homo sapiens
  chr18:71958561-71958784
  hyper
tgccgccgcgcagggcgctcccaggtgtgcacgcgcaggtgtacggattcggggagcgctcccaggtgtacacgcgcaggtgtgcggactcagggagcgctccccaggtgtgcacgcgcaggtgtgcggactcgaggagagcgcccaggtgtacactagcaggtgtgcggactcggggagcgctcccaggtgtgagcgcgcaggtgtgcggacttggggcggt

SEQ ID NO: 130165 - DNA, 30 bp, Homo sapiens; identical to SEQ ID NO: 55206
  chr18:71959077-71959107
  hyper

SEQ ID NO: 130166 - DNA, 30 bp, Homo sapiens; identical to SEQ ID NO: 55207
  chr18:71959387-71959417
  hyper

SEQ ID NO: 130167 - DNA, 598 bp, Homo sapiens
  chr18:72123591-72124189
  hyper
aggagctgctgggtgcgagctttcgggccctcccaggttaggaggcgcctgtcgaggaccgggacccgggatcctcccggtcccagccgcctccgcagcgctctctgctcgcccgagcgcacactgcgtcggttcccacagaccgcgaccgcggagagcctgggctctggagcgcaggggggccggggtcagaccagccctccgcatgggctcggtgagatagggggtgacctggcagctcagggtggaatcacagaacgcgggctgggctggagcgctgcggacccgagagacagaggcgtggcaccccggatcccgaaccccgcactggcttgcgccccgagcccggcggcctgacaccggacgcggcacctccctggacactcggatcagacccgcaaactttcttccggagctcgggctcaggggtggcgagggtaggacggagaggctgtctggggacaaagggcgaattctggcgaaaaggggagagacacccccagcgcgcccacagagcactgccggctgcgtccccattcgggggaccggggcgtgcgcctctggcactccacgcaggtgtcgggaacccatgtccccg

SEQ ID NO: 130168 - DNA, 490 bp, Homo sapiens
  chr18:72124237-72124727
  hyper
cgggtgtgatcccccctccccggacgcgcggcgcggggcagagcggcggcgggacctaccagcgcggccaggatgcgccggctcttctcgtcggtgcagcgctcggagaggacacccgggtgcgcgcggagcagcagcgcggccgccagcacccagcccgcggtccacgcggcgaaggcgaggagcgtgccccgcccgcagcgcccgcgcctcctgcaccacccggcagggccccgcgcgcccgccgcccgcgccatggccagccctgcccgcgcccgggccccaccgccgcccgcgccccgagttccgcactcgcgtagctgctccgcggctcaggcccgctcggcggggagggggaacgggggaggggccgcgcgagggttggggcaggccccgcgcctggggcggaggtgcggggagggcgtccagcagcagcaacaccccgcgcgccccgagcacccactgggggtccactcgccgcatcccctgc

SEQ ID NO: 130169 - DNA, 79 bp, Homo sapiens
  chr18:72163134-72163213
  hyper
ttggactccattgccgcactgcaggcgacttctcggaccccaccgttgaagcaccaggccccccgcccacccaagagca

SEQ ID NO: 130170 - DNA, 116 bp, Homo sapiens; identical to SEQ ID NO: 55210
  chr18:72167085-72167201
  hyper

SEQ ID NO: 130171 - DNA, 34 bp, Homo sapiens
  chr18:72265003-72265037
  hyper
tttttcggctgtggcgtccggcgctgcatccact

SEQ ID NO: 130172 - DNA, 30 bp, Homo sapiens; identical to SEQ ID NO: 55211
  chr18:72266140-72266170
  hyper

SEQ ID NO: 130173 - DNA, 30 bp, Homo sapiens; identical to SEQ ID NO: 55212
  chr18:72920182-72920212
  hyper

SEQ ID NO: 130174 - DNA, 238 bp, Homo sapiens; identical to SEQ ID NO: 55213
  chr18:72921090-72921328
  hyper

SEQ ID NO: 130175 - DNA, 30 bp, Homo sapiens; identical to SEQ ID NO: 11840
  chr18:72922720-72922750
  hyper

SEQ ID NO: 130176 - DNA, 30 bp, Homo sapiens
  chr18:72922999-72923029
  hyper
tggaagatcaagaccggccaaaaatccatg

SEQ ID NO: 130177 - DNA, 30 bp, Homo sapiens; identical to SEQ ID NO: 55215
  chr18:72923242-72923272
  hyper

SEQ ID NO: 130178 - DNA, 30 bp, Homo sapiens
  chr18:72924015-72924045
  hyper
ctggaggctgcggtcgccgtcctcccccac

SEQ ID NO: 130179 - DNA, 439 bp, Homo sapiens
  chr18:73167489-73167928
  hyper
gggccgcctctgcgccgggacagcctgggaagccgcgcaggcctggccgacttccccttcccagccccgctgcgccctgcggggccctgtcggcggtgggggctgcggacccgggagcgcgcggccgcgctgcacgtgcagggaccggtaggcgccggggtcagcgccagcgtttgatgtgcggcggggagcgggccgagccccgggaggccgcttcgcacctcccagtgtgtccgggttgagcgcgaggtcaggaggggacgcagagttcacggcgaagacggatcgcgggggctcgtcccgcccgggttgcgcgcagcgggggccgcgtgatggatgggccgggccgggcacccgggaacccgcgagcgcggggctgggctctgggctgcgtccgggggccccgacttggttattgatcggcccaagcgcaggagaa

SEQ ID NO: 130180 - DNA, 43 bp, Homo sapiens; identical to SEQ ID NO: 55217
  chr18:74162763-74162806
  hyper

SEQ ID NO: 130181 - DNA, 158 bp, Homo sapiens; identical to SEQ ID NO: 55218
  chr18:74163245-74163403
  hyper

SEQ ID NO: 130182 - DNA, 241 bp, Homo sapiens; identical to SEQ ID NO: 55219
  chr18:74202734-74202975
  hyper

SEQ ID NO: 130183 - DNA, 777 bp, Homo sapiens; identical to SEQ ID NO: 55220
  chr18:74203666-74204443
  hyper

SEQ ID NO: 130184 - DNA, 31 bp, Homo sapiens; identical to SEQ ID NO: 55221
  chr18:74204793-74204824
  hyper

SEQ ID NO: 130185 - DNA, 220 bp, Homo sapiens
  chr18:74206707-74206927
  hyper
taatggatggagagcgcatccgagctcccctcctcccgcgtcgcctttgacaaagtgtacaaagccagagcctcttccgcgctcccaccccggcccccaccccgcccctccactgcggtaaaaaccacctcccgggcgctcgccccgccgcccgaagttgcatcttcccctatcctggaattgacgagcagagcaactacccaccgggaaagccaagtag

SEQ ID NO: 130186 - DNA, 148 bp, Homo sapiens; identical to SEQ ID NO: 55223
  chr18:74207201-74207349
  hyper

SEQ ID NO: 130187 - DNA, 94 bp, Homo sapiens; identical to SEQ ID NO: 55224
  chr18:74208278-74208372
  hyper

SEQ ID NO: 130188 - DNA, 130 bp, Homo sapiens; identical to SEQ ID NO: 11844
  chr18:74843246-74843376
  hyper

SEQ ID NO: 130189 - DNA, 30 bp, Homo sapiens
  chr18:74843996-74844026
  hyper
attagcaggcgccgcgagccgggaggaccc

SEQ ID NO: 130190 - DNA, 829 bp, Homo sapiens
  chr18:74844287-74845116
  hyper
ggtcagggaggccgccggctgctacctgctcggccacctgctccgctgcctaggttctccctgcgcgtccccagccaagaaagggacccggagtccgggcgtcgggatagctcctgtccccgatcttgcgcccccggctcccgcggggctccggtccggggtcccgcccaggtctccgcggtccccactcggaggggcacagagacaaaggcggcagagcagcccgcccgtccccgagggtcacccaccggcgctgcgctcgttgctccgaggccgaggggcgccgcggggtccaaggccctgctccgcctgcccaggcccgggcaggctggtctcggcttcaagcgcccacgcgcggggtccccgggcagcctgcttcgccttccggggtcgggagacaggggccgccggggccggaggctgcttctctctggcgcgcggcggcggtgactgacggcggcggctccgagggacgggcgcgcacccagctccccggccccgcctccccgggcttcctgcgagccaggtaaacacaggccgatcccgccgggcccgccccacctggacgcggccgccggcgccgccccgggagctcggaggaccccgggcccgctctgcccacgcggaacttggggggcgcacggggcccacgcgcagggtcagacctcggaggggcggcctggagcctcgcccgctgccgaactgggctccgaactgcggcccgtcgacccttcccgttcggaggcttggcctccgaacccaccccgaccccgacctcgacctcgcgggaggggtgccaggccgcatctccccgcgtcctcaggggctg

SEQ ID NO: 130191 - DNA, 635 bp, Homo sapiens; identical to SEQ ID NO: 55227
  chr18:74961320-74961955
  hyper

SEQ ID NO: 130192 - DNA, 152 bp, Homo sapiens; identical to SEQ ID NO: 11846
  chr18:74962018-74962170
  hyper

SEQ ID NO: 130193 - DNA, 134 bp, Homo sapiens; identical to SEQ ID NO: 11847
  chr18:74962209-74962343
  hyper

SEQ ID NO: 130194 - DNA, 853 bp, Homo sapiens
  chr18:74962692-74963545
  hyper
gggcaagccgcggagcaccaccaacctgttcatcctcaacctgagcatcgccgacctggcctacctgctcttctgcatccccttccaggccaccgtgtacgcgctgcccacctgggtgctgggcgccttcatctgcaagttcatccactacttcttcaccgtgtccatgctggtgagcatcttcaccctggccgcgatgtccgtggaccgctacgtggccatcgtgcactcgcggcgctcctcctccctcagggtgtcccgcaacgcgctgctgggcgtgggctgcatctgggcgctgtccattgccatggcctcgcccgtggcctaccaccagggcctcttccacccgcgcgccagcaaccagaccttctgctgggagcagtggcccgaccctcgccacaagaaggcctacgtggtgtgcaccttcgtcttcggctacctgctgccgctcctgctcatctgcttctgctatgccaaggtgcacgccggtcgcggggccgagacgcgcgagggagggcggagggccggtgggggccctggggtctcagtgtcccgcggccctgccggagccttggcggcagcctggccccggtggtccccactctggcggcgctggtacggatctgtgcagagaggcttcctggccgctgctggagcgtgccattggcttgcgcaagaaagttacttggagtctgagagatgctggggaaagtttgcagttcacttcgcatggtccagtagaaccagtttctcctcccctccccttcctcggccctgcggcccttcaacgcccccaggttgcctgggcggtaggtaggcgggcgctgccgcatccttcccggtacagcaaacc

SEQ ID NO: 130195 - DNA, 41 bp, Homo sapiens
  chr18:74963720-74963761
  hyper
cggggcggcccctctcccccggggtgcgcagtttgccctcg

SEQ ID NO: 130196 - DNA, 257 bp, Homo sapiens; identical to SEQ ID NO: 55234
  chr18:75362778-75363035
  hyper

SEQ ID NO: 130197 - DNA, 521 bp, Homo sapiens
  chr18:75612004-75612525
  hyper
gtcctggactctgagcaaagccgcgggccttagaccctccccagcctcaggcgagccccagtgccgacacctgctaagagacggtgcattgcgggctaaacccgcagacactgagcggggacgccacttccgacggcgtaaggcacctaaagtagccacagaggaaactgggggtgcaggagctgcaggagccccggcggcctgcaggggcggtggcgcggcgctgggcgcgcggccgctagatggcagcgcagccccggcccggcccgcgggaggcggccacgcgcgggggacgcggggcgcggcgcgctgagcgcgggtgccgaggctggagggcgcggccgggctcccgagtcctccctccgcggcatccttgtctccaccctcaaatgtcctgcaagccaggagcctccgtaggaaccgctgcatttttattttcctctaaatttcacacaggtgaagcctgtgtttgaatcactgagaggagattcaaatgaggttcctgacggggtagctgctcc

SEQ ID NO: 130198 - DNA, 470 bp, Homo sapiens; identical to SEQ ID NO: 55236
  chr18:77153101-77153571
  hyper

SEQ ID NO: 130199 - DNA, 432 bp, Homo sapiens
  chr18:77156453-77156885
  hyper
agagaacgaggtcggccgggtctgtgcgcccagggaggggcgcggcgcggaccgggaacggcgtcccccagctcccagcagcccggttccgagcgcgccttctgccaataggtgtctcctctgccccagcgctgagggcgcgaggcgaggccgccgcgggtcccgccgaggaagcggctcgcaggccggcgatttggggacgggcgaggctgggccgtcaggaccacagagggcacgtgggagggaggaagggaggcttccttgggagtgaaggatgccccgtgtcttcctgagcgaggcagagccaccctctggcgccaagatcgcggtttgggggttctgcgccccccacccccaccccgagctcgtggcggcgtctccctcgcgccgcgcccctgaattccccagggccgagcccgtcacgccggctcc

SEQ ID NO: 130200 - DNA, 858 bp, Homo sapiens
  chr18:77159884-77160742
  hyper
cggggctccgcagggcgcgcacgtggcgctcgggggtcaccgttgcagccgctttcccgaggaggcccggattgaaaacttctttaaaaaaaaaacttaaaaaaaaaattccgtcgccctgggcgcagccttaggtacctggtgccgctcgtggggtcccgacgcccctacccccgggtccggaggagcctgcgccgggccgggacccccagggcacaagaggccgggggacccctgcggtcgcgcgcgcgcgagggggcgggggcgggggggacacgagtttatttaaaaactcgtgtccggggagtttatttaaaactcggaagccggcggccgcgagccggttgtttatgtaaacccggaaacgccccggggggcgggggcggggcggggacggggggaggggcgggggtcacgttacgcggaggacgcgcgggcagcgccgggagaaccgaacccctggcggccgcgaccccggctcccgccccggccccggcccgacccgccatgacggggctggaggaccaggagttcgacttcgagttcctcttcgagtttaaccagcgcgacgagggcgccgccgcggccgccccaggtgggtcagtcccggagggcgcggggggcgcggggccaggtcggggtttgggggcgcccaggccccctccgcgtcctcgtcgctccccggggaccccaggagtccccggcgcgcccgggaccgaggggctacggcgggggacgctgcagtgcggggcgtcctgggctcggatgcggttcctccgagcgctcgcggcggggtcctgggggaagagcgcagcccggacacgggcgtggacgaagtggtcccggacagagggctgg

SEQ ID NO: 130201 - DNA, 386 bp, Homo sapiens; identical to SEQ ID NO: 55240
  chr18:77193398-77193784
  hyper

SEQ ID NO: 130202 - DNA, 30 bp, Homo sapiens
  chr18:77250669-77250699
  hyper
ggccgagccgtttcccgcgtcctgggtgga

SEQ ID NO: 130203 - DNA, 30 bp, Homo sapiens; identical to SEQ ID NO: 11856
  chr18:77439059-77439089
  hyper

SEQ ID NO: 130204 - DNA, 114 bp, Homo sapiens
  chr18:77547933-77548047
  hyper
ccggggtccgcgccgcggggcgggcgcttccccggacccgggggaggcgggacgcaggcgaaggccgccccgggagagcggggtcccgggagagcggggtcccggctgtggggg

SEQ ID NO: 130205 - DNA, 170 bp, Homo sapiens; identical to SEQ ID NO: 55243
  chr18:77548351-77548521
  hyper

SEQ ID NO: 130206 - DNA, 30 bp, Homo sapiens; identical to SEQ ID NO: 11859
  chr18:77551522-77551552
  hyper

SEQ ID NO: 130207 - DNA, 114 bp, Homo sapiens
  chr18:77557776-77557890
  hyper
gctccgtgctccctccgagtggacttggccccggctccaaacccagccgagggtcggctcgctcctggggacccgcggatgtcgcgagggggcgccgcgccactgaaggctggg

SEQ ID NO: 130208 - DNA, 484 bp, Homo sapiens; identical to SEQ ID NO: 55246
  chr18:77557912-77558396
  hyper

SEQ ID NO: 130209 - DNA, 834 bp, Homo sapiens
  chr18:77558416-77559250
  hyper
cgggtctcgggaaaacccgactctcccggcgcccgccccggttcggttgggggcgcacccggctcgcgcggagagcgggcggggtgtgggcgaatgctcggcgcgctgcgcctttcccggtcccccttctccccggagatgaacgccccactcccgctcggacacacggccgcacccctactctgcctcctccgaccagccggggcgcggcccgaattgggggagagaagacccagctcccgcagccgcgaattctgcaaacccggagcccatgcgccccgtcctccggcccggggagctcccagccttgcccgccgagcgcagcccgggtccggactgtggtcactggggacgagaagggtccctcctgcggggctcccgggttcggatggacggagggggcgtccggcaggtgaactgggcccgctccgcgtcccgaacgttcccctaaacccacaagtcccggagaccctggggcattctgcgatttcggagtgaccggtggagcccccgcccgcgcgcctggctcccggggtctccccacacagcaggggctgcggggaccccctctgtcacctcctccaaagggtctgggagcaattcgacctgcctggagaattccaggaagtcctttccctgcgggagcctcatgggtccccccttctctgcctgcagagacctctggcttccgcgtgcgctcaaagtgagcgccgggcagattgtaaataatggattttgacccagctgggagatctcagagtgattaagtggagaggctgttccaccctcagccctgcccaggcagctgggtgaccccgcgggccacatgccaca

SEQ ID NO: 130210 - DNA, 159 bp, Homo sapiens
  chr18:77710772-77710931
  hyper
aggtggagaagccgtcggcgttctgcgtcctgcgaatgtcccgatactgcgggacgtagggcaccacccctccgaagaccatggccgcggccgcgccccaggacaccagctggtgcagtggcaccaggagccagtccaggccctcggcctccatcgcag

SEQ ID NO: 130211 - DNA, 36 bp, Homo sapiens; identical to SEQ ID NO: 55250
  chr18:77712072-77712108
  hyper

SEQ ID NO: 130212 - DNA, 81 bp, Homo sapiens; identical to SEQ ID NO: 55251
  chr18:77724413-77724494
  hyper

SEQ ID NO: 130213 - DNA, 306 bp, Homo sapiens
  chr18:77748470-77748776
  hyper
tccccggcccccgccgcccccgggcccacggacgaaatccggtcccgcccgcacacgcaaactccgctgggactgccacccggcagaacgtctgggcgcgcacgcaccgacgccgtgcgtgctgacggcatgcgcgcgcgctagcgccgtgcgtgctgacggcatgtgcgtataggcgccgcgcgaacgtgtagttggccgggtggagcggcggcgacctgggcaccgtggagcgccgttggttccgtcatagcagctgtcggagtgggggttcctccccagcgtccaggcggcctggtggtcctg

SEQ ID NO: 130214 - DNA, 136 bp, Homo sapiens; identical to SEQ ID NO: 55252
  chr18:77794467-77794603
  hyper

SEQ ID NO: 130215 - DNA, 32 bp, Homo sapiens; identical to SEQ ID NO: 55253
  chr18:77867027-77867059
  hyper

SEQ ID NO: 130216 - DNA, 30 bp, Homo sapiens
  chr18:77929275-77929305
  hyper
gcagccagcagggggcgccacagcagcgca

SEQ ID NO: 130217 - DNA, 30 bp, Homo sapiens; identical to SEQ ID NO: 55254
  chr18:77983402-77983432
  hyper

SEQ ID NO: 130218 - DNA, 30 bp, Homo sapiens; identical to SEQ ID NO: 55255
  chr18:78004029-78004059
  hyper

SEQ ID NO: 130219 - DNA, 30 bp, Homo sapiens
  chr18:78004369-78004399
  hyper
ggggtggtctgggtacgggtctgatccggg

SEQ ID NO: 130220 - DNA, 1051 bp, Homo sapiens
  chr18:78004629-78005680
  hyper
ctagatgtttggtaccgagcgggtgggggacgccgggctcggagccggcggcaagtctcctcctggcaggtaacaagcctcctttgcagccttgaaggcgccttggccagggccatcccacggcccgggcccccagagcccccccacggccccgaatccgagcagcccctggccctcaactcgccccggaaaggccgccctcccctccaatgtgtggcgcgccccgatcgcctctcactcgtggaacaaaagagcagctcccgcggagcgggtccagagtctgcccggactgtccgatggccctcggccctctgagcgccgcggctgccgggctttgtgtccgcgcggggggcgggaaggacggccggggtccccagtgcgcgtcccgcggagcggcgcgcggcgcccgaactggaaagttgtcgccggcgcctgtcgcctccacgccgccccagtccccctccgcggggcgccccattcattagccaggagactgggcgcagggccgccggggcgggcggggggcttaccttgctcttgacttccactgcgctgcaatcgtagaatcgcaaggtctgagacttgtgaaaacttcggttcatggtttcggccccggtcagcctcgccgtcgccctcgctcctcaggggccgcagaaagactcccgggggcggcgcccccaggccccggccccggccccggcccgcgctcgcttggccggcgggctgctcccggtgctgcgggcccgagctgggctggccgcgcgcctcagggactccaggggccgcgcgcgggaggagcgcgggggacgccggcgcgcgccgccccacctcccggcgcccgcgcccgcgccccgccccgcccccgagccccggaggacccgcccatatccccgcccacagccccgccccgcgctccggaggacccgccacaccacgcccccacgctgcagctccgcgtcggatcgccagtgggtgcgcgccctcctgtccacaatcccagagcctggggaaaggagcatcgcggccagcccaaggcgtctcgttttgattg

SEQ ID NO: 130221 - DNA, 12 bp, Homo sapiens
  chr19:267126-267138
  hyper
cagccatcaccc

SEQ ID NO: 130222 - DNA, 468 bp, Homo sapiens
  chr19:267205-267673
  hyper
cgcagatccggaggccacgctgcgctgcgctgcgctgcgctgcgctgtcaggacgcgcagttcccgccccgctgaagggacaccgttttacaacacgccgcgtagaccgtgacagggaagtaaggcccacggcagcgctccctcctcagcactcgcggccgcggacaggacgccttttcctcctcctctcacctggtgaccgggtgtcccgaaccgcggccgctcccgggcgggtcctgaagagaccgtggctccgtcttcccggtcgacgccccggggcgacgagtgcggatccgccgcggttcccgcgcgtgctccaggttgggcgggagccgggcgccccctcgcggcagtcctggggagtctctgaaaatcagcgttcggatgactgcaggccgtgatttcggaaatgtcaactgaaatcgaggccaccatcccgtgccttgatcggaacggatggagatttta

SEQ ID NO: 130223 - DNA, 813 bp, Homo sapiens; identical to SEQ ID NO: 55259
  chr19:290580-291393
  hyper

SEQ ID NO: 130224 - DNA, 119 bp, Homo sapiens
  chr19:294975-295094
  hyper
cagaccccaaggacctggttccgactcaaggaagaacaaggacggtggtggcggaggggctccagagaactcgtaatgcctctggtgaggccaccgccgtcctgcatctcttgatgtga

SEQ ID NO: 130225 - DNA, 102 bp, Homo sapiens
  chr19:384078-384180
  hyper
cgcagtcaagggcagttggtctcccctcgccaggattaaccctggaccgagggctcccgaaccgaatcgtccccacagcctgtcctgcgagggcggctttcc

SEQ ID NO: 130226 - DNA, 31 bp, Homo sapiens; identical to SEQ ID NO: 11867
  chr19:384495-384526
  hyper

SEQ ID NO: 130227 - DNA, 30 bp, Homo sapiens; identical to SEQ ID NO: 55261
  chr19:408668-408698
  hyper

SEQ ID NO: 130228 - DNA, 30 bp, Homo sapiens
  chr19:409495-409525
  hyper
gacgaattaaatgacggcaacagtaataaa

SEQ ID NO: 130229 - DNA, 31 bp, Homo sapiens; identical to SEQ ID NO: 11868
  chr19:452244-452275
  hyper

SEQ ID NO: 130230 - DNA, 179 bp, Homo sapiens; identical to SEQ ID NO: 55263
  chr19:460120-460299
  hyper

SEQ ID NO: 130231 - DNA, 1704 bp, Homo sapiens
  chr19:460521-462225
  hyper
gactcacccgcacgacgtaggagaccccgggccccaggaccctggcgtcggggtgtagccagccgtgcgcgggtttgtggatgaagctgcccttccggatccactcggcggcggcggcggcgtccccggaccccgccgccccccgcccgccccgcgacccccgcgaccccgcgccccgacagcggctgagcgcgggcaggggacagggcgcggcgcagcggggctcgcaggcgcccaggacggcggccgccagcgccgggacgccccccgggcccgccggctcgggttgggggtccgcgccccccgaggccccagccgcccgcgccgccgccgggccgcggcccaggaagccgcccggggccgcgaacttccactgcggcattcggggcagcaacgcgcagaaggtggtgggcgcctcgggctcggggggcgcggggggcgccgggggcgcgcgcccgcccggaccctgcgtcatggccgcggccgcccgacggagcccgaccgggcgctgcgcctggcgcggaggaagccctcccgctccgcccgctccctcccgccccccggcccggtgatgtcatccgcccggcccagcgcgcagccgcggggggctgcgcccctgggaccccggccctcctcgtcccggagcctggccgcgaggctggggaaactgaggccctccgaggacaccgggcgctggcctggaacccgcagccaaggcgggacggggctttgaacccagaaccccgtcagcgaccctccccgctgcgccccccacccccgcccgccgcccaagttcgcagaaggaccgagctggagaagcttagaaattccacatcccttctttcccctatttcctagtggggaaactgaggccccgggaggcgcggccagggaaaagagaaccccagaccctaaggtcagcccctccctctccgttgttgcagctagaaggtaccttagggtcacccctatttcttagtggggaaactgaggcgcggggaggggaaggggcgcggccgagggctcacagacgaagctcaaacccaggagtgccggctcgggggtggggggggggggcggggctaggagcggagccgggcccctgctctgcggcctgtcccggcctcagtttctccggctgtaactcaggggagcgggctggagggtcgcggcccttcttccctcacttctggggagcccagtcccgcaccagctcatctgagctctgggcctcagcctcccaggccggtcgctccatccccagcctcaacctctccgagaccggccgcaccttccctggcctcaagggtcggttccttctgcaccagaaaacggggtgtcactgtcaccccgggacccagcctcctggcccgacttggctggagctcccctgcacctgccccgccccaagcagggctgattgccgggaacaaagggaggggccgggacgcgctggcaggtggggagggagggaggggcgaggctgcccggagcccgatcgataattcaggggatgagatcacagccggcgccgcccgcggggccggggaggtgggggaggggagcgaggcgcgcggtcgcgatcggccgtctctgccgcggcgcgtgtcggactcagcccctgcgcgtccgcgggaggagcagatcgtgggcgcgattggtcgggctggagccgcggctggacctgcgcgcggtgtgtgtgtt

SEQ ID NO: 130232 - DNA, 30 bp, Homo sapiens; identical to SEQ ID NO: 11874
  chr19:488550-488580
  hyper

SEQ ID NO: 130233 - DNA, 30 bp, Homo sapiens
  chr19:496160-496190
  hyper
ccgtcggggtgggggcggcgctgcccagcc

SEQ ID NO: 130234 - DNA, 30 bp, Homo sapiens
  chr19:496456-496486
  hyper
tttaagcggcttccccgcggcctcgggaca

SEQ ID NO: 130235 - DNA, 30 bp, Homo sapiens
  chr19:497813-497843
  hyper
agagccgcggtcgccgcaggccagtccctc

SEQ ID NO: 130236 - DNA, 30 bp, Homo sapiens
  chr19:506837-506867
  hyper
agctctggaggctgcggtgtcagaaagctc

SEQ ID NO: 130237 - DNA, 42 bp, Homo sapiens
  chr19:507105-507147
  hyper
gggcaggtccagccccgcgcatgctccgtcaggcttctctgc

SEQ ID NO: 130238 - DNA, 30 bp, Homo sapiens
  chr19:508063-508093
  hyper
cttctggccggcttcgccttctgtgatgcc

SEQ ID NO: 130239 - DNA, 30 bp, Homo sapiens
  chr19:531027-531057
  hyper
ccagcgcctgcactcgcctcacaccacatg

SEQ ID NO: 130240 - DNA, 30 bp, Homo sapiens; identical to SEQ ID NO: 55268
  chr19:571401-571431
  hyper

SEQ ID NO: 130241 - DNA, 265 bp, Homo sapiens; identical to SEQ ID NO: 11876
  chr19:591380-591645
  hyper

SEQ ID NO: 130242 - DNA, 14 bp, Homo sapiens
  chr19:591765-591779
  hyper
ggaccctggacccc

SEQ ID NO: 130243 - DNA, 612 bp, Homo sapiens; identical to SEQ ID NO: 55271
  chr19:603407-604019
  hyper

SEQ ID NO: 130244 - DNA, 160 bp, Homo sapiens
  chr19:633640-633800
  hyper
ggatgcagcggaggcgcgaaggcatgcgccggtggacgctctgattggttcctcctgctgtttttaaagggagggggcgggacagagctgttgccgtggcaactgggaggcactctcaggctgttttcccgaggacctcaaatccggactttttttctgt

SEQ ID NO: 130245 - DNA, 510 bp, Homo sapiens; identical to SEQ ID NO: 55272
  chr19:639659-640169
  hyper

SEQ ID NO: 130246 - DNA, 214 bp, Homo sapiens
  chr19:660979-661193
  hyper
taaggaatctaccaacgtccatgattaaatatttgtcaatcactgttccatgctggctccctggccagcctgtaaattctgtgagggcaaagaccacagcggcctgtcaccacagagttcctttcactacaggaaggccctccccaggcccagtgacagtcggaggaggtcaaggtcctccgtgtccaaggccacggggcgaggaagtggctcc

SEQ ID NO: 130247 - DNA, 614 bp, Homo sapiens
  chr19:661416-662030
  hyper
tggaagaggcaagagcgagacccctgggagacagaggagtaaggcaaggctcagtctcagctccccaaccttcgccccacacccgagatttcactttatttgttcctcctgctggggaggggaagccctgtggcttcagtagagaggaaaccacacctctctctttccactcctgggcctggccccgctctcccgccatgccccaactctagcactcgctcctcctctgtgacccagagacaggcggcttctcctgactccctccagccccttcctgggtctctactcccggggaactgcactgcttctggggggcttggacttctcttacgggtcaaagcgtagcaacagccgggcggctacgtacacagcacagtaaatcctcaatgcctgcagcctcttcccctgggcacagggtggggagtccagacccctccacctcctgcggctgctcccctcaagctggccaagcggctcccgactgagccggctctgccactttcccgctgagccaccacgcgcctcagtttccccatctataaagcacgggtggctcgactaaatcaccactttgcacgtcagcctggcgaagggcaacacgggttaaaaatgca

SEQ ID NO: 130248 - DNA, 31 bp, Homo sapiens; identical to SEQ ID NO: 11880
  chr19:663759-663790
  hyper

SEQ ID NO: 130249 - DNA, 89 bp, Homo sapiens; identical to SEQ ID NO: 55276
  chr19:676321-676410
  hyper

SEQ ID NO: 130250 - DNA, 132 bp, Homo sapiens; identical to SEQ ID NO: 55277
  chr19:680399-680531
  hyper

SEQ ID NO: 130251 - DNA, 27 bp, Homo sapiens
  chr19:680552-680579
  hyper
cgaggctgctgccgcagtaggcggggg

SEQ ID NO: 130252 - DNA, 30 bp, Homo sapiens
  chr19:695209-695239
  hyper
cagcagaggcagccacgggggctcggcaga

SEQ ID NO: 130253 - DNA, 30 bp, Homo sapiens; identical to SEQ ID NO: 55279
  chr19:708694-708724
  hyper

SEQ ID NO: 130254 - DNA, 30 bp, Homo sapiens; identical to SEQ ID NO: 11881
  chr19:709310-709340
  hyper

SEQ ID NO: 130255 - DNA, 30 bp, Homo sapiens
  chr19:796811-796841
  hyper
accccggatcatggcgcgcccgcagtatct

SEQ ID NO: 130256 - DNA, 10 bp, Homo sapiens
  chr19:797226-797236
  hyper
cggccttgag

SEQ ID NO: 130257 - DNA, 30 bp, Homo sapiens; identical to SEQ ID NO: 55281
  chr19:797444-797474
  hyper

SEQ ID NO: 130258 - DNA, 30 bp, Homo sapiens
  chr19:799175-799205
  hyper
ctgggagggaggggcgccaaaggacaatgg

SEQ ID NO: 130259 - DNA, 758 bp, Homo sapiens
  chr19:813408-814166
  hyper
ccatgggttcggcgggcgcgcgcaggtgcccggggctggcgtcgtcgggcagccccaggccgcggccctccaggctcttctgcttccactcgctgatgagctgcttggagcgcgaggcgtccagcggcacgtggatggtcatgtggcggcgcgcggggtcgtccagcgagggcgcgctggccctgggcagcgtgtggctgaaggtcaccatgttctccttggccatggggctgcgcggggccagcaggtccacgtccacgctggcgcgcttcaggctgcccagcgaggtcttctcgcgggccacgggccggggcgcgccctccagccgccctgggggccccagctcgtcggtgctcaccgacttattctgctgataaaccgagtcgtggccccgctgcgtcagggcccgcagcgcgtccttggcgggggccggggccgcgggcttctctgcaggtggggcctggaagttgcccaccgcgtggcaggcctgtcggggagaggggtctgggggtgaggcctggggctcagagggctcctcccctgtgatcgttggacttgccgcggggggctctggaccgggggtgggggctggcaagctcttgtccagtgggaccggttcccaccccaaggttgctgacccagcacatcgggcaggtctgagcccacgggattctgactccagcattccaagggcgagacacttcagcacccatgccttccccctaagaccccttcgggacccacgtctatcccctcag

SEQ ID NO: 130260 - DNA, 474 bp, Homo sapiens; identical to SEQ ID NO: 55283
  chr19:814390-814864
  hyper

SEQ ID NO: 130261 - DNA, 30 bp, Homo sapiens
  chr19:821550-821580
  hyper
ggagatcatggtgccgcgggcgccgcaggc

SEQ ID NO: 130262 - DNA, 30 bp, Homo sapiens; identical to SEQ ID NO: 55284
  chr19:822071-822101
  hyper

SEQ ID NO: 130263 - DNA, 30 bp, Homo sapiens; identical to SEQ ID NO: 55285
  chr19:822620-822650
  hyper

SEQ ID NO: 130264 - DNA, 30 bp, Homo sapiens
  chr19:860550-860580
  hyper
ccgtcaggcagcctcgcccgggggaggagt

SEQ ID NO: 130265 - DNA, 30 bp, Homo sapiens
  chr19:864002-864032
  hyper
cttccgtggggctgacgcggccacacggcg

SEQ ID NO: 130266 - DNA, 30 bp, Homo sapiens; identical to SEQ ID NO: 55286
  chr19:893238-893268
  hyper

SEQ ID NO: 130267 - DNA, 67 bp, Homo sapiens
  chr19:913484-913551
  hyper
agcccctggggggacgaacggggagactgaggcgggaggcggggccggccacgatccctacacccag

SEQ ID NO: 130268 - DNA, 723 bp, Homo sapiens; identical to SEQ ID NO: 55287
  chr19:919386-920109
  hyper

SEQ ID NO: 130269 - DNA, 30 bp, Homo sapiens; identical to SEQ ID NO: 55288
  chr19:920355-920385
  hyper

SEQ ID NO: 130270 - DNA, 30 bp, Homo sapiens
  chr19:920771-920801
  hyper
ggctccctcgggagcggggactgctggaac

SEQ ID NO: 130271 - DNA, 30 bp, Homo sapiens; identical to SEQ ID NO: 55289
  chr19:922001-922031
  hyper

SEQ ID NO: 130272 - DNA, 30 bp, Homo sapiens
  chr19:924819-924849
  hyper
cggggacccgagcccgccagagaccctcca

SEQ ID NO: 130273 - DNA, 778 bp, Homo sapiens; identical to SEQ ID NO: 11884
  chr19:941803-942581
  hyper

SEQ ID NO: 130274 - DNA, 229 bp, Homo sapiens
  chr19:942806-943035
  hyper
gagcaagtaagaacccgccttccgggaggagccccgtctggattggatggcatcgcccaaaactcacgtccacccagaacctcaagatgggactgcatttggaaatagggtctctgaagatgttagtttcagtgaggtcctgcagcgtacggtggccccaaatcccatgccggtcggttgtcctctaagggggaggtcacacctgtgatccccgcgctttggaaggcca

SEQ ID NO: 130275 - DNA, 84 bp, Homo sapiens
  chr19:982964-983048
  hyper
accaggagtcgcaccgcctccggggaccgcaccccgcatgcagcctccagcccctgcctcttgctgctcgagggcacacgaccc

SEQ ID NO: 130276 - DNA, 32 bp, Homo sapiens
  chr19:984151-984183
  hyper
atctctaagcaggccgcgcgaccctcgagtct

SEQ ID NO: 130277 - DNA, 664 bp, Homo sapiens
  chr19:1000336-1001000
  hyper
gcggagcgcggagggcgcgtcggaacctggccggggccctccacccgcgccgtggtcccggtggttgcgccccgtggcgagcgacgccgacaactttgcgatggagtttgtgcgggcgctgtggctgggcctggcgctggcgctggggccggggtccgcggggggccaccctcagccgtgcggcgtcctggcgcgcctcgggggctccgtgcgcctgggcgccctcctgccccgcgcgcctctcgcccgcgcccgcgcccgcgccgccctggcccgggccgccctggcgccgcggctgccgcacaacctgagcttggagctggtggtcgccgcgccccccgcccgcgaccccgcctcgctgacccgcggcctgtgccaggcgctggtgcctccgggcgtggcggccctgctcgcctttcccgaggctcggcccgagctgctgcagctgcacttcctggcggcggccaccgagacccccgtgctcagcctgctgcggcgggaggcgcgcgcgcccctcggagccccggtacgcgggacgcccggagtcaggacgagggggacccggggcgggagcggggtcgggagccctggggacgtccggagtcaggatgggggtgccgggactacgcagggaagggggatcccgggacgctggacgggcccc

SEQ ID NO: 130278 - DNA, 91 bp, Homo sapiens
  chr19:1021292-1021383
  hyper
cacccacaatccaccgcggctatgaggccagtataaggcggtaaaattacgataagatatgggattttacgtgatcgaagacatcaaagta

SEQ ID NO: 130279 - DNA, 30 bp, Homo sapiens; identical to SEQ ID NO: 55292
  chr19:1026742-1026772
  hyper

SEQ ID NO: 130280 - DNA, 276 bp, Homo sapiens
  chr19:1039816-1040092
  hyper
agccggttatacaacgtggggaggcagcctggctccccaaagacagcgcagcctcgttcccggagggcggcctgcctgggacctgccgggcactccgccaccctacggtgatgcagcaagagccgcgcggtccctttaagaaacccggctaggcgaggcccttctgtgatcccgtctcctcccttggcccgcgcagctccgacggagcaggccagtgagtgacgggcaggtcgcccaatagcagcgtgcagaggcaggggcgtgccccggcgctgc

SEQ ID NO: 130281 - DNA, 37 bp, Homo sapiens; identical to SEQ ID NO: 55294
  chr19:1041003-1041040
  hyper

SEQ ID NO: 130282 - DNA, 163 bp, Homo sapiens
  chr19:1071619-1071782
  hyper
gccggggcctcccagcggcttcccggagctcctggagccccaatcccattcccggagtccgcctcgcatccagcagcgaagacatgttccggtccggggtctcaggcccggcggcggccagcggggtatctctggcgggtgactcggtcggtctcttcccgga

SEQ ID NO: 130283 - DNA, 30 bp, Homo sapiens; identical to SEQ ID NO: 55295
  chr19:1104973-1105003
  hyper

SEQ ID NO: 130284 - DNA, 366 bp, Homo sapiens
  chr19:1173035-1173401
  hyper
cagggagacacccaccgtccctgccccagcaccatccgtgcccggcgtccctggaggcgctgggtgggctctccacaacgcctgccccccacgccccaggtcagtctggggattggtccctccaggccccacctgccttattcttcgggactctggggtggtgggaagagtgccctacgggggacaggacccaccaggaggcctgcgcttccccttcaccgacacacgctgctcccgggccccactcgggccatctcagcccgctaccctccctcccgcctgtccctggaagccgggtttgaatgcgacccgcactcccacccccaacacgctctgcagactccgcccagacggccccggggtcac

SEQ ID NO: 130285 - DNA, 34 bp, Homo sapiens
  chr19:1173616-1173650
  hyper
agtcaggaatcggggcggcgggagagaccggggg

SEQ ID NO: 130286 - DNA, 30 bp, Homo sapiens
  chr19:1194447-1194477
  hyper
tttttttttttagccgaatgtggcgaggac

SEQ ID NO: 130287 - DNA, 30 bp, Homo sapiens
  chr19:1206384-1206414
  hyper
ggcgtcgccggagacgcccccagcgaagtt

SEQ ID NO: 130288 - DNA, 969 bp, Homo sapiens
  chr19:1206690-1207659
  hyper
ccgcagaccctgcaccgggcttggactcgcagccgggactgacgtgtagaacaatcgtttctgttggaagaagggtttttcccttccttttggggtttttgttgccttttttttttcttttttctttgtaaaattttggagaagggaagtcggaacacaaggaaggaccgctcacccgcggactcagggctggcggcgggactccaggaccctgggtccagcatggaggtggtggacccgcagcagctgggcatgttcacggagggcgagctgatgtcggtgggtatggacacgttcatccaccgcatcgactccaccgaggtcatctaccagccgcgccgcaagcgggccaagctcatcggcaagtacctgatgggggacctgctgggggaaggctcttacggcaaggtgaaggaggtgctggactcggagacgctgtgcaggagggccgtcaagatcctcaagaagaagaagttgcgaaggatccccaacggggaggccaacgtgaagaagtaagtatggcttgctggggtcggggccgggccgggccagtcacggtgctgatggttctgtcttccttccttctctcctccctccctcccttacttcctcttaacaccctgagctggacccgtctggcgcctgtgtcctccgtgccagggagagcgtggttgggggcctgcgttacggactttcactcaggcaaggccagttgtcgcagcggggcgtgcgtttgcatgggctcttggactccagttaaaatgccctggtagcgaaaccctcctgagaagggagcggcccccaatcccctaagactagccccttggctcccccagctgtccaaggagcagaggcgcccagtggaatcagcctgtgtttgtttgggccccgagagtttgtgtgcggccgccaacacgttttctgcgcagtgtgtggccgttaccggggccaggcgaaatgtgatttgtt

SEQ ID NO: 130289 - DNA, 196 bp, Homo sapiens
  chr19:1237438-1237634
  hyper
ccacggggcagcaccgcgcccccgagccggccaagggtggggatggcgagccaggggaggcagggacccgacgccagggctgagccgagacgccatcgtcctcgcccgacctcacagggagaaactgaggctggggcggggcctgagcgggggtccctctggaggcagccgggtggggggcgcaaggcccggatct

SEQ ID NO: 130290 - DNA, 53 bp, Homo sapiens
  chr19:1241589-1241642
  hyper
cgcccttatctgaccaccccctggttctgccgcagcccgggccggaacaaaac

SEQ ID NO: 130291 - DNA, 30 bp, Homo sapiens
  chr19:1242083-1242113
  hyper
ggacccgcgcgccccggaagccgaggctac

SEQ ID NO: 130292 - DNA, 31 bp, Homo sapiens
  chr19:1248272-1248303
  hyper
gcggggcagcgagtcgcgctgtacaccccaa

SEQ ID NO: 130293 - DNA, 30 bp, Homo sapiens
  chr19:1249887-1249917
  hyper
gatcctccgagcggcggcgacggctgttgc

SEQ ID NO: 130294 - DNA, 30 bp, Homo sapiens; identical to SEQ ID NO: 55301
  chr19:1250522-1250552
  hyper

SEQ ID NO: 130295 - DNA, 31 bp, Homo sapiens; identical to SEQ ID NO: 11887
  chr19:1253419-1253450
  hyper

SEQ ID NO: 130296 - DNA, 68 bp, Homo sapiens; identical to SEQ ID NO: 11888
  chr19:1260498-1260566
  hyper

SEQ ID NO: 130297 - DNA, 30 bp, Homo sapiens
  chr19:1261172-1261202
  hyper
cggcggggcctggacggaagagggggcgag

SEQ ID NO: 130298 - DNA, 205 bp, Homo sapiens
  chr19:1269058-1269263
  hyper
agggagcaggcacgcgtaactgggtcagccccgccccgccccgccgcgcgctggtcacgccccctcgagcgcgggtggaggactgcggactgcaaacgtctcggccaatagtcgagcccgacaccagtccgcgggagggggcggaaccgagatagactcggcccccagctcatgaatataagacgcaggcgcgccctctgattgg

SEQ ID NO: 130299 - DNA, 30 bp, Homo sapiens
  chr19:1269927-1269957
  hyper
cacgtcgtgctttgcgcccaaagtttggtc

SEQ ID NO: 130300 - DNA, 88 bp, Homo sapiens
  chr19:1270261-1270349
  hyper
agtgagcagaagcacgttctggtccagcaacaagtagatgtcagttggttagggtaggagttggcacccgttcggaaataggagaacc

SEQ ID NO: 130301 - DNA, 30 bp, Homo sapiens
  chr19:1276265-1276295
  hyper
cactgaagctggttcgtcgccagggtcggc

SEQ ID NO: 130302 - DNA, 31 bp, Homo sapiens; identical to SEQ ID NO: 55305
  chr19:1285674-1285705
  hyper

SEQ ID NO: 130303 - DNA, 175 bp, Homo sapiens
  chr19:1354507-1354682
  hyper
tcagaagcttatgacgcctttgcggggatgcctggctttgggatcggttgggatctgctggaattgggtccgtggcgcgcagctcccgggctgggaggtgccgtaggacctggaagattctcgaaagttctggaaggttctctcagggatcgccgcgggcgggggagcctgtttt

SEQ ID NO: 130304 - DNA, 30 bp, Homo sapiens
  chr19:1383438-1383468
  hyper
ggcagagtcgctctcgccgggactccgtcc

SEQ ID NO: 130305 - DNA, 30 bp, Homo sapiens; identical to SEQ ID NO: 55306
  chr19:1401357-1401387
  hyper

SEQ ID NO: 130306 - DNA, 144 bp, Homo sapiens
  chr19:1401652-1401796
  hyper
gggtcggggccccggccgccccctccccaaggagcctcggtgccccctctgcggagcgggcaccgcagccccgcgcccggggacgcgaacctgcaggctggggactggaatccccgccttgccgcttacgcgccatagattcct

SEQ ID NO: 130307 - DNA, 30 bp, Homo sapiens
  chr19:1407361-1407391
  hyper
aggggcggggccagcgcagggactccattt

SEQ ID NO: 130308 - DNA, 30 bp, Homo sapiens
  chr19:1407732-1407762
  hyper
aggaggcccgggagcgccgagcgtcgccgc

SEQ ID NO: 130309 - DNA, 30 bp, Homo sapiens
  chr19:1408125-1408155
  hyper
tgtcctggggcgcccgtgccgccgcttccc

SEQ ID NO: 130310 - DNA, 243 bp, Homo sapiens
  chr19:1438210-1438453
  hyper
ctccgtggaggaagcggctctgcagacctcaggcggcggctgctctaatccctgcagcctgtgttttgccctccagacggcagagggcgcgtgttcgccgccgggaaagcggaagcgcgtgtgcgcgcacggccgagggggcgggacatgccggcagtctcgcgataactgcgcaggcgcggaccaaagcgatctcttctgaggatccggcaagatggtgagtgttgcgatttggcgcgtctc

SEQ ID NO: 130311 - DNA, 30 bp, Homo sapiens; identical to SEQ ID NO: 11890
  chr19:1438780-1438810
  hyper

SEQ ID NO: 130312 - DNA, 210 bp, Homo sapiens
  chr19:1444963-1445173
  hyper
gcgcttctcacatccccgcggcctcccccctggacggcagtttacactgaactcggcgccctcccctgacttctgaaggaggagtcctgggtggccccgaagcctccccggcagccgcacggctccgtccccgctccagggttcagctgaggcacctgctggaggcggcctgtccccgccgccctgctaaagcggcgcccctttctccgg

SEQ ID NO: 130313 - DNA, 30 bp, Homo sapiens
  chr19:1445773-1445803
  hyper
ctcagcgcgccaagccgggctgattcgggg

SEQ ID NO: 130314 - DNA, 786 bp, Homo sapiens
  chr19:1446333-1447119
  hyper
ggaccaggtagggcgcgtgggtcgagccgttggggagggctccgggccgcgcaggaacggggcggggtccacaccgcgggaacagcgggcgcggcggcggggggcgcatggggcgagcgcgcggaggctgcagagtcgggggtctagtgccgtcgccgtagagaccgttgccgggaaaccgcctcggaaggctggcggggatggaagcccctctcgtgcgccgctgcgacccccagccccgggtctgcgcaagcgcagggctcgcccagcccagccctcggcctctgcaggagaccctcggacccctcctcactgcgccgacgcggaggctgcgccagctggggcggcgggggcggctgcgggggcatcctgcggaggctcggccctgcgcagggtgggggcctgggccacgccctgcgcttctttgggcctcagtttccccttctgggcgcgagcgtatggcctgctttgacgttcgccgccgctgctgttcgtatccgtccgctcccgaccccagcgcttctccagcctccggaatcgtctgaatttcgcggctgtgacatccctcattggaggggaaactgaggctggggggtgcagcggggagcccaaggtcacgcttcgaggccggagcctcgttgcggagctaaggcgcccgcaagagaacgcggggcgggggccggggagctgtccgcggtgctgacggaggcgcacgtctgccgactcgccgccggggaaactgaggcccatagcggcggtcaggcttcagggcgcggcctggaccgg

SEQ ID NO: 130315 - DNA, 210 bp, Homo sapiens; identical to SEQ ID NO: 55310
  chr19:1449907-1450117
  hyper

SEQ ID NO: 130316 - DNA, 254 bp, Homo sapiens
  chr19:1450129-1450383
  hyper
cgcccagcgctaggagcggcagcgccgcctgcccaggcccggaccgggctttgtccgccccggagcccctgcccgcgccgcggagaccccggagcccgcgcgctccgaggccaccccgggccgggatttccggtggggcccgcggagccgcgcagagggaggaggccccagacccaggcgccccgccagcccagctgcacgtaagcgggtgtgtgtcctcggggaggagggcaggggcgcgacctccgcctcgc

SEQ ID NO: 130317 - DNA, 170 bp, Homo sapiens; identical to SEQ ID NO: 11892
  chr19:1455092-1455262
  hyper

SEQ ID NO: 130318 - DNA, 30 bp, Homo sapiens; identical to SEQ ID NO: 11893
  chr19:1456011-1456041
  hyper

SEQ ID NO: 130319 - DNA, 125 bp, Homo sapiens; identical to SEQ ID NO: 11894
  chr19:1469945-1470070
  hyper

SEQ ID NO: 130320 - DNA, 92 bp, Homo sapiens; identical to SEQ ID NO: 55315
  chr19:1470383-1470475
  hyper

SEQ ID NO: 130321 - DNA, 278 bp, Homo sapiens
  chr19:1470674-1470952
  hyper
ggggcctttgcggcgcgcaggggcgaagcctgtaatcactgcagccgccggtaattcgctaatgagggctttgcagggattgttttcattctcagccccagctgtgggagtgcgggtgggggtgtggccgagccccggcaggaagccccgcccagacggtgttcagggaacccggagcccaagcgctccggcggagcccaaaagggtgggggtgggaggggcagaggccaacggatccccctgcctgtcgcaccccttggcgggagacgggaaggcag

SEQ ID NO: 130322 - DNA, 116 bp, Homo sapiens
  chr19:1471094-1471210
  hyper
gaggccaatggaaaggagactgaggggagtcccggcagtgagcccgaggccctgggacctggagcccgcgctggcctctccccagcggagcctgcacgttacggagaccatcacat

SEQ ID NO: 130323 - DNA, 30 bp, Homo sapiens; identical to SEQ ID NO: 11896
  chr19:1471522-1471552
  hyper

SEQ ID NO: 130324 - DNA, 30 bp, Homo sapiens; identical to SEQ ID NO: 55318
  chr19:1479284-1479314
  hyper

SEQ ID NO: 130325 - DNA, 30 bp, Homo sapiens
  chr19:1479554-1479584
  hyper
cagcgggggcggggcggtcgcggcgcctcc

SEQ ID NO: 130326 - DNA, 30 bp, Homo sapiens; identical to SEQ ID NO: 55319
  chr19:1489907-1489937
  hyper

SEQ ID NO: 130327 - DNA, 30 bp, Homo sapiens; identical to SEQ ID NO: 55320
  chr19:1490179-1490209
  hyper

SEQ ID NO: 130328 - DNA, 133 bp, Homo sapiens
  chr19:1490513-1490646
  hyper
cgggagagggacgcacgcctgcccgtcttccgcagacccacaccctcgggagcctcagttttcccatttgtacaacgacaagactaacccagagaagcgggttcactgttgcgataacgcgtcctaccctttg

SEQ ID NO: 130329 - DNA, 610 bp, Homo sapiens
  chr19:1491115-1491725
  hyper
ctcccattggtcctagcggggggccgggggcggacaccggcgcggggccggagcatcgcggctcaggctgcgggaaagcggtgcgcgtgcagcggggtgggtgccctggtccgcgggcgagctcgagcagccaaccccgggcgcgtcggggccatggacggcctgaggcagcgcgtggagcacttcctggagcaaaggaacctggtcaccgaagtgctgggggcgctggaggccaagaccggggtggagaagcggtatctggctgcaggtgagccgtcggcgctagcccgtttcgccgacgggcacaccgaggccatgggcctgggggtcgcagaccggactccttccccggctacggggtccggtccggccggtggagcgcgcgaggtgactgggacctcgaggtccgcccgcagcccttcccttgcccgcgccctgcgaccctgctcccgggccacccctctctagcttccgcccctggccgccccccgacgcctccttccgggcgctgggtgcctgccatgccgaagtccggttcttccagttgcccagtggccccagaggggtcgggatgccagtgtcctgcgcgtttcgccgtcccccttccccc

SEQ ID NO: 130330 - DNA, 203 bp, Homo sapiens
  chr19:1507916-1508119
  hyper
acggaaatttgcttccgggccacggctcgttaaagggcccactctgacgtgtgtgcagggagggcggggcaggtagtcaccggcgtcacgaaacacgcgctgcacgaaaaggcacgagtcgttggcgcctccgcagcggccacagcggtcctcgagggcacccgagcccaacaacccatcacagccggcgctctaaagggtga

SEQ ID NO: 130331 - DNA, 184 bp, Homo sapiens
  chr19:1546216-1546400
  hyper
gtgcgcccgtttgtgcgcgggggaagctcgcagccacgagcgaagggacctgtgtctccactttggacaaatctcccgggaatttcccgggggttcagagctccgatgtcggggcggggaggggcagggtgtcatgtgcggcgctggccacacggtggcgacagagaacgtgccgttctggtcc

SEQ ID NO: 130332 - DNA, 505 bp, Homo sapiens; identical to SEQ ID NO: 55325
  chr19:1567148-1567653
  hyper

SEQ ID NO: 130333 - DNA, 235 bp, Homo sapiens
  chr19:1568332-1568567
  hyper
acgctccttccctcccgccgcctcccgcggccccgccccggccccgcccccgcgacgtcacgccgcggcccaacaatgggcggcccccagggcgcaggcgcgcggggcggggccggggcggggccggcgccgggcacgtggtccaggccccgcctccgcccggcgctcgggcgggaacccgggcgcatccgcacgtgcgggcgctgctgcaggtgtgtgcggctcagcccctgcc

SEQ ID NO: 130334 - DNA, 30 bp, Homo sapiens; identical to SEQ ID NO: 55327
  chr19:1591612-1591642
  hyper

SEQ ID NO: 130335 - DNA, 30 bp, Homo sapiens
  chr19:1592495-1592525
  hyper
ctgcgcggccggcgcgctcattcacctata

SEQ ID NO: 130336 - DNA, 90 bp, Homo sapiens
  chr19:1605603-1605693
  hyper
tggtccggagtgggcggcgttagggcggtgctttctggccacgtggtctggcggccgattgtgcttctgggctccgcggggctacctgcc

SEQ ID NO: 130337 - DNA, 38 bp, Homo sapiens
  chr19:1672516-1672554
  hyper
gctccccacgtgcgcgctcacacgtgcatccgcggcta

SEQ ID NO: 130338 - DNA, 183 bp, Homo sapiens
  chr19:1675932-1676115
  hyper
cgcctcggggttatcgatcgcagccttggaaacgcgattagattatcccggctgggaacggcagcctggcgggggccgcgcgggggaagcgcgccgcttcttgtaaacggttccccgaagggcgctgggccaggggcctgggagggggctcgttcccggtggggggggcgtcccggtgcggcg

SEQ ID NO: 130339 - DNA, 202 bp, Homo sapiens; identical to SEQ ID NO: 55330
  chr19:1718939-1719141
  hyper

SEQ ID NO: 130340 - DNA, 648 bp, Homo sapiens
  chr19:1725426-1726074
  hyper
agcgggtggtgggaacgggattggaatcccgactgtggggcccctgcggccacctccaggatacagcggaccccgatgaagccctggcctgggtgctgggggaggctccgcggcgcggtcccgcaggcgggaggcgatgctgccgacgctattgctgccattactattacggagagatggggcggggcgggagcaccgggcccttcccggaagcccttcctgagcttattcagtgcctggggccgcggcgatcgatgacagctgggcgccggccgagccccctccgggccgcgcgggggcgcatgcgcggggccgcgggatcgatcggccgcgctcgggcctccccgcacccgcccgaccccgcccccccggctcgttgcccggcaacctctgcccggcgcgctcccattggctggcggcggcccgggccccggccgcgcgtggtcacttggtcagcgcgggctcggcgtggccgggggcctggctccgggcgcgggtcgatgccgcctcgcatctgacctttcccggcgcggggagggggcccgagaggatggagagagctggaccatcttggaagaaaactttattgacccgtctcttatcttggggacgcacggttccagcggcggggggcgagggtacggctgg

SEQ ID NO: 130341 - DNA, 30 bp, Homo sapiens
  chr19:1746735-1746765
  hyper
acacctttgaccggcgcatgggccagaacg

SEQ ID NO: 130342 - DNA, 1578 bp, Homo sapiens
  chr19:1748598-1750176
  hyper
ccgctgcagccttgctcgggtcccctagcccggcgcctccgcaaaccaacccaccgcgggccgccgagccccgctccgggatccgccggctgcctccatcccagaagagtgcgcagagaattaaatctagatatttacatgtttaatggctaaaggagcctgtcttctggcagggcagggagggcgctcaggtggtttaactcagcgccgggatcccgctcagctgcgggggccgcgaaccccgccgctgggccgacgattgggcccctccggagcgcggcgcccaacgcgggtttcgttgcgtcggggaagtccgtggcctgcagcgtccagtccccaggctgtcagccgagccctggagtggggcgttctccaggcccccaacccctgatccaggccgttcccctcccgcgcaccctccggcgggggctgcagcccgcgcccctcgccgccaagccccattttcccacagtgcaaactgcagcaaacgaactggttttctcctgagcgcacgctgcggggagacgattccaacggcgtccagtgaggaggggcccaggcctgcgagacggggcgcgttcctgtccccagacccctccggctgcgcctcaacccccagcccggctctctgacctgcatcggtcgggccgggcacagaggaggcaaagcaggcggaggccgcgagaggagagcagcctgacctcccgcctgagcccggacccttcccctcgggcaccctcggacgcccccgccccagcgtgttactttctagatggggaaactgaggcgcggccagggcgatgcggcggaagtcccgcgcccggccgtctcccgcgcctgccagacagagccccgagaagagggcatagaattccctcctctaattgtgtcccagaactctgggacgacggaggccaagctgctgagggaggggacgaggacgcggggccccagggaccaacccctccgctccccggccagccgcggccgcccagcctcggtgccccggcgcaaacaagcgcggtgtttgccgagcgcgaggcgggcggcgcggcccgagagcgatgaggattcgatggagccgctcgccgcggcgggggcaacggagcccgggcgggcgcggggatcgatcgggcacagctgtcgcctaagagcccgcgggagcatccacccgcgggccagagctgcccgggcgccccgcaactgcgggcaggaaatccgggacgtcgggcccgccaggggcgaaaccccaaagtcgcgacacccggggtggggaggtcaggacgtccccacggccaacgtggaaccttcgggagccgcgcgctcagcctcgccgggacccccgccaggccgtaaaagcccagagtctccccccaaatctaaataaaatccccagaccccgcccgaacgaaggcggctggagtccagagggagaactcctgccacacactaggcaccggcggccgggatttggggcgcccgcaggtttcgggggccgggagtgggagcagagcggatctagggctgcggctgggcttgggtggggcgcgcattcattgccatcgtttagtaaaacct

SEQ ID NO: 130343 - DNA, 453 bp, Homo sapiens
  chr19:1751177-1751630
  hyper
aggccctcttcctctcggagtccctgaccctcgtcttctctttcaaaatggatgctttccctgctagaaaagccacacacgcttgctattaaaatgaacacgatcatcaagctgtaaaaaatatatttaaaaggaagcctgcaaaatcccagctccctaggagctcccccacattggcatttgggggaacttccttccaccttgttatcctcccacccgtagagacccccagcccccacctggtctgcgcttcttgagcctgggatgctagcgttttatggcggctgattgatttttagatctcacgattatttttaattatctgtgattgttggagggtgagaatgaggagcgcaggctggggctctgtgcagccacatcccccccgccgagattcagcatctgcacggggagtggggtacgcgactgttcggacctgcccctctcttccca

SEQ ID NO: 130344 - DNA, 150 bp, Homo sapiens
  chr19:1752191-1752341
  hyper
tgcaaagctggggccggggtttgcccagaaggtttgcaccaaaggggaagtgacagcctgactgtgtcctcccctcttccttcagctttgagccctgatgcaaccctctgagatgggggtaactgggggctcccgcgaaccgactgcctg

SEQ ID NO: 130345 - DNA, 991 bp, Homo sapiens
  chr19:1753202-1754193
  hyper
gaatcacacagagacgcgaaatcggagactctgggtcgaggcccccagccccacctgggcagagtctgtcctcggacccccgcccgctgtcccccgggtacggcctgccccagcgggcgcgggcgggcgcagtggccagggacgccgaagccccaagtctggccgacttcggcctgcttggtgctcgagtggggccggggcgggcggagagcgaggctgcgggaggcagcggtggcaggagcgggtgggcgggggcgctgacgtcagacccgggcccgggcgccggcggccgctcccctgccacatcctggtggccgcgctcgcagccgggccgggccgtgcgccgcgcagcctggcagcctcgcgcgcagccaccggggagcgggcgggagtcatgcagcggccttgagcactaggggccggcgctgaggagcgcgcgcggcgggagggcagccgagcatggagctgagcctggagagcctggggggcctgcacagcgtggcccacgcgcaggcgggcgagctgctgagcccgggccacgcgcgctcggcggcggcgcagcaccgcggcctggtggcgcccgggcgcccgggcctggtggccggcatggcgagcctgctggacggcggcggcggcggcggcggtgggggcgccgggggcgcgggcggcgcgggcagcgcgggcggcggcgcggacttccgcggggaactggcgggcccgctgcacccggcaatgggcatggcctgcgaggcgccgggcctgggcggcacctacacgacgctcacgcccctgcagcacctgccgccgctcgcggccgtggccgacaagttccaccagcacgcggcggccgcggccgtggccggggcgcacggcggccatccccacgcgcacccgcacccggcggccgcgccgcccccgccacccccgccgcagcgtctggcggccagcgtgagcggcagcttcaccctcatgcgcgacgagcgggcggcgc

SEQ ID NO: 130346 - DNA, 1381 bp, Homo sapiens
  chr19:1754224-1755605
  hyper
cggcaaggagctgcccgccatggggtcgccgctgtcgccgctgcccaacgcgctgccgcccgcgctgcacggcgccccgcagcccccgccgccgccaccacccccgccgctggccgcctacggcccgccaggccacctggctggggacaagctgctgccgcccgccgccttcgagccgcacgccgcgctgctgggacgcgcggaggacgcactggcccgcgggctgcccggaggcggcggcggcacaggcagcggcggagcgggcagcgggagcgccgcggggctgctggcgccgctgggcgggctggcggcggccggggcgcacgggccgcacgggggaggcggcggccccggcgggagcggcggcggccccagcgcgggcgcagcggccgaggagatcaacaccaaggaggtggcgcagcgcatcacggcggagctgaagcgctacagcatcccgcaggcaatcttcgcgcagcggatcctgtgtcgctctcagggcacgctctccgacctgctgcgcaaccccaagccgtggagcaagctcaaatccggccgcgagaccttccgcaggatgtggaagtggctgcaggagccagagttccagcgcatgtcggcgctgcgcttggcaggtaggagcgtggcgcgcagggccagaccctgggggcgccggctctggactcccgagcacctagcggggcggcggccgatgcccggggccagcgccccaagccccgcccgtgcgccccggcagcccgggaccccctatcaggaagctagaccgcgatccgcgccgctgcccgtttgtaccgttgccaaaagggagaaagggattgtgccgcctccccgccccccggtcgccgcttctgcccctttcgggagcgcgtaggggttctctagtccttgttagactgctgggaggctccgagcctctccccaagcagccctcagggaagctcattgtgtgtgtgcgtgtgtgtgtgtgagcgcgcgcctgttggggggagctgtgtccccgaacgagctgctgttgtcggctaaggtgccactcccctcctccagagtgggtggagaggggctgttgagcccccagccccgggccacagagctccgagacgttgcggcgggcgcctgcagctcagcagcagaggccgagcccgcgctcatccccccacctgccccagcgcgcgcttctttgtagttcggccccgcgatcgataccccctccctctcccctccggccgctggcaaaggtcacccgagaatggcgggggaggggcggccccggggaccctcggcccgcgccgcccggaggccttcacaccccgacccggcgcccgccccgcgcagtttggtcgtggctcgggtgcgcgcgcccctgccc

SEQ ID NO: 130347 - DNA, 30 bp, Homo sapiens
  chr19:1755988-1756018
  hyper
tggcgcctgatcgatcgcttctccgagcac

SEQ ID NO: 130348 - DNA, 1151 bp, Homo sapiens
  chr19:1757098-1758249
  hyper
acagaagggcaaaccgcaggcgagaagtcccatggggggggggtgggctccccgcagccgggtcagcagcacccagcacccgccctgagtggacaccgcctgcttcgcctgcacctgaccctgcacccaggtgggtgttcgctcctgccgaccccacagccatccaggcctccgccgtcccctttctgccacggggagagttgcagatggggaaacaggctccgtttgtgcctcgccttcctgacttgtgacaatgacaaacagtctcagctctgggagtctgggtttcctgtcgaggaagggagagttagaacagtcgccgtctcaggggtgcgtgggggaaccggaggggtgagcgcagctcctggcaccccgagcctcccgcagggcgctggggcgttgaggatgataaacccggaccacgctgcccgcctgctctctgccgggtccgctgcccacgccgtggccccgccgcgcggccccgcggccgcggggttcacgccgtcaaccttgcgcacctgtcgcgtctcaggtgccctgggggccgcgtctacaccaccggactccgcctggggcgtaagaggtggcgggggcgagggccgcggggtcactaggctccggcccaggcctttagttccggtcgctgcgcaaatgaaaagcggttaagtggcggcaaatcgcggcggttagggggagacggccggatgcgtccccatctccacctaacacggcgacgccccaacgctggtgctcggaaagggaactctgcccccgccccgcccccgcaccatttcaaccccgcagcagaggactcgccgccctttctactccggcatccccattccccgctccgcgagcaccgcgggcctccccaggcctcctccaaggagaactttgcgccccgggtctcccgtcgcgcttgcccggctcggggcgggccacgcgtttccgcaggtgccgagtgtcctgccgggcgccggggccaggacagagacggggacagggagggagaaagacccgcaggtgcagacggagagggagggggagacggggagatggagagagagggaggggtcgcgagacaaaaccagagagtggggagggagagaccgggagcgggagaaacagacggggagaagagaaaaagaagc

SEQ ID NO: 130349 - DNA, 30 bp, Homo sapiens; identical to SEQ ID NO: 55342
  chr19:1761409-1761439
  hyper

SEQ ID NO: 130350 - DNA, 94 bp, Homo sapiens; identical to SEQ ID NO: 55343
  chr19:1761758-1761852
  hyper

SEQ ID NO: 130351 - DNA, 522 bp, Homo sapiens; identical to SEQ ID NO: 11904
  chr19:1761983-1762505
  hyper

SEQ ID NO: 130352 - DNA, 261 bp, Homo sapiens; identical to SEQ ID NO: 55345
  chr19:1762627-1762888
  hyper

SEQ ID NO: 130353 - DNA, 432 bp, Homo sapiens
  chr19:1763934-1764366
  hyper
cggctgcaatgaatacgtccggggcggatcattttacgagtgtgagtttatctgtggattaatttcccaataattgaaacgctgggtcagcctccccagcccctttctgggtggccgcttcagccgcttcttatcactgattcctttcctgtcatctttttcaaatccatttcccactgcaggcgctgtgtctccgtaacattttttttaaaaatcaacgccttgtgcgtgcgtgtgtttgcccactggctttgctcctgtttgagggtgcctgaatggggtgggtctctgtagctgaatgtccgagggtgagaggtgccccctgacacccccatgcccccaccccatggcggcccagcctccagatggagccacgagggagggacagcccgagagtccaagtggaaatgcgtttcccggttaagtctttga

SEQ ID NO: 130354 - DNA, 854 bp, Homo sapiens
  chr19:1765513-1766367
  hyper
gtcccaggcagccgccgcttcacgctgtcctgtgactgtgagtggaggccagctcctggagctgcctctctctggcctcacgcagcagctgctccctgaatggtgaatggatgagtcggttgcaggtccgtgcttcggcgttcattccttcgtgactctcgggactgcggcccggtggggacacagggctctgggtcactgcgtccacttgataaaccaggaacctgatgtccagagaggccagggtgcgcgttcaaggccactcggcccgcagagcccacccgcgtccccatggctgcagtggtgaggggagcagggggaggcagagaggagcccaccctggggctgggcggacatggatgcgtaacccacaccgcaggcttctgcggggtgacacccagactcaccccaagaccctgcacaccctacagctctcacgtctcacgtccacaccgcgagccagctgcatcccacacagggatgtcacaccaagatccgttgcctcatccaccgcccgtccaaggccccacaagctgatgccggttttcccgcccagaactggaacagctttcctaacggtcacaggtttcttagcttctcacttgggtggggtttggatgtgcaaggctgccgacccccatcgtggttgagcgcccgtgcaggcgccacccacccacccacagcacctcgctcagacttcgccctccaccccgccgggacatttgggaagcctcaggcagccccacgcgggcacacccgatggtggacggaggctggcaccctcagcccgcacgcggccaacgtcaggcgcgcgcagaggcacccacgggcccgccttcaggggcgaggcggat

SEQ ID NO: 130355 - DNA, 149 bp, Homo sapiens
  chr19:1768342-1768491
  hyper
agtgagtgaggccagcgggggaggccagacagagaggcggctggtggtggatggggagagggaagcggctggaagagctcaggagcccaggaaggactggcctgcaccgggacatgcctgaagggggcgcactgtctttacaaaggaag

SEQ ID NO: 130356 - DNA, 247 bp, Homo sapiens; identical to SEQ ID NO: 11907
  chr19:1769648-1769895
  hyper

SEQ ID NO: 130357 - DNA, 377 bp, Homo sapiens
  chr19:1775059-1775436
  hyper
cctccgggcggcgtgcgcctcctgcctctccccggccggccacacggtggcgctgtgtcccgctcgcccgcccgcccgccgctcgcccgcagcctgcaagcgcaaggaacaggagcagcagaaggagcgcgccctgcagcccaagaagcagcgcctggtgttcaccgacctgcagcgacgcacgctgatcgccatcttcaaggagaacaagcggccgtccaaggagatgcaggtcaccatctcgcagcagctcggcttggagctcaacaccgtcagcaacttcttcatgaacgcgcggcgccgctgcatgaaccgctgggctgaggagcccagcacggcccccgggggccccgccggcgccacggccactttctcca

SEQ ID NO: 130358 - DNA, 312 bp, Homo sapiens; identical to SEQ ID NO: 11908
  chr19:1775734-1776046
  hyper

SEQ ID NO: 130359 - DNA, 825 bp, Homo sapiens; identical to SEQ ID NO: 11909
  chr19:1776192-1777017
  hyper

SEQ ID NO: 130360 - DNA, 296 bp, Homo sapiens
  chr19:1812451-1812747
  hyper
ccaggcctcagggacgcggtcacggccgaagggcggggcctcgcagagcctcgcagaacaggccgggatagaagacgctcgggagcagtgcctgggtctggggaggggccgggactttggggaagggactagaaggaaggcgaggacgagcggggtctcgctgagcaaagtcagagtaggggcggggccaggactcaggggcttggccagagcgggaagcggggttgagcatggccttgcggagcagtgttatggtaggggcggggctgggatccggagccgttacaaaggaggaa

SEQ ID NO: 130361 - DNA, 30 bp, Homo sapiens; identical to SEQ ID NO: 55352
  chr19:1813043-1813073
  hyper

SEQ ID NO: 130362 - DNA, 31 bp, Homo sapiens; identical to SEQ ID NO: 11910
  chr19:1826719-1826750
  hyper

SEQ ID NO: 130363 - DNA, 30 bp, Homo sapiens
  chr19:1847819-1847849
  hyper
cgggaagcggcgggcgccaatcaggggcag

SEQ ID NO: 130364 - DNA, 30 bp, Homo sapiens; identical to SEQ ID NO: 55354
  chr19:1848335-1848365
  hyper

SEQ ID NO: 130365 - DNA, 35 bp, Homo sapiens
  chr19:1848727-1848762
  hyper
gccagggctgtccacggcgcgcctgaccaaaaaag

SEQ ID NO: 130366 - DNA, 347 bp, Homo sapiens
  chr19:1853354-1853701
  hyper
gcaagacctcaaccacgggccaggacccacctcttccaagcacccaggagaaggaggggaggccagggaagcagggccgggccaggctgcagcccaggcccggaagagcctgcaaccccggcgggcatgggctccacggccccacctgcaggccagggagggcagcgcagcccaacagccgcagtcgtcgttaagggagagttgattgtcacgtgataccgcaacggccaaagtcagcaaggcagggactggaggcccaagcccggtgccagcctcccctgcagcctctctcacccacccacccagagagggcgagctagggcccccacacccgaggacagaggaaa

SEQ ID NO: 130367 - DNA, 632 bp, Homo sapiens
  chr19:1856932-1857564
  hyper
aggaggagcaggttgccggggtggggggggcgaccggggcaggggcgcgcagccgctgggaacacagctgccgcacgtagctcggcggcggcggcggggacatccgcagccccagccggccccgctcacgtggtcccactcccgccggggccagggggcccgggccagggtcgcctctccggcctgggtgcctgccagccccgccccgcgcttggagactgaggcgcgcacatgcgcacgtgggtggcggggcagggggtgcacgggctacccacccacgctgcgctgggcgaagcgcctctgcgaaatgccaggccctgcctcgcacacaatccactcgcagggaggagggtggggtgaacttgtgggggcccagagcgcgctgctcctagccagccgggcccccaggtgcacagccacccagctgctccgcgctacctggccgagacgcagcgccctgaggatgcggtgggtggggacaacgcgggagggcagtgtgggcggggccgcggtggacttgaccctctgactcaggctgggcccgggtgagctcaggacagcctcggaaacaggcaggctcagaaaaatggagtccaggaagtcctggaaacctggcccggccccgtctgagc

SEQ ID NO: 130368 - DNA, 385 bp, Homo sapiens; identical to SEQ ID NO: 55356
  chr19:1862235-1862620
  hyper

SEQ ID NO: 130369 - DNA, 77 bp, Homo sapiens
  chr19:1864236-1864313
  hyper
ggtgcggaagcggccggccccgcccccaggccacgtgcgcgacccttcccccctcttctcccggcctggggccctgc

SEQ ID NO: 130370 - DNA, 30 bp, Homo sapiens; identical to SEQ ID NO: 55357
  chr19:1864923-1864953
  hyper

SEQ ID NO: 130371 - DNA, 361 bp, Homo sapiens
  chr19:1874692-1875053
  hyper
cacttccgggtcagccgagaaatggtattcagcaataaatgtgtcagagtcccaaaaaaaaaaaaaaaaaaaaaaaaaaaaaaacacttctactagacagaaagcgaattttcttaatctgtaaagtgcacctagaaaccaccaccatccacccaacagaaaaatgagccaagaagataaaatacaaatggcttttaaatagtcaaacgtttataataaacatattttccaatctcgaaacgactgtcagtggtaacaatgatcaacgtaacatagatgtaacaggaacatcacgacgttcgactatacttacaggaaacacaagctacagtgaaatactatctcacgcctaccaggtctg

SEQ ID NO: 130372 - DNA, 170 bp, Homo sapiens
  chr19:1876314-1876484
  hyper
tcgccaccgcctggtcgcgcgacacaggctgaaccctgcccaaccctaaggtggacaacaggccaccggttcccgagtcctcccggtcctaagccttctgccctagagatcgtaggaactcttctcgtgatcccagctccagtgtcggctccctcttccaggggagaccc

SEQ ID NO: 130373 - DNA, 156 bp, Homo sapiens
  chr19:1876538-1876694
  hyper
cgaaggaagcggcctgtccgagctctgaggtccgtcaagcgcggcacctcaggacccagagtgcgctgtcctggcccctctgcagtaggactgacgggaagctgtcgagggggcagtcccgcgatggcagcagggcccccacgcctggcgtcctca

SEQ ID NO: 130374 - DNA, 30 bp, Homo sapiens
  chr19:1877065-1877095
  hyper
ccacagcccctgggtcggggcggggtcccc

SEQ ID NO: 130375 - DNA, 30 bp, Homo sapiens; identical to SEQ ID NO: 55358
  chr19:1905237-1905267
  hyper

SEQ ID NO: 130376 - DNA, 30 bp, Homo sapiens
  chr19:1905724-1905754
  hyper
ggtgcgggagaccccgtatcctccagctgc

SEQ ID NO: 130377 - DNA, 457 bp, Homo sapiens
  chr19:1941690-1942147
  hyper
cggacacagccccacgctgacctccacactcaggagtctgccgccccagtgaccctcacactccagaccctgcccccgccgctccagtgacccccccactctgcaccccggtgactgtcgtgctccaactctcctgccctccgctgagcctttagtccccaccccacctcccgccttcttcccccacccagtgctcaagcccaccgcccactcacccgcgtccctcacgcctccccgcgttctggtcccgaggcccctgcccacctggccccatcgcctcctcctgtcttggcctggcccctccccacgcagctgtgtccccgtcctcactttgtggtcctaaagctcttgagggggagagcagggggtggtgggggggaggaaggtggtctgatccgcagggacctgttgcggcactgcctgggaactcccggctgggctcgctgccccctccccc

SEQ ID NO: 130378 - DNA, 1129 bp, Homo sapiens; identical to SEQ ID NO: 55360
  chr19:1978008-1979137
  hyper

SEQ ID NO: 130379 - DNA, 30 bp, Homo sapiens; identical to SEQ ID NO: 55361
  chr19:2050851-2050881
  hyper

SEQ ID NO: 130380 - DNA, 30 bp, Homo sapiens; identical to SEQ ID NO: 55362
  chr19:2051550-2051580
  hyper

SEQ ID NO: 130381 - DNA, 30 bp, Homo sapiens; identical to SEQ ID NO: 55363
  chr19:2061137-2061167
  hyper

SEQ ID NO: 130382 - DNA, 30 bp, Homo sapiens
  chr19:2096888-2096918
  hyper
tgaagggtgtggcgcgagcagcgtcgttgg

SEQ ID NO: 130383 - DNA, 30 bp, Homo sapiens
  chr19:2150929-2150959
  hyper
agggcacctataggcggggcccagggcatt

SEQ ID NO: 130384 - DNA, 30 bp, Homo sapiens
  chr19:2151569-2151599
  hyper
cagctgacgacgagcgcccggtcccagccg

SEQ ID NO: 130385 - DNA, 30 bp, Homo sapiens; identical to SEQ ID NO: 55364
  chr19:2151867-2151897
  hyper

SEQ ID NO: 130386 - DNA, 102 bp, Homo sapiens; identical to SEQ ID NO: 55365
  chr19:2163578-2163680
  hyper

SEQ ID NO: 130387 - DNA, 756 bp, Homo sapiens
  chr19:2164917-2165673
  hyper
ttgggacttctccccgatcttgagtgggcaggattgggctcacccccggagttagtaaattttgtcttcttcatcttggtgaccgttggaaaatgacaggccgggtggaatgttacagaggcaccccaccgggtggttccagaaacccgcgtgcggctcccggggtgcgagtcccggcgtggcccctgaggaggcggggcgcgtgcgtccgcgcttgggaccctctggccacgctccgggctgggcagggcgcgttttcggggaaaagtgaagcaggcgctgtcagcgagcgtgtccggggcgcgagttttggggggcgcgtctgcagggcccggccgggcatccccgcgcgccctgggactcccgcgcgcgctgggcttgtgtcagtttttggaaacgtgctcgctgggggcggggtcaggacgcggagagcgctggggagcccgggctggctcactgccccgggtcggtgcgagtggatgggagagggagcgcagcttccagcctggccgcacgtcccgcgcgcggggctggcggggtagggccctggggctctggcttctctggttgggcagctccgggtgtgcgcctgggcggcctgagccgggatcccgccaggagaggtcctaggacaaaaactgaaagcagaggccgcgcttcagcgccccgaccggtttcctccctcgaaagttcaaactccagaacccttccagcctccacttctctctgttgggctctcatcgttttaggtggtag

SEQ ID NO: 130388 - DNA, 144 bp, Homo sapiens; identical to SEQ ID NO: 55367
  chr19:2168519-2168663
  hyper

SEQ ID NO: 130389 - DNA, 444 bp, Homo sapiens; identical to SEQ ID NO: 55368
  chr19:2168902-2169346
  hyper

SEQ ID NO: 130390 - DNA, 30 bp, Homo sapiens
  chr19:2235909-2235939
  hyper
ggacgcccctacctcggcctcgtctgtccg

SEQ ID NO: 130391 - DNA, 188 bp, Homo sapiens
  chr19:2236298-2236486
  hyper
gctcaggctggggccggcgccaaaaatgtctcagggcgcagacacggaagcacccccagggctagtgcgcctgcgcaccttgggccagccatgccgcccgcctccgctgcgtggcgctggcgacccgtggctgctggcgtgggcggggtaccggttggtaggagagacggaccgttgttacataacca

SEQ ID NO: 130392 - DNA, 36 bp, Homo sapiens; identical to SEQ ID NO: 11915
  chr19:2250669-2250705
  hyper

SEQ ID NO: 130393 - DNA, 173 bp, Homo sapiens; identical to SEQ ID NO: 11916
  chr19:2251061-2251234
  hyper

SEQ ID NO: 130394 - DNA, 339 bp, Homo sapiens; identical to SEQ ID NO: 11917
  chr19:2251610-2251949
  hyper

SEQ ID NO: 130395 - DNA, 1147 bp, Homo sapiens; identical to SEQ ID NO: 55373
  chr19:2252588-2253735
  hyper

SEQ ID NO: 130396 - DNA, 79 bp, Homo sapiens; identical to SEQ ID NO: 55374
  chr19:2253780-2253859
  hyper

SEQ ID NO: 130397 - DNA, 50 bp, Homo sapiens
  chr19:2269131-2269181
  hyper
cctagggagggcgacgtggaccacgacagacaaacgggcactcgaagacc

SEQ ID NO: 130398 - DNA, 30 bp, Homo sapiens; identical to SEQ ID NO: 55376
  chr19:2270283-2270313
  hyper

SEQ ID NO: 130399 - DNA, 316 bp, Homo sapiens
  chr19:2270792-2271108
  hyper
gctgctggcgctgccggctgcgcgattgtgaaaatctcccccggggcgcgaggccgcgtctgcctggatgacgcaaccgggagggcccgggcctggagcgggggcgggggggcgggcggccgggagccggagcggggcgcgtcctccatgaggtcaggctaggcccgcccggtcttcgcggggacaagcaagagtcccagattttggccgtagtgcagggtggaaaggggaagccgcgacagaactgaaaaggggaagcgctggctgtcttggtggccggggggtgaggctctgccccggcggggctgcgtgaggg

SEQ ID NO: 130400 - DNA, 273 bp, Homo sapiens
  chr19:2273763-2274036
  hyper
cgccgtgttactggccgcccctagggacctgcagcgccgttcggggcagcagcacttccggcggggtcgtggcctggagcgcttccgggtctgcaaccccgccgtctgcccggccgcagcgccacctgccggccgcatccgggagcgccacccggaaaatcagggccaggcctggccgggaaaccggctggaaagaggaggaaaggaggaactcgaaaagattgtagacttggcgagcgggccggggggatattcagccgtctgagcggtggt

SEQ ID NO: 130401 - DNA, 509 bp, Homo sapiens; identical to SEQ ID NO: 11919
  chr19:2289762-2290271
  hyper

SEQ ID NO: 130402 - DNA, 237 bp, Homo sapiens; identical to SEQ ID NO: 11920
  chr19:2290630-2290867
  hyper

SEQ ID NO: 130403 - DNA, 563 bp, Homo sapiens
  chr19:2302510-2303073
  hyper
cgcgaagccggagctggggttggcgaccgagaaccttcctgcctcccctccccagcaaggggcacgtcccaccaggcccggactgcccgtctgcccctgcagggcccctcgctctggtggcgggctcggtgagctctgctgcccggtctcgggagtctgggggagcgcggcgtcgacccctgtggagggaggactcgtgtttcaaggacagagcctcattaccatgcacgaccagccgcagctgaggccgcagaggcctttggcaggggggccgggccggcggcagggacggcgttggcggtggtggacgggagtgggggtctgtcctgaacaggtgggggtggtccctgtgctggcccccgccatgcgatcgcaccccaggactctcctcctcttcctaagccccagcatgtgcctggtgccgcgcgggtgctggaggcacagcggcttccacgcagacgcccgcagcaccacagcctgtgcacggcgcatccacgccctgttacaaatgttccattcaacgccttctagcacattcacagatcgtccgcccgcacctctag

SEQ ID NO: 130404 - DNA, 30 bp, Homo sapiens
  chr19:2328376-2328406
  hyper
cctcctcaccttcgcggcctccctggaact

SEQ ID NO: 130405 - DNA, 30 bp, Homo sapiens
  chr19:2328676-2328706
  hyper
tctgccgttggttgcggcgggcaccggccg

SEQ ID NO: 130406 - DNA, 277 bp, Homo sapiens
  chr19:2328965-2329242
  hyper
tcctttccccgcctcggaggccctccgccgctgcagcgccactcacttcccaccgggtctgaaatttgtgccccctccatcctccggttctgcttctccgtttcggggtctccagttgccgccggggacgcctctctccggctctgtggccttgagcaggcggctgcccacccctctccgagcctcagtttccccttaggcggaacgggcacggtgctaagctaacctcaccctagggggtgcggtgggggaacccagaggcgtcccgcgcgtcccc

SEQ ID NO: 130407 - DNA, 30 bp, Homo sapiens; identical to SEQ ID NO: 11923
  chr19:2426859-2426889
  hyper

SEQ ID NO: 130408 - DNA, 31 bp, Homo sapiens; identical to SEQ ID NO: 11924
  chr19:2431505-2431536
  hyper

SEQ ID NO: 130409 - DNA, 30 bp, Homo sapiens
  chr19:2456719-2456749
  hyper
ttctccagctccagcgcgcggacgcggtcg

SEQ ID NO: 130410 - DNA, 626 bp, Homo sapiens
  chr19:2461977-2462603
  hyper
cccccatacccagcctttgcccgtgctgttccatccgccaggagcgccgtttcctgcctgactgcgcggccctgggcctcagtcttgcgctctgcaaaccggggtctcgaatctaccccagccctcctgtctcggcgctggggaggggcttcgggtgcccagagccatccccgcgggacccccagggactggactccaagtcccagaaagccccgcgcttcccgtgggtggggcccggggctttccccctcccagcgcgcagtttgggaggcgctgggcaattttcaaattttggcgccgaacgggaggggcggtgacagctgagaccgtggtccccccgggggcacccacgcccaggctgctgctggcagctgcgcccagagcccgaggtctggggcatcccgcaaagctgccccgtccattccgaggggcctcccaaggcaccacacgcgccagggggctccgggcccatttccattatggaaaactgaggcacaggaaggttagggaccggtcggggaatccgcaccaggggcgtagcggaggcgggattcgaacgcgggaccctctttcccccgggagctagaaattagtgaccaattggctgggcgcggtggctcacgcct

SEQ ID NO: 130411 - DNA, 53 bp, Homo sapiens; identical to SEQ ID NO: 11925
  chr19:2462944-2462997
  hyper

SEQ ID NO: 130412 - DNA, 30 bp, Homo sapiens; identical to SEQ ID NO: 11926
  chr19:2474999-2475029
  hyper

SEQ ID NO: 130413 - DNA, 30 bp, Homo sapiens
  chr19:2475622-2475652
  hyper
ccaggggctggggtcgtcgcagccaggaga

SEQ ID NO: 130414 - DNA, 85 bp, Homo sapiens
  chr19:2476062-2476147
  hyper
ctccactgaggccacgcccaatgttcaagtctataaaagtcggtgccggaggctcccagctcagatcgccgaagcgtcggactac

SEQ ID NO: 130415 - DNA, 143 bp, Homo sapiens; identical to SEQ ID NO: 55389
  chr19:2478803-2478946
  hyper

SEQ ID NO: 130416 - DNA, 711 bp, Homo sapiens
  chr19:2488410-2489121
  hyper
gtggggtagagtgaggggcctcgtgaagagcgctgcgggccaagaccctcttgcgcatgtgacgagagcgcacgagtgtgggagcttcggcctgcgctcacaggcgtgtgcgtggggaagtgtttgggccgccgtgtacacagcaggcacgccataaacgcttcttggatggctccatgcgagggaagggagggagggcagagttcaggccctacagggaggaaaagggaggggcggaggcctggctttaggtttgaatctccgcggcttactagctccagcagctcagcaaaagcgtgactcagtttccctcgtccataaaagggaaagccgaatcgccctcccacgtgtcgaggtgaaactagacagtgcactaaggcacttagcaaaacgcgctgccttgagaacccttattacgccttccttccttccacctcaccccctggccagacactctgggggtggagaggggcgctgacccaggccccagacgcccctcccgtccgccctccctagcaggcaggagtcccggctttcccgttccttaaattggataattggagacagaggcgggtgctcgagacggagaaatccccaagtgggcgaaaggcaaggggcctgtcctagtttccctgcactgggggcccccaccctcgccagcgctccctccggtgcgccctgggcgcgcagtctgtgcgctcgggagccccc

SEQ ID NO: 130417 - DNA, 30 bp, Homo sapiens
  chr19:2495319-2495349
  hyper
tcagagagggtctgcgggtgtcctggcacc

SEQ ID NO: 130418 - DNA, 609 bp, Homo sapiens; identical to SEQ ID NO: 55391
  chr19:2579150-2579759
  hyper

SEQ ID NO: 130419 - DNA, 178 bp, Homo sapiens; identical to SEQ ID NO: 55392
  chr19:2598980-2599158
  hyper

SEQ ID NO: 130420 - DNA, 30 bp, Homo sapiens; identical to SEQ ID NO: 11930
  chr19:2611090-2611120
  hyper

SEQ ID NO: 130421 - DNA, 578 bp, Homo sapiens
  chr19:2702442-2703020
  hyper
cttcgaccccctaagcgcagccccgtccccaattccaaccccagcctccagttgcagcccgggtccccagacccagcccccctcctcagccgactccgacccccaactcggtccgcagccgaatccgagctgtcccagtcccctctccgggacgccggccgcgccctcacttcccctggcccggttcgcgggcgcccttacctgcgctcgggccccgcggccgcctcagccccgccgcgcagccgaaccctccgccccggcccgcgagcgctcgctcccctctgcgggggcggggccgacactcggggggcgggccctggcgtcccggcaaggccaatcgcgagccccggctgcgggaggccggagcgggggcggggcgcggggcaggcagcggggtaggctgcgcccaggagagtggggcggggctccgggcgcgggcggggccgggggcggggcgaagagcggctttccagggtgacttcgtgacgtcaggaaggcgcgagtagtttcgcgagttcgaatcccgcgctaggtgagctggttcgaatcctgcatgccagctccgggggctcatttgc

SEQ ID NO: 130422 - DNA, 315 bp, Homo sapiens
  chr19:2740071-2740386
  hyper
cccattggcctccccgagacccgctggcagaactttccatactattggctgcgaaacctgccactcatatgcgactccacctctcctaccggcacaggaaaggggtttcctcccgctgagcggcgggcgcagccaccaagcggccccggcgggaaacccggattggcgaggaacggttccggcagggttgggtttccagagctgtccaggggcgcctggtgctgaatcccgcttggaaagaggcttggaggtggatgggaagggatttccaacggaggcggctcctctctcagcgtcctcgctgctgatcccctt

SEQ ID NO: 130423 - DNA, 15 bp, Homo sapiens
  chr19:2776121-2776136
  hyper
cgccccggccaacag

SEQ ID NO: 130424 - DNA, 293 bp, Homo sapiens
  chr19:2783366-2783659
  hyper
atgatggaggcgggcgtggaaggaagtgacgcaacgtagaggcgggaaccagctggttgttagggcaactgacctctgcgacctaatggaggccggaaatcgggtctggtttgccctctagagcgggaatgaagcggtgcacggtggaacagtggctgactccagccggtcgccgagctgaccacgtggtgctgggccggccacgtggtgcagccgcgtttggacacctggactccagagcgtcacagctgcgcaatgaatgggagtcagtgttacccgcttactatctttgt

SEQ ID NO: 130425 - DNA, 30 bp, Homo sapiens
  chr19:2785823-2785853
  hyper
gctctctcgtttgccgaatgaatgaaccag

SEQ ID NO: 130426 - DNA, 197 bp, Homo sapiens
  chr19:2819626-2819823
  hyper
aagccgccgggaaacgacggagctgggatttgaggattggctccgcgaaccccacaacacccggggactccagcgaaccacacggggtggatccaacagccgcaggggcatcgtggtcctgcggagacgccgcccgcccggaggcggcgctgtgacccaggttggagagtcaggagcccagcgccgcgctgcggggc

SEQ ID NO: 130427 - DNA, 30 bp, Homo sapiens
  chr19:2842163-2842193
  hyper
ggcgggggcggagacgcccccacctgcaaa

SEQ ID NO: 130428 - DNA, 132 bp, Homo sapiens
  chr19:2900631-2900763
  hyper
tagcgttggctacgcgccggtcactcgggcgacaggaggcggggcggcgcggaagttatcttccaatcaggtgctccgggggcgggtccggaaaactgtccaatcaaggcacggggcggacaccgggaagcg

SEQ ID NO: 130429 - DNA, 836 bp, Homo sapiens; identical to SEQ ID NO: 11933
  chr19:2944613-2945449
  hyper

SEQ ID NO: 130430 - DNA, 633 bp, Homo sapiens; identical to SEQ ID NO: 55400
  chr19:2950417-2951050
  hyper

SEQ ID NO: 130431 - DNA, 142 bp, Homo sapiens
  chr19:2977371-2977513
  hyper
tcgctattggccggcgccgccagaggcctgccccccccggagcccgaacccacgtgcagctactgcgccttcattgatctgcttcgcggtccaggtggcggctgggtggggcctgggcgggacggggcggggacaaggcggg

SEQ ID NO: 130432 - DNA, 30 bp, Homo sapiens; identical to SEQ ID NO: 55402
  chr19:3028771-3028801
  hyper

SEQ ID NO: 130433 - DNA, 30 bp, Homo sapiens
  chr19:3035312-3035342
  hyper
caggcgtgttccaacgtgggtagagtcccc

SEQ ID NO: 130434 - DNA, 212 bp, Homo sapiens
  chr19:3036206-3036418
  hyper
tcagtttccccgagcgtggaagctggaggagagcacgggttttcagaaaaagactacgattcccagaagctcccgcgcggctcccgcccaggctgtcaatcaaagtaacgtgggtacctctccggcccgcgctctcccgcccgtcgcctccctcccgccagctcccgctccctccctgccggctcccggcccggcgcggtataattacagcc

SEQ ID NO: 130435 - DNA, 122 bp, Homo sapiens; identical to SEQ ID NO: 11937
  chr19:3061486-3061608
  hyper

SEQ ID NO: 130436 - DNA, 88 bp, Homo sapiens; identical to SEQ ID NO: 11938
  chr19:3094303-3094391
  hyper

SEQ ID NO: 130437 - DNA, 174 bp, Homo sapiens; identical to SEQ ID NO: 11939
  chr19:3094776-3094950
  hyper

SEQ ID NO: 130438 - DNA, 218 bp, Homo sapiens
  chr19:3098865-3099083
  hyper
ccgggcctgctctcacgtcctttgtgtttacatgtaatcagttatgatgattgtggctgaaagggtctgcttttcccgggcatggtccgggaagctccgttccacagctgtgagctccgtggagcttcctcccgagcctcctgcccggctctgccggtgctgtagtgagagtggaggaagtgctttcctccgagatttaaccacgagaggtttcactt

SEQ ID NO: 130439 - DNA, 30 bp, Homo sapiens
  chr19:3185662-3185692
  hyper
taagaaagtgatatcgcgaaatagtttttt

SEQ ID NO: 130440 - DNA, 30 bp, Homo sapiens
  chr19:3224987-3225017
  hyper
tgcacaaaggtgggcgcccggccccctccc

SEQ ID NO: 130441 - DNA, 30 bp, Homo sapiens
  chr19:3228569-3228599
  hyper
atatttgtcttaaagcggaggttgcgctgg

SEQ ID NO: 130442 - DNA, 30 bp, Homo sapiens
  chr19:3228854-3228884
  hyper
gctggcagggttggccggcgtgtgtgtgtg

SEQ ID NO: 130443 - DNA, 30 bp, Homo sapiens
  chr19:3244231-3244261
  hyper
tgcgtctgtgtgtggcgtgtgcatgggcct

SEQ ID NO: 130444 - DNA, 30 bp, Homo sapiens; identical to SEQ ID NO: 55406
  chr19:3275594-3275624
  hyper

SEQ ID NO: 130445 - DNA, 186 bp, Homo sapiens
  chr19:3275827-3276013
  hyper
gctgaggtgggtgtcgccgcccacaggggaccggaagctgttcgtggggatgctgaacaagcagcagtcggaggaggacgtgctgcggctgttccagcccttcggggtcattgacgagtgcaccgtgctccgggggcctgacggcagcagcaaaggtgactggcgggggccggggcgggactgcga

SEQ ID NO: 130446 - DNA, 7 bp, Homo sapiens
  chr19:3285955-3285962
  hyper
ggccatc

SEQ ID NO: 130447 - DNA, 189 bp, Homo sapiens
  chr19:3285993-3286182
  hyper
cgcccctcctgcagcagcagcagcgagaaggtgaggcggccgcaacctcccctgggcgccagccccgccctctgcccgccctgtccacctgcaggctccgtgtctggcccgggcctctgggacccgcggggctgagagtgcggcctgggggctggacaggccagagttgagtcccggtgcagccgctga

SEQ ID NO: 130448 - DNA, 30 bp, Homo sapiens
  chr19:3359189-3359219
  hyper
ggtgtgtgtgtgtccgtggctgagtcgagg

SEQ ID NO: 130449 - DNA, 694 bp, Homo sapiens
  chr19:3360717-3361411
  hyper
actgggcgactgtgcgcgcgtccctgcgggacggtgttgtgaaactatggctgggctgcgtgtccgcggagccgcgtgtccctgggtgaccgtggggtgtccccgtgtgggtgtgtggcggttggggggggtcgccagggagtggagaactgtcgagtggccgcgttccaggggacagttgggtgccgcttgctgtgtgcgagtgactggcgctgagcctccccctagggaagggtctgccttccactcccggcctcgcctcccccagttccttttttcctgtaactggggactgcctgggcggcggaggaagagcgctccctccaccttttcaaaactctgtccctttatctttcccctacgtcccctccacttcccccagccttcggggtcccccatccgcttggcccgagggggtcctggctggaggttcgggcgcgaggtggcgccgggacgcgatcactcggcacgcagacgtcgctcgccaggggttgcgcttgcgcggggacctgccccgagaggggcggggcggcaggggttccccctccctgagaggccgtggaagtcccgaggggtgggtggttacagcagcacaggggttaggacgggcccgggaggtggctaaggagacccctattatcctatgctggggagagcgtaggggcaccgggactggtcccgcagtcccgcctcc

SEQ ID NO: 130450 - DNA, 482 bp, Homo sapiens
  chr19:3367270-3367752
  hyper
ggtgctccggcggcccggctgggtcccccctcctttgcaagccccccagcaccgtcccggtattttcgctgcatcgattctggattctggattctggattctggagccgccgccgggaggagcgggaggcccggcgctccgggtctggcccgggcactgcggcgctgcggacgccctcgccagcccggcacctgccccgtcccctccccctccccctccccctcccgtagcctctcacccctggccgcactcccagactgccccggggccgagccttgtgcaatggccgagggggtgtgtggggagggggcggctccccccggggactccttccagcccaggctcccggggaccccgaggtctgcaagttccgttttctagaccgctgctttcctccttacgcagtgtgtctttaggctggagaggttctggcctcagtttcccctgaagtgaggtgcggctaaggccggttctggagaggg

SEQ ID NO: 130451 - DNA, 31 bp, Homo sapiens; identical to SEQ ID NO: 55412
  chr19:3404294-3404325
  hyper

SEQ ID NO: 130452 - DNA, 30 bp, Homo sapiens; identical to SEQ ID NO: 55413
  chr19:3428808-3428838
  hyper

SEQ ID NO: 130453 - DNA, 30 bp, Homo sapiens
  chr19:3500427-3500457
  hyper
gagaccccttaacccgccccatccacagtc

SEQ ID NO: 130454 - DNA, 39 bp, Homo sapiens
  chr19:3500929-3500968
  hyper
gggctggctagcaacggagcatgcgcagtgtttctaggc

SEQ ID NO: 130455 - DNA, 30 bp, Homo sapiens; identical to SEQ ID NO: 55414
  chr19:3505928-3505958
  hyper

SEQ ID NO: 130456 - DNA, 149 bp, Homo sapiens
  chr19:3506424-3506573
  hyper
aggagaggcggggtcggcgggagccagcgagccacgggagcgagccaggtgaggcggccggggtcggggacccgccccccgggccctaggcggcggagcttgactgcgaccccccaaaaccgggacggcggggcgggctgcgaccccca

SEQ ID NO: 130457 - DNA, 30 bp, Homo sapiens
  chr19:3556982-3557012
  hyper
ccgaggggagactccgatcctgaggcaggc

SEQ ID NO: 130458 - DNA, 30 bp, Homo sapiens
  chr19:3557858-3557888
  hyper
ctcccacccagacccggcctccaggcccgc

SEQ ID NO: 130459 - DNA, 30 bp, Homo sapiens
  chr19:3572395-3572425
  hyper
gaagccctcggatccggacgtcgggggctc

SEQ ID NO: 130460 - DNA, 34 bp, Homo sapiens
  chr19:3572854-3572888
  hyper
tcacccaatgggaccgttcgccgaggccttcatt

SEQ ID NO: 130461 - DNA, 58 bp, Homo sapiens; identical to SEQ ID NO: 55417
  chr19:3573236-3573294
  hyper

SEQ ID NO: 130462 - DNA, 327 bp, Homo sapiens
  chr19:3573528-3573855
  hyper
tgtcccaccttccccggatactgaccccatcagaccctgcctcctcgggctcatgcactctcgctgcagccccgccgtcgggggtcaaaacgccctggggtgggcttttgggggaggggagattcttgggacggggctgaccgcggtatccttggctccaggccggcgggcggcaaggctccgggccagcatgggggcttcgtggtgactgtcaagcaagagcgcggcgagggtccacgcgcgggcgagaaggggtcccacgaggaggaggtgagagtccctgcgctgagctgggggaggccccgggctcccgccccagcctcgaag

SEQ ID NO: 130463 - DNA, 338 bp, Homo sapiens
  chr19:3585427-3585765
  hyper
cccctgcgcaccccgcggtgtcgccttcccgggaggctcgggttcccagatccccttacccgggcgtctcggctgtcgcgccctgggccgggggaggggaggctgcaggaagcggcggatccggcggcggcggcgagggcccgggtgggtggccgaacttctcccgccatggagggagcagcggcccgggaggcccgggggaccgagaccccgcgcgcgtctgcgcccccgcccgcgccctcggagcccccggccgcgccccgcgcccgcccgcgcctcgtcttccgcacgcagctggcgcacgggagccccacgggcaagatcgagggcttcaccaa

SEQ ID NO: 130464 - DNA, 119 bp, Homo sapiens
  chr19:3606359-3606478
  hyper
caccatgccacccgccgggccacacaggggacacctggcacctggccgctgtcaccgcgggctttgcgacacacccacagcagggcagggccagcgccggatgcgcccagcagcccggg

SEQ ID NO: 130465 - DNA, 490 bp, Homo sapiens
  chr19:3606742-3607232
  hyper
acacagatggagggcgtggcggcacaggacgccctggggtcgcggcctggaggggtccgcgggggctaagccgagctgggacgggtgggggccgctggcagcccgcggctcgctctctccgtccagtctctgtctcccgctgtctctcatcagccccgcccaccctgcgctggccacgcccctcgggcccgggcctggctgacttggagtcagtgggtgccccccgcacgccgggacaccctacagccttctggggaaggcggcgcccttgggacccccaggccaccggtggcagggatgcaatggcccgcgtaggggtggcaggggcgcttcctcgggagcctcagcccctccagccgcccagcgccctgccaggcctcttcccggcgctcccgccgccaggcccgcattattcaccatctgggcagcacccaaggcctggagggggcggggcaggtccaggcggatcggctcccgggggtcgcccaga

SEQ ID NO: 130466 - DNA, 30 bp, Homo sapiens
  chr19:3607700-3607730
  hyper
gacctggagtgggaccggacaagctgacct

SEQ ID NO: 130467 - DNA, 30 bp, Homo sapiens
  chr19:3626893-3626923
  hyper
gcccgcaaggactccgacaccccagacttt

SEQ ID NO: 130468 - DNA, 30 bp, Homo sapiens
  chr19:3627145-3627175
  hyper
tagcgcttcattggcgtggccaggggcgtg

SEQ ID NO: 130469 - DNA, 138 bp, Homo sapiens
  chr19:3670990-3671128
  hyper
cgtgatgtttgggttggcggcccgggagcagaacaattcacggttttacgtccagggtgtgggggaaggaaaagaagagagggcaggaagccagcggtgggccggggcgggacgttccagacctcatcgggggcccgg

SEQ ID NO: 130470 - DNA, 30 bp, Homo sapiens
  chr19:3671420-3671450
  hyper
ccctctgtggttccacgtcttcacctgccc

SEQ ID NO: 130471 - DNA, 72 bp, Homo sapiens
  chr19:3671893-3671965
  hyper
gagccaccccgttttcgaggaaattaggttttaaaaatagtcgggggaggaaaggcgagccgcgctgcggag

SEQ ID NO: 130472 - DNA, 56 bp, Homo sapiens
  chr19:3672066-3672122
  hyper
cgacccgggcctgcggtgcacggctctgatcgctggctgcacggtgacctcatcgg

SEQ ID NO: 130473 - DNA, 30 bp, Homo sapiens; identical to SEQ ID NO: 55420
  chr19:3699936-3699966
  hyper

SEQ ID NO: 130474 - DNA, 73 bp, Homo sapiens; identical to SEQ ID NO: 55421
  chr19:3700598-3700671
  hyper

SEQ ID NO: 130475 - DNA, 77 bp, Homo sapiens
  chr19:3721510-3721587
  hyper
ggggttattcctgccgggtcttgctggcagccttgtcgggccgggctctggccgcggccgccggccccctctcggct

SEQ ID NO: 130476 - DNA, 229 bp, Homo sapiens
  chr19:3761494-3761723
  hyper
gccgactcagactgcgctctgcacctcgaggacactcacttcccaaatcgaggccgcctcagccccgcgcagcctccaggaccccgctccccacggacggccccgacgtagcccgggccgcgtccccagaaggcgcagctcggggattcccggtcccggcgcccgctcctctatccgcgcagagccctggcccattgagcatgcgcggcctcgcgaggcctgctgggaa

SEQ ID NO: 130477 - DNA, 189 bp, Homo sapiens
  chr19:3762566-3762755
  hyper
aaagcttgggagaccgcatttcccagacacctccacggggcctacacttccacggggcctacaactcccaaacacccttgggccactgacgtcttccggaaacgtgcacttgcaagctgcccgcaatacgtcatggcgaccaaacgccttttcggggctacccggacgtgggccggctggggggcctgg

SEQ ID NO: 130478 - DNA, 30 bp, Homo sapiens
  chr19:3762958-3762988
  hyper
tttgagggacccagcgccgcttggagctcg

SEQ ID NO: 130479 - DNA, 345 bp, Homo sapiens; identical to SEQ ID NO: 11944
  chr19:3785490-3785835
  hyper

SEQ ID NO: 130480 - DNA, 356 bp, Homo sapiens; identical to SEQ ID NO: 55426
  chr19:3785864-3786220
  hyper

SEQ ID NO: 130481 - DNA, 28 bp, Homo sapiens
  chr19:3786583-3786611
  hyper
gcgcggcggggaccgggggtgagggaga

SEQ ID NO: 130482 - DNA, 147 bp, Homo sapiens
  chr19:3801381-3801528
  hyper
gggcatcttagcggccgcctctcgctcctgtccgtgaccttgcagatgcaggtgacagcctgcccttccgtttttgtctttccagtcccgcctgccggattgggttccagccctgcccacacgcccggtacatcccgcctacactca

SEQ ID NO: 130483 - DNA, 307 bp, Homo sapiens
  chr19:3801582-3801889
  hyper
cgctccagttctctggcggggagggagaggggtgttgcttctccagccccctgcagcctggtgtcttcctgccacccgccggcctgctccgggaaccgcggcctggtgggacgagggttgcggaggacgggtcaggagcgaccgcgtttcaggcccgtggactccgcagcccagacggtccatccatctgcaccgaatcccttcgctaaccaactgcttgattttgctgtcgcgccgcctaaacttggttttttggagttgctaggagggccgacttaactctttgtcagccgggctggttttcacc

SEQ ID NO: 130484 - DNA, 136 bp, Homo sapiens
  chr19:3821973-3822109
  hyper
tcgtcggatcacacgcgcggaagaggcccgaccacaggcctcccagcgcccgccgggccctagcacagcccggacgggtgtcggagctccccctgctggacgcacccggtactgcagccggtgccgccgccccctc

SEQ ID NO: 130485 - DNA, 69 bp, Homo sapiens
  chr19:3822134-3822203
  hyper
cgttgaaactgcactcgcacagcttgcagtggaagcgaagcactcgcccttcgtcgctgaacacctgag

SEQ ID NO: 130486 - DNA, 317 bp, Homo sapiens
  chr19:3868743-3869060
  hyper
tctcagccggagccccggagcccgcatcccgcccggtgcctaacctgaggccgccccgcctgcttctcccggcgccgcggcttccctcaggccggggttccaggttggggctgggactggggccgggccgggcgcacgcggcgggagaaggggtaggcggggtcccggccaggctgcaggggccgggactggcgggggctggcgcggcggggcagttacctgtactgcgggccgccgccctgcgcgaagtcgaaatactgactcgtcgccatcttggcgtcttccccgagcctggcggacccgcgacgtcacccgcc

SEQ ID NO: 130487 - DNA, 165 bp, Homo sapiens; identical to SEQ ID NO: 55430
  chr19:3880520-3880685
  hyper

SEQ ID NO: 130488 - DNA, 30 bp, Homo sapiens; identical to SEQ ID NO: 55431
  chr19:3933152-3933182
  hyper

SEQ ID NO: 130489 - DNA, 172 bp, Homo sapiens
  chr19:3933495-3933667
  hyper
cgcctccgccccatccccaggggccgcctcccccggggcggcctccaggctgccgagacctataaaggcgccaggttttctcaatgaagccgggacgcactccggagcgcactgcgtggtcgcaccctacccgggctgccttggaagtcgtccccgccgcccctccgcaccg

SEQ ID NO: 130490 - DNA, 179 bp, Homo sapiens
  chr19:3970721-3970900
  hyper
tgccccttctcgcccgcaatctccgcacaagcccctaggcagaccccagtggctccctttgcagaacctccccccgcccccaaggccttgcccatccctaaggctccgctccagcatccctggggccgctacgcccctcgcacgcccggccgagccctttccccggcccggtcacccag

SEQ ID NO: 130491 - DNA, 35 bp, Homo sapiens
  chr19:3971169-3971204
  hyper
ttggccggtgcgcccgccgctcgtgccgcacctcg

SEQ ID NO: 130492 - DNA, 191 bp, Homo sapiens
  chr19:3971241-3971432
  hyper
cggatgcagcctcaccactggctgaacactcgccatccctgatttcattggctgcagtcgacgctggtcaagcggacggaaaaaaggccgacttccggtcccttcatcgccccgcccgcctctcctctgacccaggtgctgaagctgcgagaagtgaggctgaagccctgcatcccgcttcctgccttcct

SEQ ID NO: 130493 - DNA, 30 bp, Homo sapiens
  chr19:3984688-3984718
  hyper
ctccacgttgtcaccgggccacccaaactt

SEQ ID NO: 130494 - DNA, 30 bp, Homo sapiens
  chr19:3985639-3985669
  hyper
gcggtggtcgccctcggtgtgcagtgttca

SEQ ID NO: 130495 - DNA, 30 bp, Homo sapiens
  chr19:4007091-4007121
  hyper
caggatggggggggcgcctgcaaagaggtg

SEQ ID NO: 130496 - DNA, 1665 bp, Homo sapiens; identical to SEQ ID NO: 11950
  chr19:4053793-4055458
  hyper

SEQ ID NO: 130497 - DNA, 47 bp, Homo sapiens; identical to SEQ ID NO: 55436
  chr19:4064372-4064419
  hyper

SEQ ID NO: 130498 - DNA, 98 bp, Homo sapiens; identical to SEQ ID NO: 55437
  chr19:4064871-4064969
  hyper

SEQ ID NO: 130499 - DNA, 88 bp, Homo sapiens
  chr19:4066803-4066891
  hyper
tcgcgcggcggcggcggcgtcactgcccctacagtaactgtacagtacagccaaagccccgtatgatgctcgcgactcccttcctggt

SEQ ID NO: 130500 - DNA, 30 bp, Homo sapiens; identical to SEQ ID NO: 55438
  chr19:4068091-4068121
  hyper

SEQ ID NO: 130501 - DNA, 31 bp, Homo sapiens; identical to SEQ ID NO: 11952
  chr19:4078644-4078675
  hyper

SEQ ID NO: 130502 - DNA, 30 bp, Homo sapiens
  chr19:4124505-4124535
  hyper
atctttttggcaagcgtggacacacgcccc

SEQ ID NO: 130503 - DNA, 30 bp, Homo sapiens
  chr19:4172946-4172976
  hyper
tggccccggagccccgggtgcgccctggtc

SEQ ID NO: 130504 - DNA, 212 bp, Homo sapiens
  chr19:4182605-4182817
  hyper
cggggaagaaggaggaaccgcgttccagtcctgcgcacccggcctcccacggcaaggcgcatgcgcctcttgctgacgccgcaggcgacatgttatctgctgtcagaaggaagcctgcctctttgcatgcaggtgtttgcggggcttgggaaggggctccccgatgacccgggcgggaaattggggcggccgcctacgtgagagttctccag

SEQ ID NO: 130505 - DNA, 141 bp, Homo sapiens
  chr19:4198020-4198161
  hyper
gagccctgccggccgcgtggaggtgcgaggctgcggacgtcgcgggcccggaggcacctgcgcgcccttggccgactcggaggaggtggagatggacgcccgcgggtcccctggagatgcagccggcggcctgcgctggtg

SEQ ID NO: 130506 - DNA, 30 bp, Homo sapiens
  chr19:4198462-4198492
  hyper
gccccccgcgccccgcgccccggacgccat

SEQ ID NO: 130507 - DNA, 30 bp, Homo sapiens
  chr19:4229278-4229308
  hyper
acagcctcctcccccgcccccaccctcggg

SEQ ID NO: 130508 - DNA, 38 bp, Homo sapiens
  chr19:4246830-4246868
  hyper
ttacaaaattttaacgagccgctgcccgcttctagggg

SEQ ID NO: 130509 - DNA, 212 bp, Homo sapiens
  chr19:4246926-4247138
  hyper
cgctactcaggttgcaactccggagggaagacgctgggacttccagcttgataggcggggattggaaccaatgaaagaggtctgctgtgtatgctgcagccaataatagcggccgaaggaagtgacgtttgcggaagtaaggcttccgtcggaaaagctcgataattacccagcctaaccatttctcaggtgcttgcgaggtgatcagaagg

SEQ ID NO: 130510 - DNA, 30 bp, Homo sapiens; identical to SEQ ID NO: 11955
  chr19:4247487-4247517
  hyper

SEQ ID NO: 130511 - DNA, 230 bp, Homo sapiens
  chr19:4278855-4279085
  hyper
ttcaccgccagacatcggttccatttcgaccctcactggcggtcattcccaccccctctgctggtcaatttcaccccttttggcggtcaagtgcagtcccccatttcccgggcaatttccccctcccctccttctccctctcccctcccctccccagcagtgtcactcccagctgctccccacctcccgcgctccgcgctcgctgcggccagtctcgggcgtcccggtca

SEQ ID NO: 130512 - DNA, 115 bp, Homo sapiens
  chr19:4279316-4279431
  hyper
cgcccccctccccagcgtcccacctcccggcggcggcggggaaagtctctccgaaagcgtgaagggggattggaggaggtttttatttccctttgtgcgggtggctggggccgga

SEQ ID NO: 130513 - DNA, 569 bp, Homo sapiens
  chr19:4279567-4280136
  hyper
cgctgcgctgagaacccaggcgtccgggctgggagaggggccgggagcgtccgcaggtggcgctggcccggatctcccgaccccaggaagggatcccggagcttcctggaggcggcgggcggccgtgtcgctccagggaaccgcgctgcccgcggaaactccgcgcgcctccgcggatgcccctcgccctagcccccagcgcgcggggttcggggccctgcgaggtccccccttcccccgcggtgcttcccaagctgggctaaggcgggcttctcttcctccctcctctgtcgcctccttttcctccccctcgttcaccttttccttccctctatccatccagagccccgccaaagggcgcacctgatctttctcatccttccctgctcttcccttcctctccacctcctcctcctccttggggaaaggggcccggagaagggcatgtgggggcccctctgacagtggcccgattggggtgacaggcgcccaaatggccaagtggctacgggactacctgagctttgggggtcggaggccccctccgcagccgcccaccccggactaca

SEQ ID NO: 130514 - DNA, 237 bp, Homo sapiens; identical to SEQ ID NO: 55447
  chr19:4304481-4304718
  hyper

SEQ ID NO: 130515 - DNA, 30 bp, Homo sapiens
  chr19:4343075-4343105
  hyper
ttagcgactgaggccggcttgggctctttg

SEQ ID NO: 130516 - DNA, 30 bp, Homo sapiens
  chr19:4343354-4343384
  hyper
tcaacaccccgtcacgcctcagtttcccga

SEQ ID NO: 130517 - DNA, 30 bp, Homo sapiens
  chr19:4343987-4344017
  hyper
cctggtgagcaccccgcctccctcgtccca

SEQ ID NO: 130518 - DNA, 30 bp, Homo sapiens; identical to SEQ ID NO: 55448
  chr19:4400287-4400317
  hyper

SEQ ID NO: 130519 - DNA, 150 bp, Homo sapiens
  chr19:4402294-4402444
  hyper
caagttgtcatctgcgccttgcgtaaaatgttctggtgacgtaagagcctgggcctccctcctcttagggactatcccacgcgatcagccagtcgcagcgcagagcaatgagcttgacacctccttcctccaatcgcagggcagctcctc

SEQ ID NO: 130520 - DNA, 30 bp, Homo sapiens
  chr19:4402995-4403025
  hyper
gttattgttgtagccgcgaccatattgttt

SEQ ID NO: 130521 - DNA, 149 bp, Homo sapiens; identical to SEQ ID NO: 11957
  chr19:4432844-4432993
  hyper

SEQ ID NO: 130522 - DNA, 30 bp, Homo sapiens
  chr19:4457552-4457582
  hyper
tctctctccccggccgtccccgccccgcag

SEQ ID NO: 130523 - DNA, 186 bp, Homo sapiens
  chr19:4471581-4471767
  hyper
actaagagctcccccggagcctgccccttcctctaagtcccgcctcctcgagctggcaatcgcccgtccctgttttatgttgtatcgctcttctttcgatagccaatggccgacgttcccgctgaagccccgcctcttgtgatggccaatgcctgctccctaccttgaggcgcttctcttgtggta

SEQ ID NO: 130524 - DNA, 151 bp, Homo sapiens
  chr19:4472044-4472195
  hyper
ccgttatccaatcccgttaactgctgtgctccaacctctgttcttattggtcgcctcccttctctgtcccctgcacgtggtcctgatcgacggctttgccggcccgtgacggccggagggctgaacttccgttggcgcaacgcccaataag

SEQ ID NO: 130525 - DNA, 30 bp, Homo sapiens
  chr19:4472412-4472442
  hyper
tgccagggtgaggccgcgcgggagatgggg

SEQ ID NO: 130526 - DNA, 30 bp, Homo sapiens
  chr19:4472869-4472899
  hyper
agccctgcaggagccgcgccccggggtctg

SEQ ID NO: 130527 - DNA, 249 bp, Homo sapiens
  chr19:4523780-4524029
  hyper
tccacaaggatgggcgcgaagggtcccaccagccagggcagcggcacggcctgcaccaccagctccagcagctcgtccacgcaggcgtgcgcgtgggccacgcgaccccggccctcggccagcgcggccgctggcacgtccctgaagcagcgggcatcagcgaaggcggtctgcagggcatccacactgcgccgcacctcagccaccttctcctgggcgccggcgggcaggccccgcacgctggactcc

SEQ ID NO: 130528 - DNA, 96 bp, Homo sapiens
  chr19:4558484-4558580
  hyper
acaggaggaggtgacgcctgcgggcaaggggcggcgaggtgagcggcctgcagtcccgctcgtggccacaagacggcgggcgagagcagcagacgc

SEQ ID NO: 130529 - DNA, 453 bp, Homo sapiens
  chr19:4580775-4581228
  hyper
gcgcccaaggtgcggcggccggacgcgaagtggggcggaggggcctcccagtgccaggacccccacaccagccccgggtcgcctcgacttggctctcaggaccccgccccccaacgccacccccaacccccgaccaacaggccccctgcctgccccgaaccccccacctgggccccaatccagctccccagcggcgcagccgcgagcctcattattgtgtcttctccgggcccccccaggacaaaatctccacccgctgcggtgccgacagaacccccaacctagctgcacatacaggcccccagtcaacaatccaagcgccccccccacgttgcggtgccattagacacccccataatggaggctcagggagcgccccaggccaaaatccagcccctccaaagcgatgccaccggacccccaccggatccctccatacggccagcgaccccc

SEQ ID NO: 130530 - DNA, 167 bp, Homo sapiens
  chr19:4636193-4636360
  hyper
ccatggcactgggccggggcagaggcccggagaagagggtcgctagctgcaggttgcacagcccggcagggtgcgaggcctggcctgggggtgcgggtgactctggtgggtctaggctccgcggggagacttgggcctggagaccccgccccgcacgcagatcccgc

SEQ ID NO: 130531 - DNA, 30 bp, Homo sapiens; identical to SEQ ID NO: 11960
  chr19:4639224-4639254
  hyper

SEQ ID NO: 130532 - DNA, 178 bp, Homo sapiens; identical to SEQ ID NO: 11961
  chr19:4639829-4640007
  hyper

SEQ ID NO: 130533 - DNA, 28 bp, Homo sapiens
  chr19:4666908-4666936
  hyper
tcaaggtgttgaccgggctaggctctta

SEQ ID NO: 130534 - DNA, 180 bp, Homo sapiens
  chr19:4669763-4669943
  hyper
acttcctccctcttcggagctgcagcgactgatttccttcaggcccaggagggcagatgccctttagcctcctgccgctcccatcactgacccctccccacctctgcgtctggagggcaggggtgcctggacactccaggcaggcgacaggtgacaggtgatcacgccccctcaacgccg

SEQ ID NO: 130535 - DNA, 30 bp, Homo sapiens
  chr19:4723965-4723995
  hyper
tgaacgacatcttccggtgggttagggaga

SEQ ID NO: 130536 - DNA, 23 bp, Homo sapiens
  chr19:4759804-4759827
  hyper
tgatcccccctcctcgtctcttg

SEQ ID NO: 130537 - DNA, 189 bp, Homo sapiens; identical to SEQ ID NO: 55459
  chr19:4769516-4769705
  hyper

SEQ ID NO: 130538 - DNA, 30 bp, Homo sapiens
  chr19:4791300-4791330
  hyper
gcccaaaacagacgcgtcccctctagtcgc

SEQ ID NO: 130539 - DNA, 177 bp, Homo sapiens; identical to SEQ ID NO: 55460
  chr19:4791537-4791714
  hyper

SEQ ID NO: 130540 - DNA, 200 bp, Homo sapiens
  chr19:4815707-4815907
  hyper
gactcgggaggcacacggccgttcagaaaggactacatttcccagggttccttgcggcaggagcagggccatgtgattatattctggccaatgggatgagggcaaaggccggtctatgccctccaagaagaggcgtgcacttcccgcttcctgttcccttttgcgggagcgggagccacgtgttttataacaaatagcca

SEQ ID NO: 130541 - DNA, 30 bp, Homo sapiens
  chr19:4831528-4831558
  hyper
gcctggagccctggcgagcggcacgggctc

SEQ ID NO: 130542 - DNA, 84 bp, Homo sapiens
  chr19:4831870-4831954
  hyper
cttcccaacccttgcggtcacgttcagcaagtgtgagcacctactgtctgcagggggccagaagaactcgcatctgctctcggg

SEQ ID NO: 130543 - DNA, 624 bp, Homo sapiens
  chr19:4867022-4867646
  hyper
ccccaaagcagttaacggataggccttcctacttttaagccacctcgtcgccacgcccacccgagggaagtgggcaggctttgcccaagacctccccagaatcagttgggggcgccaggagctggggcaacccccacccccacccgtggcaaaaccatctgtaggggagggggctttgcggtggcggggggtgtctctgaaaaccccagaagggagggcggagattctgcccgcaggaggaaacttgcctgcaaatggcgtttccaaaagcaaactgttcaaaatttagagaaaacctggtgggcggggggcggtatttagcccacccccttcaatatcaccccttctacggggctctttcgcccctcaaaagtcccaggaagtgagaagagggtttcaaagtctgagcttcgttgcagaagttggatttttctggggggaggggtgaccagcctgggctgaagacccctccccaggccgcagagtccagcaaatcccaccccgagaaaggccctccccgacccctccggcccctggggtgccccaggactccatggacaccgccccccagctcaactgagacgcccccgccactcaccgcggtcaaccggacgtcccaggaac

SEQ ID NO: 130544 - DNA, 133 bp, Homo sapiens; identical to SEQ ID NO: 55464
  chr19:4867953-4868086
  hyper

SEQ ID NO: 130545 - DNA, 30 bp, Homo sapiens; identical to SEQ ID NO: 55465
  chr19:4909459-4909489
  hyper

SEQ ID NO: 130546 - DNA, 30 bp, Homo sapiens; identical to SEQ ID NO: 55466
  chr19:4910259-4910289
  hyper

SEQ ID NO: 130547 - DNA, 21 bp, Homo sapiens
  chr19:4946174-4946195
  hyper
tctccacgaagcactcactcc

SEQ ID NO: 130548 - DNA, 30 bp, Homo sapiens; identical to SEQ ID NO: 55468
  chr19:4968543-4968573
  hyper

SEQ ID NO: 130549 - DNA, 498 bp, Homo sapiens
  chr19:5292639-5293137
  hyper
caggcccgagaggagcggaaacaaatggatggaggtaaacttcctgcgattttcgggggtggctaagagcagggattcctgccatgcaccccccaccgctacctgccccctctgcggtcctgttgcctcctccgccttctgcgaagtccccagtcacagctcccccgggctggcagcgaaggctgccccgcgcctggctccgcccccgggaggtgggggaggagagggggtggggggaggaggtcgggctgggggccaggcgggggaggggaccctgcggagcataacggtctggagttttccaaagtgcaagcgacgggcctgaatgggggggcgccaggcagcagcaggcccaagctggccctggagggcggccggcacggtcaggcccgcgctgggctgtggggacccccgtggtccccagcctcggagcctggagggggcgcgacaagagagacaaagcccggggcggcccgggcctcggggtggaagggggtc

SEQ ID NO: 130550 - DNA, 986 bp, Homo sapiens
  chr19:5293155-5294141
  hyper
cggctcggagatcgggcccaggccccgcgaggcctccacagggcccgccgcagccgctccccgcgtccctcggtccgcccggagcgcggcgcgcagcgaagactcgggagaggcctcggcctggggagctcggcctgggggcggggcaaggggcggggctgtagggggcggggttgcagtgggcggggctgcaggggacgggccccgaggagggggattggggggcagggcggggccccggccggaagtggggcggggggaccagaggggagccccatctggaggcgcggagagcctccgcaggagtccatgaaacactgagcgaaggggcgccccagggagggcacgacccaagacccctccctcccgaagacgtctcacggggagcctctacactgctcctcgcttccccagctctgatcgtagccatggcaacgcatgaggaggctggatgccggacagggcggcggagggctccccaaacacacccaactacaggaggtcggagaaggggcagagttcccctcccagtctgggtgggaccggaggcacggtgatgggggcggggggcgtcccctcttccccctcttagaccagagggtaggggagaggtgcgggcgcagaggcttccctcccgctgggggtccaggggaatgaatggggggacaccgtggcagaggcccccaccctcgccacaagcctgaggagggggcggagagcacagggccagattggaaacagatggggccgccgtgccaggcccgcgacaccggagcagagggagaggaggagggagagggaggggcagacctgtccgggcggccaatccgagccagcgttgcgcccggggtgcgggtttgaaaactccaccggaggggcccggaatgtagaagcccagcgggacctgggggtctggggacgggacaggggcagaggccgggatggagacccaagggctcccgcgtctgctcccatccctggaaaaa

SEQ ID NO: 130551 - DNA, 39 bp, Homo sapiens
  chr19:5313530-5313569
  hyper
atgggcaggcctggccggggccgacggctggcactgagc

SEQ ID NO: 130552 - DNA, 177 bp, Homo sapiens
  chr19:5338673-5338850
  hyper
gacagaaggcaggcgcgattggcagggggaggggggcacaaaggaagggaccctgggagggggaggggacttatgcaaatggcagattcgaccaagtccctgggccattaataaacgctccagcagctgccgctggtatcgcaggagcagaggagcgggatggcttccttctcccgg

SEQ ID NO: 130553 - DNA, 236 bp, Homo sapiens; identical to SEQ ID NO: 55472
  chr19:5338900-5339136
  hyper

SEQ ID NO: 130554 - DNA, 30 bp, Homo sapiens; identical to SEQ ID NO: 55473
  chr19:5339365-5339395
  hyper

SEQ ID NO: 130555 - DNA, 34 bp, Homo sapiens
  chr19:5339652-5339686
  hyper
gaaccctcgcacccacggcgcgggcactctaacc

SEQ ID NO: 130556 - DNA, 1186 bp, Homo sapiens
  chr19:5339888-5341074
  hyper
ggtgctgggcgtgcgcgtctgcctgccagagcccctggggctgggggctgaggctcgcccctgggtggggaggctggaagggggcgccgaggccgcagaagggtggggcaatgcccgagtgccggaggggcgacctcccataaggcaacgacagggcccggagtgttccaggggagacggcgtagactagggggtctccaggggagggagacccggagagggaaggcggcgggcgcagcagccctggagccaccccgcctggagccacccgtcccggctcctctccgctccggggcgcccgcatgccccccatcccccggcacagcgccccctgcctccaggacccgcccggggacccgggccgggcgccgccggggccggcaccggctccgcacacacgcgcgcccccctccgcgcctctgccccgcccgcagcccggggtggtgcagccggcggcgctgggcagcttccaatgccgcgctctgggcgcttccagcccagccccctcccacgccgcggacgaagcccccccagcaccccctgccgagcgcccccagcgcggccccggccctgtccctcggggcattgtccgggcgcagctaccggggcgcagcggctgggcgtgcaactggctgcagccgagcatcctccgagcacaatggccgtgcaggcttccccggcacaaagccggcgcgctgcccactcggctgcctccgagaccccccttggagcgcctgcatttttttttcctctaatccatgattttatttttttttttggctttacctggaggctggctgggctgggctcccccggctctgccccgcttcacatcgtggctgttgcatgggatccgagcggagcccgagcgccagcggctcgcggcgtgcgcgcgccggccgggctgccgggcgggcggcgcgaggacactcactgcggctcgcgctcccctagctcccgctcgcgcgcccccccagccggtgacgtcatcccttccgccagcgccgccgccgccgccgccgggtcgggggcagggccggcccgtgcgcgtcactgcgcagccgcgcggccgccacgccccccggccaatgggacggcgcagcgcggtcacgtggctccggggtgtttaaagggccgcgggagcacgtggggcgcggggcttcgcgggacacgtgggcggctgggg

SEQ ID NO: 130557 - DNA, 30 bp, Homo sapiens
  chr19:5436288-5436318
  hyper
gggcagctccacaaacggaggtgtgttctg

SEQ ID NO: 130558 - DNA, 125 bp, Homo sapiens; identical to SEQ ID NO: 55477
  chr19:5436795-5436920
  hyper

SEQ ID NO: 130559 - DNA, 30 bp, Homo sapiens; identical to SEQ ID NO: 55478
  chr19:5437138-5437168
  hyper

SEQ ID NO: 130560 - DNA, 374 bp, Homo sapiens
  chr19:5536536-5536910
  hyper
tctgctgcgcccgggcgcaaggaggaaggagagccgggagggcgtacctggcagccaaaagcccagccgctaatgagcccggtgcggcgcgagctatttttagcagctgctcctcgggacgcctaatcgctccggccggctcccgccaggctgccatggaaacgctcgcgccaccgccaggagctccctcccggtcccggccggcgctgcccgcccctcagcccggggccaggatgatgcgtgctgccccccgccaggaaggagccctgcctgccttcccagcactgtcactgcacggctgtgcgatcccgggacatctctgcccctctctgggccttagagggcaagagaggtaaaggcgcgcactggaggct

SEQ ID NO: 130561 - DNA, 550 bp, Homo sapiens
  chr19:5567583-5568133
  hyper
ggaggccgccttgggcgcccgcctcccccgccgctctccaggggtccccggccgccgcccccgccccaccccaccccgagccccgcggccacctggggtcgctgacgagcagcagcaccgagccgtcctgcaggcgcgcgtcgcgcaccgtctggtggtcgtccagccgccgcgcgttgtagtagaaggcgcgcttccaggagctcacgccctggcccaccagctgggcgcgcaggtcgctgagcgtgtcccgcggccgcacggtcagcggtagcagcagcgcctcgtccgccaggtgcaccttgatgtggtagcgcttccagcgcgacagcccccgccgcagcccctccatggcgcccgcccggctccggctccagctctggccccgggccccgagcgccccgcgcacccgcccgactagcctggccgcccgcccccgccgcgcccgcgctccgcccgcccggacacgcccggcacgcagtgggcaggcccggcccggcggggcggggcgggtgccacggtcccctcaggcgtccgctccccactgctg

SEQ ID NO: 130562 - DNA, 740 bp, Homo sapiens; identical to SEQ ID NO: 11970
  chr19:5608065-5608805
  hyper

SEQ ID NO: 130563 - DNA, 30 bp, Homo sapiens; identical to SEQ ID NO: 55481
  chr19:5622351-5622381
  hyper

SEQ ID NO: 130564 - DNA, 30 bp, Homo sapiens
  chr19:5623242-5623272
  hyper
tgattctggagcggcgggcgcggcggctct

SEQ ID NO: 130565 - DNA, 445 bp, Homo sapiens
  chr19:5680741-5681186
  hyper
tgtttgcacctggccgcggagcctcctgggaaatgtagttcggcccggccctggcaccgtgaggggaaagaggcgtcaggtgcctggctgaagcctgaaggtgacccgaaaacaagtcagagcccgagagatccacccgcgcccgcgcgggggaccaagggcccggatttaagaagagtgtgcctacaaggcggttgtcacggcaacgagagggcgggattgttcgagcgctgcggccccctcacgtgatcgattcggaggcggggcgtccgcccagtgggcggggccgggcccctgctgggaggcgaagaccaggcgggcactgttgcccggcgacgctccggcgctgggtccccgaggcccggcccctccccgggaggaggtgggcttcgagtcacgtgacccgtgccctacgggagggggtgcggtcggggacccggcagga

SEQ ID NO: 130566 - DNA, 425 bp, Homo sapiens
  chr19:5686658-5687083
  hyper
gactgggggcgtgggcggggtggagtctcattgcgtctgggggaagagctctgaacggggcctcgttgaatgggaaccaaaccttgctagatccagggtgtaaggccaaggctgggtgtctttgatcgtagtgggagttacctggggcggagctcgctggaccagcgctctgggtggagctaagctcgggggcggggtttgatcgtttccttggggaggggcctccggggctgaccggcgtttctgggccaggcgggctggactacctcgtgctgaaccacatcggcggcgccccggccggcacgcgagcccgcagcccccaggcaactcgctggctcatgcaggtgctccgctcctccgcggccccggcccgcccctctatctcagggaccggtggtccgttcccttcgcggtccgggttctgc

SEQ ID NO: 130567 - DNA, 30 bp, Homo sapiens; identical to SEQ ID NO: 11971
  chr19:5687363-5687393
  hyper

SEQ ID NO: 130568 - DNA, 104 bp, Homo sapiens; identical to SEQ ID NO: 55486
  chr19:5691107-5691211
  hyper

SEQ ID NO: 130569 - DNA, 30 bp, Homo sapiens; identical to SEQ ID NO: 55487
  chr19:5720312-5720342
  hyper

SEQ ID NO: 130570 - DNA, 31 bp, Homo sapiens; identical to SEQ ID NO: 55488
  chr19:5804011-5804042
  hyper

SEQ ID NO: 130571 - DNA, 202 bp, Homo sapiens; identical to SEQ ID NO: 55489
  chr19:5804851-5805053
  hyper

SEQ ID NO: 130572 - DNA, 640 bp, Homo sapiens; identical to SEQ ID NO: 55490
  chr19:5827785-5828425
  hyper

SEQ ID NO: 130573 - DNA, 155 bp, Homo sapiens
  chr19:5892117-5892272
  hyper
caggcgaggtgggggcgcctggcaggcctgcgccaaccctggcggctagcccggaatgggctgggtgggcggcgagcacagctcctggtctgagccgtcggctcccttgaacacagggaggcacctggggctgggaggtgcgaaggggcgtgcgg

SEQ ID NO: 130574 - DNA, 30 bp, Homo sapiens
  chr19:5903853-5903883
  hyper
actttattgataggcgcggacatggacatg

SEQ ID NO: 130575 - DNA, 30 bp, Homo sapiens
  chr19:5904712-5904742
  hyper
catgatcccggaaccggtggtagtgtttgg

SEQ ID NO: 130576 - DNA, 30 bp, Homo sapiens; identical to SEQ ID NO: 55491
  chr19:5905200-5905230
  hyper

SEQ ID NO: 130577 - DNA, 580 bp, Homo sapiens
  chr19:5961934-5962514
  hyper
ccactaccaagagcgcgtggttccccttgttttccatggccagtgcttactcctgcacagacaccatctccttcaggaagctcccactgtgagaggcgtgcctgccctgctgcactccctcccgagcaggccttatatcctgccacggggcacgcggagaccacggccacagcagctgaaacagcctatcacccagcgtacaccgcatcaacaccctgcaatgagtgtttgaactaggccctctctctgtcattcatctacacaacaccagctgctacgtactcacaaatatttactaagccctcattctgtgcagggcgccacaggaagagtggagaacaggaagctgagggcagacgcttcaggagaaaacatctgactgaaagggaggggcgtgtttgcacttggtgaccaggcactgtggagccctggcactcccagaggggtgtgtggtgacagcatctacccctagatgtaagttctagaaagtggggcctcgtctgttccgtttctctctgtattctcagtgccaaacacagagcctcacacttaacaggcactcaaccggcagttagagggt

SEQ ID NO: 130578 - DNA, 30 bp, Homo sapiens; identical to SEQ ID NO: 55493
  chr19:5977684-5977714
  hyper

SEQ ID NO: 130579 - DNA, 30 bp, Homo sapiens
  chr19:5977951-5977981
  hyper
tagcctggagcggacgaaacccttgcactc

SEQ ID NO: 130580 - DNA, 30 bp, Homo sapiens
  chr19:5978266-5978296
  hyper
gcagcctgccctgacgagccgcgctcctag

SEQ ID NO: 130581 - DNA, 30 bp, Homo sapiens; identical to SEQ ID NO: 55494
  chr19:6022505-6022535
  hyper

SEQ ID NO: 130582 - DNA, 400 bp, Homo sapiens
  chr19:6108897-6109297
  hyper
atccaactttcccagcggtgcagcgaggaaaaccaaaaggaacggagccggaggctggtggcgagggagcgcggaggcttctcggagggaggaaaaagaaagaaatgagcatttggggtgtgagtgagtgtgtgtgtgtgagtgtgtgtgtgcgcccgcgagcgcgctggtgggcggtgggggcagggggtggagtttaaatccacaaacacacacacgcactcgcactacctcggagaaaatgcctggagcagtttaggttctttaacaaaataaataaattgaaaaaaaaaaaaagtttcactcgcgttggtgaaacttttctcccttccagatcagtcctaagaggagagctgcggacgtgcggaggggcatcttgggggcacgtggaaagactggc

SEQ ID NO: 130583 - DNA, 777 bp, Homo sapiens
  chr19:6110225-6111002
  hyper
ccccaaactccgccgcgcgcgcggacggggtggcggaggcgggtcccgcgggcgcaccacccggacgtttggggtgagcggcggggacgtgctgcccgccccccggcccccgaacggggtccccgccgccccccacactccccggccgggctgggcccggggcggtcgcatcggtcacctggagttcgggccgggagttcgggcagcggctcccgcggcggcggcagcggctgctgcgtgttggtccccgttggtaagtaacagtctccacggctacagtctctatggcggcggcggtggcggcggcggccgctcctcctccggctcccgccgccagccagcctcgcgcagcccgcccgcccgacggggcggggcgttgttaccggcaacggttaccaggctccgcgccccaccttcctaacggcccgcccacgctcgcctccaacgggcccccaagagggcggggcgcgagaccctacggcgttccattggctgtctgcagagtctgtcggaaggaggaggcgttcccccttgaaaaagagtgcgagactcggccaatggccgcgaagaggggcgggtcttggcgggaggcgcgcgcggctcagagggttggcgaaccggtcgcgcgcgcggcgccgtgggttggtggcgcgttttgggaaagtccagttttaggggacccaagggactccgtttaccccacaggaggagtgtgggacatgtgggaacagtctgatcaggggtcagcaaactctcgctcgccgcctgtttttcacg

SEQ ID NO: 130584 - DNA, 30 bp, Homo sapiens; identical to SEQ ID NO: 55497
  chr19:6199427-6199457
  hyper

SEQ ID NO: 130585 - DNA, 132 bp, Homo sapiens
  chr19:6279429-6279561
  hyper
tgaggtccctaagccgggctggggtccccaggggcgtcccaggtggatgcaggtcggactggcgttccgaggggtctcccgggggtctccgagccaggctggggggtcaccaggggcgtcccaaggggctcc

SEQ ID NO: 130586 - DNA, 30 bp, Homo sapiens; identical to SEQ ID NO: 55498
  chr19:6361440-6361470
  hyper

SEQ ID NO: 130587 - DNA, 30 bp, Homo sapiens
  chr19:6373612-6373642
  hyper
tccgtggagtcaagcgccgggatgggttgg

SEQ ID NO: 130588 - DNA, 30 bp, Homo sapiens; identical to SEQ ID NO: 11976
  chr19:6393404-6393434
  hyper

SEQ ID NO: 130589 - DNA, 31 bp, Homo sapiens
  chr19:6393961-6393992
  hyper
gcatgcacacatcccccgaatcatggcagta

SEQ ID NO: 130590 - DNA, 30 bp, Homo sapiens; identical to SEQ ID NO: 55500
  chr19:6424202-6424232
  hyper

SEQ ID NO: 130591 - DNA, 31 bp, Homo sapiens; identical to SEQ ID NO: 55501
  chr19:6459633-6459664
  hyper

SEQ ID NO: 130592 - DNA, 224 bp, Homo sapiens
  chr19:6459945-6460169
  hyper
tccttctgggaagacgggctagggagctcagtggtctcaggtctggtttcagagttccgcctctgcgtgcctcagtttaccctttccccctttgcccaagggggcaaggtagagcgctgtcggggattgggtttcataatccccttccacttgacctccccgccacacccactaatcttcaggaactcaagttctcgcttttcccagacgcacgcaagaaccgt

SEQ ID NO: 130593 - DNA, 201 bp, Homo sapiens; identical to SEQ ID NO: 55502
  chr19:6464134-6464335
  hyper

SEQ ID NO: 130594 - DNA, 76 bp, Homo sapiens; identical to SEQ ID NO: 55503
  chr19:6464627-6464703
  hyper

SEQ ID NO: 130595 - DNA, 30 bp, Homo sapiens
  chr19:6502138-6502168
  hyper
gcctccccgggccccgttccccgagcacct

SEQ ID NO: 130596 - DNA, 30 bp, Homo sapiens; identical to SEQ ID NO: 55504
  chr19:6502542-6502572
  hyper

SEQ ID NO: 130597 - DNA, 30 bp, Homo sapiens
  chr19:6516505-6516535
  hyper
ctgacaggatcagtcgtggaaggggcgggc

SEQ ID NO: 130598 - DNA, 30 bp, Homo sapiens; identical to SEQ ID NO: 55505
  chr19:6516802-6516832
  hyper

SEQ ID NO: 130599 - DNA, 676 bp, Homo sapiens; identical to SEQ ID NO: 55506
  chr19:6530737-6531413
  hyper

SEQ ID NO: 130600 - DNA, 974 bp, Homo sapiens; identical to SEQ ID NO: 55507
  chr19:6590244-6591218
  hyper

SEQ ID NO: 130601 - DNA, 30 bp, Homo sapiens; identical to SEQ ID NO: 55508
  chr19:6737142-6737172
  hyper

SEQ ID NO: 130602 - DNA, 30 bp, Homo sapiens; identical to SEQ ID NO: 55509
  chr19:6737416-6737446
  hyper

SEQ ID NO: 130603 - DNA, 238 bp, Homo sapiens; identical to SEQ ID NO: 55510
  chr19:6737654-6737892
  hyper

SEQ ID NO: 130604 - DNA, 30 bp, Homo sapiens; identical to SEQ ID NO: 55511
  chr19:6739509-6739539
  hyper

SEQ ID NO: 130605 - DNA, 214 bp, Homo sapiens
  chr19:6739798-6740012
  hyper
aagtccaatcggcccgcctctaagttcccctttgctggggtccaggcaccccccttttgtccccaatgtatcttagagggggctccgcgcctttcccttccaccgacccctgggtccccgccctccaccctccgctctctctcgaagtttatctgggagtctcagcacgctcaggggcgaagggcgactttgccggaccggagtggggaaactg

SEQ ID NO: 130606 - DNA, 179 bp, Homo sapiens; identical to SEQ ID NO: 11981
  chr19:6767995-6768174
  hyper

SEQ ID NO: 130607 - DNA, 31 bp, Homo sapiens; identical to SEQ ID NO: 11982
  chr19:6801936-6801967
  hyper

SEQ ID NO: 130608 - DNA, 224 bp, Homo sapiens
  chr19:6862816-6863040
  hyper
ggatatagacttcaaacgccgtcagacagacacccactagatcaaacagggacattcctaaacatcacacagacacatcgccaggcagtcccaccgcagacagccacaaattaaagccgcgcttgccccctgatggacagcagcagtagtgcgccacctcgatagcgcaatctcccagagcgctggcattgcaggcgtgagccaacgtccgcagccaaacacgt

SEQ ID NO: 130609 - DNA, 254 bp, Homo sapiens
  chr19:7069468-7069722
  hyper
ccctgccacagacccgcgccaggacgaccctgcctccgcggctgtccctagccagggcccaacctggttctattaataactaagcaaactagaacacctcagccggaggctggggtgcgcggctgctgcacctgcagcctgaacccgggggtcctgacacgccgcattttgggctgggaccagctggagccggaagcggaggtgcagtgtggctagccggagaccggaagcggaagcgcgcttgtgtcttgtga

SEQ ID NO: 130610 - DNA, 30 bp, Homo sapiens; identical to SEQ ID NO: 11983
  chr19:7087694-7087724
  hyper

SEQ ID NO: 130611 - DNA, 160 bp, Homo sapiens; identical to SEQ ID NO: 55517
  chr19:7098895-7099055
  hyper

SEQ ID NO: 130612 - DNA, 409 bp, Homo sapiens
  chr19:7197094-7197503
  hyper
gaggtgaacttttgacagcttcgtggtcagcagcgacgaccgcaggagcgcgtgtccttgaagcggggaagcgccccttttccttgcctgacaataccgccccacacgcgatgacgcctttggaatagaactgcgcagctctttggagacatacggcgcatatagaggctagaaagggaacagagtaccagagggccttcccgcttcgggagccgcaggcttcttctcttcggagagagagtgagtgagtgagtaagcgagtgagtgagtgagtggggagggagtgagtccgtccacgggggcgggccctctccatgctgcggatctcttaggagatatactgcgcacgcagaggcccggaaggaggcggggtcccaggggtctcctcgctagagcagccccaggattg

SEQ ID NO: 130613 - DNA, 30 bp, Homo sapiens
  chr19:7198395-7198425
  hyper
ggtcgagtctgccacggatggaactttgga

SEQ ID NO: 130614 - DNA, 1592 bp, Homo sapiens
  chr19:7293529-7295121
  hyper
ccagagaggagcccgcggcggggcgggcaccggggcaaggttcctcgggctcaggtcgggcacgcagggcgcggaggcgcgagcccgggcgggcaaaggccaaggtcagaggcttcccgctccccctacgcgatgcaggagctaccgtcctggccaccgccccccgcccctggggagggttctcagtccacaagcgggggctcgattttggcttgggtggggtcctctccccatcgcggcgctccccgcccacgcccgcgcccccagactcaccctctccggggtacaggtggcccgcggcgcccagtagcagcgcggccaccgccaccagcagcggcgcggccgccgccccccgccggcccccggtggccatggctgcgggagcgcggggtctcctcggatcagagcgcgcggcgctggcccgcgggggtcatgctccgaggcggccacccaagaggcgctgggggccgcgcgtccttctcttccacgcccgcgacccgcgggccgcagcccccctgccggggagggcccagaggcagccccgggaagggcgcgcgcggcttcgccagctacaaatactgagcggaggcccttgcggtggtggccccgaccccccggccgctgcggcccgggccccgtcccaggatctcggggcccggagctccgcgctgcgcccgggactgtctctcggctctcggccccgcgcgctctgggtcgcgatctgcgggctccgggacagagggacgcgcggaccgacggactagctgactggcgggcgggcacctgggctggcgggtggcgggcgggcggcgggagagagggctgctcgggcccgtaaacaacgcggcccgtcagctgggccccgtgcgggccgcgggaaaaggcggcgcggatctggcctaggaagggactctgcgcccgggagaggcccaggagagggagggaaagcttgcaggggagggaggtgccgcccggccccgccccgccccgcccgcctccccgcctccctgtgccgggccccgcgcgggaggccctgggcgcgccgggaccgagggcgcgccccagatccgcgcgccctacagccccgagtctcctccagtttcagacccccggaggcgccccacaggcccgacgcagcggcacagatcctttctctaccattttgctattttgttcatagtgggctttggaggattcctgttgattttttaaaaaatactgcattaaaatgtttattttggtgactcgaggtggttttggtttctttctttttttttttttttcactcccttaaattttgcaccccaggcgagtagtgtctcactcgcctttcctcagtccgggcctggccagcgacactcgtcccagagcgcgtgggcgcccccagatgtcccgcccgcgagtgcgccccggcccaggggcgagacccaagccaggcccctggggacagccacgtgcccgcgtgcccagtgcgctccctgtgttcaagttggagaaatgacacctggaaaaatgtgcagacgcttctgaaagggcaaagacgacgccaaagaagacgccggagacctcgaatagggcgcaggtggacatct

SEQ ID NO: 130615 - DNA, 1109 bp, Homo sapiens
  chr19:7459629-7460738
  hyper
aatcacccaggcttccgttaaccccacaaaacgcccacctaaccctgctgctctccctctggatccccgcaacccagctgtcccctcagagcccccggccctactgacagccaggctcgcattgctctccttcaaaaagccccccaaccccgctgacccgcccctcaaaagtcgccctcaccctcgccgcgagcaccctcccacttcggtgcccgcgcccctctcaaggccgagccgacgccccctcaccacggctcggggagcagcagccccaggtccccgggagcgccccgccctcgagggcacgcctccttccgggtcacgccctctgccccgcctccgaggcgggatcgcgcatgcgctgctctcctcgcgcggcttcccgcttccggctcccagctgctagctactgtggatctgggggggccggacggaggcatcggaggcggctgcgagagtggcagaggagctggcggagagcggcctgcgggcgatcgggccgaggtgaggacggcggcggggcggtcccgaggaaaacggggctcaggagggggccctcggtctcttcagggggtggcctggggcgcgggacccccggggctgcctcgggcctcccgccggctcctgggggacttctccaggcaggcgaacgggtgctggggtgcaggctgctccttcaatgcatggaggctctaggcggcgattgcagggtgcagaggtgcagacgatgcccgcccgctccgtccgagccccagccagtcctggggtgctacggcttactctcctccaggagaggagaggaggggtcacttgggccccagcctctgctcctcgttcaggagcgcccggggcaggaccagggatggaatggaacccaccacaatacccagcaccgtcgtatttcaggcctcccgggagaaccctcacaccccggagcagacagccctccctggcagggagcgtttgggtgcaaaaccgtgagaactatctgtgccatgggttttagtttcttgtataagaactcagttggtgctttcattgcggacgggaacgagaagctttcccctggtccttacatgtttcgttttgttttacgtttttaaatttca

SEQ ID NO: 130616 - DNA, 243 bp, Homo sapiens
  chr19:7553841-7554084
  hyper
ggtcccggcccctgtacgactccagcgccgacgccaggccgctcagcgacgccatggcaactccgtgacgtcaccgcgacgtcggcgcgccgcgccagggggcggggccaggccggggtaccgggagcgccccaaaggcttgcgcgcaggcgcggccgcaggcctttgtccccctgaccggctttttgtccgctgtaggggagggacagagtttgcagaggtggggccgacacgtgtgtgctc

SEQ ID NO: 130617 - DNA, 542 bp, Homo sapiens; identical to SEQ ID NO: 55522
  chr19:7565791-7566333
  hyper

SEQ ID NO: 130618 - DNA, 61 bp, Homo sapiens; identical to SEQ ID NO: 55523
  chr19:7580808-7580869
  hyper

SEQ ID NO: 130619 - DNA, 30 bp, Homo sapiens; identical to SEQ ID NO: 11990
  chr19:7581399-7581429
  hyper

SEQ ID NO: 130620 - DNA, 30 bp, Homo sapiens; identical to SEQ ID NO: 55525
  chr19:7587274-7587304
  hyper

SEQ ID NO: 130621 - DNA, 31 bp, Homo sapiens; identical to SEQ ID NO: 11991
  chr19:7588102-7588133
  hyper

SEQ ID NO: 130622 - DNA, 187 bp, Homo sapiens
  chr19:7598772-7598959
  hyper
gatcggctccctgtcgcgcccgaggagggcctggacctttcgtgtcggacccttgggggcggggagactgggtggggagggtgttgaataaaagggaaaataaatgtgtcgttttcatttttagcgggaggagcagtccttgcgttaagcggtgtgaggccctttaaggcgcggccacactcagcat

SEQ ID NO: 130623 - DNA, 30 bp, Homo sapiens; identical to SEQ ID NO: 55528
  chr19:7599158-7599188
  hyper

SEQ ID NO: 130624 - DNA, 66 bp, Homo sapiens
  chr19:7600087-7600153
  hyper
agtgggtaccaggtcggcctttggccccggggtggggttggacaggcgggcgtctggtaggcccta

SEQ ID NO: 130625 - DNA, 30 bp, Homo sapiens
  chr19:7600703-7600733
  hyper
gaactcctcgggggcgaaggtggcggagag

SEQ ID NO: 130626 - DNA, 63 bp, Homo sapiens; identical to SEQ ID NO: 55530
  chr19:7615962-7616025
  hyper

SEQ ID NO: 130627 - DNA, 130 bp, Homo sapiens; identical to SEQ ID NO: 11992
  chr19:7660555-7660685
  hyper

SEQ ID NO: 130628 - DNA, 278 bp, Homo sapiens; identical to SEQ ID NO: 55532
  chr19:7660714-7660992
  hyper

SEQ ID NO: 130629 - DNA, 173 bp, Homo sapiens; identical to SEQ ID NO: 55533
  chr19:7661304-7661477
  hyper

SEQ ID NO: 130630 - DNA, 1167 bp, Homo sapiens; identical to SEQ ID NO: 11994
  chr19:7676863-7678030
  hyper

SEQ ID NO: 130631 - DNA, 30 bp, Homo sapiens
  chr19:7694507-7694537
  hyper
taaatcatttttgacggacaggcccacgtt

SEQ ID NO: 130632 - DNA, 129 bp, Homo sapiens
  chr19:7701787-7701916
  hyper
atctgtgagcgtgtcgtcgaggtgtgcacctccagcgacttcgtgctcggcagcgcggacgcacctgcccgtcctccccgccagggactcaacttcctgggcctgggcgagaaccgacggcggggaggg

SEQ ID NO: 130633 - DNA, 315 bp, Homo sapiens
  chr19:7702163-7702478
  hyper
tgggagttgggggccgggctgggcgtccgagcacctgaccctcgagggggcgggcggggacgggttcccagctggacgcccctgctctccggtgccagaacagaacaaaattggggggccggactccggggacccaaaggggacgggtagagtgtggcggaggctggggcccggactcctgggcctcctagggtgcctgccgggggaggagggcacagctggatgcccacactctaggatctcttaagccgggcaaagttcaggggctggattcttggggcctcctagggctctggtcagcgaccctaggtgctg

SEQ ID NO: 130634 - DNA, 243 bp, Homo sapiens
  chr19:7745711-7745954
  hyper
gccttttacggcgccgtaaagcagctcggccgagcagactgctgcggttcctggtgagaccctacccacccccctgcccgcgccgggcctcgtccgctccccggccccttccccgcgggcgtgtgggtcccgggctggggtctcggcgtccgcgatcccgagcccgctcgcttcggcccccctcaggaggctgcgaggagggtgggtttctccccagtgtagaggtacggggcgagggtcgcg

SEQ ID NO: 130635 - DNA, 30 bp, Homo sapiens; identical to SEQ ID NO: 55537
  chr19:7746397-7746427
  hyper

SEQ ID NO: 130636 - DNA, 170 bp, Homo sapiens; identical to SEQ ID NO: 55538
  chr19:7746641-7746811
  hyper

SEQ ID NO: 130637 - DNA, 31 bp, Homo sapiens; identical to SEQ ID NO: 11996
  chr19:7762517-7762548
  hyper

SEQ ID NO: 130638 - DNA, 460 bp, Homo sapiens
  chr19:7794835-7795295
  hyper
gacatctgagcctgcagagtccgccccgccctgccccaccgcctgaccacgccccctccccctgcgcacctgctcatccaggcccccaacgatcaccaggtgcgcgctggcatctgcgcagtgatcctgcgccgccgcccacgtcgtctttggcacagagaaaaagtagcaggagccctcgaaggacagccacgacgtggggcacggctcgcaggagtctgcggggtggcgagggtcagagaggtcgcgtgcttccaggggcaacgcaccgagaggatgcagtgggtaggggttcggccccgcgggctcaggggtggagacacagaaccaggccaaggtccaggagtgacagggtccgcttacgccctcacagcccgcccccgaccccccgtctcgctcactgttctggagcctcacggcctccagcgcccggaacagctcagtgcggacgtcctcacgg

SEQ ID NO: 130639 - DNA, 166 bp, Homo sapiens
  chr19:7795513-7795679
  hyper
aaggtcagagtgcagcgtcagggtcaggacggggtgcatgatcggggtcgggggtcagcactcaggacggggtcggggtcgggggacgcggccagggctcagggccggggtcgcgtcgggccctcaccgcgctcacgcagttcccgcagggcgctctcctgctcca

SEQ ID NO: 130640 - DNA, 515 bp, Homo sapiens
  chr19:7852955-7853470
  hyper
ttgctcgcgtctgagcgtgagcagagtgtgtgtacatctttgggccgtttgcagtcacgcgtgtgcacatggcgtgcacgtatgtgtgcgagtccccacgcgtttgtctcccatcggcgtgtgtgcacatagtgtgcgctatatgcctgcctgcccgcccgctctgtggtcccgagtcgggggaccccgcaccccccgggcaagggaaggatttccgagtccctggccttgcctgcaggagcctctctccgcagcctccacggagcgcgcggcgctgctcggctgccaggacctgctgaggacaaacggtgtgtgcagagccgggcgcctgggcgcccggggcgtgtgcggcgggagcgtctgagaccccagagatggagtcctgggtgcgtgggggccctgtggtccctgagtctggccacggggtgtggaagggagtcccctgagtcctcccaagtgacccggcgggcatgcgttttgggatgggggtcgttccagcctcgaagcagacggcg

SEQ ID NO: 130641 - DNA, 254 bp, Homo sapiens
  chr19:7853543-7853797
  hyper
cgcaagggtggggtcttgtggccgggatgggaggggggccggaggcgaggcctgcggcgagtggggcggcggggggctggtctccgaagtcccgccccatcctcgcctccctcgcccctctcaccccgcggctcccaggctcggggacgcaggcgctgctgcagaccacgagcgcggagcttggggaggcgcaggcgaagctgatggagcaggagagagccctgcgggaactgcgtgagcgcggtgagggcccg

SEQ ID NO: 130642 - DNA, 30 bp, Homo sapiens
  chr19:7895034-7895064
  hyper
gggcggggccagggcgcctgggggcggcga

SEQ ID NO: 130643 - DNA, 802 bp, Homo sapiens; identical to SEQ ID NO: 55545
  chr19:7933744-7934546
  hyper

SEQ ID NO: 130644 - DNA, 153 bp, Homo sapiens
  chr19:7937037-7937190
  hyper
acaggtaaggctcgacgagtggggcgtggccggcagggtgggcggggcctgactttggagagcggctggcggagggggcgttaccggtggagagggagggagcgtggctggcaggggagtggctgcattgtcgggaggcggtacgggtcttgc

SEQ ID NO: 130645 - DNA, 719 bp, Homo sapiens
  chr19:7938934-7939653
  hyper
acgggctcaggatgtcgcatccctccagacccggagcgcacgcccgggtctccccgccagcccccatcggcctcccctggcctccccgagggatgcctgcacctgccgggaggcagagcggccccgctgcccgcgaacgggctccgggagacaaagagccgcgtcccgggcccgacccctcccccagccgggcctggcccgcgcccagcctctccacctgctcgcgtcgcgctcacctccgcctccggcctccggccgctcctcacagagtcgcctggggtggggcccgggccggagcgacgcggtggccgccagcggcgaggaggcgaggggagggggctgcgggctgcggcgccgggggagccgagccggtcccgcccctcggccgcgggcgggagagccgggggcgcgcgctcgatccggacccgggagcgcggccggcggaagcgcgccgagggggatgggggagaagcgcgctttggagagaagggtggcttctctgcggtccgggggaagcctgtttccccagctgcgcctgaggaacccagatagtcaacggttgggactgggggagcaaatccctggggtcctccactgtccttcccaacacatacacctgccccgacccccaccacaaccacctggcaccaaggaccgcctggacgcggataggctgggccctggcaaccaggaggcgggaccaccgcgcctctggccca

SEQ ID NO: 130646 - DNA, 41 bp, Homo sapiens; identical to SEQ ID NO: 55547
  chr19:7953414-7953455
  hyper

SEQ ID NO: 130647 - DNA, 195 bp, Homo sapiens
  chr19:7968414-7968609
  hyper
aggttccaggaatgcgcatgcgcaaaagccacgcgggcgaacacggcttcgcctcgctaagcatgcgcgccgttttccccgcccaccgtcctcagaagaatggtgtttcctcgcagcgcctctctcaggagcgatcgggaattggcgcatgcgcactacggtggtggtggcgacgaaggcgggggttgcacgttg

SEQ ID NO: 130648 - DNA, 30 bp, Homo sapiens; identical to SEQ ID NO: 55548
  chr19:7968822-7968852
  hyper

SEQ ID NO: 130649 - DNA, 154 bp, Homo sapiens
  chr19:7982944-7983098
  hyper
cccacgcccctggcccgcccgcgagagcctcgcccagcggtccccagcccaggaggtcccagtgaggaaggtaggtatggaggtggagggagctgggtgaggtaggagatctgacagtgacgcttcctagcgcttagttcgtgccaggcactgt

SEQ ID NO: 130650 - DNA, 30 bp, Homo sapiens
  chr19:7985153-7985183
  hyper
cgcgtccgcctccgcgcggttctttctgac

SEQ ID NO: 130651 - DNA, 30 bp, Homo sapiens
  chr19:7985908-7985938
  hyper
aggcgagggctaaacgggcggaatgaactg

SEQ ID NO: 130652 - DNA, 171 bp, Homo sapiens
  chr19:7990125-7990296
  hyper
cggccctctgagaccccggcgcagggccggctagggggcgccgcgcccctcacaccaacgcgtagtcgaactgcccgcgctcgagcgcctccttgtggtcggtccaggacgaggcgggcatgcggctgtaggggtcgagcaggatgcgcacgcagcgcaccatcaacagca

SEQ ID NO: 130653 - DNA, 301 bp, Homo sapiens
  chr19:7990893-7991194
  hyper
gctctctcagggacccgcgccggctgcgcgttcggcctctccccggcggcggcggcggcggcccgggctccggctcagcccaccccacccgcccctggagcggcggagaccgaggcaggcaagcagcgcgcgagccgggccgccgcggctgttcctatggcgacgggggcggggccgccgcggggggcggggctgcagggggcggaggctgcgcagggagcggcgcgcgagccagcgaccccgcccgggcctgcgggaggacggaaccccagccccgaggacccgcgagcacccacgacct

SEQ ID NO: 130654 - DNA, 115 bp, Homo sapiens
  chr19:8067287-8067402
  hyper
actctccagagcctagcgggggcccaggacacagcagcggagcagggagagtcgttcagaggagggagcgagcctcacttccctcccacaggctggcttccgttggtcttcccct

SEQ ID NO: 130655 - DNA, 30 bp, Homo sapiens
  chr19:8070789-8070819
  hyper
tctggttgagcgctcgccgtgtgtcccgca

SEQ ID NO: 130656 - DNA, 454 bp, Homo sapiens; identical to SEQ ID NO: 55552
  chr19:8115154-8115608
  hyper

SEQ ID NO: 130657 - DNA, 30 bp, Homo sapiens; identical to SEQ ID NO: 55553
  chr19:8206937-8206967
  hyper

SEQ ID NO: 130658 - DNA, 30 bp, Homo sapiens; identical to SEQ ID NO: 55554
  chr19:8213597-8213627
  hyper

SEQ ID NO: 130659 - DNA, 31 bp, Homo sapiens; identical to SEQ ID NO: 55555
  chr19:8213983-8214014
  hyper

SEQ ID NO: 130660 - DNA, 30 bp, Homo sapiens
  chr19:8214417-8214447
  hyper
acccggggcgggaacgcaaagccgagaggc

SEQ ID NO: 130661 - DNA, 49 bp, Homo sapiens; identical to SEQ ID NO: 12004
  chr19:8273922-8273971
  hyper

SEQ ID NO: 130662 - DNA, 707 bp, Homo sapiens
  chr19:8274270-8274977
  hyper
gcctggggcgggcggcgcgtgtctgcagctgctccgggtagcccgctaggcgcgccgtccccagccccgccgccggccctcggtgcgcccggccgcctgcacccccaggtaagcgagcaccccgcgccgcgaacaccgccccgaacgccaccctcacggcggtccccggccccgcctccgcggccatggcggccccagcccggcccccactcgcagctgggctccagcccccatcaccccgccggggactgtccccctcggggcttcccatcatggccgtctccccgagctatccgcgctcccccacgagggccggggcgcaacgggtgcccgaggacgcggctgtgaaacgggctggagcgagtaggggcgatcctggcctcgtgacgcgggggaatccggatgtgtgagccgggggagcgccccgtttccccgacgtgccagggctggggacgcagctggggccctggcctcggagtccgcagcccggccgcgtagacggcttctgagaaccgcttaaacacgtcattccaagcccgagctaacccatcaggcggccggggtgaggtggaggtgcccaggcggggataatgtcatttggcctggttggaccagccagcgagggctttttaggcccagggcctagccgggagtgtgtgcggagcagaaaagaggccagcctggctgaaacgcggagagggagggtc

SEQ ID NO: 130663 - DNA, 30 bp, Homo sapiens
  chr19:8280728-8280758
  hyper
gtgatggcacccagacggtaacaggacggg

SEQ ID NO: 130664 - DNA, 724 bp, Homo sapiens; identical to SEQ ID NO: 55558
  chr19:8372856-8373580
  hyper

SEQ ID NO: 130665 - DNA, 30 bp, Homo sapiens
  chr19:8386361-8386391
  hyper
ctctccccgaagcacgtgactcctctccgc

SEQ ID NO: 130666 - DNA, 30 bp, Homo sapiens
  chr19:8428841-8428871
  hyper
gcctggagcgggggcgggagagccacagtt

SEQ ID NO: 130667 - DNA, 30 bp, Homo sapiens; identical to SEQ ID NO: 12007
  chr19:8429145-8429175
  hyper

SEQ ID NO: 130668 - DNA, 30 bp, Homo sapiens
  chr19:8429424-8429454
  hyper
agcgcgtgcgggtccgcctgtcagggaacc

SEQ ID NO: 130669 - DNA, 183 bp, Homo sapiens
  chr19:8432387-8432570
  hyper
aaggggagatgcctgaggggccggaaagcgtcttcctggtcactctgggcccgcccccacccccaccgtgcagactcatttcgacctttcccctacttttccggctgggctgggggcggttcctcccagtctggagcgtctgagcctccagacgtgctcaacgccatcctcccctcctccctc

SEQ ID NO: 130670 - DNA, 30 bp, Homo sapiens
  chr19:8454923-8454953
  hyper
ggtcctctgatagtcgggtaggttctcaat

SEQ ID NO: 130671 - DNA, 30 bp, Homo sapiens
  chr19:8455164-8455194
  hyper
cgctgggtgcccgtcgctactccactcgcc

SEQ ID NO: 130672 - DNA, 41 bp, Homo sapiens
  chr19:8478143-8478184
  hyper
ggtcgctattggtccgcggcgctgtcggctcggcgggcggt

SEQ ID NO: 130673 - DNA, 30 bp, Homo sapiens
  chr19:8510274-8510304
  hyper
atgggggttgatggcgcgggcccggaccgg

SEQ ID NO: 130674 - DNA, 30 bp, Homo sapiens
  chr19:8570906-8570936
  hyper
tgcggggtcggaaacgcgaacaacggtgtg

SEQ ID NO: 130675 - DNA, 228 bp, Homo sapiens; identical to SEQ ID NO: 55562
  chr19:8579004-8579232
  hyper

SEQ ID NO: 130676 - DNA, 125 bp, Homo sapiens
  chr19:8942731-8942856
  hyper
gcaagcagcagcttcgtgctgacctaagctcacagcccgaggcctcatgaaccgaaacacggctccctggagggacgcagggcccgtggctggcggtgtccgcggcccacgtcgccccctggact

SEQ ID NO: 130677 - DNA, 23 bp, Homo sapiens
  chr19:9251128-9251151
  hyper
ggaggggtcagcggcgaattctt

SEQ ID NO: 130678 - DNA, 31 bp, Homo sapiens; identical to SEQ ID NO: 12009
  chr19:9267730-9267761
  hyper

SEQ ID NO: 130679 - DNA, 737 bp, Homo sapiens
  chr19:9419934-9420671
  hyper
gtgaaccaccgcgcttggcccaaacactacctaatgcataaagaggggacaggaggggaccgagccgaggcaaatgtcaccccgtgctcacccgacacgccgcgatccacagatcagctcacagagaacgaggctgaagcgcttgtccttgagacacgaatggcagagatgctcttcctttctggaaagagagcaaaggatgctttcggaggctgatgaactacgacattggttctccaactctcgcctgcatcagaatcaccccgatttctgtacccagaccagagttcccgattcagtgagtttgggaccagccgcggccacaggggcagctgacccgggctctctgaggaggcgccgcggcggcgggaggccccgggcgcggggtccggacaaggagtggcggggaggcagcccttagaccgccgattcccaaacccagccctcggtctcccgcggacccgacccggggcaggcagggcggggcggggcagggcaggacaggaagcgggcggaggcaaaaatgttcctcagacgcgggcggaggcgtagggtgacaaggctgtcgactcgcgcatgcgcagaagcacacttctgattcctctttcggcgctgcaaatggcgtatggggcggggcctgggaagcgggacttgaggtgaagggggtggagcaggtaggagcgggatgcaaaggagcgccaaggctggttccagccgcaagtggatgagaaatccta

SEQ ID NO: 130680 - DNA, 570 bp, Homo sapiens
  chr19:9434650-9435220
  hyper
ctttgttcaaaacgccagtaacctggacagcttgcagtcaagaccccctaccggtgacacttgcgctcttcggggaggtaaacagcatttcctctcagctctgggttggaaaaagccgcagcagctgatgggcccgggaacccgaggccccgccccctaggtggtcctagcctttgcgcgtgcgcggcgtgtctgcgtgggcgcatgcgcataacggccgccatcttaacagcgcgttcccgttggcgtctgaggtaagtttttgtttctgggcggcgttcggtggtgtcccggtgcagccacgcgagagtagaagggtggaaaggggaggtgcccagtgaaatggagcctgtcccgtgcactttcgggcatttcgagcatcttgtgggctctcccaagtcgcggcccctcctctgagagccacagtcaggtctgtcctcaggggtcgaggcggctgcgctggggcctcggcccgggaggaggcggggggcacggcctttccattttccctgctcccctctgcagaagcctcatagggcccggcgcggcggctcacgcctgtcattccca

SEQ ID NO: 130681 - DNA, 70 bp, Homo sapiens; identical to SEQ ID NO: 55567
  chr19:9473938-9474008
  hyper

SEQ ID NO: 130682 - DNA, 290 bp, Homo sapiens
  chr19:9517500-9517790
  hyper
cccgcactcccgacccgccttttacctggacccaagcccccagcggcgcaggtgggagtctgggaagaagtgcggtgtcggcaggaagtcccagcgcgacgtccgggaaagccacaggaggaggcgacctgcaggaggctaccctttgaccccaaccctactctccagtcctcctagtctggtgggagcaaccttagactggttgatgtggaaggaggcgggcctgcacgcggagtacggcattcacttccgtttccgggagcgcacttccgtttccaggcatgagggca

SEQ ID NO: 130683 - DNA, 127 bp, Homo sapiens; identical to SEQ ID NO: 55568
  chr19:9517879-9518006
  hyper

SEQ ID NO: 130684 - DNA, 30 bp, Homo sapiens
  chr19:9545594-9545624
  hyper
ttctggtctacaaacgtttatattcacata

SEQ ID NO: 130685 - DNA, 447 bp, Homo sapiens; identical to SEQ ID NO: 55569
  chr19:9545894-9546341
  hyper

SEQ ID NO: 130686 - DNA, 117 bp, Homo sapiens; identical to SEQ ID NO: 55570
  chr19:9609320-9609437
  hyper

SEQ ID NO: 130687 - DNA, 578 bp, Homo sapiens; identical to SEQ ID NO: 55571
  chr19:9648913-9649491
  hyper

SEQ ID NO: 130688 - DNA, 30 bp, Homo sapiens
  chr19:9694917-9694947
  hyper
aaaacgcgcggagtcgggacaaacacactt

SEQ ID NO: 130689 - DNA, 30 bp, Homo sapiens; identical to SEQ ID NO: 55572
  chr19:9731906-9731936
  hyper

SEQ ID NO: 130690 - DNA, 37 bp, Homo sapiens
  chr19:9732220-9732257
  hyper
gatgagggatgggacgcatccccgggggatgctcctc

SEQ ID NO: 130691 - DNA, 30 bp, Homo sapiens
  chr19:9879320-9879350
  hyper
aggccctcctgccccgccctgcctaggttg

SEQ ID NO: 130692 - DNA, 124 bp, Homo sapiens
  chr19:9879600-9879724
  hyper
gtcgatattgggaacgacgccggaccaggaaacccagcgccaagggccgggttggaggcggggactggcgcagcgggcggggcacgcgtggaggcgtcacctaaggcttcgattgcagacagcg

SEQ ID NO: 130693 - DNA, 31 bp, Homo sapiens; identical to SEQ ID NO: 55574
  chr19:9896567-9896598
  hyper

SEQ ID NO: 130694 - DNA, 30 bp, Homo sapiens; identical to SEQ ID NO: 55575
  chr19:9903762-9903792
  hyper

SEQ ID NO: 130695 - DNA, 257 bp, Homo sapiens
  chr19:9929305-9929562
  hyper
acgcgcggttagaacgaccccagccccgggccacatcgcatctccaggtgccagctgcgccctccgccctgcccttccccccggaggcggggccgcacctggagatgcggatccggtcccgtaccgggaggtaagagaagatctcgagcaggaccgagtccggcagttcgaccaaagtcgccatgatcccgccgacacgcacttccgcttccggttaaagagacccgaggggtcctgggggcgccgaggcggctgac

SEQ ID NO: 130696 - DNA, 261 bp, Homo sapiens
  chr19:9938401-9938662
  hyper
ctctctacccggcgcgcctaccacaggcgcgacacctgtcaagccttgggacaccgaaaccgtacctgggaacagcaaacacaccacagactgcagacccggaagaacttgtcccagtgttgaccacaccccctggctaggggcagggcttccggcctcgaactttaacttccgcttccggttcctagcgttaactgcgaccggggttcagcgctcgggtgaggagctggtggcgtcggcaggttcgaggcgattcgaggt

SEQ ID NO: 130697 - DNA, 30 bp, Homo sapiens; identical to SEQ ID NO: 12013
  chr19:9942246-9942276
  hyper

SEQ ID NO: 130698 - DNA, 30 bp, Homo sapiens
  chr19:9945638-9945668
  hyper
cataagctctatcccgcctgggtgggctct

SEQ ID NO: 130699 - DNA, 30 bp, Homo sapiens
  chr19:9945891-9945921
  hyper
gggagcccaatgggcgtcgccgccaggccc

SEQ ID NO: 130700 - DNA, 516 bp, Homo sapiens
  chr19:10024009-10024525
  hyper
cgtcccctacccaggcgtgccgggcagggtcgtgggaagcacaggggtagagggggacaggtgggggccccgggggctgcggcggcggcagcggctgtggcgcgggtaccacgccccccgggagcgccccccgcgcggcggccactcacgattttctcagaggcgcccgcacgggacacggtgccgttgagccccacgagcgagggcagcgtctgcgacatccagttggtgaccatggccatggtgctcagcacggccccgatcttgagcagcggcaccgacatcgcgcctccgcctcatgccccgcggccgcccgccgcgcgtcccttctctggcccgccgcggggcgctcggtccctcgacacccaggcgccccgggggggcgtgggggagggggcacgagcgcgagctgcggggcagggggtccgggacggggtgagggggggctcggggacgcgggctgcggctcggcgcgcctggcgggctcctcttataaagcgccggctcgggcccccg

SEQ ID NO: 130701 - DNA, 156 bp, Homo sapiens
  chr19:10024727-10024883
  hyper
tggcattccccagccccgccccccaacggtattcccggcccccctccccctaggcggtgttcccggaccgcctcccgcacgcagaccctcttcgagcctgagccgcgggaccccgcgcgtaaaggcgccctcggcccaccccggccacccaaagac

SEQ ID NO: 130702 - DNA, 30 bp, Homo sapiens; identical to SEQ ID NO: 12015
  chr19:10047405-10047435
  hyper

SEQ ID NO: 130703 - DNA, 30 bp, Homo sapiens
  chr19:10111029-10111059
  hyper
tcttcctccaggtcacgtcccgactgcaga

SEQ ID NO: 130704 - DNA, 31 bp, Homo sapiens; identical to SEQ ID NO: 55579
  chr19:10120919-10120950
  hyper

SEQ ID NO: 130705 - DNA, 30 bp, Homo sapiens; identical to SEQ ID NO: 55580
  chr19:10121157-10121187
  hyper

SEQ ID NO: 130706 - DNA, 30 bp, Homo sapiens
  chr19:10138548-10138578
  hyper
cggaggctcgcttgcgccctctggtgtcca

SEQ ID NO: 130707 - DNA, 30 bp, Homo sapiens; identical to SEQ ID NO: 55581
  chr19:10197175-10197205
  hyper

SEQ ID NO: 130708 - DNA, 392 bp, Homo sapiens
  chr19:10197445-10197837
  hyper
tttttccaggaaatgccgtaaagggatgaaaggcggggggggggcggcggaggccaaaaccaagggtcaagttcgggccgggagaacggtgcctagagatgggggagggatgatcccgtttccccttcccccaccggaacccccctgtctccatcccagctggagaagagcgtccggcgcctccgggagaagtttcatgggaaggtatcctccaagaaggcgggggctctgatgaggaaattcggcagcgaccacacgggagtggggcgctccatcgtgtacggtgaggctgcaggggtcccgggcctggtgcggggaccgcgcgtgggagcgccgagggggcgtggtctagggagaggcgttgagatcacctcccccggaggtcccagcct

SEQ ID NO: 130709 - DNA, 187 bp, Homo sapiens; identical to SEQ ID NO: 55583
  chr19:10207019-10207206
  hyper

SEQ ID NO: 130710 - DNA, 51 bp, Homo sapiens
  chr19:10216839-10216890
  hyper
gtttctctgcagcccggagccgcgtagccccgccccggtctccctagaaac

SEQ ID NO: 130711 - DNA, 30 bp, Homo sapiens
  chr19:10217128-10217158
  hyper
gtcccggccgaggtcgcggcgctgaccctt

SEQ ID NO: 130712 - DNA, 263 bp, Homo sapiens
  chr19:10252655-10252918
  hyper
ggccaactttgaccccgaagccttccctctagcaagcaggggcaccacctcgaggaagtagaagcggttggggccgcccatggagtacacctggacgcactcgggcaggtcctccccatactccacggtgcagcggccctgcacagccttgaagtccaccacggcctcctcgtcgctccagtagagcaggttgatgtctgcgtggtagctcgctggagtggacttgtgggtgttctcaggcctgcgagcgggagaggcctcgt

SEQ ID NO: 130713 - DNA, 211 bp, Homo sapiens; identical to SEQ ID NO: 55586
  chr19:10253328-10253539
  hyper

SEQ ID NO: 130714 - DNA, 30 bp, Homo sapiens
  chr19:10304751-10304781
  hyper
ttccctgatgcccacggctcacaggcacag

SEQ ID NO: 130715 - DNA, 167 bp, Homo sapiens
  chr19:10305759-10305926
  hyper
atgcccagggaacacgcatgcgcaaggcgggcacacaccccccccacgcggagcagtgggctcgtccaagctccacggtttgctgggaggtgggcacggtgcccgaggcattcattcattcattctttcaggtgtgatggggataaagcagcgagaagcccccaagg

SEQ ID NO: 130716 - DNA, 51 bp, Homo sapiens; identical to SEQ ID NO: 12018
  chr19:10340886-10340937
  hyper

SEQ ID NO: 130717 - DNA, 147 bp, Homo sapiens
  chr19:10342108-10342255
  hyper
ccggctggccggggcgcacgcgggggccgacaggagctgcacggagggccctttgtccgccccccccacccgatctctcactctgcccctcccagcccccacccgtgagaaccggccggcgcgaaacgtcacgcagcctggtgacgt

SEQ ID NO: 130718 - DNA, 196 bp, Homo sapiens; identical to SEQ ID NO: 55588
  chr19:10346994-10347190
  hyper

SEQ ID NO: 130719 - DNA, 114 bp, Homo sapiens
  chr19:10362530-10362644
  hyper
tgcccacttatgggcgggggtcactccttcaggcttaacagtcattggctgaattgggccagagaggtctcattggctgaattcctgcaccggctcgtcggaggcgggacccaa

SEQ ID NO: 130720 - DNA, 185 bp, Homo sapiens
  chr19:10363158-10363343
  hyper
tccaggaggggcggcgacagagaggtctgacccttgaccctaacctctgacccccgcaatcgctccaggtctcccggagcccgtgctgcgcaaagtcgagctcccggtacccactcatcgacgcccagtgcaggcctgggtcgagtccttgcggggcttcgagcaggagcgcgtgggcctggccg

SEQ ID NO: 130721 - DNA, 88 bp, Homo sapiens
  chr19:10380737-10380825
  hyper
gagtcttggggtcacacgcacaggcggtggccaagcaaacacccgctcatatttagtgcatgagcctgggttcgagttgccggagcct

SEQ ID NO: 130722 - DNA, 1015 bp, Homo sapiens
  chr19:10381048-10382063
  hyper
tgtaaagacgcctccgcggccaaggccgaaaggggaagcgaggaggccgccggggtgagtgccctcgggtgtagagagaggacgccgatttccccggacgtggtgagaccgcgcttcgtcactcccacggttagcggtcgccgggaggtgcctggctctgctctggccgcttctcgagaaatgcccgtgtcagctaggtgtggacgtgacctagggggaggggcatccctcagtggagggagcccggggaggattcctgggcccccacccaggcagggggctcatccactcgattaaagaggcctgcgtaagctggagagggaggacttgagttcggaccccctcgcagcctggagtctcagtttaccgctttgtgaaatggacacaataacagtctccactctccggggaagttggcagtatttaaaagtacttaataaaccgcttagcgcggtgtagaccgtgattcaagcttagcctggccgggaaacgggaggcgtggaggccgggagcagcccccggggtcatcgccctgccaccgccgcccgattgctttagcttggaaattccggagctgaagcggccagcgagggaggatgaccctctcggcccgggcaccctgtcagtccggaaataactgcagcatttgttccggaggggaaggcgcgaggtttccgggaaagcagcaccgccccttggcccccaggtggctagcgctataaaggatcacgcgccccagtcgacgctgagctcctctgctactcagagttgcaacctcagcctcgctatggctcccagcagcccccggcccgcgctgcccgcactcctggtcctgctcggggctctgttcccaggtgagtcggggtggggattgccgtcgggccagttctccgaagccccgggaggaccggctcccgggtcaggtcatgcatgcttaggtagctgtttatgggaaggaggggctagagacagcgattgaaaggcaacagccagtaggttcgaatccagaccctgc

SEQ ID NO: 130723 - DNA, 405 bp, Homo sapiens
  chr19:10397587-10397992
  hyper
ctctccagggtggagtcgaggaggcggggctgcgggcctccttatctctagagccggccctggctctctggcgcggggccccttagtccgggctttttgccatggggtctctgttccctctgtcgctgctgttttttttggcggccgcctacccgggagttgggagcgcgctgggacgccggactaagcgggcgcaaagccccaagggtagccctctcgcgccctccgggacctcagtgcccttctgggtgcgcatgagcccggagttcgtggctgtgcagccggggaagtcagtgcagctcaattgcagcaacagctgtccccagccgcagaattccagcctccgcaccccgctgcggcaaggcaagacgctcagagggccgggttgggtgtcttaccagctgc

SEQ ID NO: 130724 - DNA, 378 bp, Homo sapiens; identical to SEQ ID NO: 55595
  chr19:10398074-10398452
  hyper

SEQ ID NO: 130725 - DNA, 285 bp, Homo sapiens
  chr19:10399790-10400075
  hyper
cccagccagatgagcgcatggagttgggggtggggggtgtcaaagcttggggcccggaagcggagtcaaaagcatcaccctcggtcccttgttctcgcgtggatgtcagggcccccacccaccgagcagaaggcggactcaggggcgctccagggtggctcgagctcacacacgctgagtagacacgtgcccgctgcaccctgggtaaatacagacccggagccgagcggattctaatttagacgcccgcgaacgctgcgcgcacgcacacgtgtcctcggctcg

SEQ ID NO: 130726 - DNA, 3175 bp, Homo sapiens
  chr19:10400293-10403468
  hyper
gtgggggcggggctcggagtccagcttattatcatggcatctcagccagggctggggtaggggtttgggaagggcaacccagcatcccccgatcccagagtcgcggccggggatgacgcgagagagcgtggtcgcccccagaaggccctgggccatcatgccggcctccacgtagaccccaggggtcgctcactcctgccagctcgccttcaccaaggccaggagcttagcgcacgctcgcctcccgcccccccgccgcctctgccgccgccccctccttggaaaccaagttaccaacgttaaaccaatccccaagcgcaactctgcctcccccacaccccacccgccgcgccgcgcggagccgtcctctagcccagctcctcggctcgcgctctcctcgcctcctgtgctttccccgccgcggcgatgccagggccttcgccagggctgcgccgggcgctactcggcctctgggctgctctgggcctggggctcttcggcctctcaggtaagagccccgctctggttcggggtggacagggcgggggcggagtccctggacctgagaaacggcctcctgtccctcccagctctgccctcgcctcgctcccacgcctctgcccccacctcgagcctgagtcttctccccttccccctcctccccaacacacacccgagccccagcttcctgactcctcgatagcccctacccgcttcgagatcctaggtgttcttccgcacccaacccttcgccctggagacccagtgtctctcctgtccgctccccgggtacctccttacgctgtgctgtgcaccatggtccacggactggcatcttccccactcgcggtccgcgaagactccatctctccaactaccctgactcagaggcgctgttcccgctccacccagagccctggcaaccgggtccctcagctgttcccgcggttccttccatgagcccagccttgcgtcccggctccgtgttcttcaccgggtgtagggtccttcctgatccttgacccagcctcgtctctcctttgcccttgccgcaaacgcactctcctcgtatcccggcattctgccaggaccctgagaactggttcatcccccatcccccatcccgggtccccttctctcagccttgctgtgttcatccaagaacccacctttcctctcctctacgccctccccccatgctttcccgccgctccatcggcgctttggagaccatggctctctgctaccacgtcccagagacaccctcgaggtttagactctgggagtgcgcctttaaaccggaggcctgggcaggacgcgggacgcctgggttctttccctggctgcagcctctcctcctcctccccgccctctgagaacccttgactcgacataggggcgctaagatgtcagggagttggctccccaggctcagcccgcgtttccctgggcagcggtctcgcaggagcccttctgggcggacctgcagcctcgcgtggcgttcgtggagcgcgggggctcgctgtggctgaattgcagcaccaactgccctcggccggagcgcggtggcctggagacctcgctgcgccgaaacgggacccagaggggtttgcgttggttggcgcggcagctggtggacattcgcgagccggagactcagcccgtctgcttcttccgctgcgcgcggcgcacactacaggcgcgtgggctcattcgcactttccgtgagttctgggtggccacgcgcgtactccactactctccctccctcccaggccccgccccctgggtcccagggtcctccccttcaggccccaccttctgttccaagtcccggtgttcaaagagctgcggactcttcccccttgcagagcgaccagatcgcgtagagctgatgccgctgcctccctggcagccggtgggcgagaacttcaccctgagctgtagggtccccggcgccgggccccgtgcgagcctcacgctgaccctgctgcggggcgcccaggagctgatccgccgcagcttcgccggtgaaccaccccgagcgcggggcgcggtgctcacagccacggtactggctcggagggaggaccatggagccaatttctcgtgtcgcgccgagctggacctgcggccgcacggactgggactgtttgaaaacagctcggcccccagagagctccgaaccttctgtgagtgggtgtggggaggagatggggacccagtggggtcggtcggtgtttaggaggtttagaggtagatacatctgaatgctgaccccgacttcaaccctcgccggctgagctgtttccccctccgtgccttgaggatgataatacgataagatagtgcatgtcaagtgcttaggacatattgagcgctcggagttagttcaaacttggttcttcgacccctagccctgtctccggatgccccgcgcctcgctgctccccggctcttggaagttggctcggaaaggcccgtgagctgcactctggacggactgtttccagcctcagaggccagggtctacctcgcactgggggaccagaatctgagtcctgatgtcaccctcgaaggggacgcattcgtggccactgccacagccacagctagcgcagagcaggagggtgccaggcagctggtctgcaacgtcaccctggggggcgaaaaccgggagacccgggagaacgtgaccatctacagtaaggaaggaggcggggtctccgcggctccgaggtgggaccagaggaatgcgaaggcggggcgaagagtgggcgggacctcagtaccggaacaggcgtggcccgaggggcggggcaggtgggggcggagacgtaatcgctggggaggaggagcctgtacagcctgagaggcggggcgccgtaccctagttcgttctcagcaccccgaggattcgggcagataaggggcgggccttgaccggagggaggggtatggtcagtatactacgaccaaatgctccgcccccaggcttcccggcaccactcctgaccctgagcgaacccagcgtctccgaggggcagatggtgacagtaacctgcgcagctggggcccaagctctggtcacactggagggagttccagccgcggtcccggggcagcccgcccagcttcagctaaatgccaccgagaacgacgacagacgcagctt

SEQ ID NO: 130727 - DNA, 30 bp, Homo sapiens
  chr19:10403724-10403754
  hyper
agggcccagagcagacgctgcgctgcgagg

SEQ ID NO: 130728 - DNA, 157 bp, Homo sapiens; identical to SEQ ID NO: 12025
  chr19:10406002-10406159
  hyper

SEQ ID NO: 130729 - DNA, 140 bp, Homo sapiens; identical to SEQ ID NO: 12026
  chr19:10406278-10406418
  hyper

SEQ ID NO: 130730 - DNA, 110 bp, Homo sapiens
  chr19:10406919-10407029
  hyper
catgaggactgacttcgtgcctgtgggagtgcggggggcggtgggagaagccccccggagcttggccaccctccgcgagggtctccaccccgcaggtccgtggctatggg

SEQ ID NO: 130731 - DNA, 195 bp, Homo sapiens
  chr19:10407044-10407239
  hyper
cggcggggggcgcggcgctgctggccgcgggggccggcctggccttctacgtgcagtccaccgcctgcaagaagggcgagtacaacgtgcaggaggccgagagctcaggcgaggccgtgtgtctgaacggagcgggcggcggcgctggcggggcggcaggcgcggagggcggacccgaggcggcggggggcgcgg

SEQ ID NO: 130732 - DNA, 31 bp, Homo sapiens; identical to SEQ ID NO: 12027
  chr19:10426144-10426175
  hyper

SEQ ID NO: 130733 - DNA, 178 bp, Homo sapiens
  chr19:10443526-10443704
  hyper
gtgatatggaggggcgtactctccgcagtcctgaaacttctggatgtgaggtcccgccaccctgtggtagagtgggtggagaaaagcatcatccaagcagggggcaactggtggtccaatgtaccagcccattcacaattccccaacaggaccaaagctgtccgcccccttccattcc

SEQ ID NO: 130734 - DNA, 317 bp, Homo sapiens
  chr19:10491158-10491475
  hyper
tccttccgcgcccgcgtccagactcacccttccgggggaacacaagctcgaacccggacccctccccgctcccgcgggtagctactgcttgtcccccgccgagacgcctcctcccattggccgcctgaaacgcacacgcccattggcagctgctctgttctccctgctcgtcaccattggatttttttttttttgccatggtggcggcactctcattggtcctggggctcattcgtcactcagccgcgattggctgagtcggcacccagatgcgctgtcgcttctgctattggctggcactcggtggacggagacgg

SEQ ID NO: 130735 - DNA, 30 bp, Homo sapiens
  chr19:10514234-10514264
  hyper
gccccttccgcttccgccgagcgcgggaaa

SEQ ID NO: 130736 - DNA, 30 bp, Homo sapiens
  chr19:10515563-10515593
  hyper
acggcccgggcacgcgcgcgcacggaccca

SEQ ID NO: 130737 - DNA, 30 bp, Homo sapiens
  chr19:10526624-10526654
  hyper
actgtgtgggccacgcgaggactttgacgt

SEQ ID NO: 130738 - DNA, 81 bp, Homo sapiens
  chr19:10526987-10527068
  hyper
gctgcagagcgcacccgtcttcgggaacggcgtctgtgtccctgtctgtctgtttctatttccacacgtccctgtctgtct

SEQ ID NO: 130739 - DNA, 1963 bp, Homo sapiens
  chr19:10529635-10531598
  hyper
gctgatgggggggccggtttttgctcggcgttcgcccacgccgggagccccctctggcggggagaaaagtggctgtgggggttgaagaccggcagtcttttttttttttttttttttttttcaaataaggagaagggcgcggggggagggcggtggcaaacggcatcgcgtgccctggggagcccgtgacagggggcgcacgggggcaggggtctggtccccgggtcccgcagcagagcagtttcgcgttcgagctcttatcggcgtggggggggggggcggtgggacacgcgggcgcgtgcactccccccgcccagcagccatccttgggggggttgagggggatgggggcgcactcggatcccgctcgctctctgcttgctcgctcggcgcggcgctgggggaggcgggagcgtgagtcacggcgactcccgatttaggtgccggaaggggggctctgctggcgggggccgcagggaggaggctcgcctgtttactcgcctgaaaagggcacgggggtgcgctccgcggctacctgggaccttcctcagtttacctctggcagaagcgctttagaagaggcagcgatgtatagagcggtgggccggcagctgcggtatccgccacagggtgtcttcctggagccacaagggaaccaatgggacacaccccagaaacaccccagaggccccaggccgaccacacacatacactcacgcacacgcacacactaacatacatagacgtcctccgacactacagtcagacgacagaggccgaatcgcgtgcacaactccgcaagcacacaccgaccacaaacgcatccaagcgcttgagaacacattcacagtccccaggccacctgaaaaaagaccacgtagggatgcacatcctccaaataggtagcacatgtgcgcacacatccttcacccacagacacacacagttatacacacagccaaatccagagaaacgggcagacaacagcagccaaccacgtgcgcacacacacttccagccgacactgaaaacacagacaaccctcggaagaggccacgtgcgcgcacatcccgccccgggcccgcaccatcactatcctccgacgcacagacaggagatcccacacactctgccgccgcccgctgcaggtaccgcgccggtggcactaggaccactcctcaaaaactgccccccgccaggggtagcggcgaggacacgccaacaccggactccgccctcgccatgatggaccgactgactgacactctggcaaccagtccggtgtctgcttccagatcggattaaccgtttaactccttcgtgcctgtgcgcgccgcggccaagcagggtgctttgaagacagacgagttccagcgccccctcccagcccggagcggggatctgcgtgggcgggaagggcccccctccttaggtagctgccccccgctggcccggacggaggaggaggggggcggcgctgacagccgcggcgggcggggggcggggaggggcgggacggggcggaggagccggggctggcgccgagcgggccgcggaacgcggagcgcggagcgcggagagcgccgccgggcactgagcagagctccaggcgccgaaaggaagctgcagagcccggcccgggggcgattggcccgcagcgcccccgggtctgtccccggggcgccatggccctaccgcggccgggcgcacccgcggggccctgggctcgctggcttgcgcgcagctgagcggggtgtaggttggaagggccagggccccctggggcgcaagtgggggccggcgccatggaacccccgaccgtcccctcggaaaggagcctgtctctgtcactgcccgggccccgggagggccaggccaccctgaagcctcccccgcagcacctgtggcggcagcctcggacccccatccgtatccagcagcgcggctactccgacagcgcgga

SEQ ID NO: 130740 - DNA, 341 bp, Homo sapiens
  chr19:10531608-10531949
  hyper
cgggagcggcagccgcaccggcccatagagcgcgccgatgccatggacaccagcgaccggcccggcctgcgcacgacccgcatgtcctggccctcgtccttccatggcactggcaccggcagcggcggcgcgggcggaggcagcagcaggcggtaagactccccgcggcggatgcgcgcggaacggatgggcgcgcagggaggaggcaactcgagctgccggccgcagggggcgctaggatgcgggtggggtcggtttggctggcgggggcggagggaattcggctgcgggggcgtctgggacctggcccctggttgtgcgctctacgggaggcttcctgc

SEQ ID NO: 130741 - DNA, 434 bp, Homo sapiens
  chr19:10535125-10535559
  hyper
atgtgggttgggagcgggtctccccgcgcgccctctgctggacgacgaggaaggcacagcctgggtgtgcgctccgagcgcggacctgctccagggacgccgccagtcccggagcaaagcaaagtcgccgccaccgtcgcggcgcccggtattattattttatgcttattgagcgtcctggagagcgggcgccaggccggctgaccgcaggctgcgtgtggggtcctcgccctcccgggcttgggaccaggccgctttccccatgcgccagcccctgccacacgctgcggggactgtcgtctggaggacagggaggaacctggccgaaaagttgcagccgtggagttcccgtcccgcctctgcgcgcttgcccggcaggccggtgaaccccagcatccttggctctgcgcttcctgcccgggaaacagagacca

SEQ ID NO: 130742 - DNA, 30 bp, Homo sapiens; identical to SEQ ID NO: 55610
  chr19:10542608-10542638
  hyper

SEQ ID NO: 130743 - DNA, 146 bp, Homo sapiens
  chr19:10589793-10589939
  hyper
cgggagtttttttcccgactacgattggctggtgtaattgtcatcacttgaaaaggcagccaatgagaggcgcggtcgcctcgctggtggaagccgagagctgagcgaagtgaggcgtgcggagccaaaggcgctagagcgatagc

SEQ ID NO: 130744 - DNA, 30 bp, Homo sapiens
  chr19:10612787-10612817
  hyper
ggggcctggcactgcgcaggggtcaataaa

SEQ ID NO: 130745 - DNA, 30 bp, Homo sapiens
  chr19:10613477-10613507
  hyper
cagagccgggcgcccgccgtgtcacaataa

SEQ ID NO: 130746 - DNA, 329 bp, Homo sapiens
  chr19:10616197-10616526
  hyper
ttgcactccagcctgagcaacagcgcgagactacgtctcgaaaggaaaagaaaaaaaaaaaagatagatgggatttcgccatgtaagtgaataataaatggaaactctaggcccctggagcctccagggtgaatttgaaagattgaacgtcctggctcagggtctggaaggaatcacgtgtagggctacgttggagttaccccgctaccccaaatccttgttgcgtgtagatgcagttccagacagctcctcaggggggcggcctagatagtccgtgaacacgctgagtggccgaggttgtaaccagcgccttcctggcacgttgcaga

SEQ ID NO: 130747 - DNA, 113 bp, Homo sapiens; identical to SEQ ID NO: 55612
  chr19:10624739-10624852
  hyper

SEQ ID NO: 130748 - DNA, 701 bp, Homo sapiens; identical to SEQ ID NO: 55613
  chr19:10624965-10625666
  hyper

SEQ ID NO: 130749 - DNA, 252 bp, Homo sapiens
  chr19:10654403-10654655
  hyper
cctgaaggggctgtcgcgctcctggcggtgtgataaggagggcggggggaggccgcgggaaggcgtcggggtttgaggtccccgcctggcgacccgggatcggggcaggaaaggcggctgggcggggagagggcggggcggggcgtctggcttggccacgcccaccgtcatccggggtcctggcccgctaagatggcgatggctgcggtagcagcggcggcggctgttgcctggcccggtaccctggggacg

SEQ ID NO: 130750 - DNA, 67 bp, Homo sapiens
  chr19:10676718-10676785
  hyper
ggacggggcggggccgccctcagtcccgcccgcatccacttgtaaacgaggcgtaccgctgctaacc

SEQ ID NO: 130751 - DNA, 370 bp, Homo sapiens
  chr19:10679762-10680132
  hyper
gtgtagcggcaccgcgttgcccggcgcgcgaccttacggcgttccgcccacagggcctgcataaccagtggctgcgcgtcgccggggaaacttcgggctcggcgtgaaacgcgtcgctcctgattggtcagagtgtggcaaccggtggaccgccggcaatggcggggttttcggttttcaaatgaacccggcaggcgggaaagaaggctggtttaactgacccagggagaaaggtcaggggcagggtcgcgcgggctgctctgggacctcggcgcctcctgagggaagggaggcagggctggagccacccaatccgaggttccactactaatagacattcattggcccttactacgagctgggcgcttta

SEQ ID NO: 130752 - DNA, 322 bp, Homo sapiens
  chr19:10691748-10692070
  hyper
cctggcacccaatagtcgctcaatcatgaaacagcctttgcagtcagccaatggctgcaatactggccgtgatcagcagatggtgagcgagcgcttatttcaaaacgggctgcgattctcttaagtccccacgtggggcgggtttgcgactcccctgtgcatttctcagaagaaaggtcccctaaatgcttacggccagtgagctcgaagagcacgcggtcattgaggcccagccgcagctctggcattcctgacagaaacaccttgagcttgatggtaccgacgatttcgctcagaaggacgctgccgttggcattgacct

SEQ ID NO: 130753 - DNA, 30 bp, Homo sapiens
  chr19:10713528-10713558
  hyper
gaggggaggcgcggcgatctgggctcggaa

SEQ ID NO: 130754 - DNA, 200 bp, Homo sapiens
  chr19:10762081-10762281
  hyper
caggcgtgagccaccgcgcccggcgtctttggcacatttgacgtatcatgtgactatgctacctattaaaaatccacagtaaaatgtaaataaaatagaaaagcagagggtacagcatgcactcatttcttttttgagacggtctagctgtgccatccaggctgaaaagtgcagtgactccatcacggctcactgcagcc

SEQ ID NO: 130755 - DNA, 30 bp, Homo sapiens
  chr19:10764798-10764828
  hyper
aagtcacgtgactacgcacgcaaacactcc

SEQ ID NO: 130756 - DNA, 30 bp, Homo sapiens; identical to SEQ ID NO: 55618
  chr19:10765729-10765759
  hyper

SEQ ID NO: 130757 - DNA, 30 bp, Homo sapiens
  chr19:10806127-10806157
  hyper
cctccatgtgaagagcgcggaaaccgcccc

SEQ ID NO: 130758 - DNA, 126 bp, Homo sapiens
  chr19:10812214-10812340
  hyper
agggcccgggcaggcgagctgtggctgccgcatgggacagtggccactcctgtgttcatgccagtgggcacgcaggccaccatgaagggcatcacgaccgaacagctggacgctctgggttgccgc

SEQ ID NO: 130759 - DNA, 171 bp, Homo sapiens
  chr19:10812676-10812847
  hyper
cctcataatctgctaacggtgagctgaggagagagccgacgttctagggcccttctctggagtgaagggtccccatctccaccccctgacagctttgcggtggggtttcccttaggacagcggcggtttccagatggtgtcgctggtgtctctgtccgaggtgacggagga

SEQ ID NO: 130760 - DNA, 538 bp, Homo sapiens
  chr19:10828650-10829188
  hyper
gtgtatccgagtggcggtgcagcaggccagtcgcgtgcggcgcgagtgctttgggcgcagcccccggggccggggcgggaggtcgctcgggtcgggtgtcgcctgagaaccggatgaggcggcgaccgtgaggccgagccgggagcgggcgtcttgccgaggcccgggcgggcggggagcaacggctacagacgccgcggggccaggtcgttgagggtcggcggcgggcgaggagcgcagggcgctcgggccgggggccgccggcgccatgggcaaccgcgggatggaagagctgatcccgctggtcaacaaactgcaggacgccttcagctccatcggccagagctgccacctggacctgccgcagatcgctgtagtgggcggccagagcgccggcaagagctcggtgctggagaacttcgtgggccggtgagcgggcgcggcagggatcgcgggcgggtggcggcctagggcgcggagggcggaccgggaatggcgcgccgtgcgccgccggcgtaactgcggcgcttgcgtgccc

SEQ ID NO: 130761 - DNA, 30 bp, Homo sapiens
  chr19:10909167-10909197
  hyper
tcctacccccggttgcgagaggagacagag

SEQ ID NO: 130762 - DNA, 31 bp, Homo sapiens; identical to SEQ ID NO: 12036
  chr19:10929999-10930030
  hyper

SEQ ID NO: 130763 - DNA, 78 bp, Homo sapiens
  chr19:10946958-10947036
  hyper
ttctgtatgttgtccgtaaccagaggtgccaggagtgaaggacccccccactagagggcaggcggcccgaatgaatgc

SEQ ID NO: 130764 - DNA, 30 bp, Homo sapiens
  chr19:11038942-11038972
  hyper
tcagggttcacagccgcctaggcttcgggg

SEQ ID NO: 130765 - DNA, 140 bp, Homo sapiens
  chr19:11039289-11039429
  hyper
gctctctgcgcctgcgcgtctcgcctacccgtcagactccaaccgactcagacctgacagcaacatccggcgcctgtcctctttctatcctctcccgttgggaagccacttccggtaaagttggcgcttgcgcagaagag

SEQ ID NO: 130766 - DNA, 30 bp, Homo sapiens; identical to SEQ ID NO: 55624
  chr19:11071224-11071254
  hyper

SEQ ID NO: 130767 - DNA, 30 bp, Homo sapiens
  chr19:11072220-11072250
  hyper
ggcttttctggctgcgtggtaacgggtccg

SEQ ID NO: 130768 - DNA, 529 bp, Homo sapiens; identical to SEQ ID NO: 55625
  chr19:11144002-11144531
  hyper

SEQ ID NO: 130769 - DNA, 438 bp, Homo sapiens
  chr19:11199836-11200274
  hyper
taacagttaaacatcgagaaatttcaggaggatctttcagaagatgcgtttccaattttgagggggcgtcagctcttcaccggagacccaaatacaacaaatcaagtcgcctgccctggcgacactttcgaaggactggagtgggaatcagagcttcacgggttaaaaagccgatgtcacatcggccgttcgaaactcctcctcttgcagtgaggtgaagacatttgaaaatcaccccactgcaaactcctccccctgctagaaacctcacattgaaatgctgtaaatgacgtgggccccgagtgcaatcgcgggaagccagggtttccagctaggacacagcaggtcgtgatccgggtcgggacactgcctggcagaggctgcgagcatggggccctggggctggaaattgcgctggaccgtcgccttgctcctcgc

SEQ ID NO: 130770 - DNA, 461 bp, Homo sapiens
  chr19:11200841-11201302
  hyper
aactcggagctgggtgtggggacctccagtcctaaaacaagggatcactcccacccccgccttaagtccttctgggggcgagggcgactggagacccggatgtccagcctggaggtcaccgcgggctcaggggtcccgatccgctttgcgcgaccccagggcgccactgccatcctgagttgggtgcagtcccgggattccgccgcgtgctccgggacgggggccaccccctcccgcccctgcccccgcccctttggcccgccccccgaattccattgggtgtagtccaacaggccaccctcgagccactccccttgtccaatgtgaggcggtggaggcggaggcgggcgtcgggaggacggggcttgtgtacgagcggggcggggctggcgcggaagtctgagcctcaccttgtccggggcgaggcggatgcaggggaggcctggcgttcctccgcggtt

SEQ ID NO: 130771 - DNA, 31 bp, Homo sapiens; identical to SEQ ID NO: 55628
  chr19:11225129-11225160
  hyper

SEQ ID NO: 130772 - DNA, 70 bp, Homo sapiens; identical to SEQ ID NO: 55629
  chr19:11253287-11253357
  hyper

SEQ ID NO: 130773 - DNA, 74 bp, Homo sapiens
  chr19:11266485-11266559
  hyper
ctgtccgcggggcccgccctcttccagaagaggttgctttccattggattttttgatacgtcagtcataagcaa

SEQ ID NO: 130774 - DNA, 331 bp, Homo sapiens
  chr19:11308101-11308432
  hyper
gtgcacactcgatccccgaaccagacttgaacccctacccagccccgggtcccactcgccttgcgcgctccggccgctgccttccctgggtcccgccgcccgagcgtcttcgcgcgcgccgcagcctgggcgcccggccctcggaggtggctccgcccgcaccacgccccctccggctggtcccgcccccccagccggcaccgccccctccagccgcccgggcgccccggccgcggtggggggtggggatggagagacgctggttggagactggatctcacctggacagcaggtgtgtgtgcgcgccggggtgtccggcctcgtccttcct

SEQ ID NO: 130775 - DNA, 43 bp, Homo sapiens; identical to SEQ ID NO: 55632
  chr19:11373071-11373114
  hyper

SEQ ID NO: 130776 - DNA, 31 bp, Homo sapiens; identical to SEQ ID NO: 55633
  chr19:11399747-11399778
  hyper

SEQ ID NO: 130777 - DNA, 315 bp, Homo sapiens
  chr19:11456950-11457265
  hyper
ccaataattcgtcccgcctcccagctgagcccgaagccaatcgggtcgtagatctgcacctttctatcccgccctcctgggtattgactaatcgtagaaacccccctgggatcccgccccctccacgggcttttatccaattacgccgcggctactaagcgcagctgaagcgtgaaggcgccaatgaggccttcggctactccggcaggggcggaactaaaatgccggccacacccctctctgtgactcagtctctgagcgttttaatacgatggtgtccccgcgggatcaaacttcagcgtcacagctgaggac

SEQ ID NO: 130778 - DNA, 175 bp, Homo sapiens; identical to SEQ ID NO: 55634
  chr19:11465992-11466167
  hyper

SEQ ID NO: 130779 - DNA, 31 bp, Homo sapiens; identical to SEQ ID NO: 55635
  chr19:11466333-11466364
  hyper

SEQ ID NO: 130780 - DNA, 31 bp, Homo sapiens; identical to SEQ ID NO: 55636
  chr19:11466379-11466410
  hyper

SEQ ID NO: 130781 - DNA, 513 bp, Homo sapiens
  chr19:11486037-11486550
  hyper
tgctggaaaaacgggcgaatataagaatatttaacagctctgaactggttcatcctggaaccaaggaaagtatgcaaggaggcagggttacttttaaggagtctggcttcctgtgctgaatccggccctttccttctgtttctccttctagaagatccgcttccagtacccaccctcaacccgagagcttttccggctcctgtgctctgcccatgaggccccggggccagccccctcccttctgctgctcgacggcctagaagagtacctagcggaagacccagagccccaggaagccgcctacctcattgccttacttctagacacagctgcccacttcagccaccggcttgggcctggccgggattgtgggctcatggtggccctccagacccaggaggaagcaggtagtggggacgtcctgcacctggcactgctccagcggtattttcctgcccagtgctggctgcagccagatgcaccaggtccaggagagcacggcctccgagcctg

SEQ ID NO: 130782 - DNA, 1004 bp, Homo sapiens; identical to SEQ ID NO: 55637
  chr19:11491657-11492661
  hyper

SEQ ID NO: 130783 - DNA, 74 bp, Homo sapiens; identical to SEQ ID NO: 55638
  chr19:11492786-11492860
  hyper

SEQ ID NO: 130784 - DNA, 30 bp, Homo sapiens
  chr19:11494965-11494995
  hyper
ctgcctccgccggacgcagctgaccaggcc

SEQ ID NO: 130785 - DNA, 864 bp, Homo sapiens; identical to SEQ ID NO: 55639
  chr19:11529237-11530101
  hyper

SEQ ID NO: 130786 - DNA, 667 bp, Homo sapiens
  chr19:11531257-11531924
  hyper
atgaatacccagggtcatggtcggtaacatttattgcgcaactctgaggccggggcggacccagctggggagatttactgtgggaacgtctggcccggccccttcctcccctccgggcgccgctggccgcctccgttcccggtccgggccgcgttcagcccctgaaggggccccgtggggcctgcgctagacccggagggatcgggggctccgaagggggccgcctggtgggtgtcaggacgagtctaggacctccgagagcgacggtgcttcttgtgactttcgattaatttctgggaacggatcttgagtgatgcgcgggtcactacctcgttgtcctcctcctcactctcttcgtctaaggggggtggggggatgagcagggagcgatgtgggatccaggtccccatccctggctccccttccctttaccaccccactccacccccaccttggccctgaacagggtatctgacaacctcctgctacccagcttggggccccaaccgcaccccttcatccccccacccatactgaccaaaaaacttgtccttggaagtggcaaggggcagggcgatgcgggtgttgtattcgggcagccttccctctaagctggcgaggaactaagcggggatgggaagcgagagaggaaggtgggcggggccag

SEQ ID NO: 130787 - DNA, 1214 bp, Homo sapiens
  chr19:11532425-11533639
  hyper
cacgaggcccagcaggtttggcacatagttatctgcctggggatccagctcctttcccgcgaagcggccgtcctcctgcggccagggtagagccgggtcagccgagaggggtggggcctcttggaaggctccacccaggggcggggcttttctttcgggggcggggcctaggaggtaagggcccacctgcagggtcgatcctagccattgggggcggggacttaggtcaaggccacgtctgtgatgggggagcctctgaactctaactctatatgtaaaggtttcggggaggcctcttgggaacagtaaggattcgagggaggccattgtgggatggcctcctgaagaaatggccctctgctgcgggcaggataggtcttctgtctcgggctgctccagaactgcagataggtctccgagcttttcggggacagggtgggacttctttcccttggaggcggagcttgagacgggacagggtctctgacgtcttgggcttccttggggagtgagagcttccccagggaggtggggcggggactctgaggaatggggtggggcttcccctgtgggcggggcctctgacgtccgggacagaggatgtggcaggccacgttccctcgggcaagctggtgtggcaggaaccccgcttcgtggctgcgcctctgcggtcccaggagggcctgtcggggcttcccctgggcggggcctaccacagtgatgtggatcagcttgctggccaggtgctccaggctgtccttggccacttgcatcgcccgcaaggcgcgctccagctggtccttggcctcggcgtgccgccgctcctccttcttgagacgctcctgcgcctcggcttgcagtttctgctggctgcagggagccgggaggtcaccccgggggctcagcccgccccgccgccctccccagagccccggtgcctcacctcaccagcgtggcctcccccgagtacttgaggtcttccagctcccgctgcagttgttgcttctcctgcttcagcctcaccaacgtctgctcgttctcgctcttgagcgtctccaactgcgcgaaggtgtcgccctgggccaggaaccgccgcaccaacgactgcgggccacccagccccagtcagagccagggcctagggagcgtaggggcgctccacctcctctcccccaccctgcgaaccctcgcacgcaggacaggtggcctgagct

SEQ ID NO: 130788 - DNA, 180 bp, Homo sapiens; identical to SEQ ID NO: 55644
  chr19:11545951-11546131
  hyper

SEQ ID NO: 130789 - DNA, 30 bp, Homo sapiens
  chr19:11546458-11546488
  hyper
tctgcagcaggaaccgcggctgctggacaa

SEQ ID NO: 130790 - DNA, 905 bp, Homo sapiens
  chr19:11590394-11591299
  hyper
cccccgggatacgcccgggctgccgagtgggaatccgagggctcgggcgaggccgggcccccggggccctgggggcggggcctagatgggcgtgcccgggcgtggccaggcagggcgtggcagggcgggaggggctgcgcgctcgggagctgaccagctccgtggctgctgaaagcaccgagcgcggggctagcggtgcgggcgagcaggcgggcgggccgcgctcaaggtcacctcgcggcccagagccttggcgaggtggggagcctggacctggcctaagggggctgtctcggcctcccaccccatctcccggggggcggagacccgggagcccagaggtgcccccccaacccgcgggccctcctctcccctccccctccccgcagcccgaggcgcccgcgcgaggctgcggcccgcgaagaagcgccgagaaacaaagggacgcggcagcagcggcggcgggcccgcggggcctccgggcgcgccccctcctctcccctccccgcttgccgcaaggtcgacgggctcgaggacgagacgcccgcctcccgggtgcggccgaggcccggggcgcgcgatccgacgccacccgctttcccagggctctcggggacgctttgtcgctttggcttggcccagcaccagtgatcgggccctgcgtttgcctgggcggcctgcggggtctgggcctggatggaggaagcatccttagccgccgcggcccctcccccatcaggcctgctggagagggggcaatcccgcctccagggcggcgtcggacgcctcccgaatcgcagtcagtctccctaaggccctctcagaccaagctctaagcgccctcagcactctgggcgcggccctgcccactctcaggccccgaggcttggtcctacccccccaac

SEQ ID NO: 130791 - DNA, 285 bp, Homo sapiens
  chr19:11591353-11591638
  hyper
cggagcctgggcccaactcctccccgtcccgattccctttcggcgacaggggaatacctacagtgaccattcttgtgtgcccggcgggcgcggtccgtgttgaggggggctccgggggtggtgcactcctaggggggcgcccgatgctcacgctggggtcccgcccgggcggcctctggtgcggccgctgcagatgtggcgatgaaggcggcggctccctcgagggccagggacgggcccgaacccggggatgcgcgcgcggatggccgggccccggggtggcct

SEQ ID NO: 130792 - DNA, 304 bp, Homo sapiens; identical to SEQ ID NO: 55647
  chr19:11591672-11591976
  hyper

SEQ ID NO: 130793 - DNA, 1073 bp, Homo sapiens; identical to SEQ ID NO: 55648
  chr19:11592583-11593656
  hyper

SEQ ID NO: 130794 - DNA, 31 bp, Homo sapiens; identical to SEQ ID NO: 12048
  chr19:11593855-11593886
  hyper

SEQ ID NO: 130795 - DNA, 30 bp, Homo sapiens
  chr19:11616017-11616047
  hyper
tcccaggattgggccgccagagttctagcg

SEQ ID NO: 130796 - DNA, 30 bp, Homo sapiens; identical to SEQ ID NO: 55650
  chr19:11616655-11616685
  hyper

SEQ ID NO: 130797 - DNA, 359 bp, Homo sapiens
  chr19:11639726-11640085
  hyper
tcccagcgcgtccccgcccccactacgaaaggtcatggcgccctggccctgcagctgggtccctccagggctgccctctcgcgctgccgggtcctgaagggcccgcctgcagcccagcagttcgcgttcgcctacccgcgcgcgacctacctactcacgcggccagccgcggactccaggccagctctgtcttgttgctgggcgctgccatattggcccagagagcgtccgggtcagggagctccagggaggtagcaaatcaagaaagctggtgtaataggtcccgcccacaacgcgaggtgggccaataggaaggcggaaggatctgggacccgcctcataacgagccaggcccagcc

SEQ ID NO: 130798 - DNA, 30 bp, Homo sapiens
  chr19:11669715-11669745
  hyper
gaggagtcatcccccgaatctgctggtacc

SEQ ID NO: 130799 - DNA, 30 bp, Homo sapiens
  chr19:11670260-11670290
  hyper
tcagtttccaggagcggcaagtgaggaata

SEQ ID NO: 130800 - DNA, 369 bp, Homo sapiens
  chr19:11689315-11689684
  hyper
cagctgtctgcaggccctccacgggaccgcagcctgggagggcaggaggccctgcacctgcggccggtctgacctgctcctcacctccctgcctgcctcctccgtgctgggcgccgccgcgacacgtcccgcggacattcaggagtcccttcagtccctgcgagcgcggacccgggagagagctctcattcaacgctgaggccactggctcacagatctccccgggtcaccctgcgaagtgcttggtcccccccattcccagccctgcagcagcaacaaacgggaaggaagtgggtgacgaggacaggcagagacccctcccacggggccgcccgcatctcacctgccgtcgcggggcgggcgttgcgg

SEQ ID NO: 130801 - DNA, 30 bp, Homo sapiens; identical to SEQ ID NO: 55653
  chr19:11708122-11708152
  hyper

SEQ ID NO: 130802 - DNA, 30 bp, Homo sapiens; identical to SEQ ID NO: 55654
  chr19:11750346-11750376
  hyper

SEQ ID NO: 130803 - DNA, 224 bp, Homo sapiens
  chr19:11750895-11751119
  hyper
ccgggcgtcctgtccggtccccgcgcggcaactgcggcccaggttccggagtcctctctgggcagctccgcgtccgcagccccgcgtctccctagattgtgcggggacacgggagggtcatggggggaatcctcctcgggtgtggggttcatgtggaaggagcagcggtctgtggggtccccagttcctcctttgtctccaaggggctcgagtttttactgaga

SEQ ID NO: 130804 - DNA, 747 bp, Homo sapiens; identical to SEQ ID NO: 12049
  chr19:11805240-11805987
  hyper

SEQ ID NO: 130805 - DNA, 133 bp, Homo sapiens
  chr19:11849762-11849895
  hyper
cgtggagaagactccgcgggctctttgaacgtcgcaccctcctccctgcagcgtgcctgattgacagttctcacaatccccgccccctcatccctgattggatagtgctccaggtcccgccccttggtggctg

SEQ ID NO: 130806 - DNA, 650 bp, Homo sapiens
  chr19:11877699-11878349
  hyper
tctgtttatcaggttccactccgctgcccgagatcgcttcttccgttactcagtgcccgggggagggacctggcgcactatccaatcagggccgcggggcggggtcgtgagaactgtcaatcaggcgcactgaccggaggagggtgcaaggttcaaagagcccgccgagtcttctccacgcccctgcactgggctccgggttctgtcactgagagacgccctggaacgtctgtggcagcttctgtctcgctgggacccgcactgacagcgggaggcagagggaggaacctggacgccggaagccgggaaatggtgagtgtgtgaggtctggtgtcccgacgcgtgagaggagagactggttggaaccggccggaaccggctgtggtggcaccaggtcttccccgccggcgacaccctggcgcagctcggccctcggttccctcggccgcacgatggggctggggcggcagccgggaccccgggcgtcctgtcccgtccctgcgcggccactgcggccctggccctggaggcctgtctgggcagctccgcgcccgcagtcctgcgtctccccagattgtgcggctgtaaccggcacaggttcgcggcccgagtcactgcaccgagacgccgagggctgcagcagaaacagt

SEQ ID NO: 130807 - DNA, 789 bp, Homo sapiens; identical to SEQ ID NO: 12050
  chr19:11909168-11909957
  hyper

SEQ ID NO: 130808 - DNA, 758 bp, Homo sapiens
  chr19:11924844-11925602
  hyper
agggctcaaggaaggcgctcgcttagagaggctgttcgcttagagaggctgctcgcttagagaggctgctcgctcagagacgctgtggccagaacaagtcagacatgatctgcaggacccggttacccagggcttctgctgtcactcagcacggaggaggcggggcctggcgccccatccaatcaggggtgctggggcggggccctgtcaactgtccatccggggaagggggaagggacagtcgccctccgtccattcctttagtgctgcgccgacagcggtcaggatctcggctttcttgcttcgagagggactaggtgcctccaccagagcttctgtcgctctgtaacctgcactgtgacctacactagtcgcgggagccacgcagaggacgccggaacaccctggaagccgagaaatggtgtgtgtgagggggctggcgtccgggcgactgggagaggggctggaatcggccggaaccggctgaggcgggacccgggcctccacgcggcgactccggggtcgtggacgcgagtcccctcggtcgcagggtggggctgggccggcagccgggaccccgggcctcctgtcccgtcccttcacggcgactgcggccccggctccggagcctaatctgggcagctccgcgtctccccacattatgcgggggccacgggagggatatggggggatcccgcctcggatatggggtttgttagaaacaagtgcccggtgccgcaaagaaaaccagcatctag

SEQ ID NO: 130809 - DNA, 31 bp, Homo sapiens; identical to SEQ ID NO: 12051
  chr19:11950106-11950137
  hyper

SEQ ID NO: 130810 - DNA, 835 bp, Homo sapiens
  chr19:11959363-11960198
  hyper
aactatccaataacccgagtgcaggaagcagctcgtgtaagcttagagaagctgttgctagaatctgtcagtctggctccgcagggcctgatacccagggcttccgctgtcacttagacgtggggggcggggccgaacattccatccaatcagaggcactggctcggggccctgcccactgtgcatccaggcacggaggatgttgcattcctgccgtcacctttgtcgctgcgagggcggcggttgggatctggcctttccagccccgagagggacctagtgcctctacccagatttctgtcgctctgtcacctgcgctatgccctgctttactcacaggagctgtagagaggaccccggtacatctgaaagccgggaaatggtgcgtgtgctggccgggagtggtgcgatgggggaggggctgcctggaactggcgggacccgggcctccctgtgggcgactccggggtctgggaccgagtcctcctagagctgctcggccctcggtccccgcggccgctggatgtgggtgggccggcagccgggactccgggcgtcctgtcccgtccctgcccgtcgactgcggccttggccccgaagcccttttgtgcagctccgcgcccgcagcccgacgccccagcttgtgcgggggccacgggagggtcatgcgcggatttcgactcgggtgtggatttcgtccgtaggaggagcagcggtctgtggggcccacagcctccactttctcctgttaaaaattatactgaggtacgttaacaaaaagttcatttgaggaaacagccattcacgaatgagaaacacccggtcctggcttgtg

SEQ ID NO: 130811 - DNA, 1047 bp, Homo sapiens
  chr19:11998435-11999482
  hyper
accagagtgcaggaaggagctcgcccttggaaaagctgtggtcagaatccgtctgtctggctctgcagggcccgatacccagggcttccgctgtcactcagacatggggggcggggcctagcattccatccaatcagaggcattgtggcgggtccctgcccactgttcctccagacactgagggggtcgcattccttacctcacctttgtccctgcgcgggctgcggctgggatccggtctttccagccccgagagggacctggttcctctgcccaggcttctgtcactctgtcacctacgctatgccctgctgtagtcacaggaggtgtagagaggaccccgggacatctgaaagccaggaaatggtgcgtgtctggggccgggtgtcgtgagacgggggaggggctgcctggaccgaccggaaccgactgtggcgagaccctggctttcctgcgggcgactttgggatctgggaccgagtcctcctggagccgctcggccctcggtcccctcgactgctcggtgtggctgggccggtagccgggacaccaggcgtcctgtctcgtctctgcgcggcgactgcggttccagagccctctatgggcagctccgcgcccgcagccacgcgtctacccagattgtgcgggggccacgggagggtcatgtgggtgatcccgactcgggtgtggggttcgtgcttgggaggagcagcggtctgtggggcccccagtgtccactttttctcctgttaaaaattaaactgaggaacgttaacaaagagttcatttgagcaaacagcgattcacgaatgagacacacccagtcctggcttgtggtttgtcaacggaaaaagccaaactatgtaaaataaagaagtttattcggagccgaataggagagaccttggccgagggaaaaacaaccccaagaagcctggagtaagtggtcccgaggcggctcaagacagtttggttttattcattttagagagacaggaattgcagggaaaatcatgaattagtgcctggaaggtgtaatttccttag

SEQ ID NO: 130812 - DNA, 30 bp, Homo sapiens; identical to SEQ ID NO: 55661
  chr19:12035862-12035892
  hyper

SEQ ID NO: 130813 - DNA, 30 bp, Homo sapiens
  chr19:12036400-12036430
  hyper
gaggcatcctgactcgggtgtggggttcgt

SEQ ID NO: 130814 - DNA, 653 bp, Homo sapiens; identical to SEQ ID NO: 12054
  chr19:12075733-12076386
  hyper

SEQ ID NO: 130815 - DNA, 806 bp, Homo sapiens; identical to SEQ ID NO: 55663
  chr19:12098300-12099106
  hyper

SEQ ID NO: 130816 - DNA, 897 bp, Homo sapiens
  chr19:12146020-12146917
  hyper
cccccacacccgaggcgggatccccccatgaccctcgcgtagtccccgcacaatgtggggagacgcggggcagcgggcgcggagctgcccagagagggctctgggaactgggtgacagtcaccgcgcagggacaggacgagacgcccgggtcccggcggccggcccagccccactgtggggccaaggggaccaagggccgagctgtcccacgggaaatcgggtcccagaccccggagtcgccgcggggaggcccgggtcccaccacagccggttccggccggttccaaccagctcctcccccgcctcgggacccctggcccgcacgctcaccatttcttgcctttcaggtgactcccacgaccagtgcgggtcacagcacaggcgacagaagctatggcagaggcacctgaaccctctcggaggggaaagccaggctcccaacctcagctcgccgcctggagccgggaaccgaggagagcagggccttcgccctccccgatggacactcggcaggccccgcccagcgcccctgattggacgaagcgccgggccccgccccctcagccgtgagtgacaatagaagcccttggtaacggggctctgaaaacgggtttgaccggatccagcgatagattctttaagccagaggtctgtaacctttttagcaccagaaccggtttcgtggaagacagttctcctacgggggcagatagtttcggaatgaaacttccacctcagatcaggcattttatcctcataaggcgaacccaacctagatccctcgcatgtgcagctcacaatagggttcgggctcctatgacagactaatgcctctgctgatctgacaggaagcatatctctggcgataatgcccgctggctcgcccgccagccgct

SEQ ID NO: 130817 - DNA, 1017 bp, Homo sapiens; identical to SEQ ID NO: 55666
  chr19:12163010-12164027
  hyper

SEQ ID NO: 130818 - DNA, 712 bp, Homo sapiens
  chr19:12175439-12176151
  hyper
tgtcactcaggatgcagggggcggggcctggcgctccacccaatcagagtcgccggggtggggcccggccaactgtttatccgcgggtcacattgccgttcgcctcagtctttggcccctcccgccgggtgaggttggcaccccgtttttcctgctctgagagggaccggttgccaccgccatacttctgtcgccctgtcgtctgtgttgtgactgctttggacgtgggagtcacctgaaagccaggaaatggtgagtgtgagcccccgctgggagtcccgagacttgggggagggtaggcggaggctggttggaactggctggaaccggctgtgccgggacccggacctccccgcggcgactcgaggtctggggcccgagccccgctggcgcagctcggccttcggtccattcggccgccgggtgcggctgggccggcagccgggacccctgggcgccctgtctcgtcgccgcgcggcgactgcggccccagcccgggagccctctctggacagctccgcgcccgcagcccggagcctctccatattgtgcggggccacgggagggtcatgggggcaatcccgccttgggtgtggggctcgtgcgggaggagctgcgctgtgaggccctcagtgccccctttctcctgttaaaacttaaacaggcccggtgctgggaatagaggcgtgagccaccgcgcctggcctagcgt

SEQ ID NO: 130819 - DNA, 681 bp, Homo sapiens; identical to SEQ ID NO: 55668
  chr19:12203012-12203693
  hyper

SEQ ID NO: 130820 - DNA, 46 bp, Homo sapiens; identical to SEQ ID NO: 12059
  chr19:12204538-12204584
  hyper

SEQ ID NO: 130821 - DNA, 455 bp, Homo sapiens
  chr19:12250826-12251281
  hyper
cccagccgcaccctgcggccgaggggacgcagggacgagctgagacagagggattcgggtcccagatccaggaggcgcggcgaggaggcccagatcccaccacagccgcttccggccggttccacccagcccctcccccgtctggggactccggccccatacactcaccatttcccggcttctgggtgtcccggtgtcctctctagggctcccgtgaatagtgcgggtcacggtgcaggcggcagagcgacagaagttgtggcagagggacccggggcctctcggagtaggaaatctggtatcccgacaacaacctgcatagcaacaaaagtagaagctggaatgggcctcctccttccggacggaccgttggccgggctccgccccggcgcttctgattggacaaggtacaaggccccgccccctcagaactgagtgacggcagaagccctggg

SEQ ID NO: 130822 - DNA, 923 bp, Homo sapiens; identical to SEQ ID NO: 55671
  chr19:12266888-12267811
  hyper

SEQ ID NO: 130823 - DNA, 30 bp, Homo sapiens
  chr19:12273826-12273856
  hyper
cgcgccgtcggggacgcagctgcagacgtt

SEQ ID NO: 130824 - DNA, 434 bp, Homo sapiens
  chr19:12305759-12306193
  hyper
caatcagaggcgccacgtggaaggtgggtggggcaatgcggcataaaagaggtgggcgtcgtacgtcgttacgcagcgcggttgctgggcacctcgactatcacctgaccgtagtaatatctcccgctacgcgcgttgtgaccaatgctgcatacaggagatgagggaggacggccagacacctggaagccggaaaatggtgagtgtgcggggccggtgtcccgagacctgaggagggacaggttggaaccggccggaaccggctgtggcgggacccggggctcccctcggcgactctggggtctgggacccgggtccctctggcgcagctgggccctcagtgccctcggccgcagagtggggctgggctggcatccgggaccccgggcatcctgtcccgttcctgcgcgacgcctgcggccccggcctcagcc

SEQ ID NO: 130825 - DNA, 18 bp, Homo sapiens
  chr19:12306229-12306247
  hyper
cgtgtctccccagattgc

SEQ ID NO: 130826 - DNA, 2 bp, Homo sapiens
  chr19:12306298-12306300
  hyper
cg

SEQ ID NO: 130827 - DNA, 30 bp, Homo sapiens
  chr19:12405858-12405888
  hyper
gacccgacccgtcccgggaaacgtttgcct

SEQ ID NO: 130828 - DNA, 593 bp, Homo sapiens
  chr19:12444057-12444650
  hyper
ctccgaggccgggaccgcagttgccgcgcagggaccggataggacgcccggggtcccggctgccagctcagcctcactctgtggctgaggggaccgagggtcgagctgcgccagggggactcgggtcccagaccccggagctgacggcgggggaggcccacgttcgccgcggccggttctggacggttccaaccagctctttcccacttttgggacgcctgaccctgcacacgcaccatttcccggcttccgggatgttccagggtcctccctctgcctcccgctgccagtgcgggtcccactgtgacagaggctgccacagacgttccagggcgtctctcagcgactgaggctacacagacgttccagggcgtctctcagcgagcgactgagtctagagctgagcgcaggggcgtgaagacgccgcgggctctttgaacctggcaccctactgccagccgtgcgcctgattgacagttctcacgaccccgccccatagctctgattggatagggctccaggtcccgccccctgggcactgagtgacagaagaagcgatcacacagtgctgagtcgagcgggatgaacgagtt

SEQ ID NO: 130829 - DNA, 1241 bp, Homo sapiens
  chr19:12475619-12476860
  hyper
agccccactgcctcgcgggggccgccttcctgagagtcaggtcacagaagacactgaccgccggcttctgcattgtgcctggggataagatctcggagagctgctcgagttgcccaagttctttctcagatcttgaattccaacggaaaggctggcgccaagcagggtgaaaaccccacgagggaacccactcagcaggagaatgcggtttcttcacctcccgtcccaggattcgcctgtcacttccccaccaaccagcgaccccacacttcagccgcccctgtccagacccctaaacacccccatccccaaacctctcatggaggcggaactggggtcttctctcctctccccctattaaactgtttctgctgcaggccttggagtctcggtgcagtgactcggaccgcgaacctgtgccggttacagccgcacaatctgggaagacgcggagctgtgggcatggagctgccccagagagggcgcgggagccggggccgcagttgctgcgcagaaacgggacaggacgcccggggtcccggctgccggcccagcccccagctcccaccccgcggccgaggggactgaaggccggctgggccaggggaactcgggtccacagaccccgcagtcgccgcggggacgcccgggtcccgccacagccggttctggccggttccaaccagtccttcgccctgccccaggacgccgggccccgcacactcaccatttcccggcttccgcggtgtcccgtgttctccccaaggttccccgctgccagcataggactcagcgtgacagtgcctgccactgacctgccagggcttctctcagctacagagccaggagcgggagctcagaggggtgtagaaagctccaccctcctcccggcagcgcgcctgactggcagttcccaagaactcgcccccaacactgattgggtagagctccaaattccgcccccccagggaactgattgacagaagaaggatcttacacggctgagtggagcgagatgaagcggttccagacacagcccttgatagggtgggcttcctcccttcgctgtgacctgacccctcccaggggacatttgcatttaagcggaatttcctgcctgtactcaatgggctcttcctgctccttcttcctggacggggacccacaagtgtgtgctgggaattcgagactcactgcccagtggagccatcccctggcctcagagcggtaggggaggccca

SEQ ID NO: 130830 - DNA, 240 bp, Homo sapiens
  chr19:12551183-12551423
  hyper
cagcagaaaggctggcgccaaccaggttgaagaccccacgagggagccctctcagcagaatgcggtttcttcacctcctgtcccaggattcacccctcacttccccaccaaccaaggacgctacacccagccgcccccgtccagaccccaaatccctcagggaggcggatctggggtgtcctcccctctcctcctgttaaaccgtttctgctgcagccctcggcgtctcggtgcagtgag

SEQ ID NO: 130831 - DNA, 403 bp, Homo sapiens
  chr19:12551485-12551888
  hyper
cggagctgcccagagagggcgccggggccgcagtcgccgcgcaggaacgggacaggacgcccggggtcccggctgcatgcccagccccaccctgcggccgagggccgacctacgccagggggacccgggtccgtagatcccgaagtcgcccttggggaggcccgggtccagccacagccgattacggccggttccacctaacccctcccccgcctcgggacgccggcccagcacacgcaccatttcccgacttccgcggtgtcccaggtcctaccgacagctcccgctgccaatgcgtgttccagccagacaaaggctgcctcagaacttccaggtcgtctctcagctacagaacccagagccgagcgcaggtgggtggagcagacgccgcgggctttttcaa

SEQ ID NO: 130832 - DNA, 30 bp, Homo sapiens
  chr19:12552117-12552147
  hyper
gcggaatttcctgcccgtactcaataggac

SEQ ID NO: 130833 - DNA, 1143 bp, Homo sapiens
  chr19:12594999-12596142
  hyper
caggctggaggacacggtcgtgggtttgagatctggcttcccatacacttggaaaccttgagaaacgagtcctcccttgggaagaaaagagggactgaggaccccacacaacactgctcctcccacgcacgaaccccacgaccgagacgggattccctccatgaccctcccgtgccccagcacaatctggggagacgcgaggctgcgggctcggagctgcccagagagggctccgggactggggccgcagtcgccgcgcagggacttgacaagacgtccggggtcccggctgccggcccagccccatcctgcggccaaagagaccgagggccgagctgcgccaggaggactcgggtccacagacccgggagacaacggcggggaggcctgggtcccaccacagccagatccggccggtttcaacccgcccctctctcccatctcaagacccccagccccgcacacttaccatttcccagactctgggatgtcctggtgttctgtttacctctcccgcggccagcacaggtcctacctccacctgaggcccttcctccacctgagggccttctggggtgaggagaccccagagcggagcgcagcggctggtagccacgccctcgccgtttgcgcagcgcccctccgcccgccttcccggcggcgcccctgattggacattgcactcttggacccgccttcgttgcctgagtgacagctagtagggaagtcgcgtctctaagcaacctgcattcgtccggggtcaggaatctgttcccctgccacggatatttgcgtctaagcagaatttgttaacgtacccggggtcgggcactggtgtcttcctgcagctccttctgagcgcggagacacaagcgtgcacagcgcaggaaattccaggctcagtttccagaaaaaggctctttgtccacagcgaaaaaggacgcccgggccatgccagactagaacggaagggtcagacgctcccagacttagcataaggctgcgaggccattcatggatttctgactcttgtttacaaatacagacacttagagtgacagagtgacctcatcatacctaacaaagagtgactacgttttaatctttgacaactgacagggtttaggccgtcacccatccctt

SEQ ID NO: 130834 - DNA, 684 bp, Homo sapiens
  chr19:12605962-12606646
  hyper
gcacacctatgtccccgttcagaagcttcttcggtaaacgccagtgtccggtctgagggcctttatatctagcatataaagttctggtataatgcaaatgtctctggcaggacagtttcagggacaaaagtggaagctggatcgctcagctacctgacctccgtctgagatgtgactcaggcaacagggggtggaacctcacaaactgtccaattggagacgccgccggagcggtgggtggggccgccctgtacaaaggcgcgtggatacggtggcgcgatttccagtttgtgtctctcctgcctcgaacgtcgctaggtggctctgccgcagcctctgtcgctctgggacccgcactggcagagggagtcgtagttagggggtggggacaccgcggaagcccggaaatggtgactgtgcggggcctggaatcccgagacctgaagagctgctggccggaaccggctgtcgcgggaaccgggcctgcccgcggccactcctgggtctgtgaacccgagtccccctggcgtagctcggccctcggcctcctcccgccgcagagtgaagctgggccggcagccaggatcccgggagtcctgtcctgtccccgcgcggctactgaggcccgggtcccggagccctgtgtgggcagctccatgcccgtagccccgcgtcttccaagat

SEQ ID NO: 130835 - DNA, 30 bp, Homo sapiens
  chr19:12661717-12661747
  hyper
acgtttggaagactcggaggaagaccagtc

SEQ ID NO: 130836 - DNA, 249 bp, Homo sapiens
  chr19:12662262-12662511
  hyper
gaacccaaacgcagcggacacgaaacaggaagaccccgcggagttgttgaacattgcccctgtcccccttgcagagttcctgattggatggtttgcaggttcccgccccagtgcccctgattgggtgatgattcaagtcctgcccccttggtactgagtgacaggagaagcaatgcggtatgtggctgagtaaagacagattgacagggtcttggccactgcccttcgcgggccgggcttcctccttct

SEQ ID NO: 130837 - DNA, 133 bp, Homo sapiens
  chr19:12707773-12707906
  hyper
aaagggctccggggccggggccgcaatcgcagggacgggacagaacgcctgaggtcccagctgccggcccagccccacgctgctgggagaccctcgggtcagctgcgccagggggactcgggtcttcccatag

SEQ ID NO: 130838 - DNA, 74 bp, Homo sapiens; identical to SEQ ID NO: 12063
  chr19:12721073-12721147
  hyper

SEQ ID NO: 130839 - DNA, 239 bp, Homo sapiens
  chr19:12721434-12721673
  hyper
ctggacttgctcctcgaggggtcgctccatctggaaactgagactggaattcctgcgcatccctgtccccgcatccagaaacactgcaggaagacttccgtgtccgacccgagatccggaacaatttctgcttcaacacaattgtccacggagggcaccagttccgtcccaccggcggaagcgagatctgcctagctactagacctgctgcctagctgtcattcggacaaaaaggggcg

SEQ ID NO: 130840 - DNA, 30 bp, Homo sapiens
  chr19:12722327-12722357
  hyper
cccgaattcccaaacgcctacttccgctcg

SEQ ID NO: 130841 - DNA, 355 bp, Homo sapiens
  chr19:12750860-12751215
  hyper
gcaccctactccgctcacctgcgacggcagcagccagtccccacgggcggaggggacctcatgcgacattcagcccgcgagattctcagagactgctcgcccgcaacacgcagtaacgatctcaggagagcccatgatggggcggcgcgtgtcgtagccgagaagactctgtcatcgccggcgacctcctggaactctctcttgcggtttgcagccagatcacttcccatacacgcggcagccaagctcaggggatggcatcagactgaccctaggtggcgctcgaacacccgccggacctcaccagacaggcactttccccagtctacaccgcctggttcgggtcccacatgaa

SEQ ID NO: 130842 - DNA, 268 bp, Homo sapiens
  chr19:12777552-12777820
  hyper
aaaggccgggcaaacgccccgcccccagacccggccgggccaatcggggtggggggcggggccagggcgcggtctggaggctcacgggagagaggctgtagccctgggcaatcccgggggtcgttacaggaaggtaggaaaatgccaccctcagggcactggttgggctaaaggtgacactggcgtctcacgggctatgaagacggaatgcctcttaatgccggaattccaagacggaatgcctcttaatgccggtaggagcagaagt

SEQ ID NO: 130843 - DNA, 30 bp, Homo sapiens
  chr19:12779920-12779950
  hyper
tagaagctcaaccccgcccaccttaagcat

SEQ ID NO: 130844 - DNA, 30 bp, Homo sapiens
  chr19:12792208-12792238
  hyper
aggacagaaactcccgcccagaataggtcc

SEQ ID NO: 130845 - DNA, 281 bp, Homo sapiens; identical to SEQ ID NO: 55682
  chr19:12806991-12807272
  hyper

SEQ ID NO: 130846 - DNA, 30 bp, Homo sapiens; identical to SEQ ID NO: 55683
  chr19:12807482-12807512
  hyper

SEQ ID NO: 130847 - DNA, 30 bp, Homo sapiens
  chr19:12833463-12833493
  hyper
gttcaaactggtcccgccgagccaatcgga

SEQ ID NO: 130848 - DNA, 31 bp, Homo sapiens
  chr19:12834644-12834675
  hyper
aggttagggaagtgtcggcaggcgcctaact

SEQ ID NO: 130849 - DNA, 30 bp, Homo sapiens
  chr19:12844853-12844883
  hyper
aatcctgatatccacgtttcctcattctcc

SEQ ID NO: 130850 - DNA, 262 bp, Homo sapiens
  chr19:12848077-12848339
  hyper
agcctagaccgtaccgatgtgttcattaggtagggggaacccttggaaaattatagaccagaggttgacaaagtgaaccctggaagcaaagaatagtgaaaatataatttatatttctcctaaaaggcaagtaatgaggaaattaactcatgctcctagcttcgctaggaatgtgatagagaatttcccctgtaggttcttcgtatggtgcgctccgctggatcacgtgagccagttccaaaatggcggcaggggtggccgg

SEQ ID NO: 130851 - DNA, 30 bp, Homo sapiens
  chr19:12868512-12868542
  hyper
accgatgggagaggcgcccggcgacttcct

SEQ ID NO: 130852 - DNA, 155 bp, Homo sapiens; identical to SEQ ID NO: 12066
  chr19:12885825-12885980
  hyper

SEQ ID NO: 130853 - DNA, 30 bp, Homo sapiens; identical to SEQ ID NO: 12067
  chr19:12886189-12886219
  hyper

SEQ ID NO: 130854 - DNA, 30 bp, Homo sapiens
  chr19:12886609-12886639
  hyper
agatccttttgagacggaggtgctccaccc

SEQ ID NO: 130855 - DNA, 30 bp, Homo sapiens; identical to SEQ ID NO: 55686
  chr19:12889071-12889101
  hyper

SEQ ID NO: 130856 - DNA, 31 bp, Homo sapiens; identical to SEQ ID NO: 12068
  chr19:12897558-12897589
  hyper

SEQ ID NO: 130857 - DNA, 238 bp, Homo sapiens; identical to SEQ ID NO: 12069
  chr19:12899528-12899766
  hyper

SEQ ID NO: 130858 - DNA, 639 bp, Homo sapiens; identical to SEQ ID NO: 55689
  chr19:12900113-12900752
  hyper

SEQ ID NO: 130859 - DNA, 252 bp, Homo sapiens; identical to SEQ ID NO: 55690
  chr19:12902438-12902690
  hyper

SEQ ID NO: 130860 - DNA, 30 bp, Homo sapiens
  chr19:12904147-12904177
  hyper
ccaagctgggagggcggggggaaaaaaaaa

SEQ ID NO: 130861 - DNA, 30 bp, Homo sapiens; identical to SEQ ID NO: 55691
  chr19:12904379-12904409
  hyper

SEQ ID NO: 130862 - DNA, 30 bp, Homo sapiens; identical to SEQ ID NO: 12072
  chr19:12912575-12912605
  hyper

SEQ ID NO: 130863 - DNA, 122 bp, Homo sapiens; identical to SEQ ID NO: 55693
  chr19:12912809-12912931
  hyper

SEQ ID NO: 130864 - DNA, 37 bp, Homo sapiens; identical to SEQ ID NO: 55694
  chr19:12917227-12917264
  hyper

SEQ ID NO: 130865 - DNA, 30 bp, Homo sapiens; identical to SEQ ID NO: 55695
  chr19:12917469-12917499
  hyper

SEQ ID NO: 130866 - DNA, 30 bp, Homo sapiens
  chr19:12917534-12917564
  hyper
gagttcgcctgtgcccgcggtgtgccgcaa

SEQ ID NO: 130867 - DNA, 30 bp, Homo sapiens
  chr19:12936497-12936527
  hyper
ccaactcagggccacgcgtccgctaggggc

SEQ ID NO: 130868 - DNA, 126 bp, Homo sapiens
  chr19:12943482-12943608
  hyper
gggactcagcgagacggcgacacaaatgtgccgacaaacatatacagagacagacagagataacccaggcaaaggcgcggacttgaggcgacaagctcctggtgaatacccggacccagcctcgcc

SEQ ID NO: 130869 - DNA, 222 bp, Homo sapiens
  chr19:12946213-12946435
  hyper
ccaggttgggtccgcgccgtcgggtttctgagaaaagggaggaaagaggcggggcctgcacggtgtgtccccgccctccaggccggcgtcaactctcattggctcagcgccacgcgggactttaaactcccgctcgagacaccgcccccaacgcggaatgcttccactcacccacccacccactcaaccccaggcttgctctgggtccggcgatccctgtcg

SEQ ID NO: 130870 - DNA, 520 bp, Homo sapiens
  chr19:12946880-12947400
  hyper
tatatgtagacagcatcctgagttcgaatgccctgtctgcagtgtcaactattaatcctgtgcgggagaagcggaatccacttggccgagcggctctgcagctgagattggaggtggcgtctgtttacactgacgccaaagacccgaacttccgccgctccagtttgaccctttcttcgtccctagaatgtttgggggcgctagcgggtggggctgggttccaggtcttcttcgggtggtgcttaaaagccctccaggggcttaccctccaaggccggttacccggatctggacaccctgggctctgtggccagaaaatccaggtcttgatttcgcttgggccattgcagacacgcagccaggtcgactggtcctcattcactccggtcatgcaaagacagagggaaaacctggtttggattatcggtcacccgtggctcgggagggcagggctgccctttggccccgcctatatgtttgtccgttgtacaacggggtgggaggacgctgtggcccatcc

SEQ ID NO: 130871 - DNA, 30 bp, Homo sapiens
  chr19:12949032-12949062
  hyper
caacggcaggtccacgctgaccttcatcgt

SEQ ID NO: 130872 - DNA, 772 bp, Homo sapiens
  chr19:12951462-12952234
  hyper
agtttggataaggggcggggccatgcttgtgtgggtgtggtcagtcgcagagggacggtcattggggggcggagactcaggtgggcggagactcaggtgggacggacagaaaggaggagtcgtacctgaggggcggggccatcccagatgaagccagaatcgtcttggaaggggccaggctgactcggcaacgaaaaaatttagagaggcggggccacaggcgaaggggcgtggtctccccataataggcgggactagactaaagacaggacatgctgctgtttgcacgccgctttagggaacgagagacctgacaggatttgccccctctttctctcataggcagcagtcccctggacagcccccgaaacttctcccccaacacccccgcccacttctcgtttgcctcctcccgaaggtgagtccctcccctccagggccccagaaccctgggcagaccctccccaaccactgtctgggccgccatctgttctcctcctaattgcacccgagctggggcctgaggggaccagcgagtgccccaaggtctcagcgggaaggagcgcctagccttcggggcggggcctataagaaggcggggtccaatcgccgatctggaacggggaaggcggtggggctccctttgcggcaggtcgaaagcgcgtgcgccctgggcgcggggtcttagtctctccgagccttgctctcctggccaggtgtttccatagcaacaggacggggcagccaagatgacgtgcgcaagcgcagattg

SEQ ID NO: 130873 - DNA, 304 bp, Homo sapiens
  chr19:12978416-12978720
  hyper
ggcggcctgaccctgcgtgagaagacctggagagggggctctccggagatgtgagcaggggaatggcggagtttgggggcggggtcgaagggggcgtgtcttccataaccacgccccctccatgcagcaagcgattctccgcgtccgaggccagtttcctggagggagaggccagtccccctttgggcgcccgccgccgtttctcggcgctgctggagcccagccgcttcagcgccccccaagaggacgaggatgaggcccggctgcgcaggcctccccggcccagctccgaccccgcgggatc

SEQ ID NO: 130874 - DNA, 461 bp, Homo sapiens
  chr19:12991903-12992364
  hyper
tgcagccctctctgcgccgcctccccggaccctctaagagctggcagcttgtagaccacgaacctggaggtcggagaatgcacagaaataggagagagggaagagaaggcaccccagggttccccgaggaggtagccatcccggttgagtgaccgcagccggaccccggggcgatggtaggccccccgctgcgcactcaccagtctacaggctgcccggagtccccgtagcaggtcagggccccggcggggacgcacagcagcgctgccagcagcagcgggatcatagctgctatggggctgagatccaggaatctgtgtcgggactgcggggcgctgggttacatcagaggccaggactggcacctggcgcctttcacttccctaaacttgcctgggaaccggggcggggacatcacgagggtacagactcctcccccgagacgcgatgctgcgttttgg

SEQ ID NO: 130875 - DNA, 2 bp, Homo sapiens
  chr19:12995811-12995813
  hyper
gc

SEQ ID NO: 130876 - DNA, 939 bp, Homo sapiens
  chr19:12995851-12996790
  hyper
cgtgcaggcgtatggcttctcccctaggggacaaggaagccataagcgccactgtctgcccagtcatgtccccgggtcccctgcatctggccacacccctttactcagcctgggctgggactaggatgaacaaagtgaggcccctagggcacaaaatttaaggaggcactcactctcagaggccagccaagtccaagtcccgccctctgcaacccttcttcccctgtaactacagcgggcgccgcgccctttctcatgtccggggccccgccccctcacctgtgtgcgtgcgcagatgcgccttcaggtgggagctcttggtgtagctcttgccgcaacccgggtgcgcgcacgtgtgcgctgcctgcctcttgcgcgcccacgaacgtcggcctcgcttggatggcgcggtctcggctatcacacctggatcctctgcagtccccccgagtccagtgcccaccgtcccgggtcccaaacaactcaggaaggagggggacgtggcgggaccgggcgcgggtccctggagcccgcggaagagctggaagtgcccttggtactgaggcgccgggtacatcgcggggtacccggacagtagcccgtagggggcgcccgacgccgcaggcactgaaagcccggtccgcgggaagtagccacccgaggagccggcgccgggccccgggtacaccggttgcagcgccagcgccttgggctcgggggccggggctggagccagggctgggcccacgaaggcgtcgggagcccgggctcgcagggcagggcgcacccaacccgagtgatcctccgaacccaaaagcccagccaccagccccgggccgccagcatatgcgcccagagtctcgggcggcggcggatattgcgccccggaggcctcgctgggcgccagagcgcaggtctggggcgcgccaccgggctccg

SEQ ID NO: 130877 - DNA, 30 bp, Homo sapiens
  chr19:13001549-13001579
  hyper
gcccacttggagctcgtcttccccacaacc

SEQ ID NO: 130878 - DNA, 30 bp, Homo sapiens; identical to SEQ ID NO: 12075
  chr19:13001975-13002005
  hyper

SEQ ID NO: 130879 - DNA, 41 bp, Homo sapiens
  chr19:13002467-13002508
  hyper
taaggcagtgagtgcgctgtgcctgcggggccggagaaaag

SEQ ID NO: 130880 - DNA, 37 bp, Homo sapiens; identical to SEQ ID NO: 55704
  chr19:13029430-13029467
  hyper

SEQ ID NO: 130881 - DNA, 627 bp, Homo sapiens
  chr19:13029766-13030393
  hyper
aaaaaaaaaaaaaaagaaatgaaagaaacgggtgcggtgcgtgggtgtttgtgcctttctctactccgttccggccacgcgccatgtgtggaaatcagacccgtcagtgcgtcagtcagggccgggttcagtcagtcaggaaatttgaggccaggcctgatgagagggagccccaatggcaaaggacaagcggccgggctcgggtccgctggagatggctgggatcgcagccgttccctgcctatctgtccgcccgccccacgcgcgagaaggaaacaagcgccgcgtactccctgtcgctccattccgtattttcccgccttcaagctcgcaccctctgcgcatgcgccgaccccgcccctggccagctgcgctcccgcggacgagtgtgttgtgacgcgtgctcccggccccgccctctttgagaacttgcgcggccaactgggcggggccgaccgttaagcagcagtttcgcggtccgcgggctgcgcgcgcagtcggcgccccttgggagcaggacggcgcgctctgggtgcgcttgtgtgcccctgtgaggctcctgggttccacggggcgcccaggttatacggatctcagagtcctgtatttattcggtgcttctaactt

SEQ ID NO: 130882 - DNA, 50 bp, Homo sapiens
  chr19:13044623-13044673
  hyper
agggctcaatgtgtcgtcatcttgagtgtggcgacggagccgcaaaaggt

SEQ ID NO: 130883 - DNA, 514 bp, Homo sapiens
  chr19:13049934-13050448
  hyper
atcccccacttagacgggtggacttcccgctggatcgaatccaaacacaagtcagattttggcaaattcgttctcagttccggcaagttctacggtgacgaggagaaagataaaggtaagagcctaggagtgggtgctcagatccgggaggacttcctggcagaagtccttgtctgtacacacacagccgggacagtccccttggaggaggacaggtggaggaagtgggggagtcttctctattctctaagtcgagggtcctcgcgagtcaaggcccaacggtgacctcactaccgtcccgtctcaggtttgcagacaagccaggatgcacgcttttatgctctgtcggccagtttcgagcctttcagcaacaaaggccagacgctggtggtgcagttcacggtgaaacatgagcagaacatcgactgtgggggcggctatgtgaagctgtttcctaatagtttggaccagacagacatgcacggagactcagaatacaacatcatgtttggtg

SEQ ID NO: 130884 - DNA, 829 bp, Homo sapiens; identical to SEQ ID NO: 12078
  chr19:13050857-13051686
  hyper

SEQ ID NO: 130885 - DNA, 932 bp, Homo sapiens; identical to SEQ ID NO: 12079
  chr19:13054372-13055304
  hyper

SEQ ID NO: 130886 - DNA, 30 bp, Homo sapiens; identical to SEQ ID NO: 12080
  chr19:13057191-13057221
  hyper

SEQ ID NO: 130887 - DNA, 62 bp, Homo sapiens; identical to SEQ ID NO: 55711
  chr19:13067539-13067601
  hyper

SEQ ID NO: 130888 - DNA, 55 bp, Homo sapiens
  chr19:13068136-13068191
  hyper
tcgggggagggcggcgaaggggatagtatgggttttatacgtttccaagtataac

SEQ ID NO: 130889 - DNA, 132 bp, Homo sapiens; identical to SEQ ID NO: 55713
  chr19:13094455-13094587
  hyper

SEQ ID NO: 130890 - DNA, 1362 bp, Homo sapiens
  chr19:13106027-13107389
  hyper
catgtgtggcggggtccgagtcccgctgcgtgtcagcgtgtgtctgcgctggaacgcgggccagcacgtgtcagggcggccgcgtcggtgtgcgcccccgcgcgcgcgtgtgcgtgtgttcgtgtgtgtgtgtgcatgtgtgtgcttgtgtgtgtgcgccggccgccgctcccccgccctgcccgcccctccccgcgcccctcctcccgcccgcgccgcccgcccgctccctctccccggagtgcgccgcttccaaactttgtctaaactttcactttcacagcgcggcggctgcggcggcggcggcggcgggcgagggtgaccggccgagcggcggcggcatggagtagacgcgcggcggcagcggcggcggcggcggacgcgagaggcagcggcgagcgcggcggcggcggcggcagcggcggccccggagccggcggggccgagcttgcgagcggcgagcgcggagcggcgccgggccgagcgcggggccgcgggccgggcgggcgcagcgcggcggaggccggaggagccgagccggagcccgagcccgagcgcggccgccgcctgccgggcctcccctcgccgcggccggccgccgcgctcccgcccgggcgcccagctatgtactccccgtactgcctcacccaggtaccggccgccgcccccgcgcgaccgggggaggggagcgggcgcgggaggccggccggcggcgcgggcggaggggacgcgcggcggccgggaagggggggccgagagcccgcgggccgccgaggggtgcaggctgtgccgcggggagcccaggcacgcgtgcgggcgtcaccgtgcgcgtgcgaccctggccaccgggcggactccttttgggggttccgggggtggccagctgcgtcgtggcgctgcccgtggagcgcaggcgggagtgcgtgtacgtgtgtgtgtgtgtgtgtgtgtgtgtgtgcgcgctcgactggggtgcgatgggcagcgggactccggctgacctgtgggctactgtagcgcgcacccgggcagcgtggtcgctggcagtgtttgcggggttgacagagtggcaagagggtggtcccgagggcgcagaggggacactgggtcccgcgacgcttcctggggagggcgcagcggttcccgagggtggcagtggccggcgtgcgtggcggcggcccttgcgtgcggccggggtgcctggggtgggccgagcggcccgggcgtctccccaaagtctttgtttaggcctcacatgggagcggggctaagaaaatggcggggctcccaaatttcggaggggcaggggaggggagaggggggcgggcgcgctgccagcggtggccgcgcctctccgacccc

SEQ ID NO: 130891 - DNA, 30 bp, Homo sapiens; identical to SEQ ID NO: 55716
  chr19:13134239-13134269
  hyper

SEQ ID NO: 130892 - DNA, 31 bp, Homo sapiens
  chr19:13207359-13207390
  hyper
ggggcagtggatcctgcgggagtctcccggg

SEQ ID NO: 130893 - DNA, 1331 bp, Homo sapiens
  chr19:13208373-13209704
  hyper
ctggactgctccggccgcgggtctccccgggcgcccctccctggggcccagcacccctcctcgccccatccccgtccgggtacgggggcgcggcaggggtccccggcccctcccccgcagaggtcaatgccaacgaacaaacgtcccctccctccctccctctccgccccgagcgcccttctttgagccagacgccaacttgaccctcaccagcattatcaggagcgcgctcagcaagttggtagtttcctcccccctttcccggcgcccctcccgcccccattcaacatctctcatcctatccccgaccccctccggggaacaccgggaaggctcgacgctccaggacaggaccagccacgcagacaggtcgatttgcccaggcccgcgcccgcacgcacgcacgcacacggccccgcacacagccccgccccaccccgcaaccagccctgtcgactgccttatacacccgcccccgcgctggccggccgacctagtgccttgttctcacccccgtgctggcggagcggacgccgcgctctgggtcccagaggggccgggtggctcagacgacccaccactcccccaccctgaccgtgctgaacagacccccccacacgagagaaaataaaggagcaataaagtcacgagaactttcgtcccccaatcgagagcccgaggggcaccccagccccgcctctgctcccccccaccccacccaccctcggggcgcccccctccccccgcaagccagcctgggccagccccgcttcggcccctcccgggagatccgtgcgcccgaccagcaccagcatcgcggaccgcaaaggccgcccgtcccgtcaaacaagtttcttcttaggctaagaaacgcagtatatacgagtatctctatatatagtactaatggatttggtgtgcttcccccttagcgtccccctccctctgctcctcctccttcagcctggtctccccctcttctctgccctccacccccgtctctgcactgagatacataagaaacaagggtagtttactgtctgttttgttttctgggttttcagtgtcctagcggaatgcaagtaggcagccagcccgtctgttccctctccgccccgccccgccccgcccccgtcactgcgcttctgttataccatctttgcctgactctctccggcttctccattgaatggctaatgtgtatgtgaaataaagaaataaagaaaaacaaacgcgagagcgcctgacccttcgctaacgcgaccgtgcgggactgggtcggggtcggtagggtgcgtccccgacttggattctgcgcctctgtccaagcg

SEQ ID NO: 130894 - DNA, 349 bp, Homo sapiens
  chr19:13213413-13213762
  hyper
ggtgtggtttccagcgtcaggccaggctctgctgtctcgcgagggtccggcctcaatgctccaggccccggcgttgggccgcgcctcctcgtgggcctcggaaggccaggatagccgaggtctccgcgtaggtcccccccagggaaagtgagcggctcccgggccggcccgccttctccccgcccccggcggcccggtttcctccctctcacccctggcggcgcagcggccggaggatgctggcccagtgcagataagggccaggctgcctggccgcgcctgataaggagcctggctgaccccggaggaaaccagcgggcggggacctagcagcgcgggcctcccggcc

SEQ ID NO: 130895 - DNA, 171 bp, Homo sapiens
  chr19:13213789-13213960
  hyper
cggtccgccacccctcagggcttcgccttccgctcccccagccactgtagggaccccgggcctctggggacccgggccccagggcagccggggagggaggtgcctggatgcacgcagggggtaaactgaggcagggaagctgcctcctcttatgtccgagtctgccctttg

SEQ ID NO: 130896 - DNA, 30 bp, Homo sapiens; identical to SEQ ID NO: 12089
  chr19:13227406-13227436
  hyper

SEQ ID NO: 130897 - DNA, 30 bp, Homo sapiens; identical to SEQ ID NO: 55722
  chr19:13229411-13229441
  hyper

SEQ ID NO: 130898 - DNA, 195 bp, Homo sapiens
  chr19:13260760-13260955
  hyper
cctgcctctgcccccgactgcaaacccaaacgcatgggggactccggagacccctatatacccctgcgtgcgcctcccactctgcaccccgacggccttgcccagcccgccgggcacgctggggccggcacccgggcactggctggcttgggtacagagcaccctccgccctcccccgtcgttgtcactcaccct

SEQ ID NO: 130899 - DNA, 30 bp, Homo sapiens
  chr19:13261202-13261232
  hyper
ggtgcacatgcccccgccccttagccctct

SEQ ID NO: 130900 - DNA, 168 bp, Homo sapiens
  chr19:13262832-13263000
  hyper
tgaatggagccattcgaacaattctgcatcctatttttggaggaagtggaattagtatttcttggagagacggcgcgtagcggagggtagggcggagattttctatctgctctgtctctgcattgctgggtttccagctcccaacctaaccccgcctccccgaacgcg

SEQ ID NO: 130901 - DNA, 120 bp, Homo sapiens
  chr19:13263754-13263874
  hyper
aaggagtgtttggccgcgacgagttggaaagcccggatgcgtccttcggttgggcggggtgtctcagtgacgtcactgggggtataaaagggcctgggtggcgggcgcctgggcagagcg

SEQ ID NO: 130902 - DNA, 818 bp, Homo sapiens
  chr19:13264168-13264986
  hyper
cccgaggtgtcgttgccggccgccctcccctctgaccctcgcctgcacccgccccgagaagccgagtccacggccgagacagcgacccccgacggtgagcacccgtttccggagccaatggacacgcaggaggcgccgacagccgaggagacctccgcctgctgtgccccgcgccccgccaaagtcagccgcaaacgacgcagcagcagcctgagcgacggcggggacgctggactggtcccgagcaagaaagcccgtctggaagaaaaggaagaagaggagggagcgtcatccgaagtcgccgatcgcctgcagccccctccggcgcaagcggagggcgcctttcccaacctggcccgcgtcctgcagaggcgcttctccggcctcctgaactgcagccccgcggcccctccgacggcgccgcccgcgtgcgaggcaaagcccgcttgccgcccggcggacagcatgctcaacgtgctcgtgcgggccgtggtggccttctgaggaccccgagcggcgctgccggagcccagagcgcgcgtcgaaccgtcggcccgagggcgcagacctgaggcgaggccacccccctccatcctgggggaagcgcccgcgaaaaccgtggagagaagccgccgcccgggctgctgagaggcccggagagggactctgtccccggggagccatcgccttcagtgtgcagggacggcaccgaggagtctgagccgggggcgcgggcgccttccgcagagacctgcgcccacaggtgctgtcttagtggactgggacgtgaacctttcgctctccttctggactgggag

SEQ ID NO: 130903 - DNA, 1276 bp, Homo sapiens
  chr19:13265774-13267050
  hyper
tcaggggctggcagccgctcgctggggccccaagaaccggtctgaccggttaccacgtgggcgagagagggttgggcccccttttccttgcccgggcattccctaactggtggagccccgcctcccccagatttgggggttcccttgaaattgtcctacaactccgggacagggagatcggggctttctgagttgagacaatagtgctaaacacactgccccaagcggagctggggatcgattgcacgcactttgaagccttgaaaggtggtagatctcgcccccaccccctagaccaaactgaatcagctgtggccggggccctacagtatcaggtggagctgagcgggtgagctttgaagggctctttagtccccagttcccgtatcttcctcgaggaatcgttgtgtgtctcaggcagggacgtgcagcctcagtttcctcatctgtgaaatgggcctctaagcagcttctccacccggcattaggtttttaaaaatgcccattagagccctagttattttcttgggtcactccccagctctagaataaccaccccgaaacgagaaagccctttcaatataccccacgtaggtttaagagtggggttgtgggcgttgccccagggcgaagggagggggcctgtcgggaagacaaaggagtcgcaggtgcggggagtggtggcggcggcaggcgccgggaaagcgctcgccccgccccgccgacggctggctctgccgccgcaggcttcccatgaccccaggggaactgaccccgtggccacagggtagaaggaggggcaagccggcctcagaacgtctgctggtggaatctgggagctttggctcccctcccgcccaacccacaccccctttcctctcctgtgtggattgtgaaggagagcttctcaccgttctccagccaagctcgcccccacggctgcctgattccttcctgggaacacgtggggggacttttaaaaggcgccacctactccgagtcctgacccacccaactctcccaggggacgtgggggcactggagccccacaccgcaggcggtagctcaatgcacccgcgtcggagttcctcccccgcgagcgtggcaaggctcagggaagtcccgggcccctggggagggggccttgccgcgcatcctgtcgcaggaaccgccgggcccttccttccgcgggaagcggcttggccgacccccgcccccgcccgggcctcttgggggtttccggtgcccggccaccgtggggctggggactgaaagt

SEQ ID NO: 130904 - DNA, 30 bp, Homo sapiens
  chr19:13273709-13273739
  hyper
cgcaggccacgccgcggcccagttgctagc

SEQ ID NO: 130905 - DNA, 63 bp, Homo sapiens; identical to SEQ ID NO: 55728
  chr19:13274018-13274081
  hyper

SEQ ID NO: 130906 - DNA, 170 bp, Homo sapiens
  chr19:13388247-13388417
  hyper
gtagtggattagaagcggccccagagaagttcagggctgactgtatccttcttggtgatggatctaatcccccagtacccttgctttcctgggcatcctgggcgagaaatagttgctacgtggtttttttaaacactggggccaacttcctgccacggcatctcttcctg

SEQ ID NO: 130907 - DNA, 30 bp, Homo sapiens; identical to SEQ ID NO: 55729
  chr19:13507622-13507652
  hyper

SEQ ID NO: 130908 - DNA, 30 bp, Homo sapiens
  chr19:13616399-13616429
  hyper
gaactccaaaccctccggacttggctcgaa

SEQ ID NO: 130909 - DNA, 285 bp, Homo sapiens; identical to SEQ ID NO: 12092
  chr19:13616671-13616956
  hyper

SEQ ID NO: 130910 - DNA, 306 bp, Homo sapiens; identical to SEQ ID NO: 12093
  chr19:13617158-13617464
  hyper

SEQ ID NO: 130911 - DNA, 105 bp, Homo sapiens; identical to SEQ ID NO: 12094
  chr19:13617489-13617594
  hyper

SEQ ID NO: 130912 - DNA, 81 bp, Homo sapiens
  chr19:13617903-13617984
  hyper
ttcctgaatcaccaacggctgcctcttctgctcccggaggaagtgtgagtgtgtatgtgcgcacagcgtttcgctcaatgg

SEQ ID NO: 130913 - DNA, 205 bp, Homo sapiens
  chr19:13618205-13618410
  hyper
ggaaaaaaaaatgggcgcaaaggtctgaaccactggccagcaaacggaaaaggggagcaattgatgagtttaacagtagaaggacccacccagagtgtcgacacatgagggcccgcgaccaatcgtggaggctcgtggaggcgcgggggtaccgggctcagcggagtttgtgggggagagaggggagcgtcgcatggttgggagg

SEQ ID NO: 130914 - DNA, 30 bp, Homo sapiens
  chr19:13875626-13875656
  hyper
tggaggtgggagtgcgcccgcgcctgcagc

SEQ ID NO: 130915 - DNA, 30 bp, Homo sapiens
  chr19:13885305-13885335
  hyper
gcgcaagtttcaggcgcacaaacccgcaaa

SEQ ID NO: 130916 - DNA, 30 bp, Homo sapiens
  chr19:13906159-13906189
  hyper
tggcgggggagggccgaggaggccgagggg

SEQ ID NO: 130917 - DNA, 30 bp, Homo sapiens; identical to SEQ ID NO: 55735
  chr19:13953210-13953240
  hyper

SEQ ID NO: 130918 - DNA, 196 bp, Homo sapiens; identical to SEQ ID NO: 55736
  chr19:13954424-13954620
  hyper

SEQ ID NO: 130919 - DNA, 435 bp, Homo sapiens
  chr19:13961290-13961725
  hyper
cggcctgaggctcgaacccaggtccgcgctggagggcggtggcggttgccgagcaacgcgctgtttgttggcgcggggggcggggccggggccggcgcgcggtgactcaccgcggcgtgatgcggacgggcgcggcgcccagcagcctggccggcggcccgatctcggctggcctcggcgtccggaggggcccggcggcgggggcgccttagcccccaagtgggcgccggaggcccgtggggaagcggcggagcaggtcccgggctctcggactcggttcgaatcccagccctgcctcttactcttgactcttgatctgtgacttcaaggctccttgcctcagtttacccgtcagtaaaagaagcgacactggagggtgcagtaacccaccactggcatttaaagcagctgagatgatcacgcagtgacactgcg

SEQ ID NO: 130920 - DNA, 222 bp, Homo sapiens
  chr19:13975796-13976018
  hyper
tttgaggtctgcgtgcgtctgggtccctgcgtgtgcccgcccgcgcccccgtgtccctgattcccccgcgcgggccccgggagctgcgttttggagacccacgggcatcccccgagtgcgtcccggtgcgcctggcaggaggcctcgggacgcgcacggccgcggctggacccaccgcccggcgcggcgcggggaggagggagggggcggcggcagcgggga

SEQ ID NO: 130921 - DNA, 30 bp, Homo sapiens; identical to SEQ ID NO: 55739
  chr19:13976941-13976971
  hyper

SEQ ID NO: 130922 - DNA, 691 bp, Homo sapiens
  chr19:13983607-13984298
  hyper
agctgcgagagagggcgccccactccagctccagacagaggggtgggaacgtgaccccgacccggggcgggtgagagggcgggctctggggaaagggctctagaaggtgccgggaggcgggaggggggcttcgggagggcgagttagccgggatcgggcttgaggggccctacgaaattcggtttgggggcgtgcccggtcggggcggaccttagtggggggttgggcttcgtgggggcaggacgcagtcccggggcgtctatagagcaggcttttgtggagggctctaagggggcgggccctaagggagctgggctctttgaggactggcttaggggtttggcggtgggctccgtgggagtctatatgggcgggttttagagggagtgtgttctggggaacaggtcaaaagcgacggggctctaaggggcagggcctgggctggggccttggctggtggctccagactgtgggtggggctctcgggggcggggctctcgggggcgcgtcctcgggggctcggccgggttccgttgccaccaccgtgaggggtgtggtgggggggtggttcacgcagctcggcacacttgggggtccctcatctaccttggggttatgccaggcggttattttgggcctcagtattcccctcggtgaaatgccaggggccaggaaattacttatttttttg

SEQ ID NO: 130923 - DNA, 30 bp, Homo sapiens
  chr19:13990987-13991017
  hyper
gggagtaacagatccggggaccccagagca

SEQ ID NO: 130924 - DNA, 30 bp, Homo sapiens
  chr19:14017118-14017148
  hyper
tcgggatcgacggccgcggggcgccgacga

SEQ ID NO: 130925 - DNA, 30 bp, Homo sapiens; identical to SEQ ID NO: 55741
  chr19:14017419-14017449
  hyper

SEQ ID NO: 130926 - DNA, 30 bp, Homo sapiens
  chr19:14063216-14063246
  hyper
ggctttcgcccaaccggcgggccgctgtcc

SEQ ID NO: 130927 - DNA, 1344 bp, Homo sapiens; identical to SEQ ID NO: 12100
  chr19:14073500-14074844
  hyper

SEQ ID NO: 130928 - DNA, 234 bp, Homo sapiens
  chr19:14089417-14089651
  hyper
gtggggagtcagaggcgggtccctagaccgacccgtcgggcggaggtggggtctacagggcttgcggggcctggtgggcggcccagactgggcgcccccgcccccgcccgcccgctgccccccgcccgtgcgtccgccacctactttgagggccgtggcggccgtgccgaacactagcacctgggggattctctggatcctgaccctctggtcggggctggctcgggccgggag

SEQ ID NO: 130929 - DNA, 56 bp, Homo sapiens
  chr19:14089812-14089868
  hyper
ggggcggcggctccggcggcggcgtgggccggggatctcgctgctctgccttccta

SEQ ID NO: 130930 - DNA, 30 bp, Homo sapiens
  chr19:14116246-14116276
  hyper
cagaaacggtagatacgaggaaaaggttca

SEQ ID NO: 130931 - DNA, 30 bp, Homo sapiens; identical to SEQ ID NO: 55743
  chr19:14116492-14116522
  hyper

SEQ ID NO: 130932 - DNA, 30 bp, Homo sapiens; identical to SEQ ID NO: 55744
  chr19:14117264-14117294
  hyper

SEQ ID NO: 130933 - DNA, 30 bp, Homo sapiens; identical to SEQ ID NO: 12101
  chr19:14117526-14117556
  hyper

SEQ ID NO: 130934 - DNA, 30 bp, Homo sapiens
  chr19:14168332-14168362
  hyper
gctcaccggagctcccggggctcccgaggc

SEQ ID NO: 130935 - DNA, 30 bp, Homo sapiens
  chr19:14183071-14183101
  hyper
aaggcggctcctggcgccccctcgggccgg

SEQ ID NO: 130936 - DNA, 30 bp, Homo sapiens
  chr19:14183604-14183634
  hyper
acggccgccactgccgccacaggtgcctca

SEQ ID NO: 130937 - DNA, 30 bp, Homo sapiens; identical to SEQ ID NO: 55746
  chr19:14184728-14184758
  hyper

SEQ ID NO: 130938 - DNA, 30 bp, Homo sapiens
  chr19:14192733-14192763
  hyper
aggtcggtggccagcgtgggcgtgggctcc

SEQ ID NO: 130939 - DNA, 30 bp, Homo sapiens
  chr19:14201139-14201169
  hyper
gtagtgcggggaagcggcggacgacgaggc

SEQ ID NO: 130940 - DNA, 175 bp, Homo sapiens; identical to SEQ ID NO: 55747
  chr19:14202316-14202491
  hyper

SEQ ID NO: 130941 - DNA, 31 bp, Homo sapiens; identical to SEQ ID NO: 12103
  chr19:14205671-14205702
  hyper

SEQ ID NO: 130942 - DNA, 30 bp, Homo sapiens; identical to SEQ ID NO: 12104
  chr19:14228458-14228488
  hyper

SEQ ID NO: 130943 - DNA, 30 bp, Homo sapiens
  chr19:14229451-14229481
  hyper
ctgctcctgttccccgtctgtatttcctgt

SEQ ID NO: 130944 - DNA, 31 bp, Homo sapiens; identical to SEQ ID NO: 12105
  chr19:14306908-14306939
  hyper

SEQ ID NO: 130945 - DNA, 49 bp, Homo sapiens; identical to SEQ ID NO: 55751
  chr19:14316560-14316609
  hyper

SEQ ID NO: 130946 - DNA, 30 bp, Homo sapiens
  chr19:14317591-14317621
  hyper
gaccgagccggcgccgggcaccagcaatga

SEQ ID NO: 130947 - DNA, 30 bp, Homo sapiens
  chr19:14358446-14358476
  hyper
gcctaggaggggagccgtcctaattttggc

SEQ ID NO: 130948 - DNA, 170 bp, Homo sapiens
  chr19:14358694-14358864
  hyper
ttgggagctcccctacggcgaagcaggaaggctgggaagtggggggccttgaaactctcttcgtggttgcccgcggaggatggaggaaaaggcggggaggaggggggctgaggttggtctggggtcactggtggggcgctgggcaggtggagacccgtgttgagttctcg

SEQ ID NO: 130949 - DNA, 30 bp, Homo sapiens
  chr19:14359145-14359175
  hyper
cggcgggagggtgcacggggaccaggagag

SEQ ID NO: 130950 - DNA, 30 bp, Homo sapiens
  chr19:14359656-14359686
  hyper
tggggagggagccgcgtgcaggccatggaa

SEQ ID NO: 130951 - DNA, 30 bp, Homo sapiens
  chr19:14360457-14360487
  hyper
ggcggcggcagctcccggcagtgccccccc

SEQ ID NO: 130952 - DNA, 444 bp, Homo sapiens
  chr19:14516820-14517264
  hyper
ctcccggggctcagtcgggtaggcgggccctggaggcatgaggccccgcccctgtccgggatctggccccgcccaccggggggtcgggttgtctctttaaagggcgctggctttggagctgcctggccacaccccgagtgcccgctcgcttctgagcgttgttgggggtgggccctggggggaaacctggcccccgctccagacccgcccaccctccggctgtggtcccgcccactctcgggacctggcaggcgactggctctggcgccgcatgcccctccccgcgctgacgtcgctccgcccctccgtccccgccccgcaggtggggctgcgctgccgcctggtggccgggctgctgcactactgtttcctggccgccttctgctggatgagcctcgaaggcctggagctctactttcttgtggtgcgcgtgttccaaggcca

SEQ ID NO: 130953 - DNA, 30 bp, Homo sapiens; identical to SEQ ID NO: 12106
  chr19:14529908-14529938
  hyper

SEQ ID NO: 130954 - DNA, 30 bp, Homo sapiens
  chr19:14530356-14530386
  hyper
cgacagactggctccgacagcgcgcggtct

SEQ ID NO: 130955 - DNA, 215 bp, Homo sapiens; identical to SEQ ID NO: 55753
  chr19:14542784-14542999
  hyper

SEQ ID NO: 130956 - DNA, 30 bp, Homo sapiens
  chr19:14544021-14544051
  hyper
agggggcggacgggcgggaccccgcagccc

SEQ ID NO: 130957 - DNA, 14 bp, Homo sapiens
  chr19:14583047-14583061
  hyper
gcggagccccagcc

SEQ ID NO: 130958 - DNA, 362 bp, Homo sapiens
  chr19:14583153-14583515
  hyper
gcgccctcttctggtaggccccggaactgcatccaccctggaggcgcacgcggcgtccctgcagccccccgcgcggccccagtggatgccgaagccccgacgggacacacggtcctgcctgggctcgcagaatggctttttattcccaaaggctctgcgccgcgcacctgggcccagcccagggtgggctggcttagtcgttgggcctctggttgtgcttagaagtggctgaggccgctgtgccgggagctgcgcagcgagctggcctcccaggcgctcggtgttaggcccagccccgcggggccgcccttggctccggccctcgggggcaagaggcgaagcagttggcgcagcacggcctg

SEQ ID NO: 130959 - DNA, 188 bp, Homo sapiens
  chr19:14583613-14583801
  hyper
cgccgacggccagcgccaccaacacctgcgggggaagccggtgtgagctatagagcaggcgcgggcgcaggggggcgcagggatggtgggggcgtggctggaaggtaaaagcctgggaggaggggcgagccgtcgcagggagggtaaatggggatccagatgagaaacggatgcggaaaaaaaagggg

SEQ ID NO: 130960 - DNA, 245 bp, Homo sapiens; identical to SEQ ID NO: 12108
  chr19:14584167-14584412
  hyper

SEQ ID NO: 130961 - DNA, 353 bp, Homo sapiens; identical to SEQ ID NO: 12109
  chr19:14584536-14584889
  hyper

SEQ ID NO: 130962 - DNA, 248 bp, Homo sapiens
  chr19:14586095-14586343
  hyper
gtccccatcaccggccgctcagccctgccgcccactgcgccctggctctccggcaagccgcttcctccctccctcttcctggggcggctcctcagctcctcccgccgcccttgctggcctccaggggccgctccaccccgcgcacgcccgctgggggcctggagtggcagagacccccctctctgctcctggcaatgggcgggggccactctgggccccagcggctccctccacgaggagtgaggctc

SEQ ID NO: 130963 - DNA, 30 bp, Homo sapiens
  chr19:14606789-14606819
  hyper
aggcccgcgacccccgaggcccccggagca

SEQ ID NO: 130964 - DNA, 144 bp, Homo sapiens
  chr19:14607037-14607181
  hyper
gcttcgggtggacccgacggaaacattccagagggatccctccgcctcgcccggctcttcccgactcctcccctcgccgcgaagcagtggaccgttccgccccgcctaagccgcggctggctgtaccaccggagggctgaggag

SEQ ID NO: 130965 - DNA, 118 bp, Homo sapiens
  chr19:14629109-14629227
  hyper
cgtccgacgcgccgcgggccaggcccaacgtctggtagtagtctttacccatgaccccctcctgcggcccgccgacccgctgtcgccgtcccccggctccgccgccgaccagtcccgg

SEQ ID NO: 130966 - DNA, 269 bp, Homo sapiens
  chr19:14640085-14640354
  hyper
ttaccccgcccccgcgtctggcctaaccgtcgcttaccttggtttccacagcgacgccatcagggggcgtggcaaagggacgcgcggggcagagacctcctttggattggtggatggtcaagccccttctctttagcccctcctacaggcgttccgcccccttcgattggtctcgcaagttgattggtcaatcccctggtgctagtcctagtcttggttcggaccggccccaaggagcaggggcgaacgtgggcgcctcgtgccctgat

SEQ ID NO: 130967 - DNA, 141 bp, Homo sapiens
  chr19:14682851-14682992
  hyper
acctagctcctacccggaaccactgacccctcagtcagacacagcttccgggtcatttaggcagctgcggagatcatagagatgaaggactccagaggatcgctccggtccgcctggcgtcacctcgcggacaggcggagg

SEQ ID NO: 130968 - DNA, 30 bp, Homo sapiens; identical to SEQ ID NO: 12112
  chr19:14800715-14800745
  hyper

SEQ ID NO: 130969 - DNA, 38 bp, Homo sapiens
  chr19:14886822-14886860
  hyper
cgggcgcccctcccacaggaaaacgctgtggccgcctg

SEQ ID NO: 130970 - DNA, 198 bp, Homo sapiens; identical to SEQ ID NO: 12113
  chr19:14887409-14887607
  hyper

SEQ ID NO: 130971 - DNA, 758 bp, Homo sapiens
  chr19:15089970-15090728
  hyper
ccctctgacagagaaggcaaccgagccctataaatgcacaaggcatcgggctcggtgctggaaacgtgcctgtgtgcggaggccacgggttggggaggtggggagacgggcagggagacccggggataactaaggggataggaaactcaccagaacgaccaggagaaaagcggtggcaacggctctaaggggcaagcaggagctcagagacaaagggcggcggagaagtggggacgtgggcgcagggagcgccccacacgcctgaccccagcgcctcggatcccccacctgcccgcaacctccgcgccgcagccacaccgagtccccgcgccgagccgcggagtccccactcaccggcgtccggagcggcgggggcggcctgcccgcgcctcggcctgcgcgctgcgcccggatgcaggagccggagcccggcgaagcgcccggccggggccgcggggacccgccagggactgtgcagcaccggcgcggggaccggaccgtggaggcaccggcgcggagccgggacgcgctatgctgcgggagggatccgggccggccctgcgctcacgtgggtgtgggggcaccgagcggccgggggagggggcgggatcccctccgcgatgccctccgcctcccccgcgcccagcccaggctccgcagccgtgtgggagaagggggacagcgtgcttgcgaagggagggggactgggggtgggcgggggtgagtggcctctccggcatccagcccccgccccctgc

SEQ ID NO: 130972 - DNA, 344 bp, Homo sapiens
  chr19:15090745-15091089
  hyper
cgcccccgccccctaaaccgcctccggagccctcggaggccccagcatccctggcggagcgcggggaacaggccctggcaccgcgggacccgctccagcagcctcggcggaggcctggggaaggcgcggctctagtgtcccagtaacaacagccagggagagggctccgctgcccccttctccttgcgggtgcaccttccggccttggccacttggctgctgtgtgcccttgggccaactcctctccctctctgagcctggcttcctccgctaaacaaggaagatggcttggccgaccccacagaaaattaaagctgagaaaattaaagcgcgtgaggctggaa

SEQ ID NO: 130973 - DNA, 615 bp, Homo sapiens; identical to SEQ ID NO: 55765
  chr19:15121587-15122202
  hyper

SEQ ID NO: 130974 - DNA, 220 bp, Homo sapiens; identical to SEQ ID NO: 12116
  chr19:15218124-15218344
  hyper

SEQ ID NO: 130975 - DNA, 30 bp, Homo sapiens
  chr19:15218564-15218594
  hyper
ctccttgggaggcccgggagggggcctcgc

SEQ ID NO: 130976 - DNA, 354 bp, Homo sapiens
  chr19:15235614-15235968
  hyper
tccctctggactagtcggggctcgctttcccaccctgcacaatgagtgagctggaagcagcaccacgaggcccctccctctttgactgcccccagcccacctcccattctgtgccccgcaccttgtgcagcagctgatagaagagccccaggcggtgagcggcgcccagcaaggcggccaccagcgtcccgcaggccaggagcaggaaggaggggaataagctcccagcgggggcggcggccgcgggggtctccatgaggtggtacctaagagagaaagggcacttcccagacttgggcgcgacagggaacctctccggaagaaatcgcgccccttctcgcagcaggatccagg

SEQ ID NO: 130977 - DNA, 602 bp, Homo sapiens
  chr19:15288254-15288856
  hyper
tggaaagagaggcagggcccacggacaaacagactgggatggatgcatagacagacggatcgatcgggtggatgggctcacttgcaagtgcgctcgcggccaccggcgtggcagtcgaagttgtcgtagaggcaggcgggcgagctgcaggcggggtcgcagcggctgttgttgaagaggcgccagcactgcagcgcctcgcattgccgccaggggtcgcccacgctcagcgagcagtcgccgccgtcccagccgcagcctgggctgttgcactcgcggtcgcagcgctggtccccgcgcttggcctggcaggcggcgcgcgggcaccgcggctcctccgagacctcgggtgccgcggcgggcgcctcgcagcgcggcccggtccagccctgcgcgcaagcgcagcggaagaagggcgcgagcggcgcggggcggcaggagcccccgtggagacagggggcggccgcgcagctggcgttgctggcccccggcggcgaccccgggaagctgcggcaggagggtcccgacaaccctggggggcaggcgcagcgcggcccgcggggcgtctgctggcatgggacgcccaccgggcactgcagctc

SEQ ID NO: 130978 - DNA, 368 bp, Homo sapiens; identical to SEQ ID NO: 55769
  chr19:15306317-15306685
  hyper

SEQ ID NO: 130979 - DNA, 837 bp, Homo sapiens
  chr19:15310945-15311782
  hyper
gccccttcccctccccgcgcaggggcggggtcccagggcctccgggtccccgcggccagaggagagaggcgggctgcgggcgggggagggggcgcgcgcgccgccgaggctccggctcggaatccggctccgggtcttgctgcgcgccggcctgggaagttttctccgagttcagagctcccagaacttcgcgccccctccccaccccccgcctggcccagcccgcccggggtgtcgggggcggggtgggggggcttttgtgcgagaggtccccggcctagaagtacctgggcccccaatcataacctacccaggactccaggcgtgagttggatggggacgagtcccgaactctgtacgcacccccccacctcgagtccctgatccccgcacctcgagctcccagtctcggactcctgggtcccttcatcttcagctctaatcgctcaagggtccctgttccttgggcctctggggtcctccccattctgaatctctgggtcctccaggactggcatgaagcccggggctcctgcgccccttccccgaccctggttcctgcctcccatgaacccccgccagccccggccttgggggttcttgcactccccctctgccgccctcgtcccatccgccaggtcccggcccctcacctgcagcccccggccccgctagcagcagcagcaggggcagcgcccgcacgggtggcggtggcggtggcggcgacatcgggcgacggcggcggcggcggccacgggcccccggccccatggcggccggccgcgaccctcccctcctccctccttccctgggctccgggcgcgtcccgggccagcc

SEQ ID NO: 130980 - DNA, 741 bp, Homo sapiens; identical to SEQ ID NO: 12120
  chr19:15334101-15334842
  hyper

SEQ ID NO: 130981 - DNA, 706 bp, Homo sapiens; identical to SEQ ID NO: 12121
  chr19:15342706-15343412
  hyper

SEQ ID NO: 130982 - DNA, 122 bp, Homo sapiens
  chr19:15344008-15344130
  hyper
cgggacctaatatggcgggtcaggagggtctggaagacgaagaagagggacaggcaatgccaggtctaggactaggagggaggcgcgggcggtattagcggctggaggaggcttcgggaggc

SEQ ID NO: 130983 - DNA, 30 bp, Homo sapiens
  chr19:15399512-15399542
  hyper
gaggaagtcaacgcccgagggtggccacta

SEQ ID NO: 130984 - DNA, 88 bp, Homo sapiens
  chr19:15479820-15479908
  hyper
aggccagggacggacgctgaaaaaaggttggagaagcatctgaactgtaacccctacccctgatgccagtcccgagactgtcccacga

SEQ ID NO: 130985 - DNA, 30 bp, Homo sapiens
  chr19:15479910-15479940
  hyper
atggcgaccggcgtgcgctgctcagaagcc

SEQ ID NO: 130986 - DNA, 30 bp, Homo sapiens
  chr19:15480786-15480816
  hyper
aaagtgttggctgatcgccacggtcaaggc

SEQ ID NO: 130987 - DNA, 118 bp, Homo sapiens
  chr19:15490555-15490673
  hyper
cccaccagcagccccgtttactaggcgaccacagcacgcatgcgttcagcgcacctccgccatcgactactggaagaccaggcgcacacgtcactacttccgcgcgcccccattggct

SEQ ID NO: 130988 - DNA, 308 bp, Homo sapiens
  chr19:15529684-15529992
  hyper
ccccacgcagagcccgaccccaccctgccaggcccacctgtgtagctcatggtggcgggcaacacaacatccgacgacgccggcttctgctgctctgaacatccgacgctgcgatagctgctgctaaccacagggtcccctccacacacacccgagccccgcctcccgaccgcattggctcataccggcctcggcttcacgtctattggaaggaaccgctgtctatctctatgcctcctcatatcagtggctggaagctgctggcaatctcgtgagagccccgccttgtccccgccttctgttattct

SEQ ID NO: 130989 - DNA, 30 bp, Homo sapiens; identical to SEQ ID NO: 55776
  chr19:15560159-15560189
  hyper

SEQ ID NO: 130990 - DNA, 391 bp, Homo sapiens; identical to SEQ ID NO: 55777
  chr19:15619209-15619600
  hyper

SEQ ID NO: 130991 - DNA, 30 bp, Homo sapiens
  chr19:15667323-15667353
  hyper
ggtcctgtcgctggcggctgtgggacctcc

SEQ ID NO: 130992 - DNA, 37 bp, Homo sapiens
  chr19:15694859-15694896
  hyper
catctgtcttatatgcgggtggctgggtgtcctgaga

SEQ ID NO: 130993 - DNA, 512 bp, Homo sapiens; identical to SEQ ID NO: 12122
  chr19:15695277-15695789
  hyper

SEQ ID NO: 130994 - DNA, 30 bp, Homo sapiens; identical to SEQ ID NO: 55779
  chr19:15947133-15947163
  hyper

SEQ ID NO: 130995 - DNA, 30 bp, Homo sapiens
  chr19:15947373-15947403
  hyper
ttcggggggaaaggcgggactggggagccc

SEQ ID NO: 130996 - DNA, 30 bp, Homo sapiens
  chr19:16152477-16152507
  hyper
accctcgcagggtgcgtttctcaatccaga

SEQ ID NO: 130997 - DNA, 826 bp, Homo sapiens; identical to SEQ ID NO: 55780
  chr19:16186793-16187619
  hyper

SEQ ID NO: 130998 - DNA, 655 bp, Homo sapiens; identical to SEQ ID NO: 55781
  chr19:16187640-16188295
  hyper

SEQ ID NO: 130999 - DNA, 256 bp, Homo sapiens
  chr19:16222188-16222444
  hyper
gcgagctgtgagggcgggacccagagacacccgccccaactactggcgtgcgccctctgctgtcgcctaacggaactccgggcgcgcgtgcgcacgcaccccaagccacgccccgccaggctgccggcgcgcgagcggttggcgccgctccctgccttccctctcctacagtggggcggggccgggccgcccgagtcgggggtggaaggcgggggccacataatgccacgcccccgcctcgtccccatttgaagcc

SEQ ID NO: 131000 - DNA, 214 bp, Homo sapiens
  chr19:16222493-16222707
  hyper
cggccaatgggaggtgcgctcgggctgcttccggctccgcgctccgctcgccccctcccaaggtctccccgcgactggcgggacgcaggggcgggcgtcggccgcggtgacgcgcagcgggcctggagccaataaggggcgggctcggtgctgatggacggtgctggtggccagtggagaggcgctggccgcacttcccgtcggggagagagtg

SEQ ID NO: 131001 - DNA, 30 bp, Homo sapiens
  chr19:16223136-16223166
  hyper
agcagccctcgaagcggttcttttgaggct

SEQ ID NO: 131002 - DNA, 236 bp, Homo sapiens
  chr19:16296080-16296316
  hyper
ttggctctctgtcccgcccactacccggaagtgtggcccgggtccagaaccaagagcgcatgctcaccttgtagctcagccaatcaaagagaagcgaggcggccattcgggcggaaatagtgtttgcaaacaggaagtgtggcactccagctaccgaagcactggagagtgtcatggaggcctacgagcaggtccaaaagggacccctgaagctgaaaggcgtcgcagagctggga

SEQ ID NO: 131003 - DNA, 30 bp, Homo sapiens; identical to SEQ ID NO: 55784
  chr19:16296639-16296669
  hyper

SEQ ID NO: 131004 - DNA, 179 bp, Homo sapiens; identical to SEQ ID NO: 55785
  chr19:16308330-16308509
  hyper

SEQ ID NO: 131005 - DNA, 30 bp, Homo sapiens; identical to SEQ ID NO: 12127
  chr19:16436107-16436137
  hyper

SEQ ID NO: 131006 - DNA, 89 bp, Homo sapiens
  chr19:16583043-16583132
  hyper
gccgctgtccgagtcgaccatgctgtgtcatccctccagcccatgccgaggcctggttctctgttagggatgccgtccccctgccagtg

SEQ ID NO: 131007 - DNA, 410 bp, Homo sapiens
  chr19:16606940-16607350
  hyper
gggggtgtgcactgcgcttccggtcgccgccaccccttagctcccagctctctctgcggctcttcaggcgcgtcccgaaactacaactcccgtcacaactcgcgattatgacctgagggtcccattggtcgctgcggcgcggggcacgttgggcccgccccggaactaccgctcccatgacaccccgcgattgtgattcggggcgccattggtctgcggggcgcggtgcttcccgggagatgtagtctcttctgctctggctctgttgcccagggcaaccgctccttcaggcgtgaatgtggcggctgcctctgcgaatggacggcgtgggaagaggtcggcagggctggtggggaggtgacctagctgggcgtccgggctcgcgagggggatacggggaaatggggcct

SEQ ID NO: 131008 - DNA, 194 bp, Homo sapiens
  chr19:16638140-16638334
  hyper
ttgtgaggttcaatttcgtgtcctgaagctggggatgggaggctcaaagccacaaccaccaagtctcagtccagagccagtctccttgccatccttacacctgtccctgcagacagggagtcacctggaaaggccacgctgcgaagccaaccaggccccacgggcaagggggaaagtcacgccctggaagaccc

SEQ ID NO: 131009 - DNA, 30 bp, Homo sapiens
  chr19:16652665-16652695
  hyper
ccggaggggactcacgctgctgctgctcca

SEQ ID NO: 131010 - DNA, 30 bp, Homo sapiens
  chr19:16770777-16770807
  hyper
gttcagcaccgccccggcattcatcagcaa

SEQ ID NO: 131011 - DNA, 62 bp, Homo sapiens
  chr19:16771041-16771103
  hyper
ggctgggagggtcccgccctctgcaggccagacccccttaggggagcgcgagcgccccacct

SEQ ID NO: 131012 - DNA, 30 bp, Homo sapiens; identical to SEQ ID NO: 55790
  chr19:16771323-16771353
  hyper

SEQ ID NO: 131013 - DNA, 673 bp, Homo sapiens; identical to SEQ ID NO: 55791
  chr19:16772105-16772778
  hyper

SEQ ID NO: 131014 - DNA, 30 bp, Homo sapiens; identical to SEQ ID NO: 55792
  chr19:16830271-16830301
  hyper

SEQ ID NO: 131015 - DNA, 334 bp, Homo sapiens; identical to SEQ ID NO: 12131
  chr19:17007054-17007388
  hyper

SEQ ID NO: 131016 - DNA, 345 bp, Homo sapiens
  chr19:17007446-17007791
  hyper
cggcagggcccgactcgccggggaaccagcctgggggacgaggcaggctcgacagaccccccaccctgaaccttgcccgcgcccccacagaacctgggggtggggaagatgtccctgggtcccgggcccactaccccctcggtgggtcttggggcgcgacagttaatgggaggtcctgagccctggccttatggaatttcacgcaggtatttgcctaatacttacaaaaacagaaacagacttttaaaaagcggttgtaggagagaaaggagacagggcgtcctgtctgggccgccctgcaacaacagccccgtcccctgccgcgcctcctccgcactgaccaca

SEQ ID NO: 131017 - DNA, 385 bp, Homo sapiens; identical to SEQ ID NO: 55795
  chr19:17008133-17008518
  hyper

SEQ ID NO: 131018 - DNA, 113 bp, Homo sapiens; identical to SEQ ID NO: 12134
  chr19:17008585-17008698
  hyper

SEQ ID NO: 131019 - DNA, 31 bp, Homo sapiens; identical to SEQ ID NO: 55797
  chr19:17008820-17008851
  hyper

SEQ ID NO: 131020 - DNA, 257 bp, Homo sapiens
  chr19:17137101-17137358
  hyper
gtcacacgaagggggcgaggtggggcggggggagctgacctcagcacctttagcttttgggagtccctgtacctccacagagccacttcggaaactttagggcgccccctcctcaagacgattcgggaacaagaggccaggtccagcccagcgcggaggctgtgtggccttgggcaggtcgctgcaacactctgagccagtacccgcgacccccaccccagaaggcgaccgacctcctctgtcgccggaggatactc

SEQ ID NO: 131021 - DNA, 77 bp, Homo sapiens
  chr19:17137591-17137668
  hyper
atgcgccccgctccgcgcccggccaagctggggcagccccgggccagccccctccccggacccgcctcgtctccggg

SEQ ID NO: 131022 - DNA, 30 bp, Homo sapiens
  chr19:17186152-17186182
  hyper
ctccagccctatggcgtctacaaatccaga

SEQ ID NO: 131023 - DNA, 81 bp, Homo sapiens
  chr19:17326049-17326130
  hyper
ccggcccagcgccccgtctcaaaacaagatattacttccgctccaaacaaagatgggccagctaacgagcgcgggggaaac

SEQ ID NO: 131024 - DNA, 612 bp, Homo sapiens
  chr19:17355713-17356325
  hyper
cggggtgcacggcggcggcgcgcggatggggggctcaccggcaggtgtagctgaggttgcggcggatgcttcgcttgaaaaagctcttgcagccctcgcaggtgaagacaccgtaatgcttgccgctcgacttgtccccgcacaccacgcagtccacctgcagccccggccgctcctcgtcgcccggctcggcgtcgctggcggcaccggggggcgaggccgagtcgtcctcggccgcgcgcgggtagccgcccgccttgtccacgccgttcgtgtcgccgccggggccgccccagccgccggtcaccatggccatagccccagggcagcggggccggggcgcccccaccgcgctcttccctccgggcacccctctcggcccgggggaccctacgcggcgcgcattcggccccggcgcgcggggggcacgggctgcaccccccaaaaaagttttgcagcaacttcctgcggccggtcctcgcgcccgggcggaactggtcgggccggttccaggccaactttcccacgcgtgcgcggggccgggcccggggccgggaggggcacgctagaggcgcgggccgggggcccagaggactcgcgtcccgccgccct

SEQ ID NO: 131025 - DNA, 266 bp, Homo sapiens
  chr19:17357469-17357735
  hyper
ggcgcccacccgccccgcgcggctggaggcgacaggcatgccctgtctgggggcctgcccctttttcccttttaatttccttttctttctgtgctttgcagaaagggcttggcctggcggccggctggactgcagatgtctcttccaggcgccctggagcctcgcagctgccgccacctccaactcaccccatcccccagtaccggggctggggcccgcccgaccagcatttattaagcaccctttgtatgcgaggcccgggctgg

SEQ ID NO: 131026 - DNA, 147 bp, Homo sapiens
  chr19:17378081-17378228
  hyper
attccaggtcccgccgcacccagctccaggcagctctcactccaaaccccacccccaacccagtttcagcctatcagtttccaagttctttctagcctcaaccagtttctgtctctgcttgttctgcagcccgctgaactacatttc

SEQ ID NO: 131027 - DNA, 30 bp, Homo sapiens; identical to SEQ ID NO: 55801
  chr19:17389688-17389718
  hyper

SEQ ID NO: 131028 - DNA, 528 bp, Homo sapiens
  chr19:17392398-17392926
  hyper
gtagctccacccactcgagccgggtgccttcgcgtttcccgtttttaaatgagatagtggcacacccggtggcatcctcccacccgggctcttatcggcggtcccagaccctgcttgagcgcctccgggtgtcaagggcccctgaggacactaaagctctcgaaccccgatgtggacccccgtgcggcgcggggcagcctggctgggaaccctgctcggccctggagaggggccccccgagccgaggggaggagcggcgcatgcccacaagccccccgcgggaagtaggaaatcgaccgaccaggcggtgcgcttcggacccagccagggcatgtgctcggaggcccgcctggctcgcaggttgcgggatgcgctgcgggaggaggagccgtggtgagggcggggccgggggcgggccaggagtgggggtctttggccggggtccactctgaccgcggtgtttgcagggcagtagaggagctgctgcgctgcggcgcggaccctaatttggtgctagaggacggcgca

SEQ ID NO: 131029 - DNA, 88 bp, Homo sapiens
  chr19:17393042-17393130
  hyper
cggggtctccccaagccgaagtctgggaatccgggaaggggcgccccatcatcccgggccaggcctcggggctcgagggtggggttta

SEQ ID NO: 131030 - DNA, 30 bp, Homo sapiens
  chr19:17420024-17420054
  hyper
tgagccaccgcacccggccgaacctcgcat

SEQ ID NO: 131031 - DNA, 140 bp, Homo sapiens
  chr19:17420264-17420404
  hyper
gcggccaatggaagcgtgcaaagcgctcctatgtgggggcggggctagactgcacaccaatgacagggaggtggtggcgccatcagtgtgggctgtgccgtggctggaagttactgtgaggcggcggctaagaaggcggc

SEQ ID NO: 131032 - DNA, 30 bp, Homo sapiens; identical to SEQ ID NO: 55805
  chr19:17445058-17445088
  hyper

SEQ ID NO: 131033 - DNA, 30 bp, Homo sapiens
  chr19:17445662-17445692
  hyper
tctccttcccggcccgatgcacgtcactct

SEQ ID NO: 131034 - DNA, 513 bp, Homo sapiens; identical to SEQ ID NO: 55806
  chr19:17448122-17448635
  hyper

SEQ ID NO: 131035 - DNA, 324 bp, Homo sapiens
  chr19:17501235-17501559
  hyper
gggtgcctctatacacgtccccgcagaccccccccccatatgtgtcctccaggccgacgcccccttccggcagggggccgactcaccctcgtgcgcgccgcgccggccgccggcagcccccggagggtccggagcgagagcgcgagcgagggctgggccggggtcgggaccccgagcggggacgcggccggggcactctgcgctgtgggctcatctcggcttccaggacgttactgccgggaagggggaagggggctgtcagcctctggacccctgtccccagacatcgccagccctcatccgccagagcgtccctttgctggg

SEQ ID NO: 131036 - DNA, 30 bp, Homo sapiens; identical to SEQ ID NO: 55808
  chr19:17501923-17501953
  hyper

SEQ ID NO: 131037 - DNA, 16 bp, Homo sapiens
  chr19:17502609-17502625
  hyper
cgtccatctcaatctt

SEQ ID NO: 131038 - DNA, 30 bp, Homo sapiens; identical to SEQ ID NO: 12141
  chr19:17530727-17530757
  hyper

SEQ ID NO: 131039 - DNA, 232 bp, Homo sapiens; identical to SEQ ID NO: 55811
  chr19:17531153-17531385
  hyper

SEQ ID NO: 131040 - DNA, 30 bp, Homo sapiens
  chr19:17564400-17564430
  hyper
gccatctcgtcctgccgcgagggggcgcca

SEQ ID NO: 131041 - DNA, 30 bp, Homo sapiens
  chr19:17580374-17580404
  hyper
cgaccctggcgggccgttctagcacccatg

SEQ ID NO: 131042 - DNA, 161 bp, Homo sapiens
  chr19:17581045-17581206
  hyper
ccagggtccgggggcggagcctggccaggacctggccaatcccaggcctggggccctggtctggttcctagttagcgggcgggtgtaaaagcctggaaaggggcgatgcctggcctgaggagttgaccaatcccaggcctgggggcggagtctgactcgga

SEQ ID NO: 131043 - DNA, 30 bp, Homo sapiens
  chr19:17581415-17581445
  hyper
ccgtggacctggagcgcggcagcggcgctc

SEQ ID NO: 131044 - DNA, 30 bp, Homo sapiens; identical to SEQ ID NO: 55812
  chr19:17581951-17581981
  hyper

SEQ ID NO: 131045 - DNA, 187 bp, Homo sapiens
  chr19:17607094-17607281
  hyper
ccatctgtaaagtggcggggggggagtcattccgaagcccaactggagatgagaactcttaaaggcaccgtggggcacctggtggatgaccccaggaagctcttgcggggcttgagaatgtgtggcagggagggaagatgtcctgcagggggagcccatgagcaggtggctccgtgggcacctgggg

SEQ ID NO: 131046 - DNA, 185 bp, Homo sapiens
  chr19:17622144-17622329
  hyper
aactcaccaaaatacgccctccttcagaaaatccctgccacctcgataggacgtcctcttcttgagctcccctctccggccctccctgatacagcaaggttgagcattcgggcactggcttcccgaactcacttcgactcaggcacagcaggcaaagattcaatgggtagggccggaccgactgc

SEQ ID NO: 131047 - DNA, 393 bp, Homo sapiens
  chr19:17649951-17650344
  hyper
ctctcagtcctgcagcgaagccaggcccctgctgcccgggccttcctggacgccgtccgactctaccggcagcaccaaggccactttggcgacgacgacgtgaccctaggctcagacgccgaggttagtgccccgcgaggccgcacccgggacccccaggaccctcccggccgaccgcggcgcccatggccccctctcctgcaggtgctgaccgcggtgctgatgcgggagcaacttcccgcgctgcgagcccagacccttcctggcctgcggggggcaggccgcgcccgcgcctgggcctggaccgaggtatgcacggcgtccggatccgggatagggggcgggatgcgggcgttcgggttcccctcccacgactgtcgcctaaaccctctc

SEQ ID NO: 131048 - DNA, 102 bp, Homo sapiens
  chr19:17666359-17666461
  hyper
cgggccttgggactcggagagcgtctggaggcggggcctggacttcacgcccggcgcgctcctcccctttaaggcgcgcggccgggcggggcccctatgacc

SEQ ID NO: 131049 - DNA, 30 bp, Homo sapiens; identical to SEQ ID NO: 55814
  chr19:17667139-17667169
  hyper

SEQ ID NO: 131050 - DNA, 1043 bp, Homo sapiens; identical to SEQ ID NO: 12144
  chr19:17716508-17717551
  hyper

SEQ ID NO: 131051 - DNA, 30 bp, Homo sapiens
  chr19:17727387-17727417
  hyper
gcggagaggggacggcgagtgagagggagg

SEQ ID NO: 131052 - DNA, 479 bp, Homo sapiens; identical to SEQ ID NO: 12145
  chr19:17790866-17791345
  hyper

SEQ ID NO: 131053 - DNA, 53 bp, Homo sapiens; identical to SEQ ID NO: 55817
  chr19:17792548-17792601
  hyper

SEQ ID NO: 131054 - DNA, 230 bp, Homo sapiens
  chr19:17797518-17797748
  hyper
tttaagaacacccgcgtccacgccggcccagcccggccggatttgcactcggaagctgccgcggcggggagcgggcgggcggggcagggtttgtgaatgaatcggccgagggggaggggagggaggaggaggggcggcgggggcggttcccggctccccggcctgcccaccctgtgtccaggcagcaggagttcagcacacgcacgcttcctgtcgcccgaggtctcccg

SEQ ID NO: 131055 - DNA, 203 bp, Homo sapiens
  chr19:17798530-17798733
  hyper
cttcgaatttccagccgggtccgcgtccatgaggacccgtaacccagcccacaacaccagaccccttccaagcacccctgcaggcttcaatcaaactaccgagcccagactcttcctcactgaccctctaaaaacctggtctacacagacgccccagtctagatcgtttccgggtagaaccccggatacccgtccacgtccac

SEQ ID NO: 131056 - DNA, 645 bp, Homo sapiens
  chr19:17798754-17799399
  hyper
cgtccacacgacccctccagcagcggccaccaggacccccgagagccctgccgcgtctacacggatcaccccctccggggcccagctgcgtcgacaagggctacccctctcaaaagtccagccacctggactcgggtcaccccccaggaaccccctgggagccgcatccacgcggaccccgaccccagcccgcgtccacacgggtcccccgacccccagcctcgcctcctacctccaacgcaaagcagagacatgtctccgagctcgcaggtgggccggaggcggccgggccggctctgtcgggtcgggctcagcggccgctgggctggggcatctcccggctgcagcccgcgcttggctcacgccggggcccggccgccaccggccatcttggttcagcaccgggggcgcggacagcgcctgacgtggcgctgatgcggggcgggcaggcggagcccagggacgcctgatggggcgggggcgctgcgggctgggggggcgttaaagggcctggctccgggaaggggcgcctcgccccacacctcctcgttgcagggggacaaggggcgacggcggcccccaagcaggtttcctcctgtgcagaccctcacctgcactgaaatggtgcacgtgcccccgccaccc

SEQ ID NO: 131057 - DNA, 233 bp, Homo sapiens
  chr19:17830033-17830266
  hyper
acatgcagcaggcacgcaatcaaagcttgttcaatgaaaaaaaaaatgaatgaatggtcacttgggagaggcggctcccaagcggacacccaggagtcggccaacccctttaacgcccgcatcccctgctctccacgacctcaaagggcctgtaagtggtcgacaaaaaggggcggggatgcggtggttccgggcggggtcttcagcccttccggtgcggcccctttaagagg

SEQ ID NO: 131058 - DNA, 30 bp, Homo sapiens
  chr19:17830630-17830660
  hyper
gagaaagtggcatccgggcctgggctgggc

SEQ ID NO: 131059 - DNA, 29 bp, Homo sapiens
  chr19:17858814-17858843
  hyper
gcgaaaatggggaccgctccccaaatccc

SEQ ID NO: 131060 - DNA, 561 bp, Homo sapiens
  chr19:17958345-17958906
  hyper
gcatcccctgtttataatcctcaacgttctgcatcctggtatggtcgggtaccctgtgtctggaccgggaaggcctggagggtaggggctgggaactccgccccccaatccctccttcccaatccctcctccccacccccaaccccgcagcccccgtcgcgcatgcgcaatgactcctccaggtccgcaaggcaggcatctcccggccttagtcaaagccgaagcccagagaagcgagcgatcggaggatgcgagtctcggctcacgtctgcctcgcagctttcctccgaggcctggaaggcgagctagcctttgccctggcagcaccctgccccagcccagccatcccccgccaccaccatcctcccccagtgtctgggccgagccctgcggcatcgccagctcttacctagcgggcagggaccctggactttcgaagggcgggcagagccgggaggcagcgagaggaaagtcccactcggctccttcctgtgtgggccccttggtttcctgagccactgtcatttaccgaaagtcagggccctgcgggagctgggggcg

SEQ ID NO: 131061 - DNA, 172 bp, Homo sapiens
  chr19:17970698-17970870
  hyper
ctggtgaacggctgcgcgacagaggacacttccttttgcgggtggcggcgaacgcggagagcacgccatgaaggcctcgggcacggtaaggcgggcgcggcgcggcagggggccaagggatggggcacgggccccatcaggggcctgcataagtggcgtgggccgggttggt

SEQ ID NO: 131062 - DNA, 973 bp, Homo sapiens
  chr19:17982692-17983665
  hyper
ctggaggcggagtcgcggtgacccgggagcccaataaatctgcaacccacaatcacgagctgctcccgtaagccccaaggcgacctccagctgtcagcgctgagcacagcgcccagggagagggacagacagccggctgcatgggacagcggaacccagagtgagaggggaggtggcaggacagacagacagcaggggcggacgcagagacagacagcggggacagggaggccgacacggacatcgacagcccatagattcctaacccagggagccccggcccctctcgccgcttcccaccccagacggagcggggacaggctgccgagcatcctcccacccgccctccccgtcctgcctcctcggcccctgccagcttcccccgcttgagcacgcagggcgtccgaggacgcgctgggcctccgcacccgccctcatggaggccgtggagaccggggaacggcccaccttcggagcctgggactacggggtctttgccctcatgctcctggtgtccactggcatcgggctgtgggtcgggctggctcggggcgggcagcgcagcgctgaggacttcttcaccgggggccggcgcctggcggccctgcccgtgggcctgtcgctgtctgccagcttcatgtcggccgtgcaggtgctgggcgtgccgtcggaggcctatcgctatggcctcaagttcctctggatgtgcctgggccagcttctgaactcggtcctcaccgccctgctcttcatgcccgtcttctaccgcctgggcctcaccagcacctacgaggtaccggacagaggcccgggggtaggacctgccccactggcagtgctgggaccccgtgtgggggaggcgctggggctttgggccgctgtacaggaggacgcggatggcacctcggtgctttaacggaaggggcccctaggcagacacgtggggagggttctaggaagaggccccaggcgc

SEQ ID NO: 131063 - DNA, 34 bp, Homo sapiens; identical to SEQ ID NO: 12152
  chr19:17983839-17983873
  hyper

SEQ ID NO: 131064 - DNA, 343 bp, Homo sapiens
  chr19:17984733-17985076
  hyper
tggaccagtcctccaggtccacggggtacgcacaggcacgggatggcacctgtgcacgggtgtgtgcgtgcggcggggcccccacgtgcaagaatctggcgggcgcggttggcttccggagggaggggcccacctagagagcagaccagggacccgagaggcctcggctcctgggtaaggactgtccaggtgacctcgagtccctccttgcagtacctggagatgcgcttcagccgcgcagtgcggctctgcgggactttgcagtacattgtagccacggtgagtggcctcggccccgccctccgctcagggccccgagagcgtcagccttcactagcccggc

SEQ ID NO: 131065 - DNA, 304 bp, Homo sapiens
  chr19:18043466-18043770
  hyper
ctcccctcatggaccgcgggcgcgctctggcggccgggccgctccaggctgaagccgccggaccacgtgtgtagtcgcagctgccatctttcatccgggcatcggccatcttggtaaaggcaatgttctagattttcgcctctgcccgcccctcctggttcatcaacatattaaatgagcgtagggaatgagggcgtattaagtgtcctctttttgaagagacaaagaagtggctgactaccctggcttgggtccgaggcccagccatctttttctttaccaaaatggcggcggtactgaggcg

SEQ ID NO: 131066 - DNA, 122 bp, Homo sapiens; identical to SEQ ID NO: 55830
  chr19:18059917-18060039
  hyper

SEQ ID NO: 131067 - DNA, 41 bp, Homo sapiens
  chr19:18062521-18062562
  hyper
ctgggaccttccagcccggtcaacgtcgccagctgcccgaa

SEQ ID NO: 131068 - DNA, 90 bp, Homo sapiens; identical to SEQ ID NO: 12153
  chr19:18062903-18062993
  hyper

SEQ ID NO: 131069 - DNA, 30 bp, Homo sapiens; identical to SEQ ID NO: 55832
  chr19:18063298-18063328
  hyper

SEQ ID NO: 131070 - DNA, 73 bp, Homo sapiens
  chr19:18077776-18077849
  hyper
gttgcagggggcgccggggaatgtgggatctttaaatatgggcggggcttgcggggtcgtcgaaggcggtgcc

SEQ ID NO: 131071 - DNA, 30 bp, Homo sapiens
  chr19:18111865-18111895
  hyper
caaagtcaacagtgcgggcacgcgggcggc

SEQ ID NO: 131072 - DNA, 30 bp, Homo sapiens; identical to SEQ ID NO: 12154
  chr19:18112418-18112448
  hyper

SEQ ID NO: 131073 - DNA, 512 bp, Homo sapiens
  chr19:18117801-18118313
  hyper
ttccgatccccatcacgggctgagggtgaccgtgtttgtttatgaccgccccctccacccacacacctcactgaggtggtggaagtctcctgagccaggctcagaggcggacagtcacggcaggggatgggttcagcggcagcgcattacgctgccacgagagggcgccagcgtcccgcagacgacgcagaggcaactcccgctggagaaactccatgcgacttttctttggggaaactgaagcccagagagaggtcacgccgtcccgtggccacaccgcagctgtggacctgggggtgcccgagcgtcccctgcattcagctctgtggcgggacgggggctgaggatgactggagcaggcacaagggctgcggggaaggtagggtttgccagaggctgaaaattgggaagggaacatcatttcgtaggtaccgctcctgggcgaatgcgccgaggcgcgaccgagtgacggtatgtcaagagcaggttgatgacccgggagcgaggctctt

SEQ ID NO: 131074 - DNA, 385 bp, Homo sapiens; identical to SEQ ID NO: 12156
  chr19:18118522-18118907
  hyper

SEQ ID NO: 131075 - DNA, 177 bp, Homo sapiens; identical to SEQ ID NO: 12157
  chr19:18118965-18119142
  hyper

SEQ ID NO: 131076 - DNA, 31 bp, Homo sapiens; identical to SEQ ID NO: 55837
  chr19:18119199-18119230
  hyper

SEQ ID NO: 131077 - DNA, 30 bp, Homo sapiens
  chr19:18263846-18263876
  hyper
gtcccgcgggattacgttcggctacttccg

SEQ ID NO: 131078 - DNA, 202 bp, Homo sapiens
  chr19:18271897-18272099
  hyper
ggcagccctggctgacggcattaagagcttcctgctggcactgcccgcgccgctcgtgacccccgaggcctcggccgaggcgcgccgggccctgcggggtgagcctggcgggtagcccgggggaaggagggggctgtagcgggtgggagggcccaggcctggctcaccctgccctggccatctgtccgcagaggccgcgggg

SEQ ID NO: 131079 - DNA, 18 bp, Homo sapiens
  chr19:18304395-18304413
  hyper
cgcgcctctccccgggtg

SEQ ID NO: 131080 - DNA, 30 bp, Homo sapiens
  chr19:18313490-18313520
  hyper
gtcgaagttctgatccgaggactccttctg

SEQ ID NO: 131081 - DNA, 199 bp, Homo sapiens
  chr19:18313918-18314117
  hyper
gccccacgtgcaccgcgtgcatggtccctcgaggacgcgcatctgcagcccccgctccccgcaaacctccaggccggagagctccggccaaggccgctgcatcacatgatacaggaggggcatgcacacgctcacgtgcacacagcctcaaacacgctcatccgtacatacaggagtgtgtgaacgcactgaggtgcac

SEQ ID NO: 131082 - DNA, 105 bp, Homo sapiens
  chr19:18314977-18315082
  hyper
acgtgcaaatggggcggggcctagcgtgtgcatccagtaggggcgggagcggcgcgggggccgactccgcctctcgtccgcctcctgtccgcctcggggaggcgg

SEQ ID NO: 131083 - DNA, 30 bp, Homo sapiens; identical to SEQ ID NO: 12158
  chr19:18316087-18316117
  hyper

SEQ ID NO: 131084 - DNA, 30 bp, Homo sapiens; identical to SEQ ID NO: 55840
  chr19:18335167-18335197
  hyper

SEQ ID NO: 131085 - DNA, 264 bp, Homo sapiens; identical to SEQ ID NO: 55841
  chr19:18335414-18335678
  hyper

SEQ ID NO: 131086 - DNA, 210 bp, Homo sapiens
  chr19:18335914-18336124
  hyper
aaacttagccgggagcggcggggtcaggctgtggttccatgacgcgggcggtgcgggggtagagccccccggctgtgggaacggcgcggctgcccattggccaggggggtaaactgagccagggaggctcggacttgggttcgggtctggcctgcgcggggccggccctcgttcatcctcacttctgagtacccgcgacgcgccctcgac

SEQ ID NO: 131087 - DNA, 982 bp, Homo sapiens
  chr19:18336349-18337331
  hyper
ttcggcgcggaccaagcgcaggatgccagccacagtcggcgcccacaagccccactccgaaccccagccttgcccccatccctccccacgaggtcacagtcgtttctggaaaggcagggattcgaacccagaggggtggaccgagtgcttagaggatgcagcgcaagcagctgccgggcgcaggcgcgcgctcagcctgggactcccgaacgccctgcctcgaaaaccccctcaattcaggtcttcctccgtggacacccagagttcattgtgaggcccccagggcatctctttgctggcactgggacaggatgctggtgggagggggcaccaagggaaggagtgccccttccccctcctcccactgccaggacgcacagcctgcctgccccaggccggcgagggtcaggaggagacgtgagcctcagcccgtcccactctgggcctcacagctggaaggagacagacggctggtcccctgggcctatatccaggcggcgggtggagacagacggagacagagagagacagagtcaccaactgcgagacaaaagtagggtaaggtagggtagagggagagagatacagagaaagcgagggagaggcagagcgtccaagcccggactccggccccggccccagctgtccctggccttgtccctgtccctgcccttcccacctccacaccgggcgtcccggtgaccccgccaggccctctgtccagcctcaccacagcggatgggccaccgtgaagcgccgctgcaggcggatgctctgattcaccaaaagcttcctgaagagcccgggggagccgcgcggggatccccgaggggagccgggcccggggaccggggcgggcgcgggggggccctgcatcgccaggactgcgtggaggctggaccgagcgccggctgcgcgggaccttttctggacagctgcgggggcggggcccagcggggagggggcaaagggcgcatcggcc

SEQ ID NO: 131088 - DNA, 12 bp, Homo sapiens
  chr19:18337346-18337358
  hyper
cggctccctgac

SEQ ID NO: 131089 - DNA, 507 bp, Homo sapiens; identical to SEQ ID NO: 55843
  chr19:18343302-18343809
  hyper

SEQ ID NO: 131090 - DNA, 337 bp, Homo sapiens; identical to SEQ ID NO: 55844
  chr19:18343879-18344216
  hyper

SEQ ID NO: 131091 - DNA, 30 bp, Homo sapiens
  chr19:18390592-18390622
  hyper
aacagaaaaccgggcgaaccaaggattaca

SEQ ID NO: 131092 - DNA, 30 bp, Homo sapiens
  chr19:18391286-18391316
  hyper
gcagccgctgttgacgtggctgaggacttt

SEQ ID NO: 131093 - DNA, 30 bp, Homo sapiens
  chr19:18392979-18393009
  hyper
tgtgtccgggggctcgccgggggtgtgggg

SEQ ID NO: 131094 - DNA, 331 bp, Homo sapiens
  chr19:18420496-18420827
  hyper
cgccgcccatgccgcggcctttctgctgcttctgctgctgcaggcctccgcggccgcggcccttggccaccacctcctccttgaccatgtcgatgatctcgtcggggatgcgcaggtacttgatggtgctgccgcggatgtagcactcgggcatccgccagaacttgtccccgtcctgcggagaaggggagcaggttattaacttaccaccgggccgtctggcccagccctgggagcgcgggaggccctgcagatcctgcccagcctgcaccccgtaccacccctgcaagctgcacagtatcagtcccgggacatacgtggcaaagggtcc

SEQ ID NO: 131095 - DNA, 227 bp, Homo sapiens
  chr19:18434127-18434354
  hyper
tgaggaaatgcgtgcgcaggtgaaaccttcgtcggtctcctgggctccacgctgtgggcaaagccagttaatgcctttcgtttgcagtagagagagagaaatcgaggcttcgtggtgattgggccgtgcctgatgttgcccttccgactcctagttttctgattctgtaattatccagggaacatcatttaataggttggaatcctgaccacgaccctcggggcctc

SEQ ID NO: 131096 - DNA, 126 bp, Homo sapiens
  chr19:18451213-18451339
  hyper
tcagtgcgtgcaagcggctacacactacggcataagatgttcccattttgcagacggggaaacggaggctggggaataccgggcctagccgacgggggcggggcgcagggcgcgcacgctgcgtct

SEQ ID NO: 131097 - DNA, 30 bp, Homo sapiens
  chr19:18451635-18451665
  hyper
aaggtgtcatcacccgcgggagccccgcgc

SEQ ID NO: 131098 - DNA, 30 bp, Homo sapiens
  chr19:18452049-18452079
  hyper
gggtccggggacctcgggctctcccagctg

SEQ ID NO: 131099 - DNA, 30 bp, Homo sapiens
  chr19:18521529-18521559
  hyper
aggggatgctgggggcgggacctgctggga

SEQ ID NO: 131100 - DNA, 30 bp, Homo sapiens; identical to SEQ ID NO: 12162
  chr19:18525427-18525457
  hyper

SEQ ID NO: 131101 - DNA, 30 bp, Homo sapiens
  chr19:18527956-18527986
  hyper
tcccctccctctcacgcacgtggcactccc

SEQ ID NO: 131102 - DNA, 546 bp, Homo sapiens; identical to SEQ ID NO: 55847
  chr19:18528684-18529230
  hyper

SEQ ID NO: 131103 - DNA, 30 bp, Homo sapiens; identical to SEQ ID NO: 55848
  chr19:18529592-18529622
  hyper

SEQ ID NO: 131104 - DNA, 41 bp, Homo sapiens
  chr19:18547989-18548030
  hyper
agactctcaagccccgccccactttcgggcatttttcagtt

SEQ ID NO: 131105 - DNA, 572 bp, Homo sapiens; identical to SEQ ID NO: 55850
  chr19:18548567-18549139
  hyper

SEQ ID NO: 131106 - DNA, 30 bp, Homo sapiens; identical to SEQ ID NO: 55851
  chr19:18571125-18571155
  hyper

SEQ ID NO: 131107 - DNA, 30 bp, Homo sapiens
  chr19:18632473-18632503
  hyper
ccgggcccggcgcgcgagtctgggcccctc

SEQ ID NO: 131108 - DNA, 239 bp, Homo sapiens
  chr19:18632769-18633008
  hyper
gtcggtgagcttcacgtggaacaccgacaccttgctgccgtcgctaacccgcccgcacgacagcccgtagctcctatcctccttcagcgccgccatcttgcgaccatctctcccccgcgcccccttcccggctccagcgccgccacgccggccacgccccgccccgccgcccgctgacgcgctgcattattcatgagacgcggctggccacgccccccgagtccgaccaaaccaacagt

SEQ ID NO: 131109 - DNA, 30 bp, Homo sapiens
  chr19:18633327-18633357
  hyper
cttctgtggaaagccgcagagagggcgtgg

SEQ ID NO: 131110 - DNA, 30 bp, Homo sapiens
  chr19:18668543-18668573
  hyper
ttgtgatgcacccacgagctgaagctccgt

SEQ ID NO: 131111 - DNA, 30 bp, Homo sapiens; identical to SEQ ID NO: 55853
  chr19:18668822-18668852
  hyper

SEQ ID NO: 131112 - DNA, 30 bp, Homo sapiens
  chr19:18682465-18682495
  hyper
ctcaagtgactcggcgggcggggcccacaa

SEQ ID NO: 131113 - DNA, 64 bp, Homo sapiens; identical to SEQ ID NO: 55854
  chr19:18682792-18682856
  hyper

SEQ ID NO: 131114 - DNA, 30 bp, Homo sapiens
  chr19:18700216-18700246
  hyper
tttcaggtggttggcgccggtgcagggcct

SEQ ID NO: 131115 - DNA, 151 bp, Homo sapiens; identical to SEQ ID NO: 55855
  chr19:18705871-18706022
  hyper

SEQ ID NO: 131116 - DNA, 230 bp, Homo sapiens
  chr19:18714350-18714580
  hyper
aaaggactccccaggcggctggaagaagggactgcaggaggcaggggcagcccagcttcgcagagatggcagccaaggacagggtgatcctggcccccagggaggccccctgaatgccagcgctgccctgcacttgccctcactgccccagatgggcgaggtggggtggacacggttcttgggccggccctgatgattttccggggcaaacttggctcgagggctctgtc

SEQ ID NO: 131117 - DNA, 292 bp, Homo sapiens
  chr19:18714789-18715081
  hyper
cgggtgtgccagcgtctctgccccggcccacccaccgcttcctgcctgggcccccccaacagagtgggaggcacggccaggcctgcccagaccccaggcccctctcagcccttctagagtgggtctcactcctcctgcccccaccacccgccagcttggcctgggcaggaaggggctctctggggggtcctggctggggggcgctgcccctctgccacacccgcctggcctgggccggcgtggctcacttgccagcagctgcagctgccctcccggggctgggcgggggaca

SEQ ID NO: 131118 - DNA, 104 bp, Homo sapiens; identical to SEQ ID NO: 55858
  chr19:18715120-18715224
  hyper

SEQ ID NO: 131119 - DNA, 1413 bp, Homo sapiens
  chr19:18715789-18717202
  hyper
ggggtccccatctcccgtcccgctggtacctgcagacactttacgacccacccgcctgctggtcaggtgctaagacacaccgtaagtagaaacatattgccgaggtgtgagaatcttttatttaatttcttccccccttaaaggaaaaaacacacttacagtgcccccccaccccctacaccttcgcctgctgctctactggctgaaaacaaagcttggcgctcacagtggcactcacaggcgctgcccaccgcctggcagagccgtcaggggccctgggagggcccgaggtagcccctcacctgaaagccaggggagagccaggctttcagcaagtgcccctagaagatgcccggaccctgccccttcccggaggagccctacaggcagcccgcaaacagcccagcacagggtggatgagcctgggagcagtgtgtgcccggcgacccccggggtggcccgtgcgcctggatggggtgcgtggagtgactgaacatctggggcgagtggtgcctgcctctgtgcccctgggtcgcctcccctgtgggatgtgtgtgaccgtgaatgtgtgtgtcggggatggaatgtgtgtgcgtccgcgatggtgcgcgaatgtgcacctgggatgcagtgtgcgcgagtttgagggcgagggtgacgggccacaagccagtgtgattctttgtgtgtctctgggtgtgtcccagagcgggtctgcatacggagacgtatccttgcgggggtgttccttggatggggggccccagagtgcctgaggccagaagtccctccagggcaggggtcttggcccgtagggcagcgggttcccagtgggccccctcaaagtttgggcccgctggtgcccggactcactggctcccgctccctctccctctcacccactcgctcacaaagattcctctcgctggaggctctccgcccgacgcagcctggctgaaaacggttctaagcgccgccggtggcggggactccgcggacccccgtgcgccgggtcccgcagggggagggcggtggcgccggcccgtggagacacaagtcccccgggaccccgggctgcgcgccaggcggccagagcggcccccctgcagccccgccctccccgtggggctcatccctccgcctgggggggcccgctgggggcccgcacccagcgcgccaaccgcgtgcgcccccgcctgggagcggtgccctgcagtcccaggggcccagagtccaccgaagcagacgcgtgcgcccgccacgtcctggcatgcagagggtctcaggccgcgatccccccagcccccgggggcctggcctggcgccctcggcccagctgcccaggtaacagggcctcgggcgcggaagcaggactctctggacagtggactgcggcgccgtgtgccccgcagg

SEQ ID NO: 131120 - DNA, 375 bp, Homo sapiens
  chr19:18717410-18717785
  hyper
aacggcggcggccgccgcgcggattgggcggcggggccccggcggccggcgggcatggggccggcgctgccgggggcgcgcggcgggctgcggctcggcggcggtggcgcagggcgcgggacgcaggccgggcgcgggagggcgcgggccaggccgcccgcacgtcgctgggcgcggacgcggaggccggagcaagtctgagcagccgaattgacaaggcgctaatgcgccgctggccccgcccggccccgcccccggcccggcccggccccgggggggcggcgggccccgcaccggcctccccgccgcccgcccgcccgcgggcaccgcgcgccccgcccgtcccgcctccgccccaccgagaaccgcgcgcgc

SEQ ID NO: 131121 - DNA, 30 bp, Homo sapiens
  chr19:18718660-18718690
  hyper
ttttggccattgctcgagtttcgggacccc

SEQ ID NO: 131122 - DNA, 842 bp, Homo sapiens
  chr19:18721515-18722357
  hyper
tgcttgtccgctgcccgccttgacctcggctgctgtggcttcccggacgcctggcctgccgctgattcacgcccaggccggcctcagcgccccccgcctgccgcccccagccaggccgccccggggggtaggaagtgggggggggggcgagggcggcgccgagtcaactttccctcttaagccccgaaggaatgtcggcggatttcctgaaacccgaccctggccgcccgccggccctcccgcccctcacctggaccggctcccccgggaacagcaggaggggcgcgggggctcaccttgggggccggggtcaagtcctctttccgctcacccccccagcggcctagtgcagcggaaagggggctgggtgtgcggcaatcagcctctttcccttctcccctcaggcgacctgggtgatcgacccactcctccagcctcagtttctccttctgcaaaagggcgcggggtgtccctcctccctgatgcgttttaagcaatgcccaaaggtcacctcccatcattggcagggctctgccggcttttctttgcttctctccctgtcacctggacagaaccactttgcagtctgagcatcagtttcctcacccatataaaagggcaacgctaccggtacctgtcttatacggttgttgcaagaaaaagtgtttcgttggaatgaatgaaagacagtaattgtggaggggttaggcgcgcgcgggcctctggaattagcatgtgtgggcttgaatcctgactttgccaacgcgtcccggagcctaagtttcccacctgtgaaatgggggacagtattggtcataacgcacagggctgtttcccaaggt

SEQ ID NO: 131123 - DNA, 102 bp, Homo sapiens; identical to SEQ ID NO: 55862
  chr19:18722386-18722488
  hyper

SEQ ID NO: 131124 - DNA, 456 bp, Homo sapiens; identical to SEQ ID NO: 55863
  chr19:18722521-18722977
  hyper

SEQ ID NO: 131125 - DNA, 14 bp, Homo sapiens
  chr19:18723382-18723396
  hyper
ggtcggctcacacg

SEQ ID NO: 131126 - DNA, 564 bp, Homo sapiens
  chr19:18723427-18723991
  hyper
cgacacccctggggaatagtcccctccatcccatccccctatatatttccttttggccccaagcgccagcagagatcccccgcccgtgggcaccagggaggtgtcctgggacccccgcgatgggatagacggtgggggccgcgatgcacctgccccgcccgacccgcacgcctcgggtgccgcagcgcagctaccccgcccgctctccgcatctcccaccccccgcttcccaggctgcctcgctcgggtgacgtcagcgccccggtccccgccgcagccgctgcatcctccgtgcccggcctgagctggagtcccccgcgccccccgcgttccgcccggccatggctgcggtggcgctgatgccaccgccgctgctgctgctgctgctgttggcgtcgccgcccgccgcctccgcgccgtccgcccgcgatcccttcgccccccagctcggggacacgcagaactgccagctgcggtgccgcgaccgcgacctcggcccgcagccctcgcaggtgaggcgcgtgcggtgccaggtgccagcgggggacgcgggatctctccgaa

SEQ ID NO: 131127 - DNA, 234 bp, Homo sapiens
  chr19:18811448-18811682
  hyper
ggtgcatgccagctggtcattcgcccggaaatctctgggaggaagtatcagcacagcctagcagggcgcctgggactggctctgtgggctggccgtccctctggctggggacacggggaggccgagcgtgtccgcaaagacacgcgagctgtccacctttctgggctgcaggggtctgcagaacctcggaacctcggaggggctctctgtctgcttcagcgtctctttctcaag

SEQ ID NO: 131128 - DNA, 173 bp, Homo sapiens
  chr19:18880024-18880197
  hyper
agcccgttgggcacagcgcctggggcccagggctgggggctgcagctcagaccattggacttttctgcctagggccggctcaggcagacaaaggctgggctttaaccctgtacccacaaaccttcctgactgtccagaccacctgcttgctccagcggcgcgggctgggtggc

SEQ ID NO: 131129 - DNA, 30 bp, Homo sapiens; identical to SEQ ID NO: 55868
  chr19:18880785-18880815
  hyper

SEQ ID NO: 131130 - DNA, 543 bp, Homo sapiens
  chr19:18899185-18899728
  hyper
tgcccaagcccgccccgctccgcccccacccaccttacggcactggcgctccgggcagcgcagcttctcgtccgggaagccgtctaggtcagtgtcgcgaccacagaggatcccgttgccggcccagccaacggcacactgtgggagagtgtaagtgggtgccctggagtggccgccacccaaccccgcctcaagcccagcccgcccgcactcaccacgcacgaccgcgagccatcgcgctctaggacgcagtctgcatgctcgtggcactcgctgggcgagccgtcggggcagaagcgctgtgcgcgccgctggcagccggacgcctggtcgcccacgaagccgggctggcacgggccgcactggaaggagccctgcgccggagccgccggaggtcagcgcaggccgcccgccgctcgccccacctcccgcgatcctttcttcctccccagcgggccttacccgggtgttgatgcacacggagttggggacgcagttatgttgcccggtctcacactcgttgatgtccgtgcaaacctaggg

SEQ ID NO: 131131 - DNA, 912 bp, Homo sapiens
  chr19:18900003-18900915
  hyper
cctggtgggtggggccgctgtaccccggcgggcaagcctcgcagcggaaccccgggctggtgttgatacagcggactcgggggaagcaggggtgggcgttgcactgggggaggaggggccacagagggtcagagggcttcgagctgggccctgggggccgcacctcgtagtgtctcggatgtggaaagttcaagggccatatgccagtgcttggagctctgagatggaagcaattgtcgcaggggtcaggcacgactttgccttgatgacggcaagggcgcaaccgggagaggagaggagagctgttccctcatgggcgaggggaggaaggatgagggcgggcatccccagcagaggggggcaggggtcgtcggggcgtgcgtgcccggcggtggcggggggtctgggcgtgcgttccctggctgtggaagggtcgttgggactggcgatcccctgcggcgaggagggtagctggggcggaccacccctggcggtgagggagtcgtcggggcgggcgtcactagctatgtagggggttgtgggggcgggcgtcccgggtggtgacggggatggtccttgggttgggcgtccccccgcggtaaggaggtagtctggccgtgcgcccccggaggtgagaggctcttcggggcgaacactcccagtggaggaaggggtctcccgggcggcgagagattggggggcggtagagggagtcgtcagggcggtggagtgtcggggctagcgcacctcgttgacgtcggtgcagtgcgagccgttgcccgtgaagcccgcggggcaggggccgcagcgcgcgccgctctccgtctggatgcaggccacgccggggaagcagaagccgggcgcgcagtggagcaggggccgcacgctgggtaggccggtgcgtactgactg

SEQ ID NO: 131132 - DNA, 1069 bp, Homo sapiens
  chr19:18901140-18902209
  hyper
ttttctgccccgtggcgtctctcacttccccaaaactctctcaccgcttctgtctctttttgtctctgtttctacacaccccatcccattcccgttcgtccgtccacctctccgtcagcctccatctccttccgtctcttttcctccccagctttccctggctctctgtctctgtctctgtgtctctgtctcccgtctcttctctctcccgaccgccccgccgcgctcaccgcacgcgtcacactccatcaccgtgtttttcaggaacgtgatctccctgacctgcaggggtgggatggaatcagcggggtcccaacctctcctcatccctcgggtctcccctctctctaccccggggtccctttctacagcctcttttcgccaaggactccctacccgccgacccccttccctccccatctcctctccaccttctcgggtacttcctctctcctcgctgggaactgagacccccttccgttccctggcactccctgccccgcacccgggccccgcacctgctgccgcagcagctcccgcacgtcctgcagcgccgcgttggtttcctgcagttcccgaagcatctgcgggcccaggtctgagcctgcggcggcaggggacctggtgaggcgtcatggggccggggaatcccaccaccaactcccaccgttgcagcgaacccggacctccgaggccccactgcgctcctctagtctcggtcccgccacctgctttctgcgcccggcacgtcccctacgaacagtccgtgagccccaaacagcctggatcccgggcctctcacgggtcctacagtccgttgtggggccgtgggcacggcgcgggtgctaacgcggcttacccaacgggctctggccctgtccggacgcgccgagggcagccagggtgagcagaagaacgcaggcggtgtcggggaccatggcggtggcggggagctgggtggctgctcgctttctaccgcccacgaggcccgcggggcctatttatccccaaggcacggccggccccagggacggcccaccacagccctgcccaacgtccagcctcaagg

SEQ ID NO: 131133 - DNA, 30 bp, Homo sapiens
  chr19:18942498-18942528
  hyper
gcgctcaattaaaccgaaacaccgtcgcag

SEQ ID NO: 131134 - DNA, 342 bp, Homo sapiens
  chr19:18980911-18981253
  hyper
ggcgtcgaaacaggcgccacatgaccgggggaaccggccggagcctgggggcaccctggggctcatcgcgcagtcctagagcctggagcagggcggcggctgggcctgggggcacgggggcgcgggtcaggggcagcgagggcagcagcagggccaggaggaggaggaggtggtggccgcagggaccttgctgcggcggtggcatcttcctcccaggcgatgaccagagagtgcgcagggtccgcggcggcccgggaccagtgggctgagggcggggccggtgtccccggaggggcaggggtcctggggggcgtggccgggaactggaggcaggatgagggg

SEQ ID NO: 131135 - DNA, 95 bp, Homo sapiens
  chr19:18981331-18981426
  hyper
cgtggccggggtattcggggtggggccgggtccacgggggcggggccgaggggttcagaagcgcttgtccttcaccaggccgttcctcagtggct

SEQ ID NO: 131136 - DNA, 1082 bp, Homo sapiens
  chr19:19005837-19006919
  hyper
actctctcgcaggggcgatggtctccgcagaaactggggaattctgctgtcgcctcttggaggcagcacagtccaaccctgaagccccgggccatgtcacctccaagggagcgaccactggcgtggccagagcacccaggcccttgccatccctggtcggagggtggcgctgaccccagataggcacaaggcagcgaccgggcagctcctgcctcttcccgattacagcgggcaagccggccccgccgccgcacggacccagcagaaaacgggcagcggacctcgctccgggccggggcgcagcccgcatggcagggaggcgcatggcgcaggccgcggtgcgccgagccctcccgttcccggtcctgggcttctcagtgtctggctcggccctgccggaaagagcgcgcggtggccggagccatccaccgcgcggggccccctggtcccaaactgaccggaaagggccgtgcctcggtcccccacgtctcaaacatcccacctgtctcgggccccccatgtcccagactcaccccagcccggccacacccccgcatctacccggttcccccacgcagcactgtctgaagggggcgcgcggcggcccgagagaccttatcctggggctccaacgtcctgggcctctccagcccgaggcccccacccacgttccggcgaccccttcatccgcagcagccagcgctggaagaaaggaacgcgccggcggccccaggtccccggtcccggcttcccccagtccggggtcccctcgtcccggcccccggccacactgacccgaaagaggcgcgcagtggccgcggagcgcagggcggtccagcccagcgcgccgagcgccagcagcagcagctcgggcggcgccaggtgcgcgtgctcagccaggccgcgacgcgccagcccccagccgcagtccgtgcagccccgcgccgccgccagcgcgctgccccagccgcgctgcactagctgcgcgtagctcggcatgggctcgggccccgtcggccccgccgcgggccccgccgccgccataccgcccgctcgcccgccgtgcccgtcgcctgcgcccg

SEQ ID NO: 131137 - DNA, 327 bp, Homo sapiens
  chr19:19030079-19030406
  hyper
gaaggcgttctttacgtcgaacagctcgtctacctccccggagccgccggaggccgggccgggggccggaggcgccatttcgctgtcttctcaccagctcctcttcctgaaagacacgtcagccggaagcaagacacgggcacgctaggaaatgtagtttactttttccgagcggcggcgaagtaagccaatgggaagctccacaataatatgcaagggggcggaaggcgtaagtgcgtcacggagagcatctcgggaattgtagtgtgtttctgcaagccaatgggatccggggaaacatgataaggatgcggtcgaggctgggaa

SEQ ID NO: 131138 - DNA, 30 bp, Homo sapiens; identical to SEQ ID NO: 55874
  chr19:19050956-19050986
  hyper

SEQ ID NO: 131139 - DNA, 183 bp, Homo sapiens
  chr19:19144429-19144612
  hyper
gcaagcgcgctgtccgcttcttctgggcggacgctctggaggcaaaacatttccctgctgggggcggcgaccaccgtgagcgtcccggaaggggcggcaaagacgcctccgtcgcgcacgaggtggcctcgttggctttaccttggttcgcggtcgtccttggttatcgtgagcgtccgcgag

SEQ ID NO: 131140 - DNA, 30 bp, Homo sapiens; identical to SEQ ID NO: 55875
  chr19:19144811-19144841
  hyper

SEQ ID NO: 131141 - DNA, 112 bp, Homo sapiens
  chr19:19174942-19175054
  hyper
catggatcccggggcgaggggcggatgaggcggggcatgacagtagcgtcgcgagggcaggaagaggttaaagaccccccccaaccccacactccacgtctactgccccctg

SEQ ID NO: 131142 - DNA, 30 bp, Homo sapiens
  chr19:19189348-19189378
  hyper
gtgaaggtgtgcctccgcagagcatgtacg

SEQ ID NO: 131143 - DNA, 30 bp, Homo sapiens; identical to SEQ ID NO: 55877
  chr19:19249466-19249496
  hyper

SEQ ID NO: 131144 - DNA, 30 bp, Homo sapiens; identical to SEQ ID NO: 55878
  chr19:19250602-19250632
  hyper

SEQ ID NO: 131145 - DNA, 30 bp, Homo sapiens
  chr19:19257017-19257047
  hyper
ccaggggtcagcagcggccggggctttgga

SEQ ID NO: 131146 - DNA, 30 bp, Homo sapiens; identical to SEQ ID NO: 55879
  chr19:19303374-19303404
  hyper

SEQ ID NO: 131147 - DNA, 223 bp, Homo sapiens
  chr19:19314200-19314423
  hyper
caaatcttgggacccggaaccgcgtgggcttggcgcatgcgtgttgtaattcaggcgccgaccgcggacgctccagaggtggggtttggttcgaccccgccccttcatgctcgcttcttaaagggcccgggttcgatgattgaatttaccttggttcccttgaagctgtagggaaaaggctggctgcgcgcacggggcgctgtccctcggcgcccgaaggtgt

SEQ ID NO: 131148 - DNA, 292 bp, Homo sapiens
  chr19:19322625-19322917
  hyper
gtccaaaaaatgggcggggtggggattttaggcaggggagccccctccctcgcgcagccagaggcctcgggctggcgggggcgcatgcgcagagagccctcgcggcccctttataagcactgaggcggcgctggggccagcggagcgcagggcgcaggggctggacccggcgcggagctggctgagtcggagcgcagcgtcctttgtgcccggcggccgccccgggatgcgtccgagctaggagccaggtgggggatccgtgagggggccgtgttgcgggagaagacttcgg

SEQ ID NO: 131149 - DNA, 120 bp, Homo sapiens; identical to SEQ ID NO: 12173
  chr19:19336135-19336255
  hyper

SEQ ID NO: 131150 - DNA, 30 bp, Homo sapiens
  chr19:19383976-19384006
  hyper
gctcagcgacagcgccgcgatcttgccggc

SEQ ID NO: 131151 - DNA, 353 bp, Homo sapiens
  chr19:19431244-19431597
  hyper
cgcctgagaggaggcgggggctgttacctgcaacatcccggttgtccatcttgagactcatccaatcccacaatgctccggcgccccttaaggggccctgttatagtgtgcatcgcctgatgggagatgtagtccgcctcggtcagactcgccctattactgcgtgaacgactgggtttttttttttttaacctccagaaacggaagcctcagcctatcagcgatgcctaagtcccagtcacgataaccaaacggcgtcgcccttttacaccttcccggagcggcagtcatcccaaatacaaactacatgttccaggatgctttgggcggcagatctcgcggaagccgcgagg

SEQ ID NO: 131152 - DNA, 30 bp, Homo sapiens
  chr19:19432080-19432110
  hyper
ccacccgcctctgccggaccccaaagccac

SEQ ID NO: 131153 - DNA, 30 bp, Homo sapiens
  chr19:19496462-19496492
  hyper
cactggtcgtcatgcgctgtctgtcatgaa

SEQ ID NO: 131154 - DNA, 30 bp, Homo sapiens; identical to SEQ ID NO: 12175
  chr19:19517597-19517627
  hyper

SEQ ID NO: 131155 - DNA, 32 bp, Homo sapiens
  chr19:19626941-19626973
  hyper
cttcctagccgtgccgcggaccatctcaagtg

SEQ ID NO: 131156 - DNA, 431 bp, Homo sapiens
  chr19:19648965-19649396
  hyper
gggcgacccagaggggttgctcgagcgccgtcacccagggccagggggcgtggcctgaatggggcgtggccagggcgggatctgcggtcgcatcccgcccccactctcagtcccagcggccgccagacccgccggagttggacccgagcacgccgcggagcccggaccctccctcggacgctctgccccggccatggcgtcgctgctgccactgctctgtctctgtgtcgtcgctgcgcacctggcgggggcccgaggtgaggcgcctccagcccccgcgcccagcccctgaggctcccgagggcctggcagccggccttgggtgaagccgcactcggggagagaacccagggacccacgcgcttccccggggactgggtccccttcaccagtcggatccccgcgaccacctggggcgcggagcgggcctc

SEQ ID NO: 131157 - DNA, 191 bp, Homo sapiens
  chr19:19651027-19651218
  hyper
cgtcctggttcaacgtggaccaccccggaggcgacggcgacttcgagagcctggctgccatccgcttctactacgggccagcgcgcgtgtgcccgcgaccgctggcgctggaagcgcgcaccacggactgggccctgccgtccgccgtcggcgagcgcgtgcacttgaaccccacgcgcggcttctggtgc

SEQ ID NO: 131158 - DNA, 14 bp, Homo sapiens
  chr19:19651467-19651481
  hyper
gcttttgaagagag

SEQ ID NO: 131159 - DNA, 30 bp, Homo sapiens
  chr19:19651512-19651542
  hyper
cgtcaggaggcccagcgggtcaggacccat

SEQ ID NO: 131160 - DNA, 14 bp, Homo sapiens
  chr19:19651833-19651847
  hyper
caggttacccggag

SEQ ID NO: 131161 - DNA, 60 bp, Homo sapiens
  chr19:19651990-19652050
  hyper
cgctggggatgcgtgtcccgggcgtcctctggaggcgcagaagtgcgtgcggcctcggtg

SEQ ID NO: 131162 - DNA, 418 bp, Homo sapiens; identical to SEQ ID NO: 12177
  chr19:19729111-19729529
  hyper

SEQ ID NO: 131163 - DNA, 162 bp, Homo sapiens; identical to SEQ ID NO: 12178
  chr19:19729585-19729747
  hyper

SEQ ID NO: 131164 - DNA, 1104 bp, Homo sapiens
  chr19:19738571-19739675
  hyper
gcgagggggcggtgccgaggcgtggaggtgatcggagtggacagagaggcggccccagaagttagtcggcgggatttgggcgcgagtgcttcccaagcgggcggggcaataggctgttccgggtgggacggaggacactggcggtctccgggacaaagacagcggttggggaagggatggatggccgggcctccaggcgtctccagactggggaaggggtagggggttaagggatcagagggcggcgtcctggccccgcaggcacgtgccgcgcccttcccccgggcccaggcccgcacccgcccgcctcccgtccgtgcaggcctcacctgggcctccagtcacgccgcagacaaggcgggctcgcgggggttcggggcgggctcgaggcccatggcccggcgactgcggcgggagcggtagagcgtccgggtgcgccctgtgcgggttgctgagagggcgcgggaggcggggtctccccggcgccccgcccccaccacctgggggagccctgccccgccccgccacctgggggagccccgcctccacggccgcgtcgggggcggtgtcgcccggaaccgcagcccccctgtttcctccccgcctcgcggcccctcagtcgcccctatttccggcgcgggacccccaccccggtacctgcacacctcatgcgcccgcagtttcgagcctgcggggctgagtcactcggcgacccgaaaattcccgccgtgaccccgcgctgcccgggcggagctccaggtggtcttgggtccgcgcccccgctccggacccccaaccctcccagccccaccccgctctcttcttcgtgtccaatcggccgccgagttacaagccactccctgatccgacttggctcccaccgcccggacccccgcccagcttcggctttgccagctcgcagtatcagcgagccgcggcctcctgtgcgaggcccacctctgcggccccagctgatcatcgggcgcacgctagggttttgcaatcccgcccccgtacccctcaccctgggacagcgctgccccctgcaaagcccggccctgccctgccctgccctgtggcttcctccctcggcctccctgcggc

SEQ ID NO: 131165 - DNA, 30 bp, Homo sapiens; identical to SEQ ID NO: 55891
  chr19:19754559-19754589
  hyper

SEQ ID NO: 131166 - DNA, 30 bp, Homo sapiens; identical to SEQ ID NO: 12181
  chr19:19774930-19774960
  hyper

SEQ ID NO: 131167 - DNA, 17 bp, Homo sapiens
  chr19:19779461-19779478
  hyper
cacaccccacacagcga

SEQ ID NO: 131168 - DNA, 818 bp, Homo sapiens; identical to SEQ ID NO: 55893
  chr19:19843294-19844112
  hyper

SEQ ID NO: 131169 - DNA, 260 bp, Homo sapiens; identical to SEQ ID NO: 55894
  chr19:19887241-19887501
  hyper

SEQ ID NO: 131170 - DNA, 301 bp, Homo sapiens; identical to SEQ ID NO: 12184
  chr19:19932100-19932401
  hyper

SEQ ID NO: 131171 - DNA, 301 bp, Homo sapiens; identical to SEQ ID NO: 12185
  chr19:19932460-19932761
  hyper

SEQ ID NO: 131172 - DNA, 801 bp, Homo sapiens
  chr19:19976553-19977354
  hyper
cagcggctggggaggcggggccttaggcattatccaatgagggacgctgggccggaaaccgtccaatcaggcacgcagctggagcgaaccacatggtttctgggggcctttgtttctcgctgcagcgggagctccaggtttatcctcagtgttctgtgtcctgtgcttatagaggcccgtcctctgtggccgtgtgacctgcaagtattgggagagccacagctaaaccccgggacccctggaagcctagaaatggtgagtgccgggtccaacgtcccgagagaggggagaggctgtttggaacggtgggaagtggctctggcgggactctgcttcctcacagtcagctccacaatctgccgccggagttctccctgcccagctcggcctcagtccccttcagccataagatggcggctgcggtgacatccggggcccggcacagtgattgtgccctggcctggagccctctttcagcagctctgcacccgcagcaccgcgtctctcccagatcatgcaaggaccacgggagggtcgtcaggggagaatcctgactcggttccctgcgggttcatgaatgggaagagctttggtccgtgaggttgttagaaacaagcgcttggtgccgcaaaacaacacaaaacaaaaaactacccagcacttagaaaatttcacaggaaggcatatttacttctgaagaagagtgctgctcgcgtccgacctgatcgcaagagcacacagaagaaaggaaggaaggttttttttttttttgaggcggagttttgctcttgtggcccaggc

SEQ ID NO: 131173 - DNA, 140 bp, Homo sapiens
  chr19:19977533-19977673
  hyper
cgaactcagttgatccgcccgcctcggcctcccagtttgaaaggggtttttaaccctaaacgccgttattgcctctgtgtccttcccccattggccggggtctgacctcacaatctaggctgacccgattggctactttc

SEQ ID NO: 131174 - DNA, 324 bp, Homo sapiens
  chr19:20011266-20011590
  hyper
gaggaagagactttacgttaaaaataaaaaccccttccctcctttgttcagggtgctcttgcgatcgtgattaatgcaaacaaaaaccttttgcagaagtaaattgccttactaaaaaaacttttgcctgagtactggtttcactttgcgacaccaaacactttacttccaacggtattattaatatgacaacgaaatacttctgttcaccttttcaatacattcaaaaagagagagtaaaaaagagaatgttcccatgctctggggtggacgtggctcagctcagagaggaagccctggctgaaaaggctgcagcttaggctg

SEQ ID NO: 131175 - DNA, 181 bp, Homo sapiens; identical to SEQ ID NO: 12189
  chr19:20011649-20011830
  hyper

SEQ ID NO: 131176 - DNA, 121 bp, Homo sapiens; identical to SEQ ID NO: 12190
  chr19:20011889-20012010
  hyper

SEQ ID NO: 131177 - DNA, 121 bp, Homo sapiens; identical to SEQ ID NO: 12191
  chr19:20012069-20012190
  hyper

SEQ ID NO: 131178 - DNA, 181 bp, Homo sapiens; identical to SEQ ID NO: 55903
  chr19:20012429-20012610
  hyper

SEQ ID NO: 131179 - DNA, 875 bp, Homo sapiens; identical to SEQ ID NO: 55904
  chr19:20149645-20150520
  hyper

SEQ ID NO: 131180 - DNA, 976 bp, Homo sapiens
  chr19:20162580-20163556
  hyper
aactttgagcaggctgggaaacgatcccagacccttgagggtctgtgagaaatcaaactttcggcactttggaagtcaggaaaccagcacgttgggggaggcgggatcacagttacttgctgagacaagctgccctggctacgttcactcccgtcaggtaggagaggttaaagaacaggaaggctccccctccgcagggcggaactgctctgaaggcatggaggagcgacgctgaaggtggaggcttcgcccaccatgccgggagctaaaatttcttaaccaatgccggccagcgatggcagggctgcgggactacaatcccagcgcgcacagggatcagggactgtgcgcatcactggaagaagcggcagaacggcgcgcgcctcgctgagctttctgggagatgtagtctcatggcaactcccagccttttggccacaaggctacgggacctacaatcccagcctgtaccaggatcgggagcagttcgcagcactagaggaaggggcagggcggtgcgcgccgcgcctgatatgctgggagctgtagtctcttcacggtttttagccaatgagtaggtagcttcagaactacaatcccagtatgcatgggggcggtgcgtagtcctggaggtaggggctgagaggtgtggacttaccggtgtccaaagcattgctagcagccaattccatgccgccccgttgccagggagagtgaatacagctagggacgtgaagggtaggtctgggctgggcattgaggagggtattaggctaggaagtatacctcacctttgtccaaatcgggtggttcggcctcctctcattggccctatgcagctgggttgcctctctcacccgcacccaagggtctttccagagtgttgcgtcatttccagcccagggagctgccttctttcctaaactgcaatggaaactgtcctgatgtctgagacaatgtccgttgtgccgcagcc

SEQ ID NO: 131181 - DNA, 30 bp, Homo sapiens; identical to SEQ ID NO: 55906
  chr19:20164020-20164050
  hyper

SEQ ID NO: 131182 - DNA, 301 bp, Homo sapiens; identical to SEQ ID NO: 55907
  chr19:20188716-20189017
  hyper

SEQ ID NO: 131183 - DNA, 121 bp, Homo sapiens; identical to SEQ ID NO: 55908
  chr19:20189076-20189197
  hyper

SEQ ID NO: 131184 - DNA, 181 bp, Homo sapiens; identical to SEQ ID NO: 55909
  chr19:20189376-20189557
  hyper

SEQ ID NO: 131185 - DNA, 143 bp, Homo sapiens
  chr19:21512073-21512216
  hyper
acagagccacagagtctgggcctctaggagcagaggacaaacagcagtgaagacgagaccggagctccggctgcagcaagagacaaaggccgcgccaaacccggaagccgccctgtccggtccagctgcgtgtctgagtgaac

SEQ ID NO: 131186 - DNA, 121 bp, Homo sapiens; identical to SEQ ID NO: 12196
  chr19:21541708-21541829
  hyper

SEQ ID NO: 131187 - DNA, 181 bp, Homo sapiens; identical to SEQ ID NO: 12197
  chr19:21542068-21542249
  hyper

SEQ ID NO: 131188 - DNA, 121 bp, Homo sapiens
  chr19:21542308-21542429
  hyper
gtggggttcccagttcctattatctcctattaaaagttaatgggagtcactgcaaaaatattaaaagaatttaatcaaagagtggttctaggctgggcgcggtggctcacgcctgtaatcc

SEQ ID NO: 131189 - DNA, 336 bp, Homo sapiens; identical to SEQ ID NO: 55913
  chr19:21579818-21580154
  hyper

SEQ ID NO: 131190 - DNA, 101 bp, Homo sapiens; identical to SEQ ID NO: 12199
  chr19:21580233-21580334
  hyper

SEQ ID NO: 131191 - DNA, 339 bp, Homo sapiens
  chr19:21646194-21646533
  hyper
tggtgcttcagtttatttttgaacagggtaaagtaggaactggggaccccacagaccgcagctccttccacgcaggagacccgcacaaccagtcggagtctttccctgatgacctcacaacctggggaagatgacgggctgcgggcgcagagctgcgcaaagagggctacaggctggggctaaagccgctgtgctgaaacggtaaaggacgccccggggtccctgcaccggaggagagtgagggctgagctgcggggcactcaggctcacaagaccgtcccgccaccgccatttctggcgcgtcccaaagaggcctcccccgtctccaaacgccctgcc

SEQ ID NO: 131192 - DNA, 256 bp, Homo sapiens; identical to SEQ ID NO: 55916
  chr19:21657507-21657763
  hyper

SEQ ID NO: 131193 - DNA, 31 bp, Homo sapiens; identical to SEQ ID NO: 55917
  chr19:21664417-21664448
  hyper

SEQ ID NO: 131194 - DNA, 212 bp, Homo sapiens
  chr19:21688289-21688501
  hyper
cagctaggctgtcacgcttcattctgcccagcaactgatcaccctctgtcactcagggcctgagagggcgggtcttaaacattatccaatcaggcacgcagctggagcgacaggacggtttccggaatatggcggggcgtttggctcttgctgcagccagagctccaggtctcgtcttcatttctgtgtcctttgttcttagaggcccagcc

SEQ ID NO: 131195 - DNA, 181 bp, Homo sapiens; identical to SEQ ID NO: 55919
  chr19:21688740-21688921
  hyper

SEQ ID NO: 131196 - DNA, 256 bp, Homo sapiens
  chr19:21769118-21769374
  hyper
ttcccccagcccgcccgagagggtttgctggggcagggtggcccctgggacgggttccagacagttctaggcgctcaggtccgcagctgtgctacccccgccgcccgggacgcccggtccccgccagggccctctcactgtagctttaaggagggctggggccgggtgcagcggcacctggagtctcggtggaacccggcagcggtgggcgcggaccccggagaggctgccccgagcccgagcaccccctgaccgg

SEQ ID NO: 131197 - DNA, 104 bp, Homo sapiens
  chr19:21769579-21769683
  hyper
cgcctgcgtgggactccaggggccggcgccccgctccgctccccccaggcctcaaccccgctggctacccgcgctgaaacctcacctgccgccggctgcaaacg

SEQ ID NO: 131198 - DNA, 241 bp, Homo sapiens; identical to SEQ ID NO: 12203
  chr19:22018453-22018694
  hyper

SEQ ID NO: 131199 - DNA, 272 bp, Homo sapiens; identical to SEQ ID NO: 12204
  chr19:22018873-22019145
  hyper

SEQ ID NO: 131200 - DNA, 70 bp, Homo sapiens; identical to SEQ ID NO: 12205
  chr19:22034351-22034421
  hyper

SEQ ID NO: 131201 - DNA, 599 bp, Homo sapiens; identical to SEQ ID NO: 12206
  chr19:22034446-22035045
  hyper

SEQ ID NO: 131202 - DNA, 314 bp, Homo sapiens
  chr19:22610386-22610700
  hyper
aataattcaggcccgcggggccaccagccctccctcaagcccccccacactcatcaggtgacgacctccctgtgtgtggctgccaggctgggggtgggggtgtctgtgcttccctcgcccaatctgagagtggcctgttccagggggcgggcttcctctttgtttggcagccaggagtctggagcgcaggtgccgggcaggcagcactgggagcgctcggcgacttggctggaggccgaaggtgccgcccctggggaaccagagcgcctttgcaaggtgggctcggcgtacactcccctatccttctgtggccc

SEQ ID NO: 131203 - DNA, 306 bp, Homo sapiens; identical to SEQ ID NO: 55926
  chr19:22610883-22611189
  hyper

SEQ ID NO: 131204 - DNA, 42 bp, Homo sapiens
  chr19:22611241-22611283
  hyper
cgcggctcggtggccagggctccaaggcggggccgcccacga

SEQ ID NO: 131205 - DNA, 30 bp, Homo sapiens; identical to SEQ ID NO: 12207
  chr19:22715395-22715425
  hyper

SEQ ID NO: 131206 - DNA, 200 bp, Homo sapiens
  chr19:22817002-22817202
  hyper
tcagggcctgagggcggggggggggggggtcttaaacgttatccattcagcgacgctggcctgggaactgtccaatcaggcacgcagctggagcggaaagggcggcttccgggatgtggcggggtctttgtctctcgctgcagtcggagtatggtctagtgttcgctgttctgcgtcctctggtcctagaggcccatcct

SEQ ID NO: 131207 - DNA, 121 bp, Homo sapiens; identical to SEQ ID NO: 55930
  chr19:22817381-22817502
  hyper

SEQ ID NO: 131208 - DNA, 19 bp, Homo sapiens
  chr19:22817621-22817640
  hyper
atgggaagagctttggttt

SEQ ID NO: 131209 - DNA, 202 bp, Homo sapiens
  chr19:23257805-23258007
  hyper
gctcatttgttaattagcagtaattgcccgggtcagtgacacctcctacttgagcctctttccctgtccataaaatgcactaatactggggtgggtgggattgggaggtgggtcctggagctccatccaatcagtggcactggtgtaggaaccgcccgatcaggcgcgcagttggagaggagggcgtggcttccggcatttg

SEQ ID NO: 131210 - DNA, 293 bp, Homo sapiens; identical to SEQ ID NO: 12209
  chr19:23258305-23258598
  hyper

SEQ ID NO: 131211 - DNA, 33 bp, Homo sapiens; identical to SEQ ID NO: 55934
  chr19:23258705-23258738
  hyper

SEQ ID NO: 131212 - DNA, 205 bp, Homo sapiens; identical to SEQ ID NO: 12210
  chr19:23299706-23299911
  hyper

SEQ ID NO: 131213 - DNA, 24 bp, Homo sapiens
  chr19:23300330-23300354
  hyper
ggtctgtggcgttcccaattcctc

SEQ ID NO: 131214 - DNA, 99 bp, Homo sapiens
  chr19:23386683-23386782
  hyper
agaggcgccgccctgcgctaggccggagtctgcccggcccagcccctcctcactcccttggactcttcacggtgtctccgggcccctgcacaatcctga

SEQ ID NO: 131215 - DNA, 121 bp, Homo sapiens; identical to SEQ ID NO: 55936
  chr19:23432612-23432733
  hyper

SEQ ID NO: 131216 - DNA, 169 bp, Homo sapiens; identical to SEQ ID NO: 12212
  chr19:23432792-23432961
  hyper

SEQ ID NO: 131217 - DNA, 405 bp, Homo sapiens
  chr19:23433023-23433428
  hyper
cggagccgccactctcaccatttctaggcttccaggggaggccctggcgtcttagctgtggatctcccaatgcttgcaggtcagagggccacagaggctgggcctctaagagcaggggacacaaagcagggaagacgagaccaagcgctccagctgcagcgagagacaaaggccccgccaaatcccggaagccgccctgtccgctccagttgcgtgcctgattggacggtccccagctcagggtccctgattggaaaacgtctaaggcccagccccttcaggccttaagtgacagaagacctgaccaaacgctggactgaatgaagaaagagtgacagcctaagctgcagcgttttcaggcagggcttcctccctgagcttagcccaccccggagggtatttgca

SEQ ID NO: 131218 - DNA, 28 bp, Homo sapiens
  chr19:23456223-23456251
  hyper
agaagcggctgggcgcggtggctcatgc

SEQ ID NO: 131219 - DNA, 628 bp, Homo sapiens; identical to SEQ ID NO: 55940
  chr19:23456490-23457118
  hyper

SEQ ID NO: 131220 - DNA, 145 bp, Homo sapiens; identical to SEQ ID NO: 55941
  chr19:23577690-23577835
  hyper

SEQ ID NO: 131221 - DNA, 121 bp, Homo sapiens; identical to SEQ ID NO: 12217
  chr19:23578014-23578135
  hyper

SEQ ID NO: 131222 - DNA, 121 bp, Homo sapiens; identical to SEQ ID NO: 12218
  chr19:23578194-23578315
  hyper

SEQ ID NO: 131223 - DNA, 25 bp, Homo sapiens
  chr19:23578434-23578459
  hyper
agagtgacagcgtaggctgcagcct

SEQ ID NO: 131224 - DNA, 83 bp, Homo sapiens; identical to SEQ ID NO: 12220
  chr19:23598012-23598095
  hyper

SEQ ID NO: 131225 - DNA, 623 bp, Homo sapiens; identical to SEQ ID NO: 55946
  chr19:23598334-23598957
  hyper

SEQ ID NO: 131226 - DNA, 221 bp, Homo sapiens
  chr19:23653858-23654079
  hyper
ggagcttctcccgctcgaacaatttgcagctagttccggggcttcccttcctcctcccacaccggcccgcatcctagtgttgctttctctgcccccagcaccagcctcttcttgggctccctcctccccttcccactcgcgtctcttaggaaactgcgaccctagtgtttgctaaggagcaggggaggtccttcccgtcgccgacgccccccgcccggaaa

SEQ ID NO: 131227 - DNA, 185 bp, Homo sapiens; identical to SEQ ID NO: 55948
  chr19:23654103-23654288
  hyper

SEQ ID NO: 131228 - DNA, 181 bp, Homo sapiens; identical to SEQ ID NO: 12222
  chr19:23869521-23869702
  hyper

SEQ ID NO: 131229 - DNA, 284 bp, Homo sapiens
  chr19:23869881-23870165
  hyper
atttctgcaggtcacaggcccacagaggctggacctctaggagcagaggacacagagcaatgaaagcgagacctggagctccggctgcagcgagagacaaaggcgccgccaaatcccggaagccatcttgtctgctccagctgcgtgcctgattggacggttcccagcccagcgtgcctgattggacaacgtttaaggtcctgacccttcaggccctgagtgacagaagatgtgatcagacactgggctgagtgaagactgatagcctgcgctgcagccttttc

SEQ ID NO: 131230 - DNA, 206 bp, Homo sapiens
  chr19:24154499-24154705
  hyper
gcccactggccagcgcgtttctgcgccgggccgggtccccgagctctgcagttctccgccctgcctggaaaggaagcggccccgccaggtagtgggatcggccgccgcgtcccgtcctcacccttggccccgagggggtgacatcctcgatgtgccctcggcccagaaaacgcgccgcttcccatggagggcgtcggcgacaggaa

SEQ ID NO: 131231 - DNA, 701 bp, Homo sapiens; identical to SEQ ID NO: 12224
  chr19:24216103-24216804
  hyper

SEQ ID NO: 131232 - DNA, 100 bp, Homo sapiens; identical to SEQ ID NO: 12225
  chr19:24216923-24217023
  hyper

SEQ ID NO: 131233 - DNA, 76 bp, Homo sapiens
  chr19:28284059-28284135
  hyper
ttacagtggcagcagcgtccctgtgcgaggtctaacccaggtgtgggccctgcagccagcccgggggtccaatggg

SEQ ID NO: 131234 - DNA, 812 bp, Homo sapiens; identical to SEQ ID NO: 12227
  chr19:28284337-28285149
  hyper

SEQ ID NO: 131235 - DNA, 185 bp, Homo sapiens
  chr19:29284390-29284575
  hyper
caacgtacctgagcccggccagccgctgtcgctgtcgccgccgcactcgcctgtccggacgcaccttcctcctcctccgcggcccccgagaagctgggcgcgcaggcaagggaggcgcggcggcccctgcggctggtcagttcaccaggtgcctgctcccgagcgagttgccaccgaccccgccg

SEQ ID NO: 131236 - DNA, 5 bp, Homo sapiens
  chr19:29284929-29284934
  hyper
ggagg

SEQ ID NO: 131237 - DNA, 30 bp, Homo sapiens; identical to SEQ ID NO: 55955
  chr19:29704207-29704237
  hyper

SEQ ID NO: 131238 - DNA, 202 bp, Homo sapiens; identical to SEQ ID NO: 12228
  chr19:30015760-30015962
  hyper

SEQ ID NO: 131239 - DNA, 904 bp, Homo sapiens; identical to SEQ ID NO: 12229
  chr19:30016024-30016928
  hyper

SEQ ID NO: 131240 - DNA, 58 bp, Homo sapiens; identical to SEQ ID NO: 12230
  chr19:30017451-30017509
  hyper

SEQ ID NO: 131241 - DNA, 144 bp, Homo sapiens; identical to SEQ ID NO: 12231
  chr19:30017577-30017721
  hyper

SEQ ID NO: 131242 - DNA, 982 bp, Homo sapiens
  chr19:30017765-30018747
  hyper
cgttcccagtcccgccggggccccggctgcggaaaggatgcctgcggggagcgggagtaggcgcgccccagccaggctctggcggtgcggccaggggcgggggagaagcacgagtcgcccctgccgccccgccccatccggagggaagcagtaggcagccgatggccggtccctgcctcggccctgcagccgcttccccgaactttgctagcccctccggccgtgcgccagggagcagctgcggggtggggggcacaaggccagccagccagagaccgactgcctcgctttaggttgccccaggcccccgacctacagctggtcacgcctctctctctctccccacccccagctgcattcacagaagtccccaaagatgtgacagtacgggagggagacgacatcgaaatgccctgcgcgttccgggccagcggagccacctcgtattcgctggagattcagtggtggtacctcaaggagccaccccgggagctgctgcacgagctggcgctcagcgtgccgggcgcccggagcaaggtaacccgccgcccacgcggtaccggcgcgcgcccggctcgcgcccggggcggcgaaggctaacccagggagggaagcagcgggcttcactcgcgcagggcgccgccctgtggcgcagcccatcttccaccttcgcatcccaaagcatcttcaaagtcagcagtggttacccccaaacctgtcaattattttgacagcatcgctgttcccaccacctcccagaactccattcacgcccagcccctaaagagccacacctcagcctggtcgcttgctcgtgctcgctggctgcggccctctgatgggtgctgggtagtgaaggaagcccccttggtcccatcaggctctccccgccctctgccactttgaggaccccagggctcccacggctgcgttccagaggccaccagaaaaccgagtaccggaaagccggcaggacctccag

SEQ ID NO: 131243 - DNA, 530 bp, Homo sapiens; identical to SEQ ID NO: 12233
  chr19:30019080-30019610
  hyper

SEQ ID NO: 131244 - DNA, 270 bp, Homo sapiens; identical to SEQ ID NO: 12234
  chr19:30019660-30019930
  hyper

SEQ ID NO: 131245 - DNA, 357 bp, Homo sapiens; identical to SEQ ID NO: 55963
  chr19:30019993-30020350
  hyper

SEQ ID NO: 131246 - DNA, 480 bp, Homo sapiens
  chr19:30020558-30021038
  hyper
atgccactgggtagacgcgggtgaaagggaagccggatcgtgatggtgggcaaaccaggatccgggaagtgttggggtgcgcggatgagggggcgcgacggccagggtggccagaagagtaggtttgggagctgcccagcccggcctctaaccctgctctcttgcagaccgtacgcgtccagggcaatgacatctcacaccggcttcggctgtctgccgtgcggctgcaggacgagggcgtgtacgagtgccgcgtgtcggactacagcgacgacgacacgcaggagcacaaggcccaggcgatgctgcgcgtgctctcgcgcttcgcgccgcccaacatgcaggccgccgaggccgtgtcccacatccagagcagcggcccgcgtcgccacggcccagccagcgccgccaacgccaacaacgcgggcgccgcgagccgtaccacctccgagcccggccgcggcgacaagagcccgccgc

SEQ ID NO: 131247 - DNA, 103 bp, Homo sapiens
  chr19:30021252-30021355
  hyper
cgccgggacgccccggggggctccggacccaggacccgccccctgggcgcatttgcatatgcatactccttcctagttaggtcgggagcgccccccccagggc

SEQ ID NO: 131248 - DNA, 236 bp, Homo sapiens
  chr19:30096854-30097090
  hyper
agacctcaccccaccgtccccgtcccatttccgccctcccagatccccaacctccttcgagtcctctccaagtcgcctcgcctcgctccactccaggccttagcaagcattccacatgcctttaccccaaccctactgcctgtcccccaaaagatgcaggcggaaaagaccccaggaagcgagcccactcctccccactgctcagcaacaccgcctacgacgttctcagtagccga

SEQ ID NO: 131249 - DNA, 30 bp, Homo sapiens
  chr19:30097329-30097359
  hyper
agtcctaacagaaccgctacaggaatgggc

SEQ ID NO: 131250 - DNA, 30 bp, Homo sapiens
  chr19:30116154-30116184
  hyper
ttatggtccccacaccgtggcatatgtttc

SEQ ID NO: 131251 - DNA, 100 bp, Homo sapiens; identical to SEQ ID NO: 12237
  chr19:30155979-30156079
  hyper

SEQ ID NO: 131252 - DNA, 88 bp, Homo sapiens; identical to SEQ ID NO: 12238
  chr19:30156298-30156386
  hyper

SEQ ID NO: 131253 - DNA, 269 bp, Homo sapiens
  chr19:30165118-30165387
  hyper
cacatcgaggagtgcgtgcggcggcaactgagggccacgggccgcccgcccagcacggagcacgcggcaccctggatccccgacaaggccacggacatctgcatgcgctgcacgcagacgcgcttctctgccctcacgaggcgccaccactgccgcaagtgcggcttcgtggtctgcgctgagtgctcgcgccagcgcttcctgctcccgcgcctgtcccccaagcccgtgcgcgtctgcagcctctgctaccgcgaactggccgccca

SEQ ID NO: 131254 - DNA, 56 bp, Homo sapiens
  chr19:30206576-30206632
  hyper
ggtcaagggtgctgcgtcagtatttggtgaatgtgtgggccggagccagatttcct

SEQ ID NO: 131255 - DNA, 302 bp, Homo sapiens
  chr19:30215211-30215513
  hyper
cagaaacctcaaagattacagcgctcgcacggcaggagcgcagcggcttcccatacgccggcagacaatggggcggaggaaggaaggggacggtggcctggggacccccgcgcccgcagcacgtgcaccgagcctggagcgcccgctttacagatcttgtcgctccacccctaaaacaaaggccccggggccccatctgtgccgggcgcgggggagggcgccgcacttgctgcccgccgcgtgcaaagcgagccagacaaagggctcagccctgcagacgcgagcagtggggaaataattaa

SEQ ID NO: 131256 - DNA, 30 bp, Homo sapiens; identical to SEQ ID NO: 55973
  chr19:30296837-30296867
  hyper

SEQ ID NO: 131257 - DNA, 30 bp, Homo sapiens
  chr19:30302461-30302491
  hyper
gaacccgcgccgcccgccgtgtttacattc

SEQ ID NO: 131258 - DNA, 30 bp, Homo sapiens
  chr19:30335232-30335262
  hyper
ctcagctgggccaacgcggaccccggcctg

SEQ ID NO: 131259 - DNA, 30 bp, Homo sapiens
  chr19:30364447-30364477
  hyper
tgggtggcgcagcccgggggagcggaggga

SEQ ID NO: 131260 - DNA, 194 bp, Homo sapiens
  chr19:30713398-30713592
  hyper
caacaagggccgcgccgggaggtctccccggggacccccactcagcttgctcaggtcctggaggcatgcagagggcgtcggcgccgacagggggagccggagagccccctgcccggccgtctgcggggctcaggcggggcttggcctccgatgagcgcgctgtctctgcccggtgggtcccaccccgcccggcc

SEQ ID NO: 131261 - DNA, 254 bp, Homo sapiens
  chr19:30713685-30713939
  hyper
cgaggccgcagaagccttgggcctccaggcctggaaggggctcccctggcctggaggccatgggcccggcccagaccggccagacaccgccagggacccccagaacgacgccaggacgcgcgccgggctccgtgcctcccacggcccaggcgaggccggcggctcgagggttaaaaggcgacccccattctgtaggggagaaagtgccttttctccaagtccatatggtcacttcctttcgacctgctcggccc

SEQ ID NO: 131262 - DNA, 126 bp, Homo sapiens
  chr19:30714451-30714577
  hyper
ggcagcggcaaggcccggtgcccgccgacggcgcgcctggggagaggaccaccggcggtgagggcccaggcccagcgcccagggcagctgcgacgcgtccgtctccaacgccggcacgctaaccca

SEQ ID NO: 131263 - DNA, 207 bp, Homo sapiens
  chr19:30715559-30715766
  hyper
ggcaggcgcgggaggcgaggctgaggacctctccgcgtttgtatcgcggcgattggcaacataactgccttatttacattaaatacgccacaaggttacagcgcggatcaacgtcatttgatcgctgatgactcccttaaacgcccgggctgtgactgattcttcgcgtcccgctgtccaccgagattcacccgggagttttttttt

SEQ ID NO: 131264 - DNA, 609 bp, Homo sapiens; identical to SEQ ID NO: 55977
  chr19:30716160-30716769
  hyper

SEQ ID NO: 131265 - DNA, 3088 bp, Homo sapiens; identical to SEQ ID NO: 55978
  chr19:30716952-30720040
  hyper

SEQ ID NO: 131266 - DNA, 31 bp, Homo sapiens; identical to SEQ ID NO: 55979
  chr19:30730220-30730251
  hyper

SEQ ID NO: 131267 - DNA, 419 bp, Homo sapiens; identical to SEQ ID NO: 55980
  chr19:30865605-30866024
  hyper

SEQ ID NO: 131268 - DNA, 308 bp, Homo sapiens
  chr19:31210544-31210852
  hyper
tcagctccgtgatcccgcgcttggccgcgcgcctggagaggtgcgcccgggccaggagcagagcagggcgcggcgccaggcgggggcgcccggggcctgcgtgtcgtcgcgggtgggggcgggtgtcctcgggcgcgcacccgctgcggcctccggctctggaccagcccggtggctccaagggatcaaagcgaaaaacagctttggccgcaaagggagaacgccctgagccagctcgtccctaaggactcgtcttttggcgaggaaggggacgcctaggcccgtatggggcgcgctgtggcctgggc

SEQ ID NO: 131269 - DNA, 72 bp, Homo sapiens
  chr19:31839493-31839565
  hyper
caggggagaaggaaacgccagcatctaacatggacttgacagtcatctgacaatacccagaccctgtgcgct

SEQ ID NO: 131270 - DNA, 90 bp, Homo sapiens; identical to SEQ ID NO: 12245
  chr19:31839837-31839927
  hyper

SEQ ID NO: 131271 - DNA, 2539 bp, Homo sapiens
  chr19:31839941-31842480
  hyper
cgcacccaaacaggagagcggcgcccggagttactcagtgcgggcagaagagcggggcgaggagcggggtcgcgcccgctggaggcgcggggcgagcggaggaagaggaggaggagagcagaaggaaggggaagcggctcgtacctgctgcgcgccggggcgcctgctgcttcctcctcggcatgatgcttctccggcgactgccactgccgccgccgccgccgctgccgggctgaggacagggagggagggggcggcgggcccgcgggggggcgaggcgggcctgctctcagcctcccccccggagagcggccgcccgcaggatgctgctgcgcccaggctctccgcgtcccccccgcgccgcgctccgccgcgaaccccgaacgtgcggagggaagaaggagggcgggcgagggaggctcggggagggaggagcacgggggggaggaggaggcagaggaggaggaggtggaggaggaggaggaggaccgcgctgccggcggaatgggaagtttgacaaatcgctccagaggccagaggaggagggggcggggaggagcggcggccctgcccccccccgccccgtccccagacgaggtgcgcggggttcggggctggggggcggggagagggcgggcagagcggtgggaggaggagcgcgggagcggcccggaccggtactgccccggcccccgcccctaggccgggggtcacggcatccggggggacgcgcagccgccgccgcggcccggggctcggcggtccagtcttctgcccgtggcgcggctggagcggcggcgtcggcaacaggcaagcttaaaggaaaaggagatgatcgtgtcaatcgcccgcccgcgggggcgccgcgcccccgcccccggccccaggcccgcgtgggacccccgccccgccagcgaaaggggtgccgcccctccgcctccgccccgtgcgcacacgcgggggcgcggcgccagccccgccgagcccgtcccggggcgctcgttaccccccacccctattcccacccagcgttcgtccccagccaccccccagctgccccacccggctcgcactcctctccacccgccgactccggagcccccagcgtggtccccgggccggggctggcgtcccccggggaagccagagcccacgggcaggccccctccagggaggaggcgggcgcgggccggggcgggtgggggcagccctcagaccccgcgccacccagctcctcccccaggacccgccgtagccacttcccccaattttttttccccggacaaactttcctgggcccgtcccgggggtcggtgtgggagggggttccttcaagtttcctctcctgactttgggatgatcagggtccctccaccccgcccctcgcccccgggagccgggccgcgccccccatccacggcgcgggccgatcctagggcgggacgggggcgggagaaggaaaccgggctcccctgcccatcccccgccaggggctccccccgagagcctagggggccgccgcgccgtgtcccgcgcccggcctgccggggctgctggactagagggattgattattgattggtgatcggggtcgctgaggctccgggccggcccggccgactggccgcggcaagaaggagctggctgggcggcgtgggcggcggggcgacgcgggctcacttacgggcggcggtgagggcgcgggtgggccggagctcatgcgggcgacccccgggcggcggcggctgagcgggagccggagcccgagcggcgcgggcggcggcgcatcgatgcgctgcgggctcgattgcgtctccctgggccagctctcaggccgggaatggggcggccgcgccggggccggctccgggcgctgccgggcggcggctgctggagcgcgggggcggcctccgggcccactatccccgaggcggccctgcgcccgggcgcgccggctggggctctggcgctctcgcaggccccgaggccgacagtcccggcgagggcgggcgccccgcgctccagcaccggctgcctgagcgctcctggagcagcaaaccccagacttcttcctccttctctccttccttccttccccctccccttatctttttctttttttagtctctttctccctctttttctgccctgtgtcctttttattttttctctacgactgtttttgcaagtttgtttcaaaagttcacagcatgctttcttttcttttagaccgggagacagtgatctcacccacacggtaagatcaaaagtctccgctcgcccagcctgcgggcttgggctgggtccagacgtctcccaggatgcagatgcgccgccgctggcctccccggctataaagccgcctccagcgcctttccgcgcgcaggagcgctcggagttgtggggtacggaccccaggcggggcagggagtccgaggcgggctgcggcggggctctcgggctggcggactcgggggctgaggcgccgtgcgcgttgggtgcccgcggccgcagaggccagaaccgctactcctccagg

SEQ ID NO: 131272 - DNA, 48 bp, Homo sapiens; identical to SEQ ID NO: 55988
  chr19:31842828-31842876
  hyper

SEQ ID NO: 131273 - DNA, 172 bp, Homo sapiens; identical to SEQ ID NO: 55989
  chr19:32532871-32533043
  hyper

SEQ ID NO: 131274 - DNA, 399 bp, Homo sapiens; identical to SEQ ID NO: 55990
  chr19:32715442-32715841
  hyper

SEQ ID NO: 131275 - DNA, 30 bp, Homo sapiens; identical to SEQ ID NO: 12250
  chr19:33072491-33072521
  hyper

SEQ ID NO: 131276 - DNA, 114 bp, Homo sapiens; identical to SEQ ID NO: 55992
  chr19:33166108-33166222
  hyper

SEQ ID NO: 131277 - DNA, 175 bp, Homo sapiens; identical to SEQ ID NO: 12251
  chr19:33166793-33166968
  hyper

SEQ ID NO: 131278 - DNA, 499 bp, Homo sapiens; identical to SEQ ID NO: 12252
  chr19:33166988-33167487
  hyper

SEQ ID NO: 131279 - DNA, 518 bp, Homo sapiens
  chr19:33167496-33168014
  hyper
cggccgctggtgcgcacaggtgtggctggcgcctcctccggcgtggcggcgcgcgcgctgagcacccgcagcctgcggctcgaggcggagggcgacttcgacgtcgcggacctgcgggagctggagcgcgaggtccttcaggtgggcgagatgatcgacaacatggagatgaaggtcaacgtgccccgctggaccgtgcaagcccggcaggcggcgggcgccgagctcctgtccacggtcagcgccggcccctcctcggtcgtgtccttgcaggagcgcggggggggttgcgaccccaggaaggccctggccgccatccttttcggcgccgtgctgctggcggctgtggccctagccgtgtgcgtggcgaagctgagctgacggacacccgacggccgcctgctgctgccgctccctcccctgagaaaagactcgggatgggtgtggggtctggcctgtgcaaggggagtggtcctaaaaccccgtgtgtgcatgggtacacgcgcgtttccagtgca

SEQ ID NO: 131280 - DNA, 145 bp, Homo sapiens; identical to SEQ ID NO: 55996
  chr19:33182511-33182656
  hyper

SEQ ID NO: 131281 - DNA, 30 bp, Homo sapiens; identical to SEQ ID NO: 55997
  chr19:33183262-33183292
  hyper

SEQ ID NO: 131282 - DNA, 54 bp, Homo sapiens
  chr19:33462903-33462957
  hyper
tgcagcaaccacgtcggccattggctcagctcggccctcgaccaatcagagcta

SEQ ID NO: 131283 - DNA, 30 bp, Homo sapiens; identical to SEQ ID NO: 55999
  chr19:33532284-33532314
  hyper

SEQ ID NO: 131284 - DNA, 40 bp, Homo sapiens; identical to SEQ ID NO: 56000
  chr19:33555230-33555270
  hyper

SEQ ID NO: 131285 - DNA, 585 bp, Homo sapiens; identical to SEQ ID NO: 56001
  chr19:33555490-33556075
  hyper

SEQ ID NO: 131286 - DNA, 30 bp, Homo sapiens; identical to SEQ ID NO: 56002
  chr19:33572234-33572264
  hyper

SEQ ID NO: 131287 - DNA, 30 bp, Homo sapiens; identical to SEQ ID NO: 56003
  chr19:33575048-33575078
  hyper

SEQ ID NO: 131288 - DNA, 999 bp, Homo sapiens
  chr19:33685158-33686157
  hyper
tcggcgggcgcgtcacgtggctggcgcagcgcggcctccaggctccgggcgcgggcgaggggccgggcgggaggactgacagacccacggacgctctaccggcggcacccggccgggcgggctgggcgcagcgcggggcggcccggggacgccggggccgggcgggctgcgcgccgcggggcatgggcgcgccgggggtccccgggcccaggccggccgcggcggggctcccggggcgcgggggcagcggcgggcgggggtcttccctggcggccgccgctgagcccccgcagggcccgtgacgccgcggccgatgtggccgcgcgcgccctacgggcctgcaccgccaccgcacaaagacgcctcgggagccgccgcctgcacccgggccgcagcagccacgccagccggagcccgagccctagcccgagcccgagcccgagccgcagccagagccagagccggagccgcagccggaaccggagccggagccgcggggcaggaggcggcgcccgcgggcggccgggcccggcatggagaagcgcgcggccgcggggctggagggcgcgccgggcgcccgggcgcagctggccgtcgtctgtctgggtgagtgggccgcgcgggccgggcaggtccgggtcccccgcatggcagtccgcgccgcgccctgaccgacctcctctccggccgcggcatcccgagccccccaccgcggtggctcccgcgcggagacccagagaggggccagcaccgcttgcccgcctggccccgggcctgggagggcgactctggtggcgcagccccggctcccgccccgctcggagtagcgcccggagcccgggctgagcgctggcaggaggcccttcgtgcaggcggcagccttcaacccggcccgcccgcgctgagcctggagacgagggggccccgggagctggggacaaaggccaggccggctgtcccctgaagaagaaactgtttccggcccggagttggggtggg

SEQ ID NO: 131289 - DNA, 311 bp, Homo sapiens; identical to SEQ ID NO: 56006
  chr19:33717597-33717908
  hyper

SEQ ID NO: 131290 - DNA, 116 bp, Homo sapiens
  chr19:33717938-33718054
  hyper
cggggcgggggcgggtccctggcaggggcgggtccctggcagcggcagggcctggaggtgggagcggggcggggccggcgtttgcaggcacacaggagcttcgaagttgggggcgg

SEQ ID NO: 131291 - DNA, 3867 bp, Homo sapiens; identical to SEQ ID NO: 12259
  chr19:33790838-33794705
  hyper

SEQ ID NO: 131292 - DNA, 30 bp, Homo sapiens; identical to SEQ ID NO: 56009
  chr19:34012744-34012774
  hyper

SEQ ID NO: 131293 - DNA, 403 bp, Homo sapiens
  chr19:34112326-34112729
  hyper
cgagctgaagcccagggatatcccagaatcttcctcaggatcaatcttccgcctttcaccggccctgcgcccccgcagcatcgggtcctgggcgcgcgcccctgccccgctgtggtcaaggcccgccccggtgacgcctggtccttttcccgggttggcgccgcgtgcgacccaccgaggcagtggcagcactggccgcggtctggagcctagcgtcaggccggagtccggctctcctgaaccgggagaccggcgcagccccagccacgaccgctcccacccccgcggccgccggaccgcgcccagcagcgactctttctgagagcgctgccagaggggccgcgggagccgcagagcgcgcgtgggcgcggcgcccgcgagcccccgggagggccgagtgcat

SEQ ID NO: 131294 - DNA, 157 bp, Homo sapiens; identical to SEQ ID NO: 12261
  chr19:34113145-34113302
  hyper

SEQ ID NO: 131295 - DNA, 683 bp, Homo sapiens; identical to SEQ ID NO: 12262
  chr19:34113366-34114049
  hyper

SEQ ID NO: 131296 - DNA, 87 bp, Homo sapiens; identical to SEQ ID NO: 12263
  chr19:34114286-34114373
  hyper

SEQ ID NO: 131297 - DNA, 216 bp, Homo sapiens; identical to SEQ ID NO: 56014
  chr19:34175218-34175434
  hyper

SEQ ID NO: 131298 - DNA, 858 bp, Homo sapiens
  chr19:34262993-34263851
  hyper
aggggaacccgtctgcggctccgccagcgccgtcgccgtctgctcatcaagaaaatgccagctgcggcgaccatcccggccaacagctcggacgcgcccttcatccggccgggacccgggacgctggatggccgctgggtcagcctgcaccggagccagcaggagcgcaagcgggtgatgcaggaggcctgcgccaagtaccgggcgagcagcagccgccgggccgtcacgccccgccacgtgtcccgtatcttcgtggaggaccgccaccgcgtgctctactgcgaggtgcccaaggccggctgctccaattggaagcgggtgctcatggtgctggccggcctggcctcgtccactgccgacatccagcacaacaccgtccactatggcagcgctctcaagcgcctggacaccttcgaccgccagggtatcttgcaccgtctcagcacctacaccaagatgctctttgtccgcgagcccttcgagaggctggtgtccgccttccgcgacaagtttgagcaccccaacagctactatcacccggtcttcggcaaggccatcctggcccggtaccgcgccaatgcctctcgggaggccctgcggaccggctctggggtgcgttttcccgagttcgtccagtacctgctggacgtgcaccggcccgtggggatggacattcactgggaccatgtcagccggctctgcagcccctgcctcatcgactacgatttcgtaggcaagttcgagagcatggaggacgatgccaacttcttcctgagcctcatccgcgcgccgcggaacctgaccttcccccggttcaaggaccggcactcgcaggaggcgcggaccacagcgagg

SEQ ID NO: 131299 - DNA, 218 bp, Homo sapiens
  chr19:34269015-34269233
  hyper
ttgcgcccaagcggccggcaggggctccctcgcgttcgtacccacaggcgcagagccgttctccgccgccaggtggggctaagtccccgctcccgagcagcggcttggggatccccggcggggccgccaggtggcagcagcgctctggccgcgcggctccagctcccgggcgccccgcgtccccagcctccccaccgcgcagtcggctcctctgtcac

SEQ ID NO: 131300 - DNA, 30 bp, Homo sapiens
  chr19:34286223-34286253
  hyper
tggacgctctctccacgcgcgcgaggtcct

SEQ ID NO: 131301 - DNA, 998 bp, Homo sapiens
  chr19:34286492-34287490
  hyper
gcagtgccggccagtcgcgcgctccgtttcctaggagccgggaaatggtcgccgaggaggaggaggaggcacgggcggggcgcaaaggaaacaggaggaagaggaaggggaggaggagtgggagtgggagaaaaggaggaaggggcggccgaagcggagactggggaggggcgtccggggcgcggacctcggccgcggggagtcttggctgccgccgtctccatcgcgccgcgcgcgtaaaggaaatggcgcgtctagccgcgagcggtcggcccggtgccccagcgcgtccctcccccgcggcggccgaccgcgtgtccgcagacgtcacgggagaggggcagcggggcagagaccctgggagggcggccagggagcgggggaggggcggcctggcccccggctccgctccagccccgaccgactggcagcccagtttcttcccaagtcccgcccccagccccgggcgccgcggcggcggctgctctcctctttgtaaccgaggagtcaagaaatgtgagaaacgtgccctgtgttacttatttgggagccgaaaatttatgcccagctgaaagcgcccggggaaatattacatcagatgaaatgacaatgattaaaatcagcctctcccccgccccctccccgagcccggaggaggcccgggcgccgcgtggccggccggcggggggcggggggctgggccgcggagggcgctggggcctgggcgcaccgctcccgggagggtcctggccgcggccccggcgggaaggcgcgggcttcgggagaggcgggtggggatcgcccggcgaaaggaggggaaacggcgcgtttttgtcgccaggcgcgggcgcgcggagctaattgcgactctaatcctctgccccgcggcgcagccgagccccgagccaggagtcgccgcgcgcgcccgttcgcgctgggtaatttggggccggatcgctgccctttacgtccgggctgggccgcggcgaggcgctggc

SEQ ID NO: 131302 - DNA, 975 bp, Homo sapiens
  chr19:34287807-34288782
  hyper
taggcggcgaagctgcgcccggcgcccgagaccggcagctgcgtggggcgggggctgcgcccgagcccgatctgccggctccgaggtaagctcagcgcgggcggccaccgctcagagccgcgcaaccctgccccgaagtggctgcgataccgagaaagtcgcccggccagggtctggacctgggcgggggcggccgctttgtccctctgctgggcggcgggggctggcggcgcgggggtgcccagcacaaaggcctggtgcaagagtggggttgcccacgtgggctggtcctggccgcgggtggaccctccccacgcgggcggtctcggagcttcctgccgcgcggtgtgtgtgtgtgtgtgtgtgtgtgtgtgtgtgtgtgcgcgcgcgcgcgcgcgcgcttgtggaggtccccgcactctggcccctgttctgggccgagcgccctgcagagctggcgagtttccggggtcagaaacgggctcacgcaactggggcttcgggatgcacaagtcccggcttggcgcccaaaatcagagaaagtctccagtgggacagatgtgcgtcctctgacgcccaccccacgagtccgaaacctggcaggaggggctgtcgcgctggtggtggtcccgggcgcgcagggtttggggctgggagaggggccgcgatgggagggatcgccgcctgcagatccggttccccgctgcccgcccgcaccccctgacctggacgcgcgcacccggcacacactcgcaaacacacccgggggcggacccccgcctctgcagcgcctttctgtcttccggcggcccccacccgcgactgcagaaagataagcttcaagttttcgctccgtatctcaaatgtgcatgaaggaatttaactgcacgagtgaataacagcattagtttcaattaatttttttttaatcccggcaacaataaactttgagaacaaaagcgcttttacgtcctt

SEQ ID NO: 131303 - DNA, 687 bp, Homo sapiens; identical to SEQ ID NO: 12266
  chr19:34310889-34311576
  hyper

SEQ ID NO: 131304 - DNA, 30 bp, Homo sapiens; identical to SEQ ID NO: 56018
  chr19:34396701-34396731
  hyper

SEQ ID NO: 131305 - DNA, 30 bp, Homo sapiens
  chr19:34625177-34625207
  hyper
tagtgcccctgaagcgcgcacgacgccgca

SEQ ID NO: 131306 - DNA, 30 bp, Homo sapiens; identical to SEQ ID NO: 56019
  chr19:34850560-34850590
  hyper

SEQ ID NO: 131307 - DNA, 191 bp, Homo sapiens
  chr19:34895107-34895298
  hyper
acttcctatcacagcgcattaaggggcacataatgcctgggactccgggatttcgagcccctgacgccagcggcgcctctgtggctctgggacctgagcgcacgcgccttaaagccacgcctccgcatcggatcctagtaagggagcggggttatcattttagcgtagcgttgcgcgtgcgcagagaggcc

SEQ ID NO: 131308 - DNA, 86 bp, Homo sapiens
  chr19:34919057-34919143
  hyper
cccaggctagaaggcgacccttagactttttaggtctgatggcgggcctatgctggtgtgggaataacaccgccggtctcagctgg

SEQ ID NO: 131309 - DNA, 30 bp, Homo sapiens
  chr19:34919396-34919426
  hyper
gctggtggtgggggcgggcggcatcggctg

SEQ ID NO: 131310 - DNA, 296 bp, Homo sapiens
  chr19:34972067-34972363
  hyper
cgcgaggaccagtccccaaccaacccgctcctagttctgggcgccttccccagcagtcagatgggggcttcagaggccggtgcgcggccacatggccccgggccaggcagggggtcgtggggacgcatctgcgctaggcgcacagtattcctgggcgcgggacgggcgaagcgccgtgggttccaagctgagctgggtcggccctgcagcgccggagagcaaggcggcgcagggaagggagatggggcgggatgtggggaaagctgtcgactgcttggatctctccggcccggatg

SEQ ID NO: 131311 - DNA, 125 bp, Homo sapiens; identical to SEQ ID NO: 12268
  chr19:34972522-34972647
  hyper

SEQ ID NO: 131312 - DNA, 448 bp, Homo sapiens; identical to SEQ ID NO: 12269
  chr19:34972675-34973123
  hyper

SEQ ID NO: 131313 - DNA, 214 bp, Homo sapiens; identical to SEQ ID NO: 12270
  chr19:34973242-34973456
  hyper

SEQ ID NO: 131314 - DNA, 240 bp, Homo sapiens
  chr19:34973553-34973793
  hyper
cgctcggcccggcagttccctgcgcgcatggctggggtccggggttccgagactgcctcgggtaggcggccggatcagcggaggagagcacggggctggctgggggtgcagcagtgcacggggttgggacgaggaaggtgcatcccctggggactggggagcgcaaagggtgagtgagtgcgcctggatccccagcagcggcttcacccctgcctctgggtcccccgacacacgaggggt

SEQ ID NO: 131315 - DNA, 30 bp, Homo sapiens
  chr19:35066265-35066295
  hyper
tcaggggcccgggaccgcgtccccgtcccc

SEQ ID NO: 131316 - DNA, 30 bp, Homo sapiens
  chr19:35066605-35066635
  hyper
tccagccgcggggctcgctcaggagcggcc

SEQ ID NO: 131317 - DNA, 19 bp, Homo sapiens
  chr19:35068404-35068423
  hyper
cccggggctgcagcgcggc

SEQ ID NO: 131318 - DNA, 279 bp, Homo sapiens
  chr19:35068601-35068880
  hyper
cgtgtcctgggggcgggcccgggtggcgtggcttggctggacagggagggtaggggcggtagtggggtttgtggcactccagcgtagcaggttgcatctgcgggtccccgcccctgccccgcccccagcccctcccatggtgctggatccaggcagctgatgtgcaggcggggacccctggctgggcgcggtcctgggcgcgtccctgcgcggttcaggcttccatgcgcgctgagactccgctggctctgtggcctgccccgtcgtgtgtgcgtcacg

SEQ ID NO: 131319 - DNA, 30 bp, Homo sapiens
  chr19:35167983-35168013
  hyper
atgcccttggttggcgaactacagtcgtga

SEQ ID NO: 131320 - DNA, 150 bp, Homo sapiens
  chr19:35168259-35168409
  hyper
gtaatttcttggtccgggcgccatggcccttataagtagagggtgtcccttggtttcgagttgtatcgttcaccagaggacgactgtgtgccccaggacaatttgcgcatggtcctagctggccggctctaggtcgacggccccaggcgg

SEQ ID NO: 131321 - DNA, 31 bp, Homo sapiens
  chr19:35168633-35168664
  hyper
ggtttggggcagtgtcgttcccggaggtcgg

SEQ ID NO: 131322 - DNA, 219 bp, Homo sapiens; identical to SEQ ID NO: 12274
  chr19:35168867-35169086
  hyper

SEQ ID NO: 131323 - DNA, 104 bp, Homo sapiens; identical to SEQ ID NO: 56029
  chr19:35169516-35169620
  hyper

SEQ ID NO: 131324 - DNA, 30 bp, Homo sapiens
  chr19:35224816-35224846
  hyper
tttcttggtcccggcgccattgtccttaaa

SEQ ID NO: 131325 - DNA, 30 bp, Homo sapiens
  chr19:35225300-35225330
  hyper
cccgggggcggcggcggggctcaggccctg

SEQ ID NO: 131326 - DNA, 536 bp, Homo sapiens; identical to SEQ ID NO: 56030
  chr19:35263667-35264203
  hyper

SEQ ID NO: 131327 - DNA, 12 bp, Homo sapiens
  chr19:35395936-35395948
  hyper
gccggcgcaccc

SEQ ID NO: 131328 - DNA, 168 bp, Homo sapiens; identical to SEQ ID NO: 56032
  chr19:35396250-35396418
  hyper

SEQ ID NO: 131329 - DNA, 543 bp, Homo sapiens
  chr19:35417687-35418230
  hyper
cctcaggtgtcagacgccccagcttcgaggtctatggctcccagcaactcgagcgcctgcgcctgcgcattctcagccggacgggagcgcccagaagtctccgggcgccggtgggcggccttgtggactgcgccgggcatgctcggcggtgtgacggctcaggactgcatttcccagaggctgcagctatccggccaatgtagcctgaaactacatttctcagcggccactggaacgacctcaatctctgcctcctcgccagttcattgtggtcgttgacccggcagcgagctttggagttcatcgagggagaagtcagcgcccagctccgaggttggagcagccccgccgggcaacttgaatttctgcaaacgaacacagcaccgggagctctgcagacctgtgtcggcgcggaacccggactgagacatgcgtgagcgttgggtggaccgggcgaggatcccgggccggcgagtgcgggagcggcagggcagggagggtgcgtcggccggggccggtgtgcatccgcgaagactgggtgca

SEQ ID NO: 131330 - DNA, 559 bp, Homo sapiens
  chr19:35454463-35455022
  hyper
tttgcgtctcaacaccgagaacagaagcgtggggggccgacagcgaagggcctaacgtccaagcactcacctgcgcggggtcccgcagcgccgccgctgccatcggagtctgtggtcagagcagggccccacggtgcgggaaaccacggggcgggggtagggggtctcgcaggctgaggctaccacccacctggccgtgccccagacgaggtgtgaccccgggctgagggtcgcactcctagcctcagtctcccccgtgcaaaatgcgcaaggggcccggggcgcaggctccgggggcgccgagagcgcgcagctccgctgggtacccccgttgcaaggggtcacggctggtgcaaaggcgcggagggggtcccggcctcactgtccccctcgcggtccgggaaagccggcggggcagcttcacgggcgtagccccagccgccccgcccccaactcggggtccccagctcctggggactcagcctccccgccgggaaatgacctgcgaggctgcagtgcaggaagttccggcccccaccgtggcggccgggagagttgc

SEQ ID NO: 131331 - DNA, 344 bp, Homo sapiens; identical to SEQ ID NO: 56034
  chr19:35490294-35490638
  hyper

SEQ ID NO: 131332 - DNA, 30 bp, Homo sapiens; identical to SEQ ID NO: 56035
  chr19:35490968-35490998
  hyper

SEQ ID NO: 131333 - DNA, 381 bp, Homo sapiens; identical to SEQ ID NO: 56036
  chr19:35531731-35532112
  hyper

SEQ ID NO: 131334 - DNA, 315 bp, Homo sapiens
  chr19:35581613-35581928
  hyper
tcccagggtgccaggcgctgtcccaaccacttaatttattttaacttgcttaaccctcaaagtcagtttgaggtcagtactcttttcggagagatgggtacggagtcctggagaggttaagcaccacgacagagccgagattttaagcactcggtcagggagttgggcaaatgtggcctgcagatcatgtttccttacccgcgctttttctcctccctgcatagccgccacgtgtcctaagcacagcagctaccagcaacgcttggacccgcgccgggtgcagctctgcgtccccgcggccgccctgcctgctcc

SEQ ID NO: 131335 - DNA, 30 bp, Homo sapiens; identical to SEQ ID NO: 56037
  chr19:35605852-35605882
  hyper

SEQ ID NO: 131336 - DNA, 30 bp, Homo sapiens; identical to SEQ ID NO: 12278
  chr19:35626434-35626464
  hyper

SEQ ID NO: 131337 - DNA, 30 bp, Homo sapiens
  chr19:35645541-35645571
  hyper
tcctgctcccaccccgggctctgaagccag

SEQ ID NO: 131338 - DNA, 262 bp, Homo sapiens; identical to SEQ ID NO: 56039
  chr19:35738723-35738985
  hyper

SEQ ID NO: 131339 - DNA, 30 bp, Homo sapiens
  chr19:35739185-35739215
  hyper
agacacaggaggcccgaagcgccccccctc

SEQ ID NO: 131340 - DNA, 30 bp, Homo sapiens
  chr19:35739433-35739463
  hyper
catggatctcggtgcgcttggtttggccgg

SEQ ID NO: 131341 - DNA, 30 bp, Homo sapiens
  chr19:35739747-35739777
  hyper
gtccacgtcgtttacgctcattaaaacttc

SEQ ID NO: 131342 - DNA, 384 bp, Homo sapiens
  chr19:35758212-35758596
  hyper
tggacgacctcaccccgccgagcaccgccgagtcagggagcaggtctcccacgagtaatggtgggagaagccgggcctacatgcccccgcggagccgcagccgggacgacctctatgaccaagacgactcgagggacttcccacgctcccgggacccccactacgacgacttcaggtctcgggagcgccctcctgccgaccccaggtcccaccaccaccgtacccgggaccctcgggacaacggctccaggtccggggacctcccctatgatgggcggctactggaggaggctgtgaggaagaaggggtcggaggagaggaggagaccccacaaggaggaggaggaagaggcctactacccgcccgcgccgcccccgtactcgg

SEQ ID NO: 131343 - DNA, 30 bp, Homo sapiens; identical to SEQ ID NO: 12280
  chr19:35760846-35760876
  hyper

SEQ ID NO: 131344 - DNA, 30 bp, Homo sapiens; identical to SEQ ID NO: 56041
  chr19:36000502-36000532
  hyper

SEQ ID NO: 131345 - DNA, 30 bp, Homo sapiens
  chr19:36001490-36001520
  hyper
ccctcacctgggagcggccgtagctgcctt

SEQ ID NO: 131346 - DNA, 382 bp, Homo sapiens
  chr19:36024722-36025104
  hyper
ttcgcgccgctatcacgcggtagaaagagcagaaacgagggccatcggaggctgcagcctgaaagtggcgggaagtgggcgggcttaggaggggcttagggagaacccaggggtgctgggcttccatgtaaaagtgatgttcatggcgcttcgcgtgaggtgagctttgccctccctgtgatgcacaaaacaaggacacttggaaccttgccggggacgtgctgaccacttcgcaggcgagagctcagggaagcctcaccaccacctgagaaggccagagtgtgcccgcagtttacagagcggccaacagaggttaagagagggcaaactacttccttagtctctcaacaagggcggcgcgcccgcgcgcgcgcacacacac

SEQ ID NO: 131347 - DNA, 30 bp, Homo sapiens
  chr19:36036160-36036190
  hyper
acacccggggcgggcgccccacgccgatgg

SEQ ID NO: 131348 - DNA, 818 bp, Homo sapiens
  chr19:36048549-36049367
  hyper
gtctcaccgagcacgcgttcgcccaggcctcccaggctgaggtaggcggtctggaaggcctcgcgccactgctcgtccagcggcagctcctggcccttgataaggatggagctgcagcgctccagcacgcgctcgggggcgcccttcatcaccagcaagtgtcgcgggtcccgcgggtcctccagcgtatggatggacagctgtgggcgggggggagaggcgaggctgtggacgggggaacggggcggggctgtggacgagggaacggggcggggctgaggagaggggcggggccgagagctcggtgcgggctctgagagctgcggggaagggtgaaggtggaagatggaggccttgtgtggaggggtccttggtagaaggtaagcgttaaggcggggctaggtgcagatttggagtcctggacgcagggaatgaacagaattagggtgcggagttgggctgggggcggatttggagagcgaggtgctccccatggacagtcccgccgaggagaagctgtgggcggggctgggtggtgggcggggccttgcctctggtggacggggccataggcggagcgggagatggggtggggtttggctgcggagagaaggggcaaggagcgaagcccctcgtggcccgctgatgtgggtgtggcctggggcggggcccgaggtgggcgggcccaggccgtgggcggggccggctgcgcacctggaacttgttggtggagttgaagggtatctcgcagacttttgggaagcggtcccggtagcccatggcgttgcccagcgtcagctccgagaacttgagcagcg

SEQ ID NO: 131349 - DNA, 135 bp, Homo sapiens
  chr19:36049396-36049531
  hyper
cgctgggagcggggaccggtgtcaggggcgaagccggctacaccagcctcccgggattccctggaggccccctggctctcaccttgggcacaggcactgcatcctggccggacttgaaggcggcgcggttgcaca

SEQ ID NO: 131350 - DNA, 30 bp, Homo sapiens
  chr19:36119238-36119268
  hyper
gttgaatattggtagcgtttgagatgtact

SEQ ID NO: 131351 - DNA, 30 bp, Homo sapiens
  chr19:36119902-36119932
  hyper
gcccgaatgtatgacgtcatgcgccagcgc

SEQ ID NO: 131352 - DNA, 136 bp, Homo sapiens; identical to SEQ ID NO: 12281
  chr19:36123861-36123997
  hyper

SEQ ID NO: 131353 - DNA, 30 bp, Homo sapiens; identical to SEQ ID NO: 56044
  chr19:36139218-36139248
  hyper

SEQ ID NO: 131354 - DNA, 406 bp, Homo sapiens
  chr19:36164096-36164502
  hyper
ctctgcccgacgggccgtcctccctctgtctccccagtacctggtgctcatgctcatcgtctacatcttcgagtgcgcctcctgcatcacgtcctacacccaccgtgactacgtgagcccggcgaggcctggggaggggcctgacctgcatgggaggggcgagggtcccggcgcggcggggcggaggtcgtcctctctccccacccagccctgccggcccttgttcttccctgttctcctcagatggtgtccaacccatccctgatcaccaagcagatgctgaccttctacagcgcggacaccgaccagggccaggagctgacccgcctctgggaccgcgtcatgattgaggtgggcggggtggaccgggtgctgggagggccctgggctccgtccacagaggccg

SEQ ID NO: 131355 - DNA, 30 bp, Homo sapiens; identical to SEQ ID NO: 56045
  chr19:36193392-36193422
  hyper

SEQ ID NO: 131356 - DNA, 30 bp, Homo sapiens
  chr19:36209611-36209641
  hyper
gttgacagcggcagcgtggccttggcagac

SEQ ID NO: 131357 - DNA, 30 bp, Homo sapiens
  chr19:36231933-36231963
  hyper
ggggcggcccgaagcgttgcaggcagctgc

SEQ ID NO: 131358 - DNA, 30 bp, Homo sapiens; identical to SEQ ID NO: 12282
  chr19:36232203-36232233
  hyper

SEQ ID NO: 131359 - DNA, 195 bp, Homo sapiens
  chr19:36236367-36236562
  hyper
ttgccctctccaggcgcttaccaagcgctcggaaacgccccagggcgcttgcgcgtgggaggcgcgcgccctccccatagactccccggtaggagttcttttaacagcgcatgcgtgcagtgttgcctcgcccaaagaagactacaatctccagggaaacctggggcgtctcgcgcaaacgtccataactgaaag

SEQ ID NO: 131360 - DNA, 420 bp, Homo sapiens
  chr19:36239183-36239603
  hyper
cacactacaagtcccgggaagcctcgcgatgccctaatcctttgtttcccaccgtgccccgcgcggcgcaggcgctgttactcagggtgagtctgggaagctggaactacacctcccaggaagctagggggtagatggtttgtttccggaagcaaagccccaggtgggtgggacctaaagctgggagactacggaggcagctctcaattggtcaggatgcgagattgacggctgcaataactaataggaacaagctactgccgaaggggcccgcccacagaagggtggtggccacggtccaggctggacacaaccaaaggcggaggacccgtggcccacgaagctcatctttgaactgtccccgccttctcccgccttgacttgtgaccctaggccctttggggcgcctctgacccagct

SEQ ID NO: 131361 - DNA, 198 bp, Homo sapiens
  chr19:36248724-36248922
  hyper
agttagaccggggtcgggacaggacttctgcagcaagaaggcgcttaaaaagcgggacttttaagcgagggtactttagatcacctcctaaccgcaagcccagcctcagatccttcccattggtgcacggtcttgccaattactgctacactcggcaggttctccaatcaaacacgccctgtcgggcaggcagtcgtc

SEQ ID NO: 131362 - DNA, 30 bp, Homo sapiens
  chr19:36266359-36266389
  hyper
gagaagcagcgccgcgttcccgctgccccc

SEQ ID NO: 131363 - DNA, 192 bp, Homo sapiens; identical to SEQ ID NO: 56050
  chr19:36334973-36335165
  hyper

SEQ ID NO: 131364 - DNA, 868 bp, Homo sapiens
  chr19:36336290-36337158
  hyper
aggagctcacggtttcgcggagctcggcgctgtgggcgcggcaggtcacgcgctggccatgatcgcgggatgacacttgcagaaggacgctcctggcggcggcggagcctttgaatggggctctccggggtggggcggccacgccctccagcctgtggaaccggggtcaagccagggctgcgagcggagccagaggctggagaggcactaggcgggggcgggacatgcgtggagggggcgaggccagaccagagaggggagggatccctcgcactcccacctctccccttccttgtcccaggacaagttgaccggcggattgctgctgacgctgacgcatgtcaagtttaaggcgtctcccgggcgcagtgcggatgcgttggccaggatcgtcacgttagttgggggaactgggagacggggttggaggagcgagactcagaggttaggggcggcctggtctgcgtccaccccgcctgcaccccaggctccgcccagtctcgggtcccccaccccgcctccgcccgctttccccgggtccagggttcgctgggtccctgccccacctggctctgtccctcccgccccgcccccgggcctcagcagtgcgagccctcacactgcaccgccagctgcgtggacgcgctgagctgtccagccttgcacgtgaacttggcctggttgtccgacggccctgtgaccagcaccagctctcgggagaaggtgctcccagatttctccacgctgccgagatgcacgcgccgcgactcctgcggcagccgcgactcggtcacggtgcgcgagtcctacgggccgggagtgactggggttcgcaggcagccctgccgcttccaccaacccccaaccc

SEQ ID NO: 131365 - DNA, 431 bp, Homo sapiens
  chr19:36347683-36348114
  hyper
gggatcccgccctgcgtcccccattcatccgcgtctcagccgcgggagtttctcaacgggaagagggcggagctcccggggggcggacccgggcggggcgagcgggatcgggccctcttggggtctcccagagacccaggccgcggaactggcaggcgtttcagagcgtcagaggctgcggatgagcagacttggaggactccaggccagagactaggctgggcgaagagtcgagcgtgaagggggctccgggccagggtgacaggaggcgtgcttgagaggaagaagttgacgggaaggccagtgcgacggcaaatctcgtgaaccttgggggacgaatgctcaggatgcgggtccccgccctcctcgtcctcctcttctgcttcagagggagagcaggtaccgcacgaggggagcggaggaatatgggg

SEQ ID NO: 131366 - DNA, 869 bp, Homo sapiens
  chr19:36351528-36352397
  hyper
cgtgggtagcgccaaccgcagtactgcgctggatgtgctgtgtgagctggggccggcctgtgggtgtggtcaaaggtggccgtggctttcagggctgttgagggtcggggcctggaggggcggggccgggagagcgagcgtggggtattaggaggaggagagtgtggagctggggcatattcttgcgccctagagggtgtggtgtttctgtggggctggctgatcccaggtcagtggctgcattccgccccggccatgtgacccctagtctctttcgtccagttgggccgattctgcaggcaaagccggagcccgtgtccgtggacgtgggggaagacgcttccttcagctgcgcctggcgcgggaacccgcttccacgggtaacctggacccgccgcggtggcgcgcaggtacagccctaaatctgaggcggtggctggagggggaccaggcttccttacaaatccggcttctgacgccccttccctgtcgcaggtgctgggctctggagccacactgcgtcttccgtcggtggggcccgaggacgcaggcgactatgtgtgcagagctgaggctgggctatcgggcctgcggggcggcgccgcggaggctcggctgactgtgaacggtgagaaggcggggcttcctaggggacctggcccgtcctgggatagggagcggacagagggggcaagggctaatgcagtgggagtggcctggaaggagctttacacccagcgggggctggagaccggacctattgaaggcgaggcttttaggagaatcggagtttggaggcggcgtggcctgattgattgaggttagcggagagtgcgctggacagacccggctttgttacagcctttggg

SEQ ID NO: 131367 - DNA, 30 bp, Homo sapiens
  chr19:36359287-36359317
  hyper
ggaatctcgaggggcgggggcctggcgcag

SEQ ID NO: 131368 - DNA, 146 bp, Homo sapiens
  chr19:36360474-36360620
  hyper
ggtgctgggggtctcggtcctagggagcaaagaaccaggggaccctcatgccaacgccccccgagccctcactgtcctttccacttccatccaggccccggggtcggcccaggtggctggactatgcgggcgcctaacccttcacc

SEQ ID NO: 131369 - DNA, 30 bp, Homo sapiens; identical to SEQ ID NO: 56056
  chr19:36360819-36360849
  hyper

SEQ ID NO: 131370 - DNA, 256 bp, Homo sapiens
  chr19:36361155-36361411
  hyper
agacctttggggagacgaatctgactgcggggaggggtgaccagagaggtgggcttagagggaccttcagaaagaaacagcacaggaaaagagatagggcttaaagatgacgggacttttaagggaaaactgctagtgggcgtggccaatgagcacaaggagcttggatatctaaggctggtgctagggagaagcagggcctagggaagcgatgtcctcatgaatactagagccttgaaaacggacctggccgggc

SEQ ID NO: 131371 - DNA, 114 bp, Homo sapiens
  chr19:36391018-36391132
  hyper
aggggtaggagtctcggttgccagcaacccctagcacctccaaggacccagagatccagcctcccaagcctcccagcccttgcaccctcggggccctgcgatcctggatcccca

SEQ ID NO: 131372 - DNA, 30 bp, Homo sapiens
  chr19:36391497-36391527
  hyper
tcctgggcagggcccgcccacaggcctggg

SEQ ID NO: 131373 - DNA, 30 bp, Homo sapiens; identical to SEQ ID NO: 12285
  chr19:36394467-36394497
  hyper

SEQ ID NO: 131374 - DNA, 68 bp, Homo sapiens
  chr19:36422566-36422634
  hyper
gaggcagagggtgtcgcgtggtcttctgggaaatgtagttcgtctgccaggccggaaccaccgctcaa

SEQ ID NO: 131375 - DNA, 175 bp, Homo sapiens
  chr19:36427159-36427334
  hyper
ctctttcccagcagcgccagtgcgactccatgggaggtggggccggggcgcgtctttgagagaaggggcgggtgcctacgcctttaagcgcgggtgcgcgcggagcctgcgcctttaagcgccggtgcgcgcgctgccctgggttgccggcgaggaggccgcgggagcgcctgga

SEQ ID NO: 131376 - DNA, 69 bp, Homo sapiens; identical to SEQ ID NO: 56061
  chr19:36427553-36427622
  hyper

SEQ ID NO: 131377 - DNA, 316 bp, Homo sapiens
  chr19:36449979-36450295
  hyper
ccacagggcccccgacggcgatgctggtgacagcgctccctgcgtgggcgccactctccccgtgctccccgcgcctgcagccaggcacgacggtgtgggtgtgcccgcccggggcagaggagctgcagggctcgcggcaggcggcgctgtgcaagcagcgacgtcgcggcccgaggaagtggaggcggtgaacgcgcgtgggcgcgcctcccgggacacggcgctggctctgcggcgctacctgctgggcactccctaatcgatggtgacgccgtcgctgccgcccggcgaccggcacaaggagtttgcggtggtg

SEQ ID NO: 131378 - DNA, 45 bp, Homo sapiens
  chr19:36450544-36450589
  hyper
cgccccagggtcgctggagtggtctccacacggtgccccactttg

SEQ ID NO: 131379 - DNA, 250 bp, Homo sapiens
  chr19:36478130-36478380
  hyper
gttcgcgctgagctgcgcgctacctggccacatgcgcgggtgacagccctgccgggagcgctgagtatgcggccagggcttcccgctgagcggcgcctctgagtgcccgcagccgaatgcggctgcttccttgcaggcggacacccaccgctgggcaccgtctggtaccctgcccctgcggcccccgcccccgcgctccgcccctgtgctctcccttgctggcccgcaccattcccgggctcaaaaaaat

SEQ ID NO: 131380 - DNA, 30 bp, Homo sapiens
  chr19:36478594-36478624
  hyper
tgtttaggccaggcacggtggctcactcca

SEQ ID NO: 131381 - DNA, 189 bp, Homo sapiens
  chr19:36485951-36486140
  hyper
gaggccgcgaccagcgactccgcccacttctcccagccggctgttacgtaactgcaacgacagccagtcagacgcggcagcgccggatggcgggaggcgggagttggaggccaagggaagcgctgggcggaagtggctgtggctttgccctttggcctttgctggctgtgtggcggctccgcggttcgc

SEQ ID NO: 131382 - DNA, 30 bp, Homo sapiens; identical to SEQ ID NO: 56064
  chr19:36486422-36486452
  hyper

SEQ ID NO: 131383 - DNA, 30 bp, Homo sapiens
  chr19:36505296-36505326
  hyper
caggagggcgtgggcggggcatcgtcgtct

SEQ ID NO: 131384 - DNA, 790 bp, Homo sapiens
  chr19:36523211-36524001
  hyper
ctctcctcggggtggcggggccatcggggcaggatctgtcttagtcatggtcctcggtggccctcggggggcgggtgcagagttgggggcagccttcaggcaaatcctggaggcagaggtcagctggagagggtgcccggcaggctccagggtccaagcccctaggagcttccagggccccgggtggcctccgcgcaactggatcttgggcaaccatagggacccccgttacccatagagggccccggtgtgtgcgcccagcgcctgccacctcccccaggcccagccccccattcttctcctcccgcgtcaggcccctcagtcgcggctgccccctccccgggtttgtttatctcgggattcaggatgcttcgcccctccccttctccgcgggccgccccctccccatcttacctcgggcagacagcgctggggaccaaagtggagactggggagactgtgggagcaatggggtgtcggtgtcaggggacgtgatgggggaggcaagggagacagagagaaggggacgaggcccagacgccgacagggggtgggggcggagagggaggggcgcgactgcgcatgcgcctgctgcccccctaccggcggcgggggaggagggaccaggaggagggaccgggaggcgctcgcattgatggaggggccagaggcggcgactgaaaggggagagcctccgggcactgggagaggaagagatggctacggaaaggagcgagatgagcagatacaacggcaaaagagagggctgagagagcggacacagatcttc

SEQ ID NO: 131385 - DNA, 31 bp, Homo sapiens; identical to SEQ ID NO: 12288
  chr19:36544541-36544572
  hyper

SEQ ID NO: 131386 - DNA, 30 bp, Homo sapiens
  chr19:36545835-36545865
  hyper
gttaggggatgtaacggtcgcccgcctccg

SEQ ID NO: 131387 - DNA, 30 bp, Homo sapiens
  chr19:36606526-36606556
  hyper
tccgctccgagaagcgatacagccgcagcc

SEQ ID NO: 131388 - DNA, 30 bp, Homo sapiens
  chr19:36630587-36630617
  hyper
ggaggtgtttgtcgcgacaacacctgcaga

SEQ ID NO: 131389 - DNA, 215 bp, Homo sapiens; identical to SEQ ID NO: 56067
  chr19:36705177-36705392
  hyper

SEQ ID NO: 131390 - DNA, 103 bp, Homo sapiens
  chr19:36705645-36705748
  hyper
cacggacagaatggcgttctcttatctctgagtcggggcctggctcgttttgacatttttgcgcccacgagtcttcggagagggcgtcgccactccagacctt

SEQ ID NO: 131391 - DNA, 30 bp, Homo sapiens; identical to SEQ ID NO: 56068
  chr19:36706038-36706068
  hyper

SEQ ID NO: 131392 - DNA, 31 bp, Homo sapiens; identical to SEQ ID NO: 12289
  chr19:36708803-36708834
  hyper

SEQ ID NO: 131393 - DNA, 222 bp, Homo sapiens
  chr19:36736073-36736295
  hyper
cggggtctgttgctacgggtcccctgggctcctttgaatcgctttggcagctccctcggtttagagctacagggttttctccctcccctgagactctaacgcgtgcaccaactcgcgcctagagggcgtgtatgaccccagctcagttctaagccgaggggctgctgccggacattctagggtctgatctggcgggctcgaagggaggacagtcactgcgac

SEQ ID NO: 131394 - DNA, 284 bp, Homo sapiens; identical to SEQ ID NO: 12291
  chr19:36736314-36736598
  hyper

SEQ ID NO: 131395 - DNA, 67 bp, Homo sapiens
  chr19:36736765-36736832
  hyper
cggggccttggctcaggcggaacccgaccgggatcgccccgcgagatgcagtcgttgagggagtcag

SEQ ID NO: 131396 - DNA, 230 bp, Homo sapiens; identical to SEQ ID NO: 12293
  chr19:36822236-36822466
  hyper

SEQ ID NO: 131397 - DNA, 508 bp, Homo sapiens
  chr19:36822557-36823065
  hyper
cgtggccgaatagcccaagactgaggactcacacttcccactttgcacctggaggccacctgcagaccaaccttgcgccaggcttccggaaatgggagggcgggcttccggaaacggcggccaatgggaaacgtgatcagatgttactaggcagacagtccgtttccaggcaacacagaagaaaggaacgcgctcagtcagcctcaaatagacggagatttcagccaatggatgtgcaggttccctccacattagccaataagaagtgcttggggcctacctgcctacaagcacagcaaaagctttcctgcgcatttttgcgctggaatggctacctgccgcgccaaatcaaaatttacaatcacccttggtgctgtttcctgcactttcttggagatttgcaccaggcgctggagaccctcccacctggcccatgcctgccacccggtgaacaccaagacccaaccttctgcaccaccagtcttgttgtcagcgaacaggctagtaa

SEQ ID NO: 131398 - DNA, 30 bp, Homo sapiens
  chr19:36869865-36869895
  hyper
tcctgtatctaactcggagccattccgggc

SEQ ID NO: 131399 - DNA, 270 bp, Homo sapiens; identical to SEQ ID NO: 12295
  chr19:36909078-36909348
  hyper

SEQ ID NO: 131400 - DNA, 319 bp, Homo sapiens; identical to SEQ ID NO: 12296
  chr19:36909623-36909942
  hyper

SEQ ID NO: 131401 - DNA, 46 bp, Homo sapiens; identical to SEQ ID NO: 56077
  chr19:36912303-36912349
  hyper

SEQ ID NO: 131402 - DNA, 332 bp, Homo sapiens
  chr19:36912480-36912812
  hyper
cgagacaagccggtgcgcatcaccatgcgcggcctggcttcggagccgctggacacgctgcgcgcgcgtccctgcgcgacgagaaggctgggctcttccgctactgcgccgacgcccgcggcgagctggacctggagcgcgcgcccgtgctgggcggcagctttagggggctagagtccatggggctgctctgggccctggaatccaagaaacctttttggcgctttctgaagcgggacgtacagattccctttatcgtggagttggaggtgctggacggccacgaccccgagcctggacggctgttgtgacaggcgcggcacgagcgcgac

SEQ ID NO: 131403 - DNA, 32 bp, Homo sapiens
  chr19:36980444-36980476
  hyper
gagggtcccgccagcgcgtgagttggaagctg

SEQ ID NO: 131404 - DNA, 215 bp, Homo sapiens
  chr19:36980717-36980932
  hyper
ttagttcccggacccgtcctactgcccccaggcgctggacagcctcagaaagaggacaagtctgcatggaaagataatcgcacaactgagccttctgggagatgtagttcggagctgggaaggcggttggaccctccgaaagtcatcttaattgctctcacagataagccggtgctgggctgccggcctgagtactgtgcgcccagagtgcgcag

SEQ ID NO: 131405 - DNA, 30 bp, Homo sapiens
  chr19:37019240-37019270
  hyper
gagagatcttggcccgtcctccgtgccact

SEQ ID NO: 131406 - DNA, 978 bp, Homo sapiens
  chr19:37063784-37064762
  hyper
actcctacaggctcacggaaaaaaacgaacaaacaaacaaacaaaaaaaaacaaaaaaacacttctaccccgttcacacttatagttggtcacaacagtgctgtcacacgatcacgtcaccgtagaccagggtcacacgatagaccccgcccctactcaccgtcctgagtccgatcaaacagcacccacggcacacactagggtctccgtctctcacacacacacaccacaatgacgtcgtaaacaatagcactaaccaccatcgtccgcagctcccgcgtacagaggcctcaggctcccggctccacgtggaccgacctcgcccggcagcgcggggccacctcaccgcgagctcctcccgcagcccggcccgggtcacctcgactcgccaggcttaactcaataaccacaacaccggaaaaggaagcaaaggtcgaagttcatccgcggccctgaggcctgtgggaaacgtagtccaacaacgaaagagccctgaagctcaagcggagcccgctggccgcaggggccgcaccacgccccagaccctggagtttccgggtgcgcagacccttgccatcagcagaggctgccgctgcgcgtcccctaggcgcggaagaggcggctggtggtccctgacggcaaggtgaagtcgaggcagtaatcgggaacccaggttgggaggacagaatggggaacaggaagctggggcgagggtggtcttgggggaggtggggggccgcggaattctaggtggcccctgcctcacctctggaaagaaccggaagcccgggccggggagggtgaagggagtcgcggacccggctgctcagccgaggaggaaacccggaccccaggctgagggaggccgaagaaggaactggagggccgggctgggaaggcctgaagcgggtacagcctttaggctggggagggtcgaggggagaactcggagcctgagtcgggcgaggttttgctcca

SEQ ID NO: 131407 - DNA, 199 bp, Homo sapiens; identical to SEQ ID NO: 56079
  chr19:37095613-37095812
  hyper

SEQ ID NO: 131408 - DNA, 210 bp, Homo sapiens; identical to SEQ ID NO: 12298
  chr19:37096487-37096697
  hyper

SEQ ID NO: 131409 - DNA, 766 bp, Homo sapiens
  chr19:37157428-37158194
  hyper
acccacgcaccaggtcgctgtcccaacagtaacacacagcccaaagagaaaccctacttcctcacgcattcaaaacacacccacctaagggctgatcccgcactcagaggcctaaaactatagacattcccttccgcggcactggtgagccaggatttcttaccttcagcattctcagggaaggctctggtccaagctctgattcggattccaagcgaagccacacgcccagctcttccttctccaccggcccgggacatccttacctgcctctacccggagaccattcctgcgaggctcctaccggaagtagctgtggacagcagtgtcctctgggaaatgcagtccgaggggagagcgcctggggtggagcgggtgtgttccgccgggctccgggatgcacttgcgcagtttcacccgaggctggagtgacgccaacctgttaatgttcgttttcggattctggacttcgggttccgctgaggacggatttcggaataggcacagtggctgccccgaacccctcaaggcggcctccgcgggctgtggctgaagataattttcggcgggcgcggactaacccggcttccctttgtggagttgtggtgagaaaggtgttttgttgtgcgcgtgtccgaaggtgactccggaggagaaggtggatatgaactgacggtgagggtgtagcgcgtgagatttgtatgtgaaacgatttaaaaaaaaattttttttttggccgggcgcggtggctcacgccaaggcgggc

SEQ ID NO: 131410 - DNA, 30 bp, Homo sapiens
  chr19:37178396-37178426
  hyper
atgtagtccaaggccggaaacgcccggatg

SEQ ID NO: 131411 - DNA, 30 bp, Homo sapiens; identical to SEQ ID NO: 56082
  chr19:37262512-37262542
  hyper

SEQ ID NO: 131412 - DNA, 163 bp, Homo sapiens; identical to SEQ ID NO: 56083
  chr19:37262837-37263000
  hyper

SEQ ID NO: 131413 - DNA, 1113 bp, Homo sapiens; identical to SEQ ID NO: 56084
  chr19:37263315-37264428
  hyper

SEQ ID NO: 131414 - DNA, 156 bp, Homo sapiens; identical to SEQ ID NO: 56085
  chr19:37266862-37267018
  hyper

SEQ ID NO: 131415 - DNA, 31 bp, Homo sapiens; identical to SEQ ID NO: 12302
  chr19:37282770-37282801
  hyper

SEQ ID NO: 131416 - DNA, 96 bp, Homo sapiens; identical to SEQ ID NO: 56087
  chr19:37287860-37287956
  hyper

SEQ ID NO: 131417 - DNA, 229 bp, Homo sapiens; identical to SEQ ID NO: 12304
  chr19:37288195-37288424
  hyper

SEQ ID NO: 131418 - DNA, 225 bp, Homo sapiens; identical to SEQ ID NO: 12305
  chr19:37288606-37288831
  hyper

SEQ ID NO: 131419 - DNA, 30 bp, Homo sapiens; identical to SEQ ID NO: 56090
  chr19:37289216-37289246
  hyper

SEQ ID NO: 131420 - DNA, 147 bp, Homo sapiens; identical to SEQ ID NO: 56091
  chr19:37328860-37329007
  hyper

SEQ ID NO: 131421 - DNA, 322 bp, Homo sapiens; identical to SEQ ID NO: 12307
  chr19:37329066-37329388
  hyper

SEQ ID NO: 131422 - DNA, 185 bp, Homo sapiens; identical to SEQ ID NO: 56093
  chr19:37329447-37329632
  hyper

SEQ ID NO: 131423 - DNA, 317 bp, Homo sapiens
  chr19:37340784-37341101
  hyper
ccaatctgacccgcacgcggtttctttcactcaactacccagacacccctcatcccaccagcacaagcaggcccaccgcggtctcacacacactcgagccttcctttgcccagtctcacatgcatgactgggatcgcggatttgtccccttccgactccccatgctggttcggtcccagacgctcaggtgccacattggggtgcgctctcccggctcctccacacgctacgcagctgcccgcctcaagagcgtctgcgtgcttccagcgttaagtggaattccaagcagcctccggggcacagttagtctggtcact

SEQ ID NO: 131424 - DNA, 117 bp, Homo sapiens; identical to SEQ ID NO: 56095
  chr19:37341165-37341282
  hyper

SEQ ID NO: 131425 - DNA, 774 bp, Homo sapiens
  chr19:37341571-37342345
  hyper
actcccggaaggctccgatgggcagctcacctcaaagagatagttttgttggtgccagagtccgcgccaggggaatcgggatggctgggctgtagctttcggcaacctgtcgctttctggactacacttcccagaagcctctaggcccagggcactctcccgcgataactagattgtctcttgaggagtgggcgggatcttcccgcggatttgggcaagcggccttggggctttgtgagatagctagggtcgacttgtgtggattctagtagaacggagctgaccctatccgaacaggcgtaagtgaggcggctcggagcctggcgcgacaggaactcccgacctgtgtgggctgcgtggggaacaggctaaggagcgattgtgaggagtgtgtacggttgtgactgggggcgtgtgtctgtgcgaccgtgtatggaactgtgagggcggggaggaggactttttgtttatgtttgtgcgggtgtgagtagagtttaattgtgaccgggttgggcactgtgtttgcgagtgtgaggttcctggaccgcggttgtgactgtatgtccccttggggtgtgtgtgtgtgtgtttactaccatttgccgaactgtgtgtagtatgccttaattttgaggtttgtggctgcttccgtgtgtgtgtgtgcgcgcgcgttggtgatattgttgatggagggtgcgtgtgaatttgttgtcattgtgaccccaaggtgtatgtcactgggaatttgagagatgcccacggactctgtggttg

SEQ ID NO: 131426 - DNA, 1053 bp, Homo sapiens; identical to SEQ ID NO: 56097
  chr19:37406728-37407781
  hyper

SEQ ID NO: 131427 - DNA, 636 bp, Homo sapiens; identical to SEQ ID NO: 12313
  chr19:37463931-37464567
  hyper

SEQ ID NO: 131428 - DNA, 79 bp, Homo sapiens; identical to SEQ ID NO: 12314
  chr19:37464666-37464745
  hyper

SEQ ID NO: 131429 - DNA, 30 bp, Homo sapiens
  chr19:37568734-37568764
  hyper
cttactctgttagacgattctacacagtta

SEQ ID NO: 131430 - DNA, 755 bp, Homo sapiens
  chr19:37568996-37569751
  hyper
cacctgcctggccggcgggtcccaccctctctcctgccaggggtagaccctgggaccactcagctcgctctcgcaggccctgagcgtctgacgcctgcgcactgagcgcgggcgggcgggcactcccagaaacctccggggcgctgcaggcgggacaagcaggttccacaggccgagcccacgagcccctcgaggggtgagcggcccgggcctcctggcgttctggccggctagccaagcgctggactacatttcccagaggcacggcgtccggagcgctggactacatttcccagaggcaccgctcccggagcgtagcttcatttccgttagtttgcgagatttggaggcctcgcgtggggagagggccgcgtctgtggaggagcttggctccgcacctgctgggctggcgaacccgaaattgggcttggaacccgggagccagatcttggaccctgaactgcacctctgtcaaggtaggagtgtccgggatgccggagcggacacgcgcggagaaagcgtcgctggggttactcgtgtggccgtgtctccggttttgtgtgcaggctacagcctgcctggtattggcgactgcctgtgcatacacgactggacgtgtgtggctgtggttttgtgtatgagcatttgtatgagtgtgagttgtgactctgagggtgtttgtgactgtttgcttacctggctgggatatacttatgtgactgtgattttatgtgtgccgcgtgtataattggggt

SEQ ID NO: 131431 - DNA, 504 bp, Homo sapiens; identical to SEQ ID NO: 56100
  chr19:37663373-37663877
  hyper

SEQ ID NO: 131432 - DNA, 498 bp, Homo sapiens; identical to SEQ ID NO: 56101
  chr19:37701188-37701686
  hyper

SEQ ID NO: 131433 - DNA, 216 bp, Homo sapiens
  chr19:37708869-37709085
  hyper
aagattgtcttcagcgtgcagggccagcgtcctacggcagtttcactctgagcctgtgtctggatcacggagacgcggggtagcggttcggagtgcggagcagggatgtccccgagctgtgcagctgcaagaacccgaaaaaacaggcgccatcttctcggcgcggtcctactccggactgtatttcccagaggcccccgcgagtccagggcagcc

SEQ ID NO: 131434 - DNA, 30 bp, Homo sapiens
  chr19:37808456-37808486
  hyper
gggacggtctccagcgcctggtgcaaatct

SEQ ID NO: 131435 - DNA, 30 bp, Homo sapiens; identical to SEQ ID NO: 12316
  chr19:37862257-37862287
  hyper

SEQ ID NO: 131436 - DNA, 990 bp, Homo sapiens
  chr19:37957585-37958575
  hyper
cagcgctggcacaaacgccaagtctcacacatctacacccacaagcacaccctaccttgtatccacagtttttcattcattcaagatcccactgtcatgcacgtttgcacgcaggttcatactgaaagataaaagggaaagcgcctccacgaaatccgcttacggacacgatcccggggccacactcagccagacgaatgtctggcaaatgacagtcacttcacgccagactctcacagtccttcacacgccactcccactgcctcagggaaccacaagcacaggcatcgccccgcccggcgtcctcctccaaagattggggcaccaggaccgcgggcccccactcccacccagcacaaagagtccggcgctcagagctagcggtttcccgaggactcaccaccaagcccgcggacacaggccccgattccacacttaacgctgccaaagtggcagagccggcgcgggctgggacagaggcggcactgaggccggcgctgtcggtggctgagagcgccacaagtctcggtccgttacaccaggggcgacgcttcccagaggcccccgcggctcacccgggcgggactggcttcactgtttgcgcgtcctgagaagcagaccacggtgttccagggctcacagctccgcgcaggggagctcagcctaggttttgcacgagcggcctcccgcgagcccagctctgagagattgggagcgcaacttggtgctgagaagaatcgaatcgttccgctgcttcctgcgccgaactacatttcccagaggccttcgcggccctacttccccgaccccacctgcaaaaaggcacttccttcttacagtcggctggagctgcaggttcgcaaggtccgtgaaggaagcccggctcagtgtgtttagttccgtctttttgggtctctacctgaggctagaatacagcggggtgaaggtggtgagagctccagggccagtgaaggccgggtcagctggagc

SEQ ID NO: 131437 - DNA, 41 bp, Homo sapiens; identical to SEQ ID NO: 56104
  chr19:37959759-37959800
  hyper

SEQ ID NO: 131438 - DNA, 896 bp, Homo sapiens; identical to SEQ ID NO: 12318
  chr19:37959873-37960769
  hyper

SEQ ID NO: 131439 - DNA, 1026 bp, Homo sapiens; identical to SEQ ID NO: 56106
  chr19:37997166-37998192
  hyper

SEQ ID NO: 131440 - DNA, 9 bp, Homo sapiens
  chr19:38042127-38042136
  hyper
ccttcttcc

SEQ ID NO: 131441 - DNA, 443 bp, Homo sapiens; identical to SEQ ID NO: 56107
  chr19:38042356-38042799
  hyper

SEQ ID NO: 131442 - DNA, 1087 bp, Homo sapiens
  chr19:38085127-38086214
  hyper
agaaactgcagcagctgtaaccgcacgattctcagctggcttaatgatgtccgtgtcacacgaggagtactgcggcccgggaggggccaagcgctaggagcattaacaggcggcaggtgagcccaccccgcggccgcacaagcgcacacgcacacgtccagggcggaggaacactactagtaacacccgcctccttctagcctccctatcccaaagttatggtgccgattttgtccgcggcaggggctccaggggcacactcataaattcggtgcggaggaacacaactagcagcaccacacccccgccactgccagaaccaaagtgacggtgccgacacccctccgcaagcgcaaggccgacttccataagtaattagccagagcaccgtcccgttcctgtcagcaccgagccccagccaggacaccggtattcccagcaccatacaagaactactttttcgatgaagcaacccaaaagctgcgagcggttcccggtgaggccgcccactcacctggccggcgcagacaagctccgtgcgtcaagacataacagcgtaagtgtacgacgttgcgcagcgacgcgggggccttcgggaaatgtagtctacaactggaaaccggccggatcgtgtctgcgcaggcccagcagctaagatcgggtccggcgctccagaacagaacgatccctgaggctcccttgctcgaactgtgggacttaccctactatggtccgagcctaccctatttcattatactcaagtaacgccccagaaattccagagaatctcacacaaagaggttgagtcttgccgtggtgccttcaggggaatgtcatcccgggctagaagagctgcaaaaggctgtcaggtaaggtctggatttctctctgacagctctggccgtgacgcagtggccacgataccgggttgctgctcaacggggttcggaagtgtgacgcattctttgcggccatgtgtgtgtgtgtgcgtgtgtgtgtgggtctgtgcgcgcgcgtgtccgagtgtcctctgtgggtgcagagtgggtagtggccatgcctgtgtgatgtgcgtcagattatgctt

SEQ ID NO: 131443 - DNA, 1785 bp, Homo sapiens; identical to SEQ ID NO: 56109
  chr19:38145545-38147330
  hyper

SEQ ID NO: 131444 - DNA, 260 bp, Homo sapiens; identical to SEQ ID NO: 12321
  chr19:38182699-38182959
  hyper

SEQ ID NO: 131445 - DNA, 370 bp, Homo sapiens; identical to SEQ ID NO: 56111
  chr19:38183111-38183481
  hyper

SEQ ID NO: 131446 - DNA, 71 bp, Homo sapiens; identical to SEQ ID NO: 12323
  chr19:38210086-38210157
  hyper

SEQ ID NO: 131447 - DNA, 620 bp, Homo sapiens
  chr19:38210326-38210946
  hyper
cgcctgggggcctccgcgctctgagcgcctcctgcagccccactctcaccgccacgcagggtaccacgcgggcggcgggctggggctgcagaggctcccgcagtgacctgcgccgccttcttcaggtggaaccaaaaggtcccggaaccggagccaggggtccaagttttctccgttgcctttgtaatatgtagtccaagccagaacagtcaggaccgcaggtaccggtgagaaatggagtccagaatcctaaaaacctacgagaaatacggcagcgaccacttggaccgcgcctcccacccaccgctcgagccccggagacttctgggagtggccgccttgcctcgagtgcgcatgcgcagatcggccactactgggcccctggcctgaggcttagggtggagttagtgcgttcttagggccagtaggaggcgagtctgagtagaaactgatccaggtagcctcggaagggatcacctgctggatgggtgtgagctcctcagggtggggcgccgaaaccctcatggctcctgaggtagagccggcctccttggtaacacatgggactgggacttttaataccacccgacaggcccagcttgtctcgtcaagcgctaagt

SEQ ID NO: 131448 - DNA, 121 bp, Homo sapiens
  chr19:38270324-38270445
  hyper
tagattgcaggcaccgccggacgctggctcccggaggttttagttttccctctaccaggagtgtgaagacacagagacttattgcgctggcgaagatggctgaggcgaaggcgtgtccgac

SEQ ID NO: 131449 - DNA, 62 bp, Homo sapiens; identical to SEQ ID NO: 56115
  chr19:38307857-38307919
  hyper

SEQ ID NO: 131450 - DNA, 359 bp, Homo sapiens; identical to SEQ ID NO: 56116
  chr19:38307977-38308336
  hyper

SEQ ID NO: 131451 - DNA, 122 bp, Homo sapiens
  chr19:38308394-38308516
  hyper
cgacagggccgggcgtgcctgtgtgacgtgggtgcagctgtgggactgtgaggggtgcgtggtcgaccttgcgtaacctggatgtgcagtgcgtgtcctttgcaaagcgtgcgttgctgtgg

SEQ ID NO: 131452 - DNA, 30 bp, Homo sapiens; identical to SEQ ID NO: 56117
  chr19:38397139-38397169
  hyper

SEQ ID NO: 131453 - DNA, 30 bp, Homo sapiens
  chr19:38397723-38397753
  hyper
gagctgcacgaaggcgaccagcggactacc

SEQ ID NO: 131454 - DNA, 58 bp, Homo sapiens; identical to SEQ ID NO: 56118
  chr19:38398220-38398278
  hyper

SEQ ID NO: 131455 - DNA, 31 bp, Homo sapiens; identical to SEQ ID NO: 56119
  chr19:38417473-38417504
  hyper

SEQ ID NO: 131456 - DNA, 126 bp, Homo sapiens; identical to SEQ ID NO: 12325
  chr19:38700327-38700453
  hyper

SEQ ID NO: 131457 - DNA, 93 bp, Homo sapiens; identical to SEQ ID NO: 12326
  chr19:38700504-38700597
  hyper

SEQ ID NO: 131458 - DNA, 1154 bp, Homo sapiens; identical to SEQ ID NO: 56122
  chr19:38701092-38702246
  hyper

SEQ ID NO: 131459 - DNA, 164 bp, Homo sapiens; identical to SEQ ID NO: 56123
  chr19:38715049-38715213
  hyper

SEQ ID NO: 131460 - DNA, 814 bp, Homo sapiens
  chr19:38719833-38720647
  hyper
tcgagctttcagccccggccggggcaggcccggcacctccggagaccctgagggagagatggaggagagggaaacccctacccccactctgggtggggaaacggcctccgccacccccagcccgcgccgcattccttcactgacagcgacaaagaagaggcgcccccgcgaccctggaggggctcccgcccccaaccccagggggcgacagggggtggggacccccggggcaagggttcgcgctgggggcccccattcaactacggtccgcgcgctgcgtccccctcctcagccccagggcgggcgggggaagggctcctggtgggggggtctggacagggggcggggacggcagggacactcacgacttgagcgggttctgaatggcggtggccatggcccgctcggctgggccgcctccggcccggggcgccgctgccgccgcgcgcgggcccagcccggcctgcgccgcccgctctgccgcccagcgcgctacgatttcattcattcttggggctgcggcgcgagcggagcggggcgggccgggggcggggctcagccaatccccgcgcctcccagcgcacgacgggacgtggagtctaggggcgcgcggcggcgcccgagggcgcccctgcccggactacacgtcccagggggcgtcaggaggaccgcgctcccattggctgctggggatacagggaggggcggggctccccccagagcatctttcctccctccctgggagtgctcggtctccaactcgggatctccaccctccaggcaccgcgggcgcggaagcaggtggtccctagct

SEQ ID NO: 131461 - DNA, 262 bp, Homo sapiens; identical to SEQ ID NO: 56126
  chr19:38746815-38747077
  hyper

SEQ ID NO: 131462 - DNA, 201 bp, Homo sapiens
  chr19:38747106-38747307
  hyper
cggccgcctcaggcctcagtttccccgtctgcagtgcgagagtaggccgctgcgtcggcttgaggcacgcagtcgtgcgaagttgaggtatgggcggggacccagagtcccgggcgggtccctgcatcgggggctcccgggccgggatcctgtggggcgggggcctgggacagacactcgggacccggcctgtctgcgccc

SEQ ID NO: 131463 - DNA, 658 bp, Homo sapiens; identical to SEQ ID NO: 12330
  chr19:38754870-38755528
  hyper

SEQ ID NO: 131464 - DNA, 30 bp, Homo sapiens
  chr19:38806360-38806390
  hyper
acctggcatcccagcgctgtgcacacctca

SEQ ID NO: 131465 - DNA, 42 bp, Homo sapiens; identical to SEQ ID NO: 56129
  chr19:38806819-38806861
  hyper

SEQ ID NO: 131466 - DNA, 30 bp, Homo sapiens; identical to SEQ ID NO: 12331
  chr19:38810523-38810553
  hyper

SEQ ID NO: 131467 - DNA, 30 bp, Homo sapiens
  chr19:38826352-38826382
  hyper
ccttaggggttgcgcgtcaccttggagacc

SEQ ID NO: 131468 - DNA, 434 bp, Homo sapiens; identical to SEQ ID NO: 56131
  chr19:38852094-38852528
  hyper

SEQ ID NO: 131469 - DNA, 740 bp, Homo sapiens; identical to SEQ ID NO: 56132
  chr19:38852765-38853505
  hyper

SEQ ID NO: 131470 - DNA, 428 bp, Homo sapiens
  chr19:38865005-38865433
  hyper
aatggcacgacacccgctaccttttggcttggagacgctgccccgaaggcggaacctccaggacagctacgtagcgtcccgagcactcagactgaagccagggcagccatgttcattattggaaccgtgaggtgggtagggggggtggtgttgagacagctgtcattttcagttagggcaaaagccaacttccggtcaccatcttgagtgacgacagaggcggagctccaactgacatgttcattaagggcagggctccgagggcgccacctcgagagcgacggcgggctacccggggcgggctgaggcaggttgtagccccgccccgggccttgggctccacctctcggccccacttccgccgggcaagcgtttgtaggcggcgctgccgtaaatcaggcggtctgcttgccgcatcacgcaagatg

SEQ ID NO: 131471 - DNA, 328 bp, Homo sapiens
  chr19:38877688-38878016
  hyper
cgagggtgaggcctggggctcccggggtaccatgagtcccgggggtgtggcgctgccagggaaccagacacccagcccacgagtcaggcgcatggcctgggaggtcatctcgggctccaccagggacgtccggcgggagtcgggggcgcggtccgagggctgcacttttcgggagcccccgcccgcggatggctccgactgcaagttccccatttctgacggagctcggagactagtcagaaaaatttactccagtcagcctgccagggccgtggggaccctacgaggctggctgtacttgatctaatgcgtccgcaccggccccgcc

SEQ ID NO: 131472 - DNA, 42 bp, Homo sapiens
  chr19:38878538-38878580
  hyper
cgagatgtaggccccgcccccggagctcgaggccccgccctc

SEQ ID NO: 131473 - DNA, 30 bp, Homo sapiens; identical to SEQ ID NO: 56135
  chr19:38878846-38878876
  hyper

SEQ ID NO: 131474 - DNA, 159 bp, Homo sapiens
  chr19:38879529-38879688
  hyper
tctgcccacccaggcgcccccaaggccccggctaggaggactagagagtggggaccccccaaactgcgcggcagccattcagggtaccagtcttcatttgtggggtctggactttctccgaggatgccccattcacaaaattccgtcctggaccctcac

SEQ ID NO: 131475 - DNA, 30 bp, Homo sapiens; identical to SEQ ID NO: 56137
  chr19:38893532-38893562
  hyper

SEQ ID NO: 131476 - DNA, 31 bp, Homo sapiens; identical to SEQ ID NO: 56138
  chr19:38943562-38943593
  hyper

SEQ ID NO: 131477 - DNA, 617 bp, Homo sapiens; identical to SEQ ID NO: 12334
  chr19:38976231-38976848
  hyper

SEQ ID NO: 131478 - DNA, 30 bp, Homo sapiens
  chr19:39086277-39086307
  hyper
acccacggcctccaccgcttcggtcatggg

SEQ ID NO: 131479 - DNA, 266 bp, Homo sapiens
  chr19:39109441-39109707
  hyper
gctgcgtgcattcccgcagagctccgtggcctcatggccgcgcgcaatacaacgcgcgcgcacgccgccagagctccgggtgcttcccggtgagttcgcgcgcgcacgctcccgcgctaccggcactggaactgggtctgtgaggcccgggaaaagcttagccccgccccctcgccacgagaggcgcctgcgcactgggatccagtaagatttttctcacgctgtctgtccagcttgagtggcgcgaatgcgcacgcgccaattgc

SEQ ID NO: 131480 - DNA, 508 bp, Homo sapiens; identical to SEQ ID NO: 56141
  chr19:39139397-39139905
  hyper

SEQ ID NO: 131481 - DNA, 64 bp, Homo sapiens; identical to SEQ ID NO: 12337
  chr19:39140556-39140620
  hyper

SEQ ID NO: 131482 - DNA, 677 bp, Homo sapiens
  chr19:39322017-39322694
  hyper
tgcgcagacgtcacacgaagggactcatagctgtggtctggggcttcaccgagggctactccggaagcctcctcttgtgcagaggagccagtgaggcgaaggctaatactgagtcccgggtagttggagcctgtcagtcctggggagaaaggaacagcctttgatgaccccagactgcaagacacaggcctatcgaattagggagtccttcaaaagggagcacacgcacccctgaatttaggggactcgggcccttcgtgaccccggatagccctccccgtcctacatctgctataacagcacgacagcgcgacgcacccccataaggcaagaggtgactcacgccgggtcagtaggtcgcggagtctgcgagaagccactatccccgccgccatcgccgccgccttcgtctactgcgttcggacggagtaacgtgcccgttagcggagggggcgggcacagaaggccgccatgttgagcgagggcaccgatgccgcaacctgacaggcaatgacgccgttctttccgccatctttactaagggcagtcgatttccggttgccttacatagagccaggctcagaaatggaccctttgccccagtgggaacctggccaaagaaaatagctcctgcaatggcgtgaacctgggaggcggagtttgcagtgagccgagat

SEQ ID NO: 131483 - DNA, 30 bp, Homo sapiens; identical to SEQ ID NO: 12338
  chr19:39340232-39340262
  hyper

SEQ ID NO: 131484 - DNA, 448 bp, Homo sapiens
  chr19:39341807-39342255
  hyper
aagccccctgcacaggggaggcgttcttgtgatctgtgcctgcgtcgggcctttcttcctcaagggcggggtaagaccacccgcactgcaccaagagaatgtcggagggtatctccagactccggcgaagcccaactggcggagcctggggggtggagaggagcgcgccccagttatcacgcgcaggcagcggggtcaaacggggattaacccgggatcccgtcctacggcatttaacattatggggctgcccgcgcagggtgtgggggggaacaccttagcgaagctattggcaagtgacgatatcgccaaaggggggaaaagaaataaaagcgaagctagcgtcgtgagaaacgcggcggacgccccaaaagtgctccaggacctttctgcccggctgatgggggatttcgagttgaggtccgggtggaaactaagtttgaaatgg

SEQ ID NO: 131485 - DNA, 31 bp, Homo sapiens; identical to SEQ ID NO: 56144
  chr19:39379455-39379486
  hyper

SEQ ID NO: 131486 - DNA, 184 bp, Homo sapiens
  chr19:39390791-39390975
  hyper
gggcccggggctgtcgtgggctcccctcgtcttcggctacgtcactgaggatggggacacgtgagtgaaccttaggctgccaaacggagccctaggacccggcgtcacattcctcattaatctctgatccctgaggcttcctaacctcatactcctaaatctgacttccgatgctgaacttcct

SEQ ID NO: 131487 - DNA, 216 bp, Homo sapiens
  chr19:39421218-39421434
  hyper
ctgtagccctcgcgcgcatactcgtacaggaggttccggtttcgtttctctgtagtgaaacttctccttggactatcgttggagatgcagcctccccggggccggaacccccgacgagtcagcaaaggccacaagcgccgcgccatggacgcagccatcttggaccgggaacaaggcggcacttcgtcccgcccactccgcgtttagaccaattgc

SEQ ID NO: 131488 - DNA, 30 bp, Homo sapiens; identical to SEQ ID NO: 56145
  chr19:39466280-39466310
  hyper

SEQ ID NO: 131489 - DNA, 30 bp, Homo sapiens; identical to SEQ ID NO: 56146
  chr19:39521916-39521946
  hyper

SEQ ID NO: 131490 - DNA, 227 bp, Homo sapiens
  chr19:39522732-39522959
  hyper
cgtgcgcggggggacgtggctcagcaccaccagaagcagctctgggggtagttggctcaggtccagcgcctcttcgggttccggctccggcgcggggacccgggcggcccggcccctggagaccgaggcgcccatggtccccccgccaggcccggctgtggctgcgggagaggaagggtcaaggcgtcagggaccagcagcctccgcggcgcgcagcctctgcctgc

SEQ ID NO: 131491 - DNA, 697 bp, Homo sapiens
  chr19:39574107-39574804
  hyper
gtcaggaaggggaaacgactggaaatccgggcccccccagttcttccctgcttctctttttgtggcagccgctcctcacgttcaaacagattgcaaaggtttacaggggagaaccctaacttgttccctagacgtcagtttctggagttcctgcattaatacgattaaaaagaacagctgattcttatccagcccttactctgggccgggccctgttatcggcatgaaatttcatgcagcaactcgtttactcctcacaacagcccacggggtatatacgagcatcacctcctttttacaggtgaaaaaacccaaggtccagcgaggttgaataactcacctaggtcgcacagctcagaaagcccactgcaattccgggattctggttttgttttgaggttgccccgggcttctgaggaggggtcagtgggctcagcatggaaaggaaggaagccggaaggctggaggaagatgcagcgaggctggaaaggttggggatcccccggtcctgcacacctgggtacctggggatcgggcagggccaggataggggccggtgtccgtgccctggggctccccagctgatgagtgggcgcctgagggacgagcgcagggttacctgcctgggctctcacctggtggccggctcagaggtggcgcgccggagacgtatcataaccttcctgggtcccccttc

SEQ ID NO: 131492 - DNA, 221 bp, Homo sapiens
  chr19:39574877-39575098
  hyper
cggggccctggctgtctagggaggctgtcaccccgaggcgaccggctcttccggggctgggacggctgtaggcggcaagaggcctcggcacccgcgaactcataaataccggggcggcgctggtggcgggagaggcgcgtgcgggcagccggcgcccccgagggtgagccggggtccgggagggcgtcccctttcccggatggtcccgacccggctccatc

SEQ ID NO: 131493 - DNA, 30 bp, Homo sapiens
  chr19:39589194-39589224
  hyper
cgcccagggcaccttcgtcccctttgtgga

SEQ ID NO: 131494 - DNA, 175 bp, Homo sapiens
  chr19:39589708-39589883
  hyper
tgacaacccgaaggccgtcccccggctgcgcagggacacccagcagggcatgtatgacgccgttctccatgtgggtgaggcatccgcaggggcgcgcgcagggacggtggggggcgcgcgcagggatggtggggggcgcgcgggtcgggggcgcgcgggtcgggggcggtgctag

SEQ ID NO: 131495 - DNA, 219 bp, Homo sapiens
  chr19:39616202-39616421
  hyper
ggacctcagtgggccgggagccagccttcccgcaccttttccaaaatttccaatccccgcttggcattttctgcccgaaggtctccgattggacgctctgtaccaatcggaggctggagcgggccctgagaggcgcccgactccgcccccgcactggccctgcccactgcccggtcagcctcgttgctatggggactggtgggcggtgaggggggaaag

SEQ ID NO: 131496 - DNA, 100 bp, Homo sapiens; identical to SEQ ID NO: 56149
  chr19:39687546-39687646
  hyper

SEQ ID NO: 131497 - DNA, 267 bp, Homo sapiens; identical to SEQ ID NO: 56150
  chr19:39687755-39688022
  hyper

SEQ ID NO: 131498 - DNA, 427 bp, Homo sapiens; identical to SEQ ID NO: 56151
  chr19:39754805-39755232
  hyper

SEQ ID NO: 131499 - DNA, 400 bp, Homo sapiens
  chr19:39755264-39755664
  hyper
cgcccagcaggcgcctcttgtacgtcagagcccacagttcccaccacgagatccccgcagtccccgtcgtcagcgcgaacgcaggctcagggtcagtcacaaaaggagccctgcagggcggactcggctccaggtcgcgggcgcagggctatgccgggggagagcgggatgcaattcaaccctggttcacgccttcggggagctccctggttcagtacacgacaggcacgaccgtacgctgccagtacccatccacgtccaggaatcccagactgtgcagaggttaggggccctggcgagggggcccagtcgtatgcgataagcgccgcttgtcccgcaggcggaagaggcgctgagttggaggtcgcgcaactgctccgtccgccccaggagggatcct

SEQ ID NO: 131500 - DNA, 118 bp, Homo sapiens; identical to SEQ ID NO: 56154
  chr19:39818897-39819015
  hyper

SEQ ID NO: 131501 - DNA, 30 bp, Homo sapiens; identical to SEQ ID NO: 12344
  chr19:39881515-39881545
  hyper

SEQ ID NO: 131502 - DNA, 259 bp, Homo sapiens
  chr19:39881950-39882209
  hyper
aattgcctagggggcgggactaactagcaaacggggactagaaatagggatgctgaaaagcaacggggagagacgcagtcgtaacgcacttccggcggtctacgcgaggaagatggctgcatcccagcagcaagcttcagcggcttcctcagctgctggtgtatcgggtcctagttcggctggcggcccgggtccccagcagcagccgcaaccgccagcacaactggtgggccctgcccagagcggcctcctgcagcaa

SEQ ID NO: 131503 - DNA, 32 bp, Homo sapiens
  chr19:39898000-39898032
  hyper
aaaccgaagcaatccggacttccaggtcaact

SEQ ID NO: 131504 - DNA, 72 bp, Homo sapiens
  chr19:39898533-39898605
  hyper
ccagcctagtggagggccgcagctgtggctgggtgcccccaccccctggcttcgcaccgctggctccccgcc

SEQ ID NO: 131505 - DNA, 108 bp, Homo sapiens; identical to SEQ ID NO: 56159
  chr19:39902954-39903062
  hyper

SEQ ID NO: 131506 - DNA, 30 bp, Homo sapiens
  chr19:39903880-39903910
  hyper
agaaattccgactgcgggaccccagtctcc

SEQ ID NO: 131507 - DNA, 30 bp, Homo sapiens
  chr19:39926313-39926343
  hyper
ccgcgtttgcagtgcgccacagctgtcgct

SEQ ID NO: 131508 - DNA, 16 bp, Homo sapiens
  chr19:39926903-39926919
  hyper
cgccctttctttaaat

SEQ ID NO: 131509 - DNA, 13 bp, Homo sapiens
  chr19:39936017-39936030
  hyper
agtttcagcctgg

SEQ ID NO: 131510 - DNA, 137 bp, Homo sapiens
  chr19:39936090-39936227
  hyper
cgcactccgcccaggccagccctgcctctctcaagatggcgacctggaagtgcgtcgcccgtgccagccccggaaatctcgtgttaggcgaggtcaacgggtaggttctcgcgagaggacccgtcagccccagtcag

SEQ ID NO: 131511 - DNA, 30 bp, Homo sapiens; identical to SEQ ID NO: 56161
  chr19:39971801-39971831
  hyper

SEQ ID NO: 131512 - DNA, 711 bp, Homo sapiens
  chr19:39988485-39989196
  hyper
ctaaagggtttctgaagggcccgggatgtccccccccccagttcttctggggtgggggagcgggtccctgtatgtgaagacggaatttcctgcccatttgctcctcacaccttccggaggccaaacgggcagcccagctgcggcccgaagggggaggggctcggccgcccggcagatggcggcatttacatacagctgggagccccctcttgaggccgagctcctcgccctggcgtctggtgcgtccgcgatgcggggtttgggagggtggctttgtcttgcggagggggaacacacacacgcctgcacacaggggtccacaaagagccctggatcttcatcgtatccacacacagctacacccgtggatctcccaaacccagtctcattcacacaaaccagcgcacacaggggtctacaaagaactccggatcttcatcgtattcacacgcggctgcatccgtggacctctcaaacccagtctcattcacacacaggcgccctcagccattcaccaccttgcacagcctctaccacacccgcacagagcacaaagtcacaggtttatacgcctatacaggatctcccataaacacacacgcacagagaagcagccacacagccacacaatctcaaagcgtcacacaatcacgaagtcgtgtacacttctagtgtcccactcgggtgtgcgtgcagaatcagaattgttta

SEQ ID NO: 131513 - DNA, 659 bp, Homo sapiens; identical to SEQ ID NO: 56163
  chr19:39989527-39990186
  hyper

SEQ ID NO: 131514 - DNA, 121 bp, Homo sapiens
  chr19:39992815-39992936
  hyper
gactccgtcgcaaaaaacaaacaaaaaaaaaacaaatatctgggtcaaaatacaggagtattacggtttctatgagataactgtttattttttatttttatttttttgagagggagtcttg

SEQ ID NO: 131515 - DNA, 185 bp, Homo sapiens; identical to SEQ ID NO: 12349
  chr19:39993471-39993656
  hyper

SEQ ID NO: 131516 - DNA, 35 bp, Homo sapiens; identical to SEQ ID NO: 12350
  chr19:39993711-39993746
  hyper

SEQ ID NO: 131517 - DNA, 109 bp, Homo sapiens; identical to SEQ ID NO: 56166
  chr19:39997623-39997732
  hyper

SEQ ID NO: 131518 - DNA, 410 bp, Homo sapiens; identical to SEQ ID NO: 56167
  chr19:39997748-39998158
  hyper

SEQ ID NO: 131519 - DNA, 580 bp, Homo sapiens
  chr19:40005580-40006160
  hyper
tgctgaacacctgagtgtcaccgacagctgcggaggcactggggcaatctgtgtgtttctcagcctggcgtcgggggttaagggggcgggaattactcggcgaggtcgggaggtcgcgcggtggaacccgggggccaggtggaactcggtgtaacagagcccccagtggtcgcgccgcgtctcagaacccggtgcgggagacgctctccccgcccaaagagggaaggcgggcgggactccccaaccggcttgccccggtccccctgggccccatgaataaccaggcgcggaccccagccccctcctcggcgcggacttcaacctcagtccgggcttctaccccgacccggacaccgactccactccggaccccgactccggtccggactcggacccccatccggaccctgactccagtcctgactccgtctccagccgggacttcccctctggtcctgactcctgctccagcccagattcccactctggtccccactcccgctctggcccggatcccccgtctggttccgcctcctgctccggcctggatccctactccggtgccgactcccgttcccgt

SEQ ID NO: 131520 - DNA, 261 bp, Homo sapiens; identical to SEQ ID NO: 56168
  chr19:40006186-40006447
  hyper

SEQ ID NO: 131521 - DNA, 142 bp, Homo sapiens; identical to SEQ ID NO: 56169
  chr19:40006498-40006640
  hyper

SEQ ID NO: 131522 - DNA, 40 bp, Homo sapiens; identical to SEQ ID NO: 12352
  chr19:40022936-40022976
  hyper

SEQ ID NO: 131523 - DNA, 30 bp, Homo sapiens
  chr19:40023494-40023524
  hyper
gagacctgcgcatgcgcgagtctcagtgag

SEQ ID NO: 131524 - DNA, 30 bp, Homo sapiens
  chr19:40030232-40030262
  hyper
tttccagatagtggcggagaaactgctggt

SEQ ID NO: 131525 - DNA, 30 bp, Homo sapiens
  chr19:40031006-40031036
  hyper
atgtttatgaggaacgcttacaagatcgct

SEQ ID NO: 131526 - DNA, 1068 bp, Homo sapiens
  chr19:40323999-40325067
  hyper
cgctgaaaaggcgaccgcctgtctctggcccggccggccccgcggcggggagggcaagcgggacaggaggcccggtgggtgacaacagcagccgccactgccaccgggggcggggagaggaggggacaagggtcagcccagggcacgcgggggaagagtagagcaggtggacgggggaggggcgacacgccccaccctgagtgaccaccagcccctagggacccggcgtcccgccccccacccaggaggccctcctgggcctgctgagaccggaaggcggggcccgactgagcttggcaatcggcacctgccatggcaacaactgtaccattggtcgctggtgccaagagctcagccaatcacagcctagggcagctgttgctaggcgacgaagaagcggcccgcggagctgagcccaaacaaagggcgggagtggggcccggctaccccctcccagcctccctcctgcaactgcttcctcgggcttggccggttccaggaattcaactatgaatagccaggcagggcccgcacctgcctgccacccccctcctctcctcccttggcctcgtgctaagtctcacggcgacgggagcagggcggatcccgtcctgcccacctccctgcgaccgcttgccgccccacccgtccccgcgccgttacctgaaggagcgggcaaggggactcaaactgctcggggagcccgagctcagacctgcccactggctgagggtatccggcggacgcggcaagccagggccccgattacccagtaatgcaaccagcaaaatggcgaccacaacaaaccggcccccccacgccctggactccgcccccatccctccctctccgctcccctcacgtgacccacactgacactccgcctgcgcgagatggccgcttacctgcacgcatgcgcagcgagctaccaatcccacccaagaaccgaaatccaggctgccgctgcgcaaaggcagctagaaacggagcatgcgctctgtgaccgagtgagaatttacccaaccccgcaaaattgaccaagggtgcgtgctccctgtgtcagcaggt

SEQ ID NO: 131527 - DNA, 30 bp, Homo sapiens
  chr19:40336334-40336364
  hyper
catccccggggatccgccccactgtaagtg

SEQ ID NO: 131528 - DNA, 228 bp, Homo sapiens
  chr19:40336894-40337122
  hyper
tccgtccctgaccccggaccctcaccccagcctgacctggcttcatggcgagccctggtttgtgcggctccggagtccgcggcgttcacaactccacgagtccggggctttcgcacgtggaaaagagcgcaggcgcgcggcgacgtgcgctgcgtgacgccaccccgtagtcccgcccccgggccccttccccgcccggagctcggcgcacgcgcagtgagcctggat

SEQ ID NO: 131529 - DNA, 30 bp, Homo sapiens; identical to SEQ ID NO: 56172
  chr19:40424134-40424164
  hyper

SEQ ID NO: 131530 - DNA, 30 bp, Homo sapiens
  chr19:40476609-40476639
  hyper
gatcttcccacgcccgcgcggcgcacaatc

SEQ ID NO: 131531 - DNA, 30 bp, Homo sapiens
  chr19:40477170-40477200
  hyper
gtccgggccgggctcgcggggagagggtga

SEQ ID NO: 131532 - DNA, 30 bp, Homo sapiens; identical to SEQ ID NO: 56173
  chr19:40503343-40503373
  hyper

SEQ ID NO: 131533 - DNA, 1031 bp, Homo sapiens; identical to SEQ ID NO: 12354
  chr19:40561465-40562496
  hyper

SEQ ID NO: 131534 - DNA, 30 bp, Homo sapiens
  chr19:40596526-40596556
  hyper
cactcagcaaagtgcgctgcgtccacacgc

SEQ ID NO: 131535 - DNA, 30 bp, Homo sapiens
  chr19:40697789-40697819
  hyper
gctcctgcggagggcgccccagccatggcc

SEQ ID NO: 131536 - DNA, 597 bp, Homo sapiens
  chr19:40722967-40723564
  hyper
ctagaagcagctccgcgggaggagggctctgctattctgccctgatcttcctgcctgttccctccgctgcagcccctttccccgccctgggcccagccctcacctctgccccgccccgccactcacctgtgggttcccggctgcgggcctcctgcaggtagcgcagcgcgcgtgcgtagtcgcccaggtggtagaaggcaatgccggcacggtaggtggccttgaagttgccctgctgcttctccagtaccttgagacagtactcgcgcacgcgctcgtagtttaccagctccgactgcagcaggcaagctgcgagggccccgcggccggcactctcagagcctgctggcacccccagaacccacctgactgcgaggagccgaggctccaggcggcagggaaccaggcctaagggattgctccggcaaccaggggcgccaatccgctcgcctatcgaaacaggcgcaactgcgccgctgctagggggcgccaaaacacggacaggcgccactgggcgatccacccagagctgtcggtgggcaagagcactaaggccccgcgcgggggcgagggccgggacctcgagagcctggctca

SEQ ID NO: 131537 - DNA, 31 bp, Homo sapiens; identical to SEQ ID NO: 12355
  chr19:40727912-40727943
  hyper

SEQ ID NO: 131538 - DNA, 67 bp, Homo sapiens
  chr19:40732061-40732128
  hyper
gactgcaaagagcccggggacggtgggaaagggcattcccagcggtagaaacggcgctgtgtgaaaa

SEQ ID NO: 131539 - DNA, 410 bp, Homo sapiens
  chr19:40791306-40791716
  hyper
ctggacggaaataccgccctctcgcgccacaaacaggaagtgacgtacaaagagccagagacgaactctgagagagcgagagcgcaagagcagggcagagaaggaggcgggctcacagcagggcgcctgcgcacattagacaactttgggcctgtgtgggttagagatgggcctcgctaggccgtggggcggaaaggcgagatggggctacgcaggcgcactaggactccgacgtctgctttccctagggcctagccgtagtgattatttcccggcagcccctagtccgtatttacatacgctttgatcttgttttactcagttctgggttctgacgctcttaaaggaccccggagcgggagttagttaggaggggtttccttttcagtgtgctcgtcatggttgagctc

SEQ ID NO: 131540 - DNA, 374 bp, Homo sapiens
  chr19:40854359-40854733
  hyper
gactcgtccgcggccgctctaccccaacaggccgccaccagcgagagtgcggccataaccatcacgtgaccgcccaccgacaccagcgagagtgcagtcgtaaccgtcacgtgaccgcccaccgtcggcccggcgctcccctccgcccgaagctagcaagcggcgcggccaatgagaaaggcgcatgcctggcccccgccggcctgcagtctagccgtagtgcgcctgcgcgcggctaggaggggccgtcaggcggggatacagcctggaaggtgcgtgtggggctgggtctcggagtgggagacgtggagtgcaggtactgtgcgatctgggggcgcggcgcctcggctaccctcctcgtgttgtcttccacg

SEQ ID NO: 131541 - DNA, 30 bp, Homo sapiens
  chr19:40909459-40909489
  hyper
agtcagcaaagccccgccccaagcccttaa

SEQ ID NO: 131542 - DNA, 76 bp, Homo sapiens
  chr19:40910077-40910153
  hyper
cacacccactccggcgtctcccctttaagcaagcctgagggcagctggctttctaggacccgcggaacggttaaac

SEQ ID NO: 131543 - DNA, 30 bp, Homo sapiens; identical to SEQ ID NO: 56179
  chr19:40927348-40927378
  hyper

SEQ ID NO: 131544 - DNA, 30 bp, Homo sapiens
  chr19:40931682-40931712
  hyper
cggcgggcacctgtcggacccagggatcga

SEQ ID NO: 131545 - DNA, 187 bp, Homo sapiens; identical to SEQ ID NO: 56180
  chr19:40932004-40932191
  hyper

SEQ ID NO: 131546 - DNA, 151 bp, Homo sapiens
  chr19:40939938-40940089
  hyper
ggccgcggccgcctcccgggtaccccggccggcccagggcggagggtgggcagcggggagggactgggccttcccgccacgcccagggcgggccgcgggcccatcccccgccgcggaggagggcaggttggggaacgtggacactgccctc

SEQ ID NO: 131547 - DNA, 440 bp, Homo sapiens; identical to SEQ ID NO: 56182
  chr19:40948766-40949206
  hyper

SEQ ID NO: 131548 - DNA, 30 bp, Homo sapiens
  chr19:40950157-40950187
  hyper
cgcccacagcgttgcgacccgccagtgcca

SEQ ID NO: 131549 - DNA, 30 bp, Homo sapiens; identical to SEQ ID NO: 56183
  chr19:40950479-40950509
  hyper

SEQ ID NO: 131550 - DNA, 30 bp, Homo sapiens; identical to SEQ ID NO: 12361
  chr19:40971189-40971219
  hyper

SEQ ID NO: 131551 - DNA, 122 bp, Homo sapiens; identical to SEQ ID NO: 56185
  chr19:40971817-40971939
  hyper

SEQ ID NO: 131552 - DNA, 170 bp, Homo sapiens
  chr19:40972621-40972791
  hyper
actgtttgtgactgccggggagtgtgcggctgtgtgtgacaggtgcatttgtgtgtgacgccgcgtgggcggtggttaccctattggatttgtgtggtggtgggtgacaccgttccagtgtggacgccgcgtgtgacggcgtgagggtgtgaccccgtgagaccccacag

SEQ ID NO: 131553 - DNA, 154 bp, Homo sapiens
  chr19:40973005-40973159
  hyper
ggggtcccgggggcgcgctgagcgcggcggcggcgcgagagagggaggcgcggcggcgcatgcggatctggctgagccgcgggccggcggggccgagctgagccgggctgggccgggccgggccgggccgggcagcggacgccgacagggaggg

SEQ ID NO: 131554 - DNA, 558 bp, Homo sapiens; identical to SEQ ID NO: 12362
  chr19:41018504-41019062
  hyper

SEQ ID NO: 131555 - DNA, 26 bp, Homo sapiens
  chr19:41019075-41019101
  hyper
cgcctggcagccgccggtgacttcgg

SEQ ID NO: 131556 - DNA, 629 bp, Homo sapiens; identical to SEQ ID NO: 12363
  chr19:41025293-41025922
  hyper

SEQ ID NO: 131557 - DNA, 80 bp, Homo sapiens
  chr19:41036238-41036318
  hyper
agaagccccccacccgaagccttggggcgagtggtggttcctcctgcacccccacctggggccccgcaaagaggcgggca

SEQ ID NO: 131558 - DNA, 30 bp, Homo sapiens
  chr19:41036792-41036822
  hyper
gcgtctcagcctttcgagggggggctcttc

SEQ ID NO: 131559 - DNA, 387 bp, Homo sapiens; identical to SEQ ID NO: 12364
  chr19:41055083-41055470
  hyper

SEQ ID NO: 131560 - DNA, 445 bp, Homo sapiens; identical to SEQ ID NO: 12365
  chr19:41059939-41060384
  hyper

SEQ ID NO: 131561 - DNA, 26 bp, Homo sapiens
  chr19:41060498-41060524
  hyper
cgcgcagctgtcgcgccagtgccggg

SEQ ID NO: 131562 - DNA, 269 bp, Homo sapiens; identical to SEQ ID NO: 56191
  chr19:41073588-41073857
  hyper

SEQ ID NO: 131563 - DNA, 229 bp, Homo sapiens
  chr19:41074018-41074247
  hyper
cggaggcggcggccggagcggcaggagtcagcggagcacgaggcggcacacagccttaccctgggccgctatgagcagatggagcggcggcgcgagcggcgtgagcggcgcttggagcggcaggagtccagcgaacaggagatgcccatcagaggagacctggtcaaggggtgaggtgcccgccttatgaccagaaagtgaggggaggggaaagcggagagctcctaga

SEQ ID NO: 131564 - DNA, 105 bp, Homo sapiens; identical to SEQ ID NO: 56193
  chr19:41082276-41082381
  hyper

SEQ ID NO: 131565 - DNA, 37 bp, Homo sapiens
  chr19:41082734-41082771
  hyper
gcagcctatggaggcggggtccgggtgcacacccgga

SEQ ID NO: 131566 - DNA, 30 bp, Homo sapiens
  chr19:41083115-41083145
  hyper
ccgtttaccttccccgcccagattcagtac

SEQ ID NO: 131567 - DNA, 31 bp, Homo sapiens; identical to SEQ ID NO: 56195
  chr19:41103204-41103235
  hyper

SEQ ID NO: 131568 - DNA, 30 bp, Homo sapiens
  chr19:41104393-41104423
  hyper
ggagctggaagctccgccactgagaccctc

SEQ ID NO: 131569 - DNA, 98 bp, Homo sapiens; identical to SEQ ID NO: 56196
  chr19:41105081-41105179
  hyper

SEQ ID NO: 131570 - DNA, 78 bp, Homo sapiens; identical to SEQ ID NO: 56197
  chr19:41105405-41105483
  hyper

SEQ ID NO: 131571 - DNA, 60 bp, Homo sapiens; identical to SEQ ID NO: 56198
  chr19:41105941-41106001
  hyper

SEQ ID NO: 131572 - DNA, 176 bp, Homo sapiens; identical to SEQ ID NO: 12369
  chr19:41106351-41106527
  hyper

SEQ ID NO: 131573 - DNA, 30 bp, Homo sapiens
  chr19:41106979-41107009
  hyper
tctggggggaaacccgcccgcccccacctg

SEQ ID NO: 131574 - DNA, 30 bp, Homo sapiens
  chr19:41107362-41107392
  hyper
ggactgggccggctcggagagcgtctccgc

SEQ ID NO: 131575 - DNA, 699 bp, Homo sapiens; identical to SEQ ID NO: 56200
  chr19:41111116-41111815
  hyper

SEQ ID NO: 131576 - DNA, 379 bp, Homo sapiens; identical to SEQ ID NO: 56201
  chr19:41115508-41115887
  hyper

SEQ ID NO: 131577 - DNA, 30 bp, Homo sapiens; identical to SEQ ID NO: 56202
  chr19:41116096-41116126
  hyper

SEQ ID NO: 131578 - DNA, 14 bp, Homo sapiens
  chr19:41116402-41116416
  hyper
tgccccagtcccag

SEQ ID NO: 131579 - DNA, 195 bp, Homo sapiens
  chr19:41119081-41119276
  hyper
gtcggcccgggccctgcgcaggtgagcagcatagggacccgccagagagtctgggagtagggcctgggttccagggcaaagccggctggaaaggtggaggcgggaccaaggcgctgtgggaggagcttagaaacctggcattggtgggggcggggttactgcgatgtgggcggagcttgtctgggaggccgggtc

SEQ ID NO: 131580 - DNA, 38 bp, Homo sapiens; identical to SEQ ID NO: 56205
  chr19:41119370-41119408
  hyper

SEQ ID NO: 131581 - DNA, 132 bp, Homo sapiens
  chr19:41119669-41119801
  hyper
ggggggcggtgtttgcagggagggaagtagcgtgaggcaggttggggaaggcgtgagaggcctaggagagccgaggggcggtggaggggtgtggcctagaatgttaggcggagcgggaggtgggccgggcct

SEQ ID NO: 131582 - DNA, 47 bp, Homo sapiens
  chr19:41120295-41120342
  hyper
gctgtgtccgggactgcgatcctgggtaccacgcgggccccgagggc

SEQ ID NO: 131583 - DNA, 30 bp, Homo sapiens
  chr19:41168786-41168816
  hyper
aagtcttggaggggcggccgcccaggcgcc

SEQ ID NO: 131584 - DNA, 30 bp, Homo sapiens
  chr19:41169379-41169409
  hyper
gttcctgggtagggcggggctttccagtgc

SEQ ID NO: 131585 - DNA, 390 bp, Homo sapiens; identical to SEQ ID NO: 56208
  chr19:41190145-41190535
  hyper

SEQ ID NO: 131586 - DNA, 35 bp, Homo sapiens
  chr19:41196714-41196749
  hyper
cgcggccaccgccccgccacgcccattggccagtc

SEQ ID NO: 131587 - DNA, 30 bp, Homo sapiens
  chr19:41221177-41221207
  hyper
ttgctgaggcatcgcgggagcgcaagcgtg

SEQ ID NO: 131588 - DNA, 74 bp, Homo sapiens
  chr19:41222269-41222343
  hyper
gacagtgccaggcccggggccacatgcttcacatacatgagatcatgtcagatagccccgtagctgcaagcaaa

SEQ ID NO: 131589 - DNA, 30 bp, Homo sapiens
  chr19:41222733-41222763
  hyper
cgccaccaggaccccggtgccctagatgca

SEQ ID NO: 131590 - DNA, 107 bp, Homo sapiens; identical to SEQ ID NO: 12376
  chr19:41223421-41223528
  hyper

SEQ ID NO: 131591 - DNA, 30 bp, Homo sapiens; identical to SEQ ID NO: 12377
  chr19:41256380-41256410
  hyper

SEQ ID NO: 131592 - DNA, 30 bp, Homo sapiens
  chr19:41256632-41256662
  hyper
tttttctacctaggcgggaacccaaatatc

SEQ ID NO: 131593 - DNA, 34 bp, Homo sapiens
  chr19:41304118-41304152
  hyper
cccttgtgctcacgcgaaccgccctacgccctca

SEQ ID NO: 131594 - DNA, 30 bp, Homo sapiens
  chr19:41305408-41305438
  hyper
ggagggggtccgagcggcccttaggccctg

SEQ ID NO: 131595 - DNA, 3 bp, Homo sapiens
  chr19:41596078-41596081
  hyper
cga

SEQ ID NO: 131596 - DNA, 102 bp, Homo sapiens
  chr19:41641727-41641829
  hyper
gagcccagcaaaggcggggccaatgtgtggatagggcacttggaggtctggtaaggcagcaaaacgaacgaagccggccgcaggagtcggaggccccgaaag

SEQ ID NO: 131597 - DNA, 590 bp, Homo sapiens
  chr19:41698789-41699379
  hyper
ctggggagagtggcgcggggtcaccgccagatgcggggtgtggcaacctccaggcggccaaagtctctgacttccaggttcttctgtttgcttactccctatccgggggcccaaggcgctgtctccgccgcccaagccccgcgtaaacctgggtgacctcggagacatccgttggagcatgagttcccgacatcaggcggcggcggtggtccgggagaaacccggcggcggggagataagcctgcccaggaggcagggggctgggctagctgccccgccccgcgcctgacttcgttggggagggagacgcccggctcccgcccctaactagcccagccgcgcggagcgcctgggagaggagaaggagccgacctgccgagatggaggcgaccggcacctgggcgctgctgctggcgctggcgctgctcctgctgctgacgctggcgctgtccgggaccagggcccgaggccacctgccccccgggcccacgccgctaccactgctgggaaacctcctgcagctacggcccggggcgctgtattcagggctcatgcgggtaaggggctctggggacgtcctggctaggggt

SEQ ID NO: 131598 - DNA, 538 bp, Homo sapiens
  chr19:41732020-41732558
  hyper
tgggaagggggatcccggctctggctccgcgcccccgaagccggccggaagcgctggggtggggaggtgcccccggtgactcacgcgggggcaggaatgctgcggtcggaacgggacccggctccagaacccacctccagccccagggcttctccggccggcggcgccagctcccgcgcgctgaccctggcggggccccacgtgccaggtggctggacccgacccaggctccccgcccccactcgggccgcccgcccgggactgtactgtttctcctccgggcggcgcgggggctgcgggcgcggggccttcagggcgcggaggctgcgggagcgggcacctgaccttgtctgggaacggccacctaggaagccgcgactgaggagctcccctaccctcccctttccggcctctgcagactttgcaccattccactccctccgctgacggagaaaaggaaactttgtgtctgcggatggagagcctcccttgccaacgcggtgggaacagaggcgtacacgcacggagcaaacacgag

SEQ ID NO: 131599 - DNA, 30 bp, Homo sapiens; identical to SEQ ID NO: 56217
  chr19:41768441-41768471
  hyper

SEQ ID NO: 131600 - DNA, 30 bp, Homo sapiens; identical to SEQ ID NO: 56218
  chr19:41770620-41770650
  hyper

SEQ ID NO: 131601 - DNA, 102 bp, Homo sapiens
  chr19:41815854-41815956
  hyper
acggctccaggctccgggggaaagtcctttagccatccatcccaaaattaagcacgctgggagctggagtcacagcagtgataaaacgaacaatgattctgg

SEQ ID NO: 131602 - DNA, 327 bp, Homo sapiens; identical to SEQ ID NO: 56220
  chr19:41831044-41831371
  hyper

SEQ ID NO: 131603 - DNA, 363 bp, Homo sapiens
  chr19:41831712-41832075
  hyper
ttggagcctcactggcggccactggaaacccagaatgaggggtcatcgcctctcgcccacccagaaagggcgcaggagggggcagcaaggttgcggggcctgtctggccagaaggaaatgtctgtgctgtggcctggtcacccccgcccccaggacctgctgggctgctgccgcccccggccggggctgaggccgagtaaacacagcaaacacagccgccggcagcctgggatatttataccgaggctgggcgtgggtccagtgcccaccacagcccctgccctgccctgccttgcctgctgccacagccagctccgagccagcgtggcaccagccggcaaggggacgcgccgcagacacagc

SEQ ID NO: 131604 - DNA, 595 bp, Homo sapiens
  chr19:41857121-41857716
  hyper
tgggtgcggagtgcgcgtcattgggctggagctgtaaactggcgcagaaatgggcagggaacccgcaagcccacaccgcccaagagtcagtgaaacctgagggatcttccccaaggctctgaaccacgcgggacgcctgggtcctcgcatggatgccgacggggccggctgagtgggagccccgcccgtagctggggtgaggagggcgggaggcgccgcagccaggagggcggggaccagacctgccccgtctcgccccgggctccgcgagcgatccccgcctccgccgggggcatgggaaggaaagggaagggagggggatgaggccgccggacgctggggtttccccagccaccctgagaggaactgggactttggggtccagactgccagcgtttagcgcagcggggtcctcctgccccttggtggaagcgcaggctcctccccccgcgcgtggcacccacgtggggctttctcactcctcccagcttggttttctcacctcggtcttgtagagtcaccccccacccagcacttcccctgcggctggactccgctcagcccattcccctgcatcctgcggggaatgcagcgt

SEQ ID NO: 131605 - DNA, 30 bp, Homo sapiens; identical to SEQ ID NO: 56224
  chr19:41858801-41858831
  hyper

SEQ ID NO: 131606 - DNA, 459 bp, Homo sapiens
  chr19:41859851-41860310
  hyper
gttttgaagccgcccccggccccacccaggaagcgcacggggcgggagcgggggcggcccccagggggagggcatgggggggctgggccaccgtcctcatctcgcgtgggcgggctccgaggggggtcccttcagccctgggggaaagggggcgggcaccccggctccgccccgcaaacagggtgctgcctcctggcggccaagcgccaccaaagcgggtgatccagatgcgctgtggctttgcgggcggtgtgggtcaccagagaaagaggaccaggcggagaaggcttaatccgggggatgagacacaggggagccgaccagaggagggggacccagaacggaaggagagtcaggctgggaaacaaggtaggagaagagggtctgtcaacatgggggcctccggagggtgtcagtgggaggagggggcaacaggacacctgaaggatggaagggtca

SEQ ID NO: 131607 - DNA, 30 bp, Homo sapiens
  chr19:41869673-41869703
  hyper
cgggttcaggtcggcggaaagccccgcccg

SEQ ID NO: 131608 - DNA, 222 bp, Homo sapiens
  chr19:41870210-41870432
  hyper
tccgccattttgggcgtggctaggaagctgccatgttgagtgtggctgaggaagtttgagtgcagtttctcccagataccttctttaccaaaaaagcaaatccctaactgctccgtgctgcgcctaccccaccgaagagctctctgtggtccgggatcacaaatcagagattgaaccaggaccaagggggaattccttccaggacctcgtgtacatccccgg

SEQ ID NO: 131609 - DNA, 34 bp, Homo sapiens; identical to SEQ ID NO: 56228
  chr19:41882552-41882586
  hyper

SEQ ID NO: 131610 - DNA, 30 bp, Homo sapiens
  chr19:41903335-41903365
  hyper
cctgggcgtccgcacgtggcttagcgttta

SEQ ID NO: 131611 - DNA, 338 bp, Homo sapiens
  chr19:41945337-41945675
  hyper
tttctgtaaaaattcgtcaatctcccactaactttccttacattcatccttcggtcttctaagaccaaatcccacatcctcgaacaatcccttccaagctctcttatcctacaggccccacccttgcctgtccattagctccttgtgtcatccctccctctgattggttagtcgcgtcgctcttcggcagccactccctcatccccattggatactctcagccaagtccctgcctcctctcgctcgctaaagcgtctcctccgcctgcgaccctcacagatccttcctggcccccactagccacaggtttgcactcccagtacggggcttgccaggct

SEQ ID NO: 131612 - DNA, 471 bp, Homo sapiens; identical to SEQ ID NO: 12387
  chr19:42028282-42028753
  hyper

SEQ ID NO: 131613 - DNA, 49 bp, Homo sapiens
  chr19:42257255-42257304
  hyper
ggaactggggaaagctcgctgcgccgccagggggcgccatcacaaacca

SEQ ID NO: 131614 - DNA, 182 bp, Homo sapiens; identical to SEQ ID NO: 12388
  chr19:42297159-42297341
  hyper

SEQ ID NO: 131615 - DNA, 30 bp, Homo sapiens; identical to SEQ ID NO: 56233
  chr19:42363944-42363974
  hyper

SEQ ID NO: 131616 - DNA, 36 bp, Homo sapiens
  chr19:42364646-42364682
  hyper
cgatccagagaggccgtgggcgtcggtgagctcctt

SEQ ID NO: 131617 - DNA, 30 bp, Homo sapiens
  chr19:42388707-42388737
  hyper
gacccgcctcattccgtataaagtcttaca

SEQ ID NO: 131618 - DNA, 30 bp, Homo sapiens
  chr19:42425748-42425778
  hyper
gaggtcacgggagagcgagggccgcaccgg

SEQ ID NO: 131619 - DNA, 188 bp, Homo sapiens; identical to SEQ ID NO: 12389
  chr19:42444455-42444643
  hyper

SEQ ID NO: 131620 - DNA, 30 bp, Homo sapiens
  chr19:42462859-42462889
  hyper
gcgggtgcggggcccgggaggcactcacac

SEQ ID NO: 131621 - DNA, 30 bp, Homo sapiens; identical to SEQ ID NO: 56236
  chr19:42463595-42463625
  hyper

SEQ ID NO: 131622 - DNA, 30 bp, Homo sapiens
  chr19:42497864-42497894
  hyper
actttcagacaccacggggcccacacactc

SEQ ID NO: 131623 - DNA, 118 bp, Homo sapiens
  chr19:42498158-42498276
  hyper
acacccaatgtcaccggccccacaatgtcacacggaagcggcgcccagccggctcagcacctacccccatcttggcggctccgcggcgagagagccaggcgggcggggcggggacctc

SEQ ID NO: 131624 - DNA, 107 bp, Homo sapiens
  chr19:42498570-42498677
  hyper
gattcccagagacctccgcaataggggacttggagaccccctcaatatggagtagggcctccaagaaggggcgctcagggaaagaaaaccccggaaatcctctcatt

SEQ ID NO: 131625 - DNA, 333 bp, Homo sapiens
  chr19:42501285-42501618
  hyper
agacgcagaaggggacgggtggcgacggggggcgctgtgtgcggggaggggtctcccagggtgtggccggcctgccaggactgcgctgggcaggcgggccctggagggaagtcgggcgctctgggctcaggctggccaactgggtgctgaacggacagctcccaagccccgggccgccgcccaggaacgggcgcagcctcgctctctctgggacctttccagtcaggctttcctttccgttccagtcccctccaggttccatttagttttttatggcttcctgtctctcaccccaactccgggtgtatcttaccctcccgcttcacctctggt

SEQ ID NO: 131626 - DNA, 30 bp, Homo sapiens; identical to SEQ ID NO: 56240
  chr19:42580135-42580165
  hyper

SEQ ID NO: 131627 - DNA, 464 bp, Homo sapiens
  chr19:42636368-42636832
  hyper
agctgtgggggttagcggggacccggcatgggagagagggagttgctagagtacagaggagaaggacaatggagacagctgaggaggaggggcaggcagggcccgcagagcaaacctaaatgtgctgcctgtcctctgagcagtggcacaggcaccagcccccttacctggagcccccatgctggagtgaaccatgctgcccgccccgccagggctgggggaacaactgtgtcatctccccaccctctctgggggccgagccctccctgccggaagtcactcagggaggaaaccacagggccggtccgcccccttcagaagggaaaataccctggcccacagacccgccccggcagcccggcccaccccaaatcatgtgtgtgtgctggggggtgggggctagtggggcagaggataagcaggctggaagagccgactcctacggctgcgatccaagaggtgcc

SEQ ID NO: 131628 - DNA, 30 bp, Homo sapiens; identical to SEQ ID NO: 12394
  chr19:42637615-42637645
  hyper

SEQ ID NO: 131629 - DNA, 416 bp, Homo sapiens; identical to SEQ ID NO: 12395
  chr19:42680241-42680657
  hyper

SEQ ID NO: 131630 - DNA, 30 bp, Homo sapiens
  chr19:42681497-42681527
  hyper
gcgcgcgccatccccggctcccaccttgtc

SEQ ID NO: 131631 - DNA, 30 bp, Homo sapiens; identical to SEQ ID NO: 56244
  chr19:42721461-42721491
  hyper

SEQ ID NO: 131632 - DNA, 348 bp, Homo sapiens
  chr19:42724176-42724524
  hyper
ctgtcaaggtctcccgccgcccagttcactccatgggcccaacgctcaccaaaggttgcccgagtttctctacagaacttgccgacgcttagcccgggagcgacccagagaaatgcgcaggcgcatctcctcgccctgagccccgcccacagggcgaagatgtgtgcgtggataactcccagagccccgcctgtgtggcaacacgcaggcgcaaggtcgcgtgccctgcgctgcaggctctgattggtcgccacgggtaagggcaccgcccaatgggaggtgtggatagtgaggggtcccacacgcctggagccgagggtctgtgtcaagagcggcaggggctgcagg

SEQ ID NO: 131633 - DNA, 30 bp, Homo sapiens
  chr19:42746882-42746912
  hyper
gcgggaatgatgggcgggaatgacgggtca

SEQ ID NO: 131634 - DNA, 112 bp, Homo sapiens
  chr19:42749160-42749272
  hyper
gacggctcaaaagggcggcgacatggggcaggatagcgagggttatttaaccgccagaacccgtggggcatgcgccgctgcgtgtgggcaaccgccacgaggggattggggt

SEQ ID NO: 131635 - DNA, 40 bp, Homo sapiens
  chr19:42754953-42754993
  hyper
acaggaaaccgtcggcggtgggtcccggggccagtgccag

SEQ ID NO: 131636 - DNA, 30 bp, Homo sapiens; identical to SEQ ID NO: 56246
  chr19:42757831-42757861
  hyper

SEQ ID NO: 131637 - DNA, 89 bp, Homo sapiens
  chr19:42758961-42759050
  hyper
agcaaccccgctcgcgccacgagaagcaacaggtctccagtgcttgaggggtcccccagaactggggatcactcgggctcccccggacc

SEQ ID NO: 131638 - DNA, 30 bp, Homo sapiens
  chr19:42772877-42772907
  hyper
ctgccttgtactgtcggctatgggccgaag

SEQ ID NO: 131639 - DNA, 244 bp, Homo sapiens
  chr19:42774658-42774902
  hyper
cagctcgaaagggggcgggcagtaatgactgttcaggaagtgggtgaggttggcctgttgggcttgtcctgctttctttgaccttatcccacctatccccacttggagttggagggcatatttgggggcctgcggggggctagccgactcagccaccctgccagagccagcccagccagggcggggatgcatgcaggcaagaagaggggggctgggcttgcgggtatcacgctgggtgctgtgg

SEQ ID NO: 131640 - DNA, 130 bp, Homo sapiens
  chr19:42784478-42784608
  hyper
tcttgcgaagtagtcggggaaaccgggtgctccgggggctgtgtagaagcggactggcacccagcgagggccgcgcccagcccccgctggcacctaggggtgtgggttcccgcgcgcccctgggtgcaga

SEQ ID NO: 131641 - DNA, 30 bp, Homo sapiens
  chr19:42788951-42788981
  hyper
aggggtcaaggtgtcggggtgctaagtgcg

SEQ ID NO: 131642 - DNA, 30 bp, Homo sapiens
  chr19:42806329-42806359
  hyper
tgagccaccccccgcgcccccggactcctc

SEQ ID NO: 131643 - DNA, 195 bp, Homo sapiens
  chr19:42806828-42807023
  hyper
gtcacggggaggggcgaactacctgaagagtcgagagtgggcggggaaaatctagccctctgtctagcaaatgggaagaaaccatttgctgtacagagtgaaatgtgcggaagggaccacctactgttgcgggggggggggtgacccattcacgtggtggggggaggggagcgagtggacgagtccattcttata

SEQ ID NO: 131644 - DNA, 30 bp, Homo sapiens
  chr19:42817644-42817674
  hyper
ggaggtgagcatgccgagccctcctctgcg

SEQ ID NO: 131645 - DNA, 30 bp, Homo sapiens
  chr19:42817966-42817996
  hyper
gagagccccgagctcgccgccacactcccg

SEQ ID NO: 131646 - DNA, 345 bp, Homo sapiens
  chr19:42830247-42830592
  hyper
ggactgccgggtctccgggacctcttcgatctacaaggtcatgttatgcctatagaggtcgcatttgcagggcctcaccccgggtagagggtcctctccaggtttttacggcctgtccccgctctaagggtcagtgcaggaggcggcgatggccctgggcaaggttctggccatggcactggttttggccttggccgtgctggggtcgctgtcccctggggcccgggcgggggactgcaaggggcagcggcaggtgctgcgggaggcgccaggcttcgtgacggatggtgcgggcaactacagcgtcaatggcaactgcgagtggctcatcgagggtgagtgggg

SEQ ID NO: 131647 - DNA, 30 bp, Homo sapiens
  chr19:42891364-42891394
  hyper
gagggccgcccagtcgtgcccgacggagcc

SEQ ID NO: 131648 - DNA, 598 bp, Homo sapiens; identical to SEQ ID NO: 56250
  chr19:42901073-42901671
  hyper

SEQ ID NO: 131649 - DNA, 661 bp, Homo sapiens
  chr19:42905709-42906370
  hyper
ggagggccagtccccgtccctgcggcggtcgccgcagcagcagcagcaaaaggcagcggtggcgtgcaggtccagccgtctcggtgaccggtgtgtgtgcgcgtccccctccccgtggcgagggtctcagctttcgggcccccgccccgcccccttgccacccccgacttaagtaaggcacagcccgcgtccccttccgcccggcccggaaggcattcatgacggaggccggcgcagatgggaacaacaggcttttagtgtcgccccccgcagcccccgtctacccccgcagcccccgtctccccgctcggcccggctccggcgggaggagtgaggacgaggcggatgcgctccacgcacagctctgcggcctggcgcgtctcgcggcacagcgccgctagggtcaggaagccgtgcggcaggtcctccaccacgcgcagcgtcaccggctggcccaggttgcgcagtcgccgcgcgagcatgaccgagtcgtccagcatggggtccagcgcgcacgcctacgggacagcggggagggacgtggagagagggtgggggacagacagaccggggtcgggtagagcgaggaggggtttgatgaacaaagggagcgggaaatacggatacagacggagtggacggaggcaggagacatggtggg

SEQ ID NO: 131650 - DNA, 1097 bp, Homo sapiens
  chr19:42927303-42928400
  hyper
gggaaccctggtccacgaagctcgcattccggactctgctcccaagccgatccgggcgtcagctagtccctgtgccagggtgggcctctcggctgtcacatcacccccttctcacaatggatcatcccgttgtccccgcaagcggcaatgggccagtccgcggacccccccaactccctgtggcagtgggccagtccacgctgtccccactgccccgtaggatgtacgaggttccttccgggctgctgccggtctccgcgcgctcacctttggccttgtcttttcgccaccgccggcgaccgtggctccttgagccctctttggcattcttcgaggccggggccatagcggcctcggcgggctccgttcccccggccaactccatcaattccccgcggtcctcccgcgggggccaattccagccgcgaggccctgcccggagggccaatcctcgctacacactactgtcgggcccccctattacccaatcccgagcttgctcttctctgggtccagctccctaaccaattctggtctccctccgctgccgtgctccgcccccaaccgccagaatttaagatctggctccgccccctaccgcgcattaaagggctcgcggccaacaaaaaggcaaccccgggggtggcgaaaagcgtccttcgggcaggactagtgcggagccccgcggggagcaccccagcagggaagtcccgatcttcccacgtgctgggaagcctcccatgtgctggctcagtctcgccatcccactcaccttcccagggagggatgccctagcacgcggcccggcccgccttttgaagggggaaagtggggcgcctctgagcctctgcctggggtgggggcgggccaggtcctctgccaactcaaagacgaggcggggcgccagcgctggaggcgtggctgtgcctgagagccgttggaggagggagccccgctttccctctcctgtctcctagttctcctattgcgcttttcctgggggatctttctccctctgtctccgccccctaatccatgctcccgataatgagggtgggggatggtggtaggagaacgctcggcgcctgcgcactagc

SEQ ID NO: 131651 - DNA, 46 bp, Homo sapiens
  chr19:42942662-42942708
  hyper
ttggaccactgttggcgggtaactgaaactgcgattaagtggggac

SEQ ID NO: 131652 - DNA, 30 bp, Homo sapiens; identical to SEQ ID NO: 12399
  chr19:43032572-43032602
  hyper

SEQ ID NO: 131653 - DNA, 31 bp, Homo sapiens; identical to SEQ ID NO: 56255
  chr19:43866888-43866919
  hyper

SEQ ID NO: 131654 - DNA, 244 bp, Homo sapiens
  chr19:43967266-43967510
  hyper
ggctccctcacctgccgtcaaggtgacgttgccgtcgaagcagcccttgtagacatgatcgctggcgttgtagcagctcacgaccggcggcgatgtaccctggcacgcctcccggctcaggcccacacagctgtagcactccacgccgttgggcgggtatgcactctcattacctgcgaggggagccgagaggaagaaaaggtgtcgaaagggttcgggaaccgcagctcgtcctctagccccg

SEQ ID NO: 131655 - DNA, 442 bp, Homo sapiens; identical to SEQ ID NO: 56256
  chr19:43967733-43968175
  hyper

SEQ ID NO: 131656 - DNA, 30 bp, Homo sapiens; identical to SEQ ID NO: 56257
  chr19:43968480-43968510
  hyper

SEQ ID NO: 131657 - DNA, 360 bp, Homo sapiens
  chr19:44008461-44008821
  hyper
gctccaaggcgacacgccaccggagacgggaccggaatttgagtccgggtcgtagcacgccccctactgacctcttcgaccccgcctcccctccctcatctctaggtgtcaggccttgtaccctcccagcagccccctacaatctcttggattcgcttagagcgacccatcttctccctccgagactcagcagttcggctcccgccccatccttcccggagccccgtagtcttagtcccgaccccactgtgcagggcaaccgtgcccacgccgcctcacccagggatccaggagtcggggctctccttctctgaacaagccaggagtcggagtccttgagattccgaagtccaactgcca

SEQ ID NO: 131658 - DNA, 310 bp, Homo sapiens
  chr19:44029701-44030011
  hyper
ggttgcaattctggccggaaacccgctggtgcctgtggcaaataaagtgaggaaggcaggaacctttagacttcccagtgtgaggcaacggcagggctaggactagggtgaggctgttggtgcaagatttaaggaggcgctcactcacaggtgcggaccctgcacttacaggaccctgagagcgagtgcctccttaaatgttgcactccagggtcctcaccgtccttttcctagtcctgggctccgggttctaagcacccagatgctccttcctcaaacggaggtttccgcaagacaggactgggtctct

SEQ ID NO: 131659 - DNA, 521 bp, Homo sapiens
  chr19:44030437-44030958
  hyper
ccagggaggagggaacggagcagccccgagcctgtaatgtggtccgcgtggcagtgggtattcactgggagagagaggagggacaggtccggagggtacagaaaggacctgggagtcccagcccagatccttctccctcagactcaggagttctgggccccagcttcccattccactgacgctgcagcccagccccgctgggatccatgagtttggtccccggactgaccagcatagagcagccgcagccccagctccttgatcagctgggcatcccgaggcgctgtttccaggactgggtcgatcagaacggcctcccgggactctctgtcacccagcaggtacgtgaaggtgcagctcacaggctcgaacatctgggaacgggggacccaggtgagggcgcagaaccggacttccacccactggaggccaagtagtccagactgaccctatcctcttcctaagatccagaagcagaaaccccagcccactctttccccgggagtcgggagtccggagcc

SEQ ID NO: 131660 - DNA, 234 bp, Homo sapiens
  chr19:44031370-44031604
  hyper
ctgcaggagccgggcgctacggcactgaccccgggaagggcggggcgggggcggagcacgccttaaaggggccacggacgcctggggcagagggcgggggaccgccgagcgggactggggcgagggcgagaccgaggaaagccagagtgcaatgcctggacgctttgagacccagaaaaaacagagaacagggagacactcaaagtgcgagggacagacgctcagagacacaca

SEQ ID NO: 131661 - DNA, 30 bp, Homo sapiens
  chr19:44037029-44037059
  hyper
cgctgtgcaaataacgtgccttttattggg

SEQ ID NO: 131662 - DNA, 30 bp, Homo sapiens
  chr19:44037794-44037824
  hyper
tggtgccagagcctcgggagggtgcatcgg

SEQ ID NO: 131663 - DNA, 399 bp, Homo sapiens; identical to SEQ ID NO: 56261
  chr19:44099000-44099399
  hyper

SEQ ID NO: 131664 - DNA, 223 bp, Homo sapiens; identical to SEQ ID NO: 56262
  chr19:44100423-44100646
  hyper

SEQ ID NO: 131665 - DNA, 30 bp, Homo sapiens; identical to SEQ ID NO: 56263
  chr19:44124160-44124190
  hyper

SEQ ID NO: 131666 - DNA, 779 bp, Homo sapiens
  chr19:44143629-44144408
  hyper
gggccctttgtccccgccgggatccagcctgcgcgggtgggggggctgcggcacggcggccgggccccgcgccccctcccccgctcgtcgctcccggctcccggcccgcgctgcgctttgtcccggggagggggcccggcccggccccgcgcgcattgttcggcctctgcggccccgaggctgccgggctgtcaccacagcgcgccccccgccccagcccggccggccgaccccggcccccgaccctacctggccccgccgcggccgcccacagcagcagcagcggccactggaagcgccgggcccggcccatggtgccgccgccgccgccgccgccgctcgctcccggcccggcacctgcaccgcccgcgccgcccgccccgccccccgcgccccgccccctgcccgcccgggggcggggcgccgaggccggggcggggccggggaggggagggggagacggaggagaggcccggagacaatcggggggacggcacggtgggggaacggtgcggggtgcgaaagctggagaggagaggggtgaggagggcgggaaggggtgcgcgggagggcgacagcggcgtgggagcaggtgggggatctcggtgagcgcgggaaatggagggtgttgggtgagggtgctgcgtgcgggcccaggtgctgcgcgcgagggtgcggagttgctggcatgcagggtgcttgcgctgcgcggaggggagggtggcagggtgttgctggaggctgtgcgagggtgggggcgcgggcgtcgtggggtgcgg

SEQ ID NO: 131667 - DNA, 30 bp, Homo sapiens
  chr19:44173222-44173252
  hyper
tctcgagcgctttccgggttattcatcgcg

SEQ ID NO: 131668 - DNA, 363 bp, Homo sapiens
  chr19:44174056-44174419
  hyper
actgcgccgcgtggcgttgcacaaagcacgagaattactattatttgattagggaggatgctgaggactgaaccgcattcctccaactcatcctctgacaacccccaaccccctcaattagaccctgttccaggcgcaggcgttcgggacccagcccctacctgggacgcaggtgtggagcagcagcagcagcggcagcagcggcgggtgacccatgtcgcgagggcagctcctgtgcgcggggtccctgcacgtcttctctccttctggcctcaggaaggaggcagttttgtggccccagggactcctcccagacgttttgcgaaagagcgagtcagccccagatgcgtgggcgcctccccc

SEQ ID NO: 131669 - DNA, 30 bp, Homo sapiens
  chr19:44258599-44258629
  hyper
gtttctcatttacacgttatttccgtcccc

SEQ ID NO: 131670 - DNA, 30 bp, Homo sapiens; identical to SEQ ID NO: 56267
  chr19:44286497-44286527
  hyper

SEQ ID NO: 131671 - DNA, 478 bp, Homo sapiens; identical to SEQ ID NO: 56268
  chr19:44302744-44303222
  hyper

SEQ ID NO: 131672 - DNA, 381 bp, Homo sapiens; identical to SEQ ID NO: 56269
  chr19:44405796-44406177
  hyper

SEQ ID NO: 131673 - DNA, 130 bp, Homo sapiens
  chr19:44439731-44439861
  hyper
tagggctgagcttcccgccagcctgcaattttccttttgaattagcggggggagtctaagtcattgcttgtagagctcagcctgctttttccttttgccattgttcccttttatacgtgacagaagttgc

SEQ ID NO: 131674 - DNA, 505 bp, Homo sapiens; identical to SEQ ID NO: 56270
  chr19:44455255-44455760
  hyper

SEQ ID NO: 131675 - DNA, 323 bp, Homo sapiens
  chr19:44488112-44488435
  hyper
cagcgaaacgcctgcgggagtctaattgcccggtcgatgcgcaggaaatttggctcccgcaggcgtttcgcgagtagcttgggaggcgtgggaattttggcccaggcaggaggacctgtgaattctgggaagtggagtccatttgctctgtggagtcgtgggaactttggctcaggcaggcggattcgggggattctgggaagtgtagtccagacgcctgtggcatcatcgacacttccggtctccgagcaggacactgctacttaacaaggtggtttgagccaagtatgtgtcttgcgggtctttgcgaaagtgaaccagtt

SEQ ID NO: 131676 - DNA, 213 bp, Homo sapiens; identical to SEQ ID NO: 56272
  chr19:44506685-44506898
  hyper

SEQ ID NO: 131677 - DNA, 73 bp, Homo sapiens; identical to SEQ ID NO: 12407
  chr19:44507928-44508001
  hyper

SEQ ID NO: 131678 - DNA, 30 bp, Homo sapiens; identical to SEQ ID NO: 12408
  chr19:44511186-44511216
  hyper

SEQ ID NO: 131679 - DNA, 401 bp, Homo sapiens; identical to SEQ ID NO: 56275
  chr19:44529436-44529837
  hyper

SEQ ID NO: 131680 - DNA, 30 bp, Homo sapiens
  chr19:44555951-44555981
  hyper
caggtaggcgtttccggagaattctgggaa

SEQ ID NO: 131681 - DNA, 30 bp, Homo sapiens; identical to SEQ ID NO: 56276
  chr19:44556470-44556500
  hyper

SEQ ID NO: 131682 - DNA, 591 bp, Homo sapiens; identical to SEQ ID NO: 56277
  chr19:44576035-44576626
  hyper

SEQ ID NO: 131683 - DNA, 30 bp, Homo sapiens
  chr19:44598300-44598330
  hyper
ggcttcccagtagtcgtcaacacttccctt

SEQ ID NO: 131684 - DNA, 30 bp, Homo sapiens; identical to SEQ ID NO: 12410
  chr19:44598549-44598579
  hyper

SEQ ID NO: 131685 - DNA, 30 bp, Homo sapiens; identical to SEQ ID NO: 56279
  chr19:44616704-44616734
  hyper

SEQ ID NO: 131686 - DNA, 251 bp, Homo sapiens; identical to SEQ ID NO: 56280
  chr19:44617148-44617399
  hyper

SEQ ID NO: 131687 - DNA, 365 bp, Homo sapiens; identical to SEQ ID NO: 56281
  chr19:44617606-44617971
  hyper

SEQ ID NO: 131688 - DNA, 852 bp, Homo sapiens; identical to SEQ ID NO: 56282
  chr19:44645330-44646182
  hyper

SEQ ID NO: 131689 - DNA, 196 bp, Homo sapiens
  chr19:44669063-44669259
  hyper
gttccgtgtagtcgcgcatagctcagctgcagtaaggctgtaaatgtttcccctgcggaatcctgggaactgtaggtccaatcgttctaggtagttgtaggcacttccggctcgaggaaggcagtgctgtggaattctgggaagcgtagtccaggtcctcctgatactcgcaggcacttccgcccaggaagacgac

SEQ ID NO: 131690 - DNA, 543 bp, Homo sapiens; identical to SEQ ID NO: 56284
  chr19:44711509-44712052
  hyper

SEQ ID NO: 131691 - DNA, 381 bp, Homo sapiens; identical to SEQ ID NO: 12414
  chr19:44763971-44764352
  hyper

SEQ ID NO: 131692 - DNA, 328 bp, Homo sapiens
  chr19:44808915-44809243
  hyper
agcagaccctcaacctcgaaggacgacgcgagcccgcctcccacgcaagaggttctgccgaggggacgcaaactcccgcagcctcccaaccccgccctccagcgctggccgcggcttctcttccccaagccaaggacgggttcattgctggccccacgcctaggcaaagagggctcggagaagtcttggagacccggagctgactcacctccctgggagatatctcagatccgacctcgccttcctggagcggaagtgcctccgagtgcccacggttcgtggactccacttcccagaattcctaagcggaagcgtctcagagttctct

SEQ ID NO: 131693 - DNA, 206 bp, Homo sapiens
  chr19:44905507-44905713
  hyper
cccaaaccgagcccacgctcgagcccacgctcttcccatcctatcccgggtaggtcgggccgctgaacttccctagtctaccccacctacgaggccttatcattggttaccagtcccctcttccactcctcctacttcagtccacagggacgggtcacagctgcacatcctacacccctactcctggctacgcctccaagaggggc

SEQ ID NO: 131694 - DNA, 235 bp, Homo sapiens
  chr19:44905766-44906001
  hyper
cgtccagtaccacggcgcatgcgcaaggaggcctatggcctacaatccccagaaagccccgcgcgcagcagtggccattcgcaaggctaccctggtgaaggtggcctttgacttccgtgcatttggaagtcctttgacttccgtgcattcgtctaaaataacgacaatcataataacgataaaataatgaaatgttaaataaatcactatcaacgatgaaaagaagtttcaatat

SEQ ID NO: 131695 - DNA, 434 bp, Homo sapiens; identical to SEQ ID NO: 12416
  chr19:44952395-44952829
  hyper

SEQ ID NO: 131696 - DNA, 797 bp, Homo sapiens
  chr19:45004124-45004921
  hyper
gcacccgcgcatgcacgcagaggacagtcgcggaatatacagctgtatcagtaactccatcaaccccggtgacccgaggctaaagcgccacccgcacagataccaggtctccccgctacactcaccaccgcttccagcttcccgcgtagaccctgcgcatgcgcgcatcggacaccaagcgctgccccacgcccctaccaacctgggcgtccgctggcccgcagcccaggctgggcctgtcaccgcctcagtgcctagcacggctctgcggcaggacgaactcgggttaggcaaccccctgccccgattctgcaacacggccgactcgggttaagctagttcggtcccctctcctagtcagcatccgcaaggccgctgggggttaagtctgaagggccgagctgctcggcgacagcaagcgtccgcgcgcgggacaatggctgctcttgtggccgaacccggaagtgcacttgggctcggagagccagaactacaattcccagaagcctccgcggcgcggacggtcagtaggcggggttccggcttctccaaggaagtggggcgggggaccgggccagaagctaagagggcgtcctcgtccggggcccgggggggcgccacacctgtgcatgtgcaggtctagggggagcactaagaccagccgcggcgccgggaggccgaggccagtgcagcgacgcatggggagtcgctctggcgtgacgtcagaatccaatagaaatggcggggaccctttctgggtgccccctgcctgtcagacgctgcgcgcgaccccttgt

SEQ ID NO: 131697 - DNA, 883 bp, Homo sapiens; identical to SEQ ID NO: 56291
  chr19:45146960-45147843
  hyper

SEQ ID NO: 131698 - DNA, 307 bp, Homo sapiens
  chr19:45195330-45195637
  hyper
gcttgagaccagtgtccttgacgggaactaagacgccccccacgcccatccccggctcccaggctctctccacccaagttctgcccaccagggcacactgcttccctctgccacctcctcttcccacgagccctggtacaccctagattctcagggctgtggctccttgctttacaaatgagtaagttggtggcagggaaggaagtgggctgggccatgaccaagagtcactatgattcacggggaaaaccctgccctcccgattcaactctgtgtgcaaaaaggttttgtgcgggttcctagggtc

SEQ ID NO: 131699 - DNA, 262 bp, Homo sapiens; identical to SEQ ID NO: 56294
  chr19:45207312-45207574
  hyper

SEQ ID NO: 131700 - DNA, 30 bp, Homo sapiens; identical to SEQ ID NO: 56295
  chr19:45257290-45257320
  hyper

SEQ ID NO: 131701 - DNA, 162 bp, Homo sapiens; identical to SEQ ID NO: 56296
  chr19:45257689-45257851
  hyper

SEQ ID NO: 131702 - DNA, 135 bp, Homo sapiens; identical to SEQ ID NO: 56297
  chr19:45281277-45281412
  hyper

SEQ ID NO: 131703 - DNA, 31 bp, Homo sapiens
  chr19:45287821-45287852
  hyper
ggtcttgaggaaggggcgcctctgagggtcg

SEQ ID NO: 131704 - DNA, 31 bp, Homo sapiens; identical to SEQ ID NO: 56298
  chr19:45300245-45300276
  hyper

SEQ ID NO: 131705 - DNA, 199 bp, Homo sapiens; identical to SEQ ID NO: 56299
  chr19:45312125-45312324
  hyper

SEQ ID NO: 131706 - DNA, 369 bp, Homo sapiens; identical to SEQ ID NO: 56300
  chr19:45347905-45348274
  hyper

SEQ ID NO: 131707 - DNA, 265 bp, Homo sapiens
  chr19:45348807-45349072
  hyper
aagaccagaaacagagcgacaccgaagcatgaggacggaaagacccagagaggcagaaatacagggacagagaggaagacccaaagagagtgagagagacacaaagacacgtaagagagacagagaaatccagaaagaaacgagtgcagcgacacctagagttcggggcagagattagaaacgcacgagggtacgagaaacaggctcagggcgatgggctcgacctgcggggaggtcgcacaaccgggacgtgctgggggcagaa

SEQ ID NO: 131708 - DNA, 1014 bp, Homo sapiens
  chr19:45349504-45350518
  hyper
gggccggagccagggtcggcttgactcgggggagcagcgggtggatcctgtgacgtcagcgggttcgaaccgccggagctgagcgagaggccgggggtgccgagccgggcggggagagctgggccgggagagcagaacagggaggctagagcgcagcgggaaccggcccggagccggagccggagccccacaggcacctactaaaccgcccagccgatcggcccccacagagtggcccgcgggcctccggccgggcccagtcccctcccgggccctccatggcccgggccgctgccctcctgccgtcgagatcgccgccgacgccgctgctgtggccgctgctgctgctgctgctcctggaaaccggtgagacgagcggacggccccctgccctcgcgcggaccccctccaaccttaccttccgagctggggaagccgagcaccttccccgcccacccccggctccccgagccccctctcgcgtgcccccttcctggctggccccacagactccgaccccctacacgtccgattctctcgaggagactctgacccctcctttctgcatctctctcaccaccacccccatccttcttaatccaattgcccatcctacgcctgcttgtctgtccccctccccatttctcggattcccgcgccgaaagggttaaatcccaggaaggcctggtgccccctccccaccccgcgccgagtagttcacccggatctgggtctctgtctcctctacccctctcaggaatgtggggaatgttccccccacctaccgcagtaaggtctcgaggaagaggcgagaccacctccctcccctatttttccttcttcccggcttgggcgtctgaggcccggagagaactgaggacaagcggacctgattcgggtcccttggagggctaaggataagagttctggcgacttagggggaagggcctgagctcggagctccaaccccgaacctcagggagttgggggttctgactccgtggactccagaaa

SEQ ID NO: 131709 - DNA, 30 bp, Homo sapiens
  chr19:45394370-45394400
  hyper
tcagggaaagtgggcgggactttatgcaca

SEQ ID NO: 131710 - DNA, 239 bp, Homo sapiens; identical to SEQ ID NO: 12425
  chr19:45418005-45418244
  hyper

SEQ ID NO: 131711 - DNA, 30 bp, Homo sapiens
  chr19:45458515-45458545
  hyper
gagaggcgtggctgcggcactcttgccgga

SEQ ID NO: 131712 - DNA, 30 bp, Homo sapiens
  chr19:45504498-45504528
  hyper
agagcaatgggcagcgacgcctgcccaacc

SEQ ID NO: 131713 - DNA, 572 bp, Homo sapiens
  chr19:45579318-45579890
  hyper
gcccggggtgctcaccgggatagttcggggtcaacggcgtccacagggtccacgggttccgcgggccgagggcgaggagggcggccccggcgggcatggggccaggggagtggtggggttcgccgccgaaccgccccgccgaggacacctccttcggggagaagggccccagccttggggcctgttggggctgcgcgtctggctcgggcttgagttcgatgacgaggtcctgcatttccatctcgtcgtctgggttggcggcgggcgcgggctctactcggcggggcgcgctgccggccttgcggcgggacatgagtcgcgggccgggcgagcgagcgggcgggcaggcaggcaggcgggcgggcggaggacgcacgagcggaggacgcgcggaccgtgcgcgctcaggtgagtgactgcggcgacccgccgcgaactcttacacgtgctggccgggcccgtggctccgcctaccagggcggggctcatgggaggggaccgagccgccctgctggggccctgacggcggcctaactcaatctaggcagtgtcccgtgcgtttggcttagtga

SEQ ID NO: 131714 - DNA, 30 bp, Homo sapiens
  chr19:45582654-45582684
  hyper
gccggctggagggacgttctggtccccaga

SEQ ID NO: 131715 - DNA, 30 bp, Homo sapiens; identical to SEQ ID NO: 56306
  chr19:45582909-45582939
  hyper

SEQ ID NO: 131716 - DNA, 30 bp, Homo sapiens
  chr19:45596072-45596102
  hyper
ccctgggctcttgacgaatgtgcgggagct

SEQ ID NO: 131717 - DNA, 1120 bp, Homo sapiens
  chr19:45647691-45648811
  hyper
caccgtgcctggttttcagtttttatgtggtgcttaaagcaagccactcaggtacagagactctcagggcgagcactcgtgtgctcaaaccccgggataagagttgccctccttgggggcttcagggcgctcaaggtccaggccctggccaggggcccaggctgtggggggtagggactgactgggtgcctggggagctgggagtggacgggggacctggcatttggggagacttcaggcacaggagggacttcaggccaggcctgcggcagggcaggacggcgccggtgttcacgcaggcgcgcgaaagaaaaggagcgcccgggcctggctctcttcccggcttctttcctgacttggcctcctgggtctcctccgccatcacggcctcctcctcaccctcacaccccctccctccagccgcacactcagagcctggagacgctgaacctgggccacaaccccatcgggaacgagggtgtgcggcacctcaagaacgggctcatcagcaaccgcagcgtgctgcgcctcgggctggcctccaccaagctcacgtgcgagggtagggtacggggccgggccagggtgcgggctggtgggctcagccgggcggccagccgggtgtggggcccgtggccagcccctgcggtgcccccccaggcgcggtggcggtggcggagttcatcgctgagagcccccgcctcctgagactggaccttcgggagaacgagatcaagacaggcgggctcatggcactgtcgttggccctcaaggtgaaccactcactgctgcgcctggacctcgaccgtgaacccaagaaagaggcggtgagcaggggacggtcctgcagccctggggcgggcggaaggccgggtggtggggccggcctgagagccctagccaggcgctcccgccacaggtgaagagcttcatcgagacgcagaaggcgctgctggccgagatccagaacggctgcaagcgcaacttggtgctggcgcgggagagggaggagaaggagcagccgccacagctgtcggcctccatgcctgagaccaccgccaccgagccccagcccgacgacgagcccgccgctggggtgcagaacggggcccccagcccc

SEQ ID NO: 131718 - DNA, 30 bp, Homo sapiens
  chr19:45655013-45655043
  hyper
gcaccggcttgtggccgcactccttggaag

SEQ ID NO: 131719 - DNA, 57 bp, Homo sapiens; identical to SEQ ID NO: 56309
  chr19:45655080-45655137
  hyper

SEQ ID NO: 131720 - DNA, 14 bp, Homo sapiens
  chr19:45655334-45655348
  hyper
gaggcgctgttggc

SEQ ID NO: 131721 - DNA, 157 bp, Homo sapiens
  chr19:45655399-45655556
  hyper
cggcttgagcgcgctgacggctcggatgagacccatgcgccggcggatggagtggtccaggttgaccgtgcagcgcagcaggctctgcgcctcggccacggtgaaggggaagtcggcgcccaggaagcgctcgaagagctcggggtcgccgtccagg

SEQ ID NO: 131722 - DNA, 1095 bp, Homo sapiens; identical to SEQ ID NO: 12428
  chr19:45655647-45656742
  hyper

SEQ ID NO: 131723 - DNA, 522 bp, Homo sapiens; identical to SEQ ID NO: 12429
  chr19:45656790-45657312
  hyper

SEQ ID NO: 131724 - DNA, 77 bp, Homo sapiens; identical to SEQ ID NO: 56313
  chr19:45681392-45681469
  hyper

SEQ ID NO: 131725 - DNA, 16 bp, Homo sapiens
  chr19:45681509-45681525
  hyper
cgcttccagctctcat

SEQ ID NO: 131726 - DNA, 25 bp, Homo sapiens
  chr19:45681930-45681955
  hyper
tcctgattggtagccgggcgaatcc

SEQ ID NO: 131727 - DNA, 63 bp, Homo sapiens
  chr19:45755077-45755140
  hyper
gcccgacccctgggggcgcccctctctcgggacccctctcttgtccccgtgcagaccgcttcc

SEQ ID NO: 131728 - DNA, 30 bp, Homo sapiens; identical to SEQ ID NO: 56316
  chr19:45826902-45826932
  hyper

SEQ ID NO: 131729 - DNA, 47 bp, Homo sapiens; identical to SEQ ID NO: 56317
  chr19:45843862-45843909
  hyper

SEQ ID NO: 131730 - DNA, 62 bp, Homo sapiens; identical to SEQ ID NO: 56318
  chr19:45844195-45844257
  hyper

SEQ ID NO: 131731 - DNA, 466 bp, Homo sapiens
  chr19:45873581-45874047
  hyper
gggcccggcgcccccggtaaccctcaggtcctcaggagcctcggggccccctcagtgtctcctcgctatcactgctgctccctgcggctgcccccgtcccaccccttcaccctcccctcgcccccttggggacccaggcgcgcccaccgatgaccccatcttcaagaccccccgcgcccgctagcgagcgcgacccccagcccccttctcacttcatggcgccggccggactgtgcagcggggtcgacccgcctccctcatgaatattcagcgagaggccgggtcgtggacatcctcgagggctcgctccacctatattacgagaccattggctaacctgcccgtcaatccgctagggcagagccaatcgggatactgcgcgtgcgcacggaaaagcgagggcggctgactctcgggtgaggcggtgcgggaggcgtcactgaggatcgtcgagggccaatcaaaa

SEQ ID NO: 131732 - DNA, 360 bp, Homo sapiens
  chr19:45888864-45889224
  hyper
cgcacttctcgaaggcggtggcgccgtcgctgagcgtggtggcgaagattgcagcgccgtgctgcaccagcgccatgcagatgactgtgtcgttgcacgacgccgcgcagtgcaagggtgtcctaggcgtgggggtggggggttgcggggaacgatgcgtgagaggctgcgcgtccgcccacgggggacccagcccaccgcgcgggtcggggctcaccagccgtggctgtcgggggagttgacattggcacccgcggtgatgaggaaatccacgatagagtagttggcgccgcagatggcgttgtgcaaggcagtgatgccctcctcgttgggctggctcgggtcgttcatctgagtgca

SEQ ID NO: 131733 - DNA, 91 bp, Homo sapiens
  chr19:45889315-45889406
  hyper
cgcctgctgcaccacctccagctccccggtcagcgccgcgtccaggaggagcaccagagggttgaggcgcgcgcggcgggccttgcgcggg

SEQ ID NO: 131734 - DNA, 91 bp, Homo sapiens
  chr19:45907690-45907781
  hyper
ttttctctcctaccccgcccccatccccgagccgaaaagtcgggggagagccgggacacagcctccggagggaccccgggtacctgtcctg

SEQ ID NO: 131735 - DNA, 35 bp, Homo sapiens; identical to SEQ ID NO: 56322
  chr19:45908309-45908344
  hyper

SEQ ID NO: 131736 - DNA, 47 bp, Homo sapiens; identical to SEQ ID NO: 56323
  chr19:45908809-45908856
  hyper

SEQ ID NO: 131737 - DNA, 30 bp, Homo sapiens; identical to SEQ ID NO: 56324
  chr19:45909109-45909139
  hyper

SEQ ID NO: 131738 - DNA, 39 bp, Homo sapiens
  chr19:45927242-45927281
  hyper
tggttctggaggaccgcggaggtcgtgggaggagagaga

SEQ ID NO: 131739 - DNA, 187 bp, Homo sapiens
  chr19:45931060-45931247
  hyper
gaagtgttggggagccggggcctctctgctccgccagaacccagcgggggcaggaccccctagaaggcggcccattccccgctcccgattcatttccttgaagcagaagtgcggtaaagggcccgccgcctgcgatcagtggaattctgaatcggttaacgttagttaagagcgaggggaaaaaatt

SEQ ID NO: 131740 - DNA, 345 bp, Homo sapiens
  chr19:45931578-45931923
  hyper
actcctgggctcaagcgatcctcccttctcgccctcccaaagtgtcgggattactgtagtgagccactgctcccagcctaagctgtttcaaaactaaactttggaatcccggattcgaatctccccggctcccagagttgcgcgttcgaatcccccagccgtatccaagctccgattccgcctctttcttccaaacgccccaagttccagaattcagccgcaactccagtttgggccactccccagctacggcccctgctcccatcccaaaccttcccctcctctcaacttcgagccctttgttcgccccggaacgggtggggtggggacggagactgtaaggac

SEQ ID NO: 131741 - DNA, 231 bp, Homo sapiens
  chr19:45947820-45948051
  hyper
cagggcgcagaaacccggagactgaggcgcagcaaagaggagatacagagatcagggccccggagcaagaaattcggagacatgcgtggaggccgaagcaacagggaactgtcggggcgcagagatataaggaaagaccacgcgacagatcgaacaaggacggggcccagaaataagcacagaaataatgcagttacacacgggcaacaccgaggccggcagggacgcccc

SEQ ID NO: 131742 - DNA, 263 bp, Homo sapiens; identical to SEQ ID NO: 12433
  chr19:45959072-45959335
  hyper

SEQ ID NO: 131743 - DNA, 220 bp, Homo sapiens
  chr19:45971035-45971255
  hyper
cccgccgagtggcccggaacgcaacccccgagacccccagggccccgagggtcatgcaagtgaccagatcgagtctagaacagacctcttgctggacagtgcgggactcgatttggcggggccggagatttggggaagtttgtccagcaaggggcgggtgacgtaagcaggggggcgggtcccgggcatataaatacaggctggcgggtctgtgcttcat

SEQ ID NO: 131744 - DNA, 30 bp, Homo sapiens
  chr19:45971847-45971877
  hyper
tttcaggctttccccggagactacgactcc

SEQ ID NO: 131745 - DNA, 85 bp, Homo sapiens; identical to SEQ ID NO: 56328
  chr19:45996036-45996121
  hyper

SEQ ID NO: 131746 - DNA, 30 bp, Homo sapiens; identical to SEQ ID NO: 12434
  chr19:46000139-46000169
  hyper

SEQ ID NO: 131747 - DNA, 107 bp, Homo sapiens
  chr19:46000727-46000834
  hyper
acttttggggcacgcggaggagctcaaacgtgggcagggctaaagcaacagggaattattcaaatataactgggtggggtcggattccaggcgattccaggtctgcg

SEQ ID NO: 131748 - DNA, 632 bp, Homo sapiens; identical to SEQ ID NO: 12435
  chr19:46001720-46002352
  hyper

SEQ ID NO: 131749 - DNA, 275 bp, Homo sapiens; identical to SEQ ID NO: 12436
  chr19:46002431-46002706
  hyper

SEQ ID NO: 131750 - DNA, 30 bp, Homo sapiens
  chr19:46009996-46010026
  hyper
gagtcagagcggggcgtgcgtgggccggag

SEQ ID NO: 131751 - DNA, 30 bp, Homo sapiens; identical to SEQ ID NO: 56333
  chr19:46010701-46010731
  hyper

SEQ ID NO: 131752 - DNA, 30 bp, Homo sapiens; identical to SEQ ID NO: 12437
  chr19:46012673-46012703
  hyper

SEQ ID NO: 131753 - DNA, 30 bp, Homo sapiens; identical to SEQ ID NO: 56335
  chr19:46087995-46088025
  hyper

SEQ ID NO: 131754 - DNA, 91 bp, Homo sapiens
  chr19:46088260-46088351
  hyper
cggatgctggaaggcgtgtggattcccacgcccgccttggccaacgtcactgtactccttcgtgatgtcacgttccgagttggcgtcccca

SEQ ID NO: 131755 - DNA, 30 bp, Homo sapiens; identical to SEQ ID NO: 56337
  chr19:46102048-46102078
  hyper

SEQ ID NO: 131756 - DNA, 30 bp, Homo sapiens; identical to SEQ ID NO: 12438
  chr19:46105299-46105329
  hyper

SEQ ID NO: 131757 - DNA, 240 bp, Homo sapiens; identical to SEQ ID NO: 56339
  chr19:46142559-46142799
  hyper

SEQ ID NO: 131758 - DNA, 863 bp, Homo sapiens; identical to SEQ ID NO: 56340
  chr19:46144642-46145505
  hyper

SEQ ID NO: 131759 - DNA, 88 bp, Homo sapiens; identical to SEQ ID NO: 56341
  chr19:46145557-46145645
  hyper

SEQ ID NO: 131760 - DNA, 225 bp, Homo sapiens
  chr19:46148669-46148894
  hyper
ccgttgccatagcaacgcccttcgttccagcatccccagctcagctcgcctggcatcaggcggccggcgccgggcccggcgctggggtcatccccaggatgcccagaaaggggggtcgggacaccgcctgccaagccccccaacacaatcctagggccaggattggctgcgcccggatccccctaggtaccgtctggtcccgcccacaaccggagtatagtctct

SEQ ID NO: 131761 - DNA, 30 bp, Homo sapiens
  chr19:46171436-46171466
  hyper
ccctcccatcaccccgggctgccagcgcct

SEQ ID NO: 131762 - DNA, 13 bp, Homo sapiens
  chr19:46171857-46171870
  hyper
tcattctgtccct

SEQ ID NO: 131763 - DNA, 462 bp, Homo sapiens
  chr19:46180190-46180652
  hyper
tctggcccctccctaggccctcgctgcctgccgcacggcccagatcgtgacccagtactgcgtgggtgccaactacacgtggctgctggtggagggcgtctacctgcacagtctcctggtgctcgtgggaggctccgaggagggccacttccgctactacctgctcctcggctggggtgagctccgatcccgtcccccgcccaacccagcgcgcctctcctcggctcccccaactgccctgctggttggcctctgcgggtctcctcccgtctctaggcttctgccttccccaccccgacagaggaattccgcgggtcttgggcctggcggggcccgtgagcgcgctgacagctgcggcggggtgggggggcggggtcggggtctgcacaggggcccccgcgcttttcgtcattccctgggtgatcgtcaggtacctgtacgagaacacgcagtgagttgcag

SEQ ID NO: 131764 - DNA, 541 bp, Homo sapiens
  chr19:46180864-46181405
  hyper
gtgtggtctcaagtgcggtgggcggggcctagcgagcaaatgagcttggtgatcggtgagtctagagtttttctatctcttagctctactccgccttccccaggtgctgggagcgcaacgaagtcaaggccatttggtggattatacggacccccatcctcatgaccatcttggtaggatcggtcccgcctccaccaggccgccctcagggatttcccattctgggaagtgggctgccacctcctcctgccccttcagaatgggatcgcggctggctcagcccttatctctccccacagattaatttcctcatttttatccgcattcttggcattctcctgtccaagctgaggacacggcaaatgcgctgccgggattaccggctgaggtgagggcatgcgttggggaccgaggggaaggggccgggtgcgagatggggaaccagggctgcgggatcactgctgccgccctctctccccaggctggctcgctccacgctgacgctggtgcccctgctgggtgtccacgaggtggtgtttgc

SEQ ID NO: 131765 - DNA, 14 bp, Homo sapiens
  chr19:46184845-46184859
  hyper
cgcctcctctgggc

SEQ ID NO: 131766 - DNA, 30 bp, Homo sapiens
  chr19:46195720-46195750
  hyper
gcctacttctcttgcgctcccatttgggtc

SEQ ID NO: 131767 - DNA, 30 bp, Homo sapiens
  chr19:46195950-46195980
  hyper
gcaaagcggccatgcgttccgggggccgcg

SEQ ID NO: 131768 - DNA, 30 bp, Homo sapiens; identical to SEQ ID NO: 12443
  chr19:46220698-46220728
  hyper

SEQ ID NO: 131769 - DNA, 30 bp, Homo sapiens
  chr19:46234209-46234239
  hyper
agtccgggcagccacggactacatccccca

SEQ ID NO: 131770 - DNA, 349 bp, Homo sapiens; identical to SEQ ID NO: 56345
  chr19:46271266-46271615
  hyper

SEQ ID NO: 131771 - DNA, 30 bp, Homo sapiens
  chr19:46272064-46272094
  hyper
gccggccccgcgctcggctccgcaggcaag

SEQ ID NO: 131772 - DNA, 222 bp, Homo sapiens
  chr19:46272453-46272675
  hyper
cgaagcctccgccccgagactgagcttctgcacgcctccgtctccagggtcctctgcaggcccccacattccccatctcggcctgcgctccgcccctcggaattcccggctccgcagggggggcgggtctggccgggaggaggggcggggaacgggctagaaagtttgcagcaacttttctcgagcttgcgtcccaggagcggatgcgcgtggcgtgcgcag

SEQ ID NO: 131773 - DNA, 30 bp, Homo sapiens
  chr19:46273419-46273449
  hyper
ggcctcagcctggccgaaagaaagaaatgg

SEQ ID NO: 131774 - DNA, 34 bp, Homo sapiens; identical to SEQ ID NO: 56347
  chr19:46273812-46273846
  hyper

SEQ ID NO: 131775 - DNA, 30 bp, Homo sapiens
  chr19:46295575-46295605
  hyper
gttggctcccacgacgacagcagcctgggt

SEQ ID NO: 131776 - DNA, 36 bp, Homo sapiens
  chr19:46295859-46295895
  hyper
gtctgggcggaagccggacccgacctgcgagcggcg

SEQ ID NO: 131777 - DNA, 30 bp, Homo sapiens
  chr19:46296270-46296300
  hyper
gcaatggaaagaggcgtggccagttagaaa

SEQ ID NO: 131778 - DNA, 230 bp, Homo sapiens
  chr19:46357456-46357686
  hyper
gtcattggtgatcagcgccgcctggttcagaagatccaccacctggaaggagggggagtggcaggggatagtgccagcccagtccagcccagtgcagccccctcggcactcccagggctctgccacctaaacagggattgccaaagccaggggctatgcttcctcactccaagccctacccgccacgctcaccctctctgaggtggtcatgccatcgatgcccggcccct

SEQ ID NO: 131779 - DNA, 30 bp, Homo sapiens
  chr19:46366671-46366701
  hyper
ggtcttggagagtgcggagttcgggcagcg

SEQ ID NO: 131780 - DNA, 30 bp, Homo sapiens; identical to SEQ ID NO: 56349
  chr19:46367761-46367791
  hyper

SEQ ID NO: 131781 - DNA, 38 bp, Homo sapiens; identical to SEQ ID NO: 56350
  chr19:46379819-46379857
  hyper

SEQ ID NO: 131782 - DNA, 533 bp, Homo sapiens
  chr19:46379893-46380426
  hyper
cgccttgccggctgcgtgtcacccccgccccctgccgcgctggctccccgtccgtcccaccagccttgctgtcctgggcaggccggggaattcctcccggttcctggaaaaaacaactggggccgagagaaaggccctcagtctccccaggcacccgcccccctccctcgggcctgggggtctctcccggagtcggccagcccgaggcaggaagccctgcggtttctggcttctcccaggcggcctccggatctggcccccgccccccggccaacagcccaaatattattccgcgggaggagtcggtggtggcgggaggaggcccaggctgaaagaggctttcagggcggccaggcctggggcttcctgtccccaggctcgggcctcaggccgccccagtggggacctcaggtggccggaggggcggggtgttgttgtagggtcctcgggggagggtggggccatccgtcggggtgtctggtggccaccagctctgctggcgtgggcaggtgtgacccccaccccagggacag

SEQ ID NO: 131783 - DNA, 30 bp, Homo sapiens; identical to SEQ ID NO: 12446
  chr19:46388917-46388947
  hyper

SEQ ID NO: 131784 - DNA, 223 bp, Homo sapiens
  chr19:46389399-46389622
  hyper
cccagaggccgcttcgcagggaaagttacataacacgcctgcaaagccttctgggaaacgtagtcccgccggggccggctcttaaagggaacggcgggcagacgcgggctgggggggttgtcgcctctgccggcgcaaaccttacaaccttctccgtggggccggagttcagcgcgccgcaagatgctgggacacaaaggtggtaggcgaggatgcaatacaa

SEQ ID NO: 131785 - DNA, 346 bp, Homo sapiens
  chr19:46404949-46405295
  hyper
ggatctggttctcttcgaatgagaagcgcggcttgcgcaaccgggtggtttcctccgcttcgcccgccgccgccgaggccatggcgccccccgacgccgccgtcctgccgtctggcgcatggggggcgccggcgctgcgggcaaagggcgcacggggctggctggggttcggggtccccccgccgccgcctctcccagaccgccgggccgagagctccttagtccccgggggcaggagtgggggcggggggcgggcgggggcgacgggcacccgggtaagtcggaagcgcctaagagtagctgacaccggctgagcgcttggctcggacttcgcgcggcgcgaagt

SEQ ID NO: 131786 - DNA, 30 bp, Homo sapiens; identical to SEQ ID NO: 56354
  chr19:46405935-46405965
  hyper

SEQ ID NO: 131787 - DNA, 30 bp, Homo sapiens
  chr19:46406233-46406263
  hyper
agtacccaacctttcggacagtcttccagc

SEQ ID NO: 131788 - DNA, 148 bp, Homo sapiens
  chr19:46476432-46476580
  hyper
gcccttgcacctgccacgggagggggggaaaggatggagaaaggcgaggccccctgcccgctcccccgccccgagccgcagccctttctcacctcccgtgttgctgcgcttggtgcagaccacctcggggggcgtttcgaggggcctc

SEQ ID NO: 131789 - DNA, 31 bp, Homo sapiens; identical to SEQ ID NO: 12449
  chr19:46476797-46476828
  hyper

SEQ ID NO: 131790 - DNA, 95 bp, Homo sapiens; identical to SEQ ID NO: 56357
  chr19:46477258-46477353
  hyper

SEQ ID NO: 131791 - DNA, 30 bp, Homo sapiens
  chr19:46518896-46518926
  hyper
gcaggcttggggcggcgttcaggagggact

SEQ ID NO: 131792 - DNA, 856 bp, Homo sapiens; identical to SEQ ID NO: 56358
  chr19:46519146-46520002
  hyper

SEQ ID NO: 131793 - DNA, 396 bp, Homo sapiens; identical to SEQ ID NO: 12452
  chr19:46580426-46580822
  hyper

SEQ ID NO: 131794 - DNA, 30 bp, Homo sapiens
  chr19:46582082-46582112
  hyper
acatcgcgcaggcgtcgtcagtagacatcg

SEQ ID NO: 131795 - DNA, 42 bp, Homo sapiens; identical to SEQ ID NO: 56360
  chr19:46800452-46800494
  hyper

SEQ ID NO: 131796 - DNA, 30 bp, Homo sapiens
  chr19:46849921-46849951
  hyper
cgggtccggctccgcgtagggcatggcgct

SEQ ID NO: 131797 - DNA, 325 bp, Homo sapiens
  chr19:46850467-46850792
  hyper
ttcaaaggtgcgcccgcctggcagggagggtggacagtggcccaggctgaggggtgccgggcccgcgcggaaccatagcaacgcggagctgcagcctgggcgcggggcagacactaccaagtgaccgggcgtggggaggcccaggatggcgctgccaaggagcgacatagggggcttcggagagtgatacctaggagtggcgtgcggagcgggtgctactcagtggagagactgaggagggcgccaccaattgtggggcgagagggggactggaatgagggcgctaccaaacgtgaggcctgtagagggcgctaccaggcagtga

SEQ ID NO: 131798 - DNA, 1019 bp, Homo sapiens
  chr19:46907103-46908122
  hyper
agggagctgctgtctcgtgaggattggaggagccacgtggaaaatgctgctgcccggagcccaggtggctgcgctggccagggagaagcccctggttggcggcggtggccgtcactgctgctgctgcttctgcagccaccacggcccaagcatcccccagatggcgtccccttcctctggcttcctctcccgtagcaacagcagtccctgcagaggactctggagtggtggttgcggggtcctaccccgcagggggcaggtgggcgtggcggggagaggcagtagagtcgctcagggtcagctctgacctgtccccgcggtgttcccggccccagcagctgctcagttatttgtcgagtgctgacggtcggtcggaagaaaccacccggactgaggaaggctgaccccagatgcgcctagttgggaatgtgctggaaagatacgccccctggagggagtgcgcccaggaagtggggaggagcgtttgagatcgaaggagtggccgcgtaaaggccctgaggtctcgcaaggaagggtcccggggcgtcccaggccctgttctaggtgcaagaaacaggaacctcctggagcgagcatgcggtggggaggcagggggtacgcctcctacatgaggaggagatccacgcattaggaagtgaggcctgctggggacaaaagtctggcaggcagggccccaggagggccggggcaggagagggtttgcagtcatcgtaaacggggcggcatggaaagccctcactgagaaggtgccaaagaccccaaggaggtgaggggttgcggccggcagatgcctggggaaagcgcatgaccggaagcgcaggaagagccaggttaaaagccccaagccagagtgtgataatatggggctgttaatgtgtgactactgcccctcccgtgccaggctcggtgctggcgtaggggaggcagtggggccaaagaaggccacctgcctccatggtggtcgctgtcgggttggatttccacgtgcctggagttta

SEQ ID NO: 131799 - DNA, 447 bp, Homo sapiens; identical to SEQ ID NO: 56362
  chr19:46916540-46916987
  hyper

SEQ ID NO: 131800 - DNA, 30 bp, Homo sapiens; identical to SEQ ID NO: 56363
  chr19:46919711-46919741
  hyper

SEQ ID NO: 131801 - DNA, 259 bp, Homo sapiens
  chr19:46929941-46930200
  hyper
ttcctcctgggtctgcgtgagttttcttcaactccagtaagagatctgcaaaaccttggaatccaggaccgtttccacctcctccattttctgcaaagggcgcaggcgcctggggtcagcctgtggtctccatagcaacggtcggacgcgctgctaggttctggctctgactgcgcctgcgcggctggtcccgcggggtctcccgagtagcggaagatatttgtgggtctttgagacccttcctcgcttagaaattact

SEQ ID NO: 131802 - DNA, 454 bp, Homo sapiens
  chr19:46931908-46932362
  hyper
ctgactcgtggctcccgggtcctgggcaaggctgcaccaaggagggtctaaagatgatgcttcccctttcttggcgtggcctccgaaggtctcacaggccccaacggtctctccggatctgggactgctgatctccctgggacaactgccaacagagtgtcgtaggcgcggccctggcaggcagggaggcgcgtccctcaccgctggcccagaggttgcactcagtgccctgtcgccggactaggacgaggatgtggccgctgcacttgctcccgcggtgacgtcaccgcctccttccgctctgcggcctggcggtctccatggcaaccgctgaagcatccatctcctctgccattggccgactggccgcattgaaatcaagagtctgagggggtcattcggaggtgaggggtcggccaccagccctcagaagcgcccgcgattctcctttgaa

SEQ ID NO: 131803 - DNA, 52 bp, Homo sapiens
  chr19:46974556-46974608
  hyper
ccgggcctgacgctccgcctgcccagccgggacttacttggcagatcagcct

SEQ ID NO: 131804 - DNA, 197 bp, Homo sapiens
  chr19:46974831-46975028
  hyper
cgccgctcgggggtcttgggctgcgcaggtgccgacgtctccatggcaaccgggcgtgggttgctagggctgagcccggccggcgcgccggcgctgcaattggacctagggagccgggtgcaagagtggcctgttcaggtcgcagagcaagcgggtctggatacactccggtggcgcctccacggaggccctctttc

SEQ ID NO: 131805 - DNA, 193 bp, Homo sapiens
  chr19:46991212-46991405
  hyper
ttgtccctttaaagcgctggggaaagcgccgtggccccacgattttaaacggcggaactggggtgcctcctggtggaatcagcgggcatcgcaactcgcgcggattcttcccctgctctggagtcgtaggttgcgggggcaaagggaagggtcgtcgtctgcggcgcagttctaggacgtggccacattccca

SEQ ID NO: 131806 - DNA, 641 bp, Homo sapiens; identical to SEQ ID NO: 56368
  chr19:46992619-46993260
  hyper

SEQ ID NO: 131807 - DNA, 251 bp, Homo sapiens; identical to SEQ ID NO: 56369
  chr19:46993281-46993532
  hyper

SEQ ID NO: 131808 - DNA, 84 bp, Homo sapiens; identical to SEQ ID NO: 12459
  chr19:46996430-46996514
  hyper

SEQ ID NO: 131809 - DNA, 261 bp, Homo sapiens; identical to SEQ ID NO: 12460
  chr19:46996577-46996838
  hyper

SEQ ID NO: 131810 - DNA, 56 bp, Homo sapiens; identical to SEQ ID NO: 56372
  chr19:46997221-46997277
  hyper

SEQ ID NO: 131811 - DNA, 84 bp, Homo sapiens
  chr19:47040894-47040978
  hyper
actgtgggaatcctgcgtgtgttgatgactgcgtgtggagcgcccctgctggacaatcacagaacagcacgactgccctgaccg

SEQ ID NO: 131812 - DNA, 30 bp, Homo sapiens
  chr19:47104103-47104133
  hyper
ctcaaagccccacgcggccacagagttcag

SEQ ID NO: 131813 - DNA, 156 bp, Homo sapiens
  chr19:47104722-47104878
  hyper
tgcgggctctgaggcgggcttaacggggcaggacccctgagggggcgacagagcccagagtggggggcgtccgggcccggcgagagcctcgggacccttttctacccgcgttgtcgggggctgttgaacccagagcgggacgtctggatcaccaga

SEQ ID NO: 131814 - DNA, 230 bp, Homo sapiens; identical to SEQ ID NO: 56373
  chr19:47137303-47137533
  hyper

SEQ ID NO: 131815 - DNA, 596 bp, Homo sapiens
  chr19:47137786-47138382
  hyper
gggccgacacagccccggacagaccgcaggcccagaacccccgccctattccccaccccgacccagcaccttcatgcggtcgatgttcacctccagcttcagctgttccaccgtcttgcgggcctcggcaatcttggccatgttgttggacatggttgcggcggggaaggggttaaaagacgcgcgggagtgggggctgtgggggtaggttaggatacgtctgggtcccgaggtgggggcgagagggcgggccccggtaacaggtgcgagggtggaagggcgcgtgaatggggtggccaggggctggtggagggagggacagatgaaggggacaggaacaagaggagcgatggaggggtgcacggatggaggtagctaaggcaggtggggagagagcagggaggggcgagggagggaaggaggggcgcacagatgggaggctgagacagaaggacagggccacaggtgctggatcagaatccaggtgtcctcacccccgggggcagagcgagagccaggaggggggcccctcccccaggccaattagcagtggctccagggagaactgggaattaagatcgcggcgggaggggcac

SEQ ID NO: 131816 - DNA, 30 bp, Homo sapiens; identical to SEQ ID NO: 12463
  chr19:47141841-47141871
  hyper

SEQ ID NO: 131817 - DNA, 30 bp, Homo sapiens; identical to SEQ ID NO: 12464
  chr19:47142444-47142474
  hyper

SEQ ID NO: 131818 - DNA, 30 bp, Homo sapiens
  chr19:47142941-47142971
  hyper
gcctccgcgcctctcgcagctggtttctat

SEQ ID NO: 131819 - DNA, 30 bp, Homo sapiens; identical to SEQ ID NO: 56377
  chr19:47164767-47164797
  hyper

SEQ ID NO: 131820 - DNA, 30 bp, Homo sapiens; identical to SEQ ID NO: 12465
  chr19:47217222-47217252
  hyper

SEQ ID NO: 131821 - DNA, 365 bp, Homo sapiens; identical to SEQ ID NO: 56379
  chr19:47217681-47218046
  hyper

SEQ ID NO: 131822 - DNA, 30 bp, Homo sapiens
  chr19:47249499-47249529
  hyper
aggggctccgggcccgccgtgggcccgggg

SEQ ID NO: 131823 - DNA, 30 bp, Homo sapiens; identical to SEQ ID NO: 56380
  chr19:47249922-47249952
  hyper

SEQ ID NO: 131824 - DNA, 30 bp, Homo sapiens; identical to SEQ ID NO: 56381
  chr19:47250249-47250279
  hyper

SEQ ID NO: 131825 - DNA, 752 bp, Homo sapiens
  chr19:47258851-47259603
  hyper
gtcaccgtcctggtgcgggagttcgaggcatttgacaacgcggtgcccgagctggtagactccttcctgcagcaagacccagcccagcccgtggtggtggcagccgacacgctcccctacccgcccctggccctgccccgcatccccaacgtgcgtctggcgctgctccagcccgccctggaccggccagccgcagcctcgcgcccggagacctacgtggccaccgagtttgtggccctagtacctgatggggcgcgggctgaggcacctggcctgctggagcgcatggtggaggcgctccgcgcaggaagcgcacgtctggtggccgccccggttgccacggccaaccctgccaggtgcctggccctgaacgtcagcctgcgagagtggaccgcccgctatggcgcagcccccgccgcgccccgctgcgacgccctggacggagatgctgtggtgctcctgcgcgcccgcgacctcttcaacctctcggcgcccctggcccggccggtgggcaccagcctctttctgcagaccgcccttcgcggctgggcggtgcagctgctggacttgaccttcgccgcggcgcgccagcccccgctggccacggcccacgcgcgctggaaggctgagcgcgagggacgcgctcggcgggcggcgctgctccgcgcgctgggcatccgcctagtgagctgggaaggcgggcggctggagtggttcggctgcaacaaggagaccacgcgctgcttcggaac

SEQ ID NO: 131826 - DNA, 72 bp, Homo sapiens
  chr19:47290659-47290731
  hyper
gcaagatccaggaacgaatcgagcacctccttgctgggggcattttcggcactgcccgcggctcccacggag

SEQ ID NO: 131827 - DNA, 30 bp, Homo sapiens
  chr19:47291792-47291822
  hyper
gtgtccgggagtagcggttaccagccagag

SEQ ID NO: 131828 - DNA, 140 bp, Homo sapiens
  chr19:47292035-47292175
  hyper
gccgggcccagagacgacggggcggggccaggaaggggcggggccttgggagggtgctgtttcccgccaaaggaactgggttgtgggttggagcccttaaaccacaggggttcgttccctggtgcgagggtcgctagaaa

SEQ ID NO: 131829 - DNA, 30 bp, Homo sapiens; identical to SEQ ID NO: 56383
  chr19:47353746-47353776
  hyper

SEQ ID NO: 131830 - DNA, 30 bp, Homo sapiens
  chr19:47354290-47354320
  hyper
aggactacaattcccgagatgctgaagaac

SEQ ID NO: 131831 - DNA, 271 bp, Homo sapiens
  chr19:47359760-47360031
  hyper
tgacctccagccattcggcccgtaggccgatgcttgggaaatcttgacagcggcccaagccggcagtcggcacttctctcggtcggttaattgtttactcgtttgtttatttatcctggagtggaggctagccgggtgcgcggaggcggctgcccccagggaagcccgcttcctgtggttggcttgctcaactactatccgccctcttgcgcactggaaaaaattgcagagctgggaatgcaccccttgatggttccgttcatgcagtaaa

SEQ ID NO: 131832 - DNA, 117 bp, Homo sapiens; identical to SEQ ID NO: 56384
  chr19:47363285-47363402
  hyper

SEQ ID NO: 131833 - DNA, 30 bp, Homo sapiens; identical to SEQ ID NO: 12468
  chr19:47363930-47363960
  hyper

SEQ ID NO: 131834 - DNA, 44 bp, Homo sapiens; identical to SEQ ID NO: 56386
  chr19:47494572-47494616
  hyper

SEQ ID NO: 131835 - DNA, 31 bp, Homo sapiens; identical to SEQ ID NO: 12470
  chr19:47516068-47516099
  hyper

SEQ ID NO: 131836 - DNA, 364 bp, Homo sapiens
  chr19:47522919-47523283
  hyper
cattctgacccccgacgttaccgtggggcaagggaactcggaccccagggtagcttggccccctaccagggaaaggcgagcagggcgggtccgggggcggagacgcggcgggcggggctccggcagaccccgcccccgcccgcagcgctggtcgcgcgtctccaagtctgcgaggccgaggtgggcgccgagagctgggcgccacagcccgcgcgtcccgctgcgccccgcgcgccccggggtctatggagctgcccctccgcgccgcccggccggccccacgccgcgcccggagcctgctctgcggccaagtaatcggactggcggtcctgcgggtaggggaagcttgcgggctggcaggagg

SEQ ID NO: 131837 - DNA, 353 bp, Homo sapiens
  chr19:47523635-47523988
  hyper
gggctggggctcgcgcgccggggtcttcagggaggaagttgtggtcgtggggatgtggcggtccgaacacgtggcgccatcccgagaggctggggggatccctgggcaggacacaggatgggggtccctgccctctgccccctgcctccttagcccagccgggaaaacagggtgcagatccggggagtcagacaccggggatgggcttggggggcgggtcctcggggcagagggctccgggggctggggcgtgcgtgcctggcccgggaggcgcccgccccccgcccggcttgggcatgcttggcacgcagcgcgcgggccggttcgatccgtatgcgcgccgcgtgcgccca

SEQ ID NO: 131838 - DNA, 47 bp, Homo sapiens
  chr19:47524451-47524498
  hyper
cgcgggcccccccccgggtccaattcacacccgatgttctgtccccg

SEQ ID NO: 131839 - DNA, 30 bp, Homo sapiens; identical to SEQ ID NO: 56390
  chr19:47524903-47524933
  hyper

SEQ ID NO: 131840 - DNA, 30 bp, Homo sapiens; identical to SEQ ID NO: 56391
  chr19:47526642-47526672
  hyper

SEQ ID NO: 131841 - DNA, 35 bp, Homo sapiens
  chr19:47551878-47551913
  hyper
cactacggccgccgcgcgccgtaccgccccaccgg

SEQ ID NO: 131842 - DNA, 20 bp, Homo sapiens
  chr19:47615973-47615993
  hyper
tgcgctgacctccgcgtagg

SEQ ID NO: 131843 - DNA, 30 bp, Homo sapiens
  chr19:47617085-47617115
  hyper
ggatgcgagaggggcggggcttggtagtcc

SEQ ID NO: 131844 - DNA, 30 bp, Homo sapiens; identical to SEQ ID NO: 56393
  chr19:47633927-47633957
  hyper

SEQ ID NO: 131845 - DNA, 142 bp, Homo sapiens
  chr19:47675971-47676113
  hyper
gaaacagagtcaatcacagatcatctactccagagttgaaaagtgtacacgccaaaaaaaaaaaagagaaaagaaaaaaagcacatatcttcacggatgacagagttctctaggacttgctctgtgccgggcgttttccatg

SEQ ID NO: 131846 - DNA, 18 bp, Homo sapiens
  chr19:47695018-47695036
  hyper
gctgtgggaataggccgg

SEQ ID NO: 131847 - DNA, 283 bp, Homo sapiens
  chr19:47729540-47729823
  hyper
gccgcgggccacgggcgcgcagctccactcctcggcggcctagtccctggccctggccctggccctggctcgggctccggctatgccagccgcggcgcggagtccttgggcggctctgcgggcgcgcgattcccccccacccacttaccccccacctgcctgtccgcggagcgacccagccgcgcagggcagcagctgccgcacatctggcgggggccgcctgccgccccctcctccggcggaagtcccacctgccgtctaccccacccccagcactcacccg

SEQ ID NO: 131848 - DNA, 693 bp, Homo sapiens
  chr19:47729850-47730543
  hyper
cgccatccgccgcagctgggccccgatctcccgggcccactgttcctcctccccgcggactcccggggccgcctgggtgggaccgcccgccagagcccccggggcgctgggcacgggcgactccaggtgctgctccgccagcgagagcgagggctgaggaccttggagaggcagaggggcgcggtcagcacccaccacccctccaggcctcgaggtgtctcggcctgctcccctctttcccagccactgctccccgcctcatttctagtgatcccatcgctagtgagtcaatttctcagcttctcctccacaggcaccagaaagcaagaagtacctggggacgccgctctggggtcacctgtctggccagctacgtccccacggcccttgtcagtgtggaaggtagacggccagagaggtgaccccgggggtggtcaggcttaacgacctctattttccaaaggggccacattttgccttttccatgtgacaggcagggaaactgaggcccgcccttagggagtatcccaaggtcacacagggatacagtgactgaccccacccagatcacaagcctcaggtctcctgccctctcgtgtccaaccacagggaagccacacctccggatgtggcagaggcctagagaccagaaggccagagactgtggcagcttcagagcgcgggcctgggggg

SEQ ID NO: 131849 - DNA, 283 bp, Homo sapiens; identical to SEQ ID NO: 56397
  chr19:47730759-47731042
  hyper

SEQ ID NO: 131850 - DNA, 294 bp, Homo sapiens; identical to SEQ ID NO: 12474
  chr19:47731297-47731591
  hyper

SEQ ID NO: 131851 - DNA, 30 bp, Homo sapiens
  chr19:47734052-47734082
  hyper
ggtttggagaggcgcggtgtggggaggcag

SEQ ID NO: 131852 - DNA, 16 bp, Homo sapiens
  chr19:47734361-47734377
  hyper
cgcaggcgcgtccgcg

SEQ ID NO: 131853 - DNA, 31 bp, Homo sapiens; identical to SEQ ID NO: 56400
  chr19:47738880-47738911
  hyper

SEQ ID NO: 131854 - DNA, 551 bp, Homo sapiens
  chr19:47742712-47743263
  hyper
agtcctggctttccgcggtggggaaggggtctcccgggtcccctcggtgtggccggccctgcaggccgggaggctggaccggggccgggtgggggctgggcgggggcgcgggcgtccgcagggtccgagcggccggcgcgcgtgtgaaggttaccgcttcccggcggggcgggggccgcgcgctgttgctggggtctgcggggcctgcctgcgcccgcgccccccctccttcccggccagccagtgagcggtacccgccgccgttgccaggggaaactcgccgccccgttacccagcaacaagcctggcccaaccaggcgcgaggaccccccaggccccgcccgccgctgcccaccgcgtgcccaatgccaggcgggcagagccggcccagctcccggagacggcgagcgcgctcattggccaccgccgcgtccgcccggatctgggggagccctcggcgcggggggcggggaaccgggccccggggagctgccgggcgcgcggcctgcaaacctgcgaccggctggggtgatacccgggctgtgcaccat

SEQ ID NO: 131855 - DNA, 30 bp, Homo sapiens; identical to SEQ ID NO: 56402
  chr19:47747582-47747612
  hyper

SEQ ID NO: 131856 - DNA, 87 bp, Homo sapiens; identical to SEQ ID NO: 56403
  chr19:47750796-47750883
  hyper

SEQ ID NO: 131857 - DNA, 30 bp, Homo sapiens
  chr19:47757264-47757294
  hyper
aggcgtgagccacagcgcctggtcggcttg

SEQ ID NO: 131858 - DNA, 30 bp, Homo sapiens
  chr19:47759776-47759806
  hyper
caggcaggaagtgacgcgcctggcccggga

SEQ ID NO: 131859 - DNA, 664 bp, Homo sapiens
  chr19:47776506-47777170
  hyper
gggctcgaactggatgagagacgtggctagacgggggaggggtgctgggccgggggggaggtgggaagactgctcccctccgctgactcagccccttctctcctcagaggcaggccccgaaggccaggagacggcggagatcaccgacttccagagggtgcgtttctgcaaggtggtggcggcccctccgctgccgggggccgctcgctgaccgcgcccgccggaccgcggcctccgcgctctgcactaacctcccaccgcctcgctcctctgtcctctgcttctgccacactccagccaggagagggttaaatctaaggggggaggagccagggtctgcgagccgggcggggccagggcagtagtcgggtgcaggccccaccaacgggggacgtcacggcactgggacggctgggacgcttccgcgttagtctcccatggaggccctgggcggctcgagccagtcttcaggccgaatctcccgcctccaggattgcatccgaggcctggcagccggtgacacttccgaagggcttgaattactcgggcgccagccctgtcgtattaaacgcagtgcttccgctcacccttgaactgtgtttctggagggggcaggctgggtcgctgtgcttggcgggcttttctgtggcggaagaggcggaag

SEQ ID NO: 131860 - DNA, 31 bp, Homo sapiens; identical to SEQ ID NO: 12476
  chr19:47778088-47778119
  hyper

SEQ ID NO: 131861 - DNA, 30 bp, Homo sapiens; identical to SEQ ID NO: 56406
  chr19:47852513-47852543
  hyper

SEQ ID NO: 131862 - DNA, 216 bp, Homo sapiens; identical to SEQ ID NO: 56407
  chr19:47910162-47910378
  hyper

SEQ ID NO: 131863 - DNA, 25 bp, Homo sapiens
  chr19:47910558-47910583
  hyper
gcccgggctctcgccccgggccggc

SEQ ID NO: 131864 - DNA, 58 bp, Homo sapiens; identical to SEQ ID NO: 56409
  chr19:47910679-47910737
  hyper

SEQ ID NO: 131865 - DNA, 30 bp, Homo sapiens; identical to SEQ ID NO: 12479
  chr19:47921384-47921414
  hyper

SEQ ID NO: 131866 - DNA, 557 bp, Homo sapiens
  chr19:47922893-47923450
  hyper
acttccggtgggagtcggggaggggcaggctgtggggggaggagaggaagagaccgcggccctggtgcccccaggcccctcctctcctacccagggctggggttcctgctccgggtttctcagtctccctctttcccagtctctctctccttgtctctctctgtctccgcttctcccgtcctttctctcctctggctctctgttctccgagccccctggacacaccacggaccccctccctggccatctccaggggtcacgtgggaatctggagtctggtcccaccgtaggctctcccctctctgaggctcgattccccctctgcaggatgggcagtgcgctgggggcggcgggggtgggctgtggataacggagaaacagttaagctagagggtgccaggactcagggtcttggctgagtctgggggtccccatgccggcgggctctgcccccgtggctgtcctgcggtgaggctggccgtttaaggcagtccgaggggaagggtctggaggccttgcctttcctcaaggccggcgcaccccagataggggttttg

SEQ ID NO: 131867 - DNA, 115 bp, Homo sapiens
  chr19:47923667-47923782
  hyper
gccagtggtggggggcgtggacagagcaggaagggagggagggggcacctgggatggggatggggcctaactggagtggggagggaggtaactccagtgacggtgtgattcagag

SEQ ID NO: 131868 - DNA, 223 bp, Homo sapiens; identical to SEQ ID NO: 56412
  chr19:47925410-47925633
  hyper

SEQ ID NO: 131869 - DNA, 314 bp, Homo sapiens; identical to SEQ ID NO: 56413
  chr19:47931514-47931828
  hyper

SEQ ID NO: 131870 - DNA, 573 bp, Homo sapiens; identical to SEQ ID NO: 12482
  chr19:47933274-47933847
  hyper

SEQ ID NO: 131871 - DNA, 119 bp, Homo sapiens
  chr19:47947696-47947815
  hyper
ctgtgggtggaaagaaagggccgcccccgacctcggcgtgggctgtgagctgtccgcggtgctgaaatgctggggccggcgaggagggagggtctcccgagacatgctcctcacacacc

SEQ ID NO: 131872 - DNA, 30 bp, Homo sapiens
  chr19:47950483-47950513
  hyper
ccagaccccacctatcgccctggacccgcc

SEQ ID NO: 131873 - DNA, 499 bp, Homo sapiens; identical to SEQ ID NO: 56415
  chr19:47950994-47951493
  hyper

SEQ ID NO: 131874 - DNA, 150 bp, Homo sapiens; identical to SEQ ID NO: 56416
  chr19:47960799-47960949
  hyper

SEQ ID NO: 131875 - DNA, 30 bp, Homo sapiens; identical to SEQ ID NO: 56417
  chr19:47974886-47974916
  hyper

SEQ ID NO: 131876 - DNA, 30 bp, Homo sapiens; identical to SEQ ID NO: 12484
  chr19:47975472-47975502
  hyper

SEQ ID NO: 131877 - DNA, 51 bp, Homo sapiens
  chr19:47987533-47987584
  hyper
acggaagctgccggcgttgccctctcccaagatggcggccaggtcgcctgc

SEQ ID NO: 131878 - DNA, 104 bp, Homo sapiens
  chr19:47987618-47987722
  hyper
cgcgctctcttctcctttccatttctggaccaaggggctgccataaggagtctgtgactagagatgggaggtggtggccacggcctctcgctgtatgctgtgtg

SEQ ID NO: 131879 - DNA, 301 bp, Homo sapiens
  chr19:48018495-48018796
  hyper
cactctctccccagcgctctgtacctcacctcccacgtgaccctgtggaaggcaatggcagtaccccccgccgaggccccgccccacggtgttgctgctggatcctcctccaccaatcagcaggagccctcggctcgcgctggggcggggggtcccccactcgccctccccgcggaactctggcacagtcagctgaccgcagacactcacgtgacagctcggggcccacgcccgggtttgacagttctgcgcagaacttagtcccgcccccgcggctggtctcgccggtttcttcacttgg

SEQ ID NO: 131880 - DNA, 277 bp, Homo sapiens
  chr19:48076346-48076623
  hyper
cgggggctcgcgcgccgggcctcgcgcctggcgcctcgcggggctcccagcggcctcccgccttccccgcgccgcccggggcgcacgcgcagcccggcccacccccggatctcctcgctcacgcgcggcgcaggcgcgcgtacgtgaccgcgggccgcctcacgcctcccagagcggcctcgcgcgtgcctcctggccgcgcgctctcggctgcttctccgaggggcggggcttgccgcgggcgggaaaggaggcggttggtcgccattttgggagg

SEQ ID NO: 131881 - DNA, 142 bp, Homo sapiens
  chr19:48103692-48103834
  hyper
acaaacccaggccccgcctcccgacgaataatcccccgaccggcgagaggcccatttaacccgatggggtttggggttgggacggtgatggagtcgtggctccgcccccagacctgggccaataggcggctgggctccgccc

SEQ ID NO: 131882 - DNA, 203 bp, Homo sapiens
  chr19:48104040-48104243
  hyper
cactttatttccaccgcctagctgctaaaatccggacccggaaacgtctccaatgggaacttgttcccctcgcccctatttaacagaacctggaggggacgcaggggtgtttttggattgggcaaggctttcatttctttcccctggttcttacatgcatacgggaaaatgcacgtatcttgtgcgccgctctacagaaaact

SEQ ID NO: 131883 - DNA, 1 bp, Homo sapiens
  chr19:48111578-48111579
  hyper
c

SEQ ID NO: 131884 - DNA, 30 bp, Homo sapiens
  chr19:48112392-48112422
  hyper
agaccccgcgccgacggctgctcaaacatc

SEQ ID NO: 131885 - DNA, 30 bp, Homo sapiens; identical to SEQ ID NO: 12485
  chr19:48113095-48113125
  hyper

SEQ ID NO: 131886 - DNA, 82 bp, Homo sapiens
  chr19:48216435-48216517
  hyper
gctgttgtgattcccgtgttaagaagagagacagactggggagcagcccaacgctggaggtggaggcggaattcgaacccca

SEQ ID NO: 131887 - DNA, 30 bp, Homo sapiens; identical to SEQ ID NO: 56422
  chr19:48216798-48216828
  hyper

SEQ ID NO: 131888 - DNA, 272 bp, Homo sapiens; identical to SEQ ID NO: 56423
  chr19:48229019-48229291
  hyper

SEQ ID NO: 131889 - DNA, 30 bp, Homo sapiens; identical to SEQ ID NO: 56424
  chr19:48246709-48246739
  hyper

SEQ ID NO: 131890 - DNA, 30 bp, Homo sapiens; identical to SEQ ID NO: 56425
  chr19:48248715-48248745
  hyper

SEQ ID NO: 131891 - DNA, 264 bp, Homo sapiens
  chr19:48281434-48281698
  hyper
gctgcaggtctttataaggcaactgtgggccctggaccgctccctgaaaacctccccctcaactccctgtctcctccctcacctggtctaccccgaatccttcccctctcgccccctcgccctctccaggggaggtgagggactcaagaatcgcgccctgcttctgtccccaccgcgccgtccccaagcccacgcagtgaaaagaccacccttgaggctgattccgggtccagctgggagcggccagccgtaaatcaccgcccc

SEQ ID NO: 131892 - DNA, 170 bp, Homo sapiens
  chr19:48613935-48614105
  hyper
ctgtgggaggaggtcgcgggctggaggtgtttcctcctggtcctgagcagggccaacctggaggtaaaatggcccctgcgcctttaaacagccctcctcggcttgtaggccctgcttggttgctccagctttttcagctgttccagagctcacccggagctattttcatc

SEQ ID NO: 131893 - DNA, 30 bp, Homo sapiens
  chr19:48623423-48623453
  hyper
ccatcagaacaaagccggcaacaacttccc

SEQ ID NO: 131894 - DNA, 30 bp, Homo sapiens
  chr19:48707276-48707306
  hyper
cggggtgtttccttcgtctgctggcgggag

SEQ ID NO: 131895 - DNA, 318 bp, Homo sapiens; identical to SEQ ID NO: 56428
  chr19:48774330-48774648
  hyper

SEQ ID NO: 131896 - DNA, 30 bp, Homo sapiens; identical to SEQ ID NO: 56429
  chr19:48775011-48775041
  hyper

SEQ ID NO: 131897 - DNA, 159 bp, Homo sapiens; identical to SEQ ID NO: 12487
  chr19:48823577-48823736
  hyper

SEQ ID NO: 131898 - DNA, 30 bp, Homo sapiens; identical to SEQ ID NO: 12488
  chr19:48824607-48824637
  hyper

SEQ ID NO: 131899 - DNA, 30 bp, Homo sapiens; identical to SEQ ID NO: 12489
  chr19:48825136-48825166
  hyper

SEQ ID NO: 131900 - DNA, 30 bp, Homo sapiens; identical to SEQ ID NO: 56433
  chr19:48825605-48825635
  hyper

SEQ ID NO: 131901 - DNA, 384 bp, Homo sapiens
  chr19:48833438-48833822
  hyper
actcccagcaggcagcggcgctgcccacgggccctccggcgcttctttgcccccatgggatattgggaaatgtagtcttgagggggcactgcatgacgtgtggttttcatcttccgcaggcgtggcggtgtttactggcgccttgatctatgccattcacgccgaggagatcctggagaagcacccgcgagggggcagcttcggatactgcttcgccctggcctgggtggccttccccctcgccctggtcagcggcatcatctacatccacctacggaagcgggagtgagcgccccgcctcgctcggctgcccccgccccttcccggcccccctcgccgcgcgtcctccaaaaaataaaaccttaaccgcgggctctgccttga

SEQ ID NO: 131902 - DNA, 250 bp, Homo sapiens
  chr19:48867041-48867291
  hyper
tggggtctagacagcgaggtagatcttaggagagcaggaaatgctcgtaaaggttacctagggggtgcagggccgccctccctggccatgcaatcccccgatttctccctcaccttagccaaagctcgactgtcattgagcctcctgcgcatgtgcaggagggcgtcctgggctcccgaggttcggcttcacccagcagtaaaacgcatgcgcaaagcttcggtcaatgcgggctgtccatttctcaccg

SEQ ID NO: 131903 - DNA, 142 bp, Homo sapiens
  chr19:48867354-48867496
  hyper
cgcgacgcatgcgccgcaggagtgtctccttgtcagcttgctacaaagggaaggggcggtgtggacgcgagactccctagagggatggggcggggtagggctcccgcgcgcagtccgccaacggcgcgcagtccaacgttcg

SEQ ID NO: 131904 - DNA, 141 bp, Homo sapiens
  chr19:48894904-48895045
  hyper
ctttgccgtggcggcgctaaacgcacccccaaagctgccccataggaacttgggagggtcgcagggttcggaaagtgccaaatccagcaccggttcgcccaggcagtctgtgtctctggaagagacgcagtccagtacacc

SEQ ID NO: 131905 - DNA, 30 bp, Homo sapiens; identical to SEQ ID NO: 56435
  chr19:48896932-48896962
  hyper

SEQ ID NO: 131906 - DNA, 644 bp, Homo sapiens
  chr19:48901492-48902136
  hyper
tcctccccatctcggcgcctgtccctcgctgcatctcctcctctgtgcgtctctttatctcgtctccctgtccctgcgtctcccgtctgtgcctccctctcctccccgtctctcccggcccgggcgctcagaggccgcccggcggggcccgcaggcgatgcgcggcgccggtggcccccgcggccctcggggccccgctaagatgctgctgctgctggcgctggcctgcgccagcccgttcccggaggaggcgccggggccgggcggggccggtgggcccggcggcggcctcggcggggcgcggccgctcaacgtggcgctcgtgttctcggggcccgcgtacgcggccgaggcggcacgcctgggcccggccgtggcggcggcggtgcgcagcccgggcctagacgtgcggcccgtggcgctggtgctcaacggctcggacccgcgcagcctcgtgctgcagctctgcgacctgctgtcggggttgcgcgtgcacggcgtggtcttcgaagacgactcgcgcgcgcccgccgtcgcgcccatcctcgacttcctgtcggcgcagacctcgctgcccatcgtggccgtgcacggcggcgccgcgctcgtgctcacgcccaaggtgcgcgcgaccggggcggggc

SEQ ID NO: 131907 - DNA, 24 bp, Homo sapiens
  chr19:48902532-48902556
  hyper
aggaatgggcctgggcgcggtggc

SEQ ID NO: 131908 - DNA, 218 bp, Homo sapiens
  chr19:48918113-48918331
  hyper
cccgcagccctccaccggatgccccccgcccggaaaagcgctgctgcaagggtttctgcatcgacattctgaagcggctggcgcataccatcggcttcagctacgacctctacctggtcaccaatggcaagcacggaaagaagatcgatggcgtctggaacggcatgatcggggaggtgagggggcggacgggaggcggggaatcttcggggcggagt

SEQ ID NO: 131909 - DNA, 97 bp, Homo sapiens
  chr19:48918630-48918727
  hyper
aataataataaaaaaaaagaggtcggcaccctggggcaggggcgcggccaaattgaggaaacacctgattggggcctggggcggggtcgcgggaggg

SEQ ID NO: 131910 - DNA, 116 bp, Homo sapiens; identical to SEQ ID NO: 12491
  chr19:48947361-48947477
  hyper

SEQ ID NO: 131911 - DNA, 41 bp, Homo sapiens
  chr19:48947874-48947915
  hyper
cggaagccccgccttcccttgcaccgcgatgaacccaacct

SEQ ID NO: 131912 - DNA, 52 bp, Homo sapiens
  chr19:48949426-48949478
  hyper
gctctaccaccgagcgcagactggtagggctgagtccggactccagggtcct

SEQ ID NO: 131913 - DNA, 21 bp, Homo sapiens
  chr19:48955644-48955665
  hyper
gcacccagcccatgccctcct

SEQ ID NO: 131914 - DNA, 180 bp, Homo sapiens
  chr19:48972232-48972412
  hyper
tagcaacgtattatcggaggcggggctcggtttacctagactccaagtgtccagggcctttgagcaggcgcagaggtggctgtaccgcgtggctccgcctccgcgcgacacttttccggggcttctcattggagagcaagcctgtcaagtgctttctgttgtttcggaggcggggcctgc

SEQ ID NO: 131915 - DNA, 30 bp, Homo sapiens
  chr19:48972829-48972859
  hyper
tctcctgaacgttccgccgcgaacgtttcc

SEQ ID NO: 131916 - DNA, 30 bp, Homo sapiens
  chr19:48973216-48973246
  hyper
tggacccagtagtccggataaccaggtccc

SEQ ID NO: 131917 - DNA, 184 bp, Homo sapiens
  chr19:48994397-48994581
  hyper
gccccggggtctccagcgcaggcgagacggagaagcgggagaagcacagcggggggcctggaggggggaggagggggaaatcctccgcccactcgaaactgcctcctgcggcagaaggaaagaccgcggtcaggctgcagacacctgcggcactcccgccctctggtcccgcccctcccgacca

SEQ ID NO: 131918 - DNA, 31 bp, Homo sapiens; identical to SEQ ID NO: 12492
  chr19:48996514-48996545
  hyper

SEQ ID NO: 131919 - DNA, 198 bp, Homo sapiens; identical to SEQ ID NO: 56444
  chr19:48996832-48997030
  hyper

SEQ ID NO: 131920 - DNA, 205 bp, Homo sapiens
  chr19:49014627-49014832
  hyper
ggccctgctgggctgcgggaagacgcgcaccaggtgacggggcaggacccgcagacagacccctgggcagacagcgaggccgccgcgggggtgggggccaccggacagactgatggcccgacagactcaccggggtgggccggggacgccaggcagccggaggcggagacggccgcaaggaggatgagggcgccgggggcaggca

SEQ ID NO: 131921 - DNA, 30 bp, Homo sapiens
  chr19:49016919-49016949
  hyper
acactcggcgcaggcgacccagcccccaac

SEQ ID NO: 131922 - DNA, 30 bp, Homo sapiens; identical to SEQ ID NO: 56445
  chr19:49122473-49122503
  hyper

SEQ ID NO: 131923 - DNA, 475 bp, Homo sapiens
  chr19:49127265-49127740
  hyper
tctgggcctttgttacgcgtgttagagtctctgtctttgcagctaaagacctcctccctcacgccccttttcttttgtgaattcaatggatgagacaggcccactctcccttaacaaagatggcgacaacggcgctgtctatggggccgcgacgtcgtctccgctgcgcgtcggccctcacccacgatggcggccagtctcccgaagcgcgaggccccgcccagctctcggcctctcccgcggccggtccctgcaccaagctcgcgagctgactggctccaccccccgcgccctcgtattggtgcggcccaggccggctgcacggccattggctgagcggatgcacaccctccccccacccctaggtctgatgggggctgttggtgctgacttgcgggaccgcctggaggaggacccggcgtgtgaggagggtgcgggggtcggggcagggaccggagtctaggggactgaggga

SEQ ID NO: 131924 - DNA, 30 bp, Homo sapiens
  chr19:49140142-49140172
  hyper
cctgcagaaggctccgcaacccaagcagcg

SEQ ID NO: 131925 - DNA, 217 bp, Homo sapiens; identical to SEQ ID NO: 12495
  chr19:49141162-49141379
  hyper

SEQ ID NO: 131926 - DNA, 30 bp, Homo sapiens
  chr19:49149040-49149070
  hyper
cagggactgagatccgcccttcaaacccac

SEQ ID NO: 131927 - DNA, 54 bp, Homo sapiens
  chr19:49149534-49149588
  hyper
cggcaaacactcctcgggttggcttggggtgggatgtgcgaaagggcaggattc

SEQ ID NO: 131928 - DNA, 30 bp, Homo sapiens
  chr19:49149918-49149948
  hyper
cagtgagggctgctcgcctggagggggagg

SEQ ID NO: 131929 - DNA, 509 bp, Homo sapiens
  chr19:49199688-49200197
  hyper
atggtgcagatggctcgcgcacagctggtggtgacccgactttcctgcctccaccctggggctcctcagaggcttcatggaacccaaactgctggtctcacctccgagccctgccgtcgcccagggagggcggctccgtccctcctgcactccctaatcccgctctgaatcaccgcttctgttctgggtcggagaataaaggtggggtttccaagtgatggccctacgttattgtctgaagctcccttctcctccccagggtggaagtgataatgccgggaatccgggaatcccggggaggtgcaggaagacagcgagctcgaggcagtggggtgcgactgagccggatgtgctgagctgcccggggcacggggcggttggggtagagaaaggctttcagagctgggggacaggacggggccccgggtgagcggagagctgggttatttcacgggaacagctggtgacaaagccggaggggtgtgcggggccggcgagagactgggatt

SEQ ID NO: 131930 - DNA, 504 bp, Homo sapiens; identical to SEQ ID NO: 12498
  chr19:49216984-49217488
  hyper

SEQ ID NO: 131931 - DNA, 51 bp, Homo sapiens; identical to SEQ ID NO: 12499
  chr19:49217526-49217577
  hyper

SEQ ID NO: 131932 - DNA, 98 bp, Homo sapiens
  chr19:49217818-49217916
  hyper
tggggaggggcggggcgtgggaagaggcagtgctgggcgggctcccgggcgcaggcaggagctggacaggatatttggaaaccgagaaaggaggcact

SEQ ID NO: 131933 - DNA, 14 bp, Homo sapiens
  chr19:49242359-49242373
  hyper
cgcaggtgctccgc

SEQ ID NO: 131934 - DNA, 414 bp, Homo sapiens
  chr19:49242393-49242807
  hyper
cgcccgccgccgcgggccggcccagagcgtcgcacaaagcgaaggcgtccacgcagctgctctcgccggggccaccgccggggctgcctgctaggccgtagcgctctagcgcctcggccacgagctcgcgcgccgtggagcgcgccgtggccagcacgctcttgtagttggcgcccgatgccagtccggcgccgaagatcttgaggacccccggaggcgccgtggcgcgggtagccagcgggggctcgggggccacgcccgccgccagctccggcagcttcttctcgctggcccagcgctgcgcgccccccggggtcccagggcctcctgcgccgctggaccccgtggtcccggtccccgagccccggaagagctgggagatgcgcttggcgcggctaccggaggctcccccgg

SEQ ID NO: 131935 - DNA, 33 bp, Homo sapiens
  chr19:49242911-49242944
  hyper
cgccggggaacagagtcgcgggagagagaccca

SEQ ID NO: 131936 - DNA, 121 bp, Homo sapiens; identical to SEQ ID NO: 56454
  chr19:49244869-49244990
  hyper

SEQ ID NO: 131937 - DNA, 702 bp, Homo sapiens
  chr19:49255763-49256465
  hyper
ggcagatccacagtccgcttttcgtggccggagcgcaccctccgcaaaggcaggccacatccggccgcccctggaacgccaggcgtccggctatccggcccggcagccctcccctccgcgcagcctgtccggactggcagcgagggcttggggaggagaggaaggagagggcgcggccgggagtctcgcagcgtccgccctcccgggccgggcggatggctggaaggtggagccccgcccgtcacttggcgccgagccccagcgccaggggctaaggcgatggcccctgggcccaccgctccccagatcggggatgcaggggaccgcgccctgcccctccgccccgtcattgacctgcgcgaaggcttcacccagggcaggctacctggcttctgagcagccgcagcatcattgcgtggaccaggagacggagcgcccagttgcaatgctggagccgggaggtccaatccgccgccctctctcttccggtgccagggcttagagtcggcccccgacacctgggtgcttcgagcctggccacgccccagcggctgggcagggcccccgcacctggtcccggcgagtggagcgatcgtccgccctctgccgcgtcctcctgggggatggagaacctgtttgccaggctgccgccggagcgcgcgagggcctccagcctgcaggtgctcccgcgcccaccagggt

SEQ ID NO: 131938 - DNA, 557 bp, Homo sapiens
  chr19:49298356-49298913
  hyper
agacagagaaaaaaaaatcaacggcagcaccaggggtctggcctgagaacggagagatccggaatcggggccaaggtgtatccttgaccgcacgacaaggagtaatgggcggacctgaacccgcgacgaggggctgggggccaagatgcctgggtcggcccttacggctttgggagtgtcgcaaccacatgggggcgccagagacccagacgccgcccgctggccttttatttcgtattgcacttcaggtgagtcattggtagggaggcgagtgctggcgtgacgagatgctacgggtcggtggatctggagcacagcctgcagcttcacaccgggaacatccactcgtgggctctgattccgtactgcggaacaacggaggcagtgcgtgaggtggaagctgcactacaactcccagtaggccctggggtgttccaggccgagtgcctacggagctgtgccccagcggctcacgggaaatgtagtccacttcccagagggccccaacaatgatgggaacggggaatcaaggctaaggcggcgcagaggcttccggg

SEQ ID NO: 131939 - DNA, 154 bp, Homo sapiens; identical to SEQ ID NO: 12502
  chr19:49314167-49314321
  hyper

SEQ ID NO: 131940 - DNA, 30 bp, Homo sapiens; identical to SEQ ID NO: 12503
  chr19:49315664-49315694
  hyper

SEQ ID NO: 131941 - DNA, 30 bp, Homo sapiens
  chr19:49375705-49375735
  hyper
gatcttatgcaagacgctgcacgaccccgc

SEQ ID NO: 131942 - DNA, 30 bp, Homo sapiens; identical to SEQ ID NO: 56459
  chr19:49376411-49376441
  hyper

SEQ ID NO: 131943 - DNA, 211 bp, Homo sapiens; identical to SEQ ID NO: 56460
  chr19:49436771-49436982
  hyper

SEQ ID NO: 131944 - DNA, 30 bp, Homo sapiens
  chr19:49458352-49458382
  hyper
cctccagtcccctccgtcctcggaggttcc

SEQ ID NO: 131945 - DNA, 30 bp, Homo sapiens
  chr19:49458581-49458611
  hyper
ctagcctctttccccggggagaatgtagga

SEQ ID NO: 131946 - DNA, 31 bp, Homo sapiens; identical to SEQ ID NO: 12505
  chr19:49466992-49467023
  hyper

SEQ ID NO: 131947 - DNA, 586 bp, Homo sapiens
  chr19:49467049-49467635
  hyper
ttggggtagggggcccgatttgggtctgagccaggtctagttctgagggtcccaccaaaaaagtcggggagtgccaaggggatgaggtcagcgagtggccccacccccatccgtccccgcgggggccccttcccgcgctgagctcagcatgactcagcagtcgctgcctgcaacaaggaccccagataccggcctggcggggcatctgcagatcccctcggtcaggggctgccccgcctgggctgttcggagcagctcctctgtagggcagggcctgacctcaccccacaccccagtggcttcagctccctgcccagcgcacgggctgcctccatcagggcacttaagtagagtcaaggtttgcgccgactccgtctcccagaaatcaacgtggaccaggcccacttaaaaaatatgcattagtcgaagacagacgtctcgtccataggtccccagactgtttgtccacaacgcagggcttctctttgtgggcctgaaggagcacacgtcaggcaagacacgagggcaacttcagagacactgttcagggccacggagaattctcgaagtctgtgagttgtctcca

SEQ ID NO: 131948 - DNA, 30 bp, Homo sapiens
  chr19:49468446-49468476
  hyper
tcaggcacggccttcggccccgcctcctgc

SEQ ID NO: 131949 - DNA, 206 bp, Homo sapiens
  chr19:49474211-49474417
  hyper
cctccatgaagcagccgaagccggagagattggtggagatactggggattcccataaccgtgcactcagctgcgggaaggcaggagagagacccacttagcttccctcatcgcctaccgtcttaatcgcaatagacgcctcaacaccgccctctactggcgcctgtaccaagtgccaggcgctgtgcggagcgtcgctgagccccc

SEQ ID NO: 131950 - DNA, 171 bp, Homo sapiens
  chr19:49496545-49496716
  hyper
gaaggaggccgcagcgtcactgagcccactggcgcccctgcagtgaaacctcgcagccgccaggaggcggtggccgccccccccagccagcgccattggcccacgcccgggggcggggatttccgcgtgtcctcattggtggaacgggttggagtcgctgtgtcccggccc

SEQ ID NO: 131951 - DNA, 30 bp, Homo sapiens
  chr19:49521911-49521941
  hyper
tcctgtccctaccgcggttcctgagaggtg

SEQ ID NO: 131952 - DNA, 30 bp, Homo sapiens
  chr19:49559777-49559807
  hyper
ctccagagttggggcgtctcttctaagctc

SEQ ID NO: 131953 - DNA, 203 bp, Homo sapiens; identical to SEQ ID NO: 56464
  chr19:49575271-49575474
  hyper

SEQ ID NO: 131954 - DNA, 2 bp, Homo sapiens
  chr19:49576122-49576124
  hyper
cg

SEQ ID NO: 131955 - DNA, 194 bp, Homo sapiens; identical to SEQ ID NO: 12507
  chr19:49577261-49577455
  hyper

SEQ ID NO: 131956 - DNA, 33 bp, Homo sapiens
  chr19:49588344-49588377
  hyper
gactctttgctaggcggcggagaggtacgttac

SEQ ID NO: 131957 - DNA, 30 bp, Homo sapiens
  chr19:49617511-49617541
  hyper
gtggtcggagcagtcgggcgagggagagct

SEQ ID NO: 131958 - DNA, 30 bp, Homo sapiens; identical to SEQ ID NO: 56467
  chr19:49621631-49621661
  hyper

SEQ ID NO: 131959 - DNA, 30 bp, Homo sapiens
  chr19:49623074-49623104
  hyper
tcccaggggacccccgagcccagatttcac

SEQ ID NO: 131960 - DNA, 84 bp, Homo sapiens; identical to SEQ ID NO: 12508
  chr19:49646031-49646115
  hyper

SEQ ID NO: 131961 - DNA, 83 bp, Homo sapiens; identical to SEQ ID NO: 12509
  chr19:49646245-49646328
  hyper

SEQ ID NO: 131962 - DNA, 826 bp, Homo sapiens
  chr19:49652235-49653061
  hyper
ccttccgtccccagacgtgatggtgtggtccaatgagcgggtcatgggttgggtgtccgggctgggcctgaaggaatttgccacgaacctcacggagagcggggtacacggggcactgctcgccctggacgagaccttcgactactccgacctggccttgctcctgcagatccccacgcagaatgcacaggtgagctgccgctgggcccggagcatgctgggcgtccccacctcgcagactgcacgctccaaccgccccctccacctcctctttccaggcccggcagcttctggagaaggaattcagcaaccttatctccttaggcacagacaggcggctggacgaggtgggcgcggcaacagctcagagggctctgctcccagcggctcctcgagaggctgagctgagggggcggggcctgactattaatggtcacggttggaggcggggccaggagaggggcggggttaaaggagaggtgagacccggagaggggtggagtcaaaggaaggggcggagtcagacaaggcaggagtccctcaccggctgtccggctcctatacctaggacagcgccaagtctttcagccgctccccatcctggcggaagatgttccgggagaaggacctccgaggcgtaactcccgactcagctgagatgttgccccccaactttcgttcggctgcagcgggagccctgggctctccggggctccctctccgcaagctgcagccagaaggtggggggctcccaaatgcgacagcccttcctcgcttccctagggtggggcatggaccacctcagtagtccgggttctggaatggc

SEQ ID NO: 131963 - DNA, 398 bp, Homo sapiens
  chr19:49654219-49654617
  hyper
tcggtcggcctccccgccccaggcgtcactcagtgatcacgggtaaagagaactgtttcaaaaagcttccttgttgactgattttttttttgcggggggggggggggctgttcaaccaaccacctcgagccaggagtccaggcccctcatccctcaagtctaggtccaggtctctagaccctacccgcattccccgatgccctgagattcccagaccccacgtctgacaatgaggtttcggggagcacgtttattcggagaaataaatatagctcgtggaaaggggttggaaggcagggggaggtacacctgcgtcgcagtcgagcgactgggtcagggttccggcgtttccagcatgtctgccagggccctggagacgagaacgccagaagttagac

SEQ ID NO: 131964 - DNA, 30 bp, Homo sapiens
  chr19:49654869-49654899
  hyper
actcagtatagcgtgcgagattagtgctag

SEQ ID NO: 131965 - DNA, 165 bp, Homo sapiens
  chr19:49655172-49655337
  hyper
taccgggccaggctccgcccccaccaggattcaccacgctgggcccggcaccttcctcaggtttttccagggccccgcccatgctcacctggagcgcagaccgtttcgcagaccagcgggcagagatagcagaactgacagtgctggaggcggggacggggagag

SEQ ID NO: 131966 - DNA, 447 bp, Homo sapiens; identical to SEQ ID NO: 56470
  chr19:49660927-49661374
  hyper

SEQ ID NO: 131967 - DNA, 30 bp, Homo sapiens; identical to SEQ ID NO: 56471
  chr19:49866841-49866871
  hyper

SEQ ID NO: 131968 - DNA, 640 bp, Homo sapiens; identical to SEQ ID NO: 12511
  chr19:49925605-49926245
  hyper

SEQ ID NO: 131969 - DNA, 37 bp, Homo sapiens
  chr19:49926478-49926515
  hyper
cgaccgggggcagggcgactcccgaggcagtgcggac

SEQ ID NO: 131970 - DNA, 109 bp, Homo sapiens
  chr19:49926733-49926842
  hyper
ccttatatcgcctccgcagcccccgcaccgggcagtgacgcaggccggggggccggggacgcggggtcaccccctccccaggctcattaggagccgccagcggtaatga

SEQ ID NO: 131971 - DNA, 233 bp, Homo sapiens; identical to SEQ ID NO: 56475
  chr19:49929635-49929868
  hyper

SEQ ID NO: 131972 - DNA, 30 bp, Homo sapiens; identical to SEQ ID NO: 56476
  chr19:49931427-49931457
  hyper

SEQ ID NO: 131973 - DNA, 27 bp, Homo sapiens
  chr19:49931744-49931771
  hyper
ttcaaatgcagaatcggaatcctctct

SEQ ID NO: 131974 - DNA, 383 bp, Homo sapiens
  chr19:49935878-49936261
  hyper
caggtggggcagcgcggacaccaggcctacctgcgggaacaggtgtacagggacactagggttcggggccgccggctcggcgtctctgcccggtccgtgcaccaccggctcctccctgcctcgggatcgccgccagttccctcccgccgacccctccgcgcccccctgccctctcctcctgggctctaccttgctgatctcgaagccgaacacttcttcgaagtaggcgggctgggagatgagcagcaggtagaacgtccagctgcggcagaagttggccacgatgatggcatagactggcatagacgtgaagaagcgccgccagggagtgctaaacttctgtgggggcgaggggagggccgctaagacggggagcggggctg

SEQ ID NO: 131975 - DNA, 140 bp, Homo sapiens
  chr19:49936827-49936967
  hyper
cgggttgcaacccgcctcctaggttctagcccctctctttgcgttccagtcccgtctcctctagagtctgcaggaaccgtccctgatctacacgctgtgcaggttcgtggcttgctatctctccccgccccttccccgaa

SEQ ID NO: 131976 - DNA, 31 bp, Homo sapiens; identical to SEQ ID NO: 12515
  chr19:49939532-49939563
  hyper

SEQ ID NO: 131977 - DNA, 193 bp, Homo sapiens
  chr19:49954989-49955182
  hyper
agaccgaacaccatcgtcaaatccgtggggaatatgtgtctctagacgcactaccctccgtcctacgtgccgaactgtaaacgaagccacacttccggtctatcggtaaacacaggactggagtatgccacacttccgagtaccccagtgttcattcacaagctggtatcgcgttatcgacaagccacgcccc

SEQ ID NO: 131978 - DNA, 109 bp, Homo sapiens; identical to SEQ ID NO: 12516
  chr19:49956759-49956868
  hyper

SEQ ID NO: 131979 - DNA, 30 bp, Homo sapiens; identical to SEQ ID NO: 12517
  chr19:49977303-49977333
  hyper

SEQ ID NO: 131980 - DNA, 30 bp, Homo sapiens
  chr19:49977655-49977685
  hyper
ttctggggaccagacgtcgaggttcttaga

SEQ ID NO: 131981 - DNA, 30 bp, Homo sapiens; identical to SEQ ID NO: 12518
  chr19:49990679-49990709
  hyper

SEQ ID NO: 131982 - DNA, 30 bp, Homo sapiens; identical to SEQ ID NO: 56484
  chr19:49991046-49991076
  hyper

SEQ ID NO: 131983 - DNA, 30 bp, Homo sapiens; identical to SEQ ID NO: 56485
  chr19:49991502-49991532
  hyper

SEQ ID NO: 131984 - DNA, 83 bp, Homo sapiens
  chr19:49999402-49999485
  hyper
ccgtacgactctcgcgataatacgggcgggctgaaggctggtcacatcttccctgcctaaataatcgcgcccggcgttgtggg

SEQ ID NO: 131985 - DNA, 31 bp, Homo sapiens; identical to SEQ ID NO: 12519
  chr19:50003947-50003978
  hyper

SEQ ID NO: 131986 - DNA, 325 bp, Homo sapiens; identical to SEQ ID NO: 56488
  chr19:50016228-50016553
  hyper

SEQ ID NO: 131987 - DNA, 50 bp, Homo sapiens
  chr19:50016835-50016885
  hyper
ggcgctgccttctccgctcaattaactttctcaacgtctcctgctgggcc

SEQ ID NO: 131988 - DNA, 274 bp, Homo sapiens; identical to SEQ ID NO: 56489
  chr19:50058956-50059230
  hyper

SEQ ID NO: 131989 - DNA, 97 bp, Homo sapiens; identical to SEQ ID NO: 56490
  chr19:50083835-50083932
  hyper

SEQ ID NO: 131990 - DNA, 30 bp, Homo sapiens
  chr19:50094755-50094785
  hyper
tcccgggccttcggcggctgcaaagaaaaa

SEQ ID NO: 131991 - DNA, 84 bp, Homo sapiens
  chr19:50143411-50143495
  hyper
gggggggcgggctacgctaatgaggctactgcataatcatgagctctggcaaggagggctcgcgtctccggacacttaaggagg

SEQ ID NO: 131992 - DNA, 30 bp, Homo sapiens; identical to SEQ ID NO: 12521
  chr19:50144982-50145012
  hyper

SEQ ID NO: 131993 - DNA, 30 bp, Homo sapiens
  chr19:50145286-50145316
  hyper
catcgcgcggaccccgccccatgtgtccca

SEQ ID NO: 131994 - DNA, 30 bp, Homo sapiens; identical to SEQ ID NO: 12522
  chr19:50167911-50167941
  hyper

SEQ ID NO: 131995 - DNA, 105 bp, Homo sapiens
  chr19:50169138-50169243
  hyper
aggcatgctgggagcgtcacatgcaaattgagcgtgcacccagcgttccgccctttctacgctgggccggttatcgacccggcccagtgcgcaggcgcgggaaag

SEQ ID NO: 131996 - DNA, 30 bp, Homo sapiens
  chr19:50184038-50184068
  hyper
caggggcctcgcgccgaaggctggggtggg

SEQ ID NO: 131997 - DNA, 387 bp, Homo sapiens
  chr19:50194290-50194677
  hyper
taggggattggacgccgtggctcgaagggggcggggatagaacgcggggattggaaggaggcggggataaaacccgggacctgaatacccggctagggacacgagagagaggaatcggggtttctgggtgacggtgatctcggggtgggcaggactccaaaggcccgtcgacccggtggtggactccttgcactgggattggacatatgcaagcgggagatttggggccggcgctcaaaatcggggggcgggggtggactcgggtttggaccccaggatccgatcagcggacccttgattcaacgtggtaagtactggaccccaggggctcgggctccggcggggcctggagtcctgtgtctagggttgggcgtgcaagcctctcca

SEQ ID NO: 131998 - DNA, 302 bp, Homo sapiens
  chr19:50312464-50312766
  hyper
acacagctccaggctcggcagcagagtcagggtcaggagccggtgtgggacctgaagcagggcacaggctggggctcatcgcggcccggcccctttccatcgcagatcccgcctcctcgcgactcggcccccaggtcacatccctccgtcggtgcccgccacccactcaccgtggggctcccgtgcggcaggtacaccgggtagtcgcgagcggtctgcggcggcagggaccccaccagccaggggagcagcacggcctcgggcgtccccagccgccaccaaccctctgttgctgccaccac

SEQ ID NO: 131999 - DNA, 820 bp, Homo sapiens
  chr19:50316248-50317068
  hyper
ccacctgctgacgggcgggggcgccgccgcgactgctcctgcagaatagggggaccccgctggaggccgcgaggcacagcagatgcacagtgccgcccgtcccctcctcccccatttaggactcccaccgcggtccctcacgtggggactgtcagtgcgggtcttggagcatggcggtaatcagagtaactcggcctgtggtccggagccgccagagggcgagatggggagctgattggaagaggattaacttcccgccttcttcacccaactcaaacagaccctcaaaccctattcaggcacctcccccaaacccattaggttctcttccgccctagccggaagtcacggtacccctaacaaagatggcggcaaattgaatttgcaaagctttctagtttctccgaggaggtaaagagaaccaagaagccggattgaagatgatgactgcgccaaggcgttgcctagccaccatcctgtaggctttgatgatttacattctaaacggaaaaaacagctgtgcccggatcaaagattgcgatggtcccaaagcattgcctagcaaccacattccctgtaggtttccagtatatagtagtaaacaatgtgccctactcaaagatggcgaccgtggcggggcgttgccaagcaaccaccattcagcctgatatccattccaaggctgtaaacagctgtgccctgctcaaagatggcggcacgtcgaagtccgagcaccctccttggggcgaaatcgagaaaaacaccatctcccctacaaccttcgagggtggttgagtccagcgatcgttgcctagtaacc

SEQ ID NO: 132000 - DNA, 195 bp, Homo sapiens
  chr19:50321280-50321475
  hyper
gaggcggacctggacgccccgctcaaagatggcggctgactgagccgctttcaatttatttagcttttgacaataattccgtctaacccatcaggcccctagaagggctaactatgccctttctgagtcttccacgcggtgggggcgaaggaggatggagctagaacgaagcctcagcgcgtgccccgcacaaac

SEQ ID NO: 132001 - DNA, 186 bp, Homo sapiens
  chr19:50353783-50353969
  hyper
agcagagcgaatgagcgaatccacggaaggccggggagcgacgtgagtggcgagaagcttggagtcgccagggacggcgggcggagcctgggcgccggggctaatgggcggagcctccagggacagctggccccgcccaggccgcgcggggcccgctgggagttggagtcccttgcccacctcgcc

SEQ ID NO: 132002 - DNA, 30 bp, Homo sapiens
  chr19:50370733-50370763
  hyper
gcggcttgggctcacggccacttccgacca

SEQ ID NO: 132003 - DNA, 30 bp, Homo sapiens
  chr19:50373364-50373394
  hyper
cctgcacccacacgcggtccaggggtgcac

SEQ ID NO: 132004 - DNA, 214 bp, Homo sapiens; identical to SEQ ID NO: 56498
  chr19:50380585-50380799
  hyper

SEQ ID NO: 132005 - DNA, 62 bp, Homo sapiens; identical to SEQ ID NO: 56499
  chr19:50393345-50393407
  hyper

SEQ ID NO: 132006 - DNA, 40 bp, Homo sapiens; identical to SEQ ID NO: 12527
  chr19:50393536-50393576
  hyper

SEQ ID NO: 132007 - DNA, 93 bp, Homo sapiens
  chr19:50393796-50393889
  hyper
ggacagcgagctcagcagcgcgcgcggcagcaggtcccagccacccacgatgcggctgtacctgcaggcggggcggggcggggtgggggcgtg

SEQ ID NO: 132008 - DNA, 31 bp, Homo sapiens; identical to SEQ ID NO: 12529
  chr19:50401022-50401053
  hyper

SEQ ID NO: 132009 - DNA, 30 bp, Homo sapiens
  chr19:50432912-50432942
  hyper
tttttttttctaaacgattcttcgtgcttg

SEQ ID NO: 132010 - DNA, 30 bp, Homo sapiens
  chr19:50528873-50528903
  hyper
caatcggaatgcaccgtgaggtacctctcc

SEQ ID NO: 132011 - DNA, 252 bp, Homo sapiens
  chr19:50529273-50529525
  hyper
cgcgcacaggaagtcgctgcgaggaggcgcgtgtgcggggagttgaatctcccgctcccttgaggctggggttgcgtctgttgacgcggccgactacaatcccgaggtacggagacgctggggctgagggacttgcgggctcggtccttcctgagaggtgacggaatgcaagtgggggcgacttcggcaaagggtgcgtcgccttgggcggcggttgtcagggtgaaggtgtgaaccgtctttcacagtctg

SEQ ID NO: 132012 - DNA, 736 bp, Homo sapiens
  chr19:50553764-50554500
  hyper
atccttgtgctgactcggctcctggccacgccctaaccccacccccgctgcctctaaacccgtccccacccctgcagcctcacaggctgccgtcagattctcaagcccctattcctctcggtggcctaaatccccaactgctcggggccacttttcaggccaaaatgggcccaaaatggggagggcaagtgatgaatgtcactagacagtggggccctcaaggacctggcaaatgggggcttggacctcggatcggcctcccacgcgaagcttgctccccaccagcatccccacgttggtggcgacgctgccccggccccacggatacttccgcgcctgtcagactccctgatgaactacccttcccagagtaccgcgggagctcgggctcctgagggcgacggtcctctgatggcagatgcgggagaaactctggcgtcaggcggccctcgcgtggagcacacgaagtcgtggcttattctggcttcagtatgtggggtggagaaggcgatccacgcagctgcgtctatttcctgtggatcaatcgcaaaatacgttctgtaagccccgcccccactgcgtgcgggcggcttttgtctccacggcaaccgtcaactctggaaacgcctgtctttctccatggcaactgtctacgccgcaggctggagctgcccattaccggagcccgtaagcagtatgggtgctggacaaacagcgtgatcgggtcgtaaaactt

SEQ ID NO: 132013 - DNA, 211 bp, Homo sapiens
  chr19:50651036-50651247
  hyper
gtgcagtgctgctttcgggttctggggtcagaatctgggttgcagctctgccagcctgagagaaatcgcggagtctccccgactctcagtttcttcaactgcaaagtgaggaaaggtaggttccccttcctagggatcgcagcagtcccacgctccgccggactcctggcaaacagcagacgcccaattcctgcgcgccgagtcgtctgag

SEQ ID NO: 132014 - DNA, 241 bp, Homo sapiens
  chr19:50651307-50651548
  hyper
cgccctccccactcccaaccagacccaacttgggcccgcccccggagcttctgctagcctgtctggcccggcctgcacccacctgctccggtcgggtccgcgagttccgtgcgtccaggcggattccgctggacagccaggccttcccttcctccgccgggtcccggaacgcgcctgagcagtccctgtctcggaactgtaagtcccggtaccttaaacgcggcatcgcagctggactaca

SEQ ID NO: 132015 - DNA, 564 bp, Homo sapiens
  chr19:50706517-50707081
  hyper
cggtcggcccccccacgccggcccttacaaaggcccccattcatgccttgcgcacaaagcggcccattcaccctggccccttgggcctcccgcccccggccgccccccgcgcctcgctattggtggcgccccgtgcccatcaggcctcggcttccacccccgaccgcgccgcctagctccgcgcccgggccgcgttcttttcccacggctggcacccttcgacaacttctgattggcccagcccgccagccgctctttttgattggcggctcccgtcccccaggggcggggccgtagcttgccgcagcgggcgccgattggcctctgctgctctcttgggggcggggctgtcctggcggacacgcccctctttctccccaggccgaagcctcgggacggccctggaagccggtgagtgcccggggccggcagccctccgggggcggcggaacgggactgagccaggggaagctggagcctgggggctgcgatcggggcccgggagcccgggcaggcggccggggacggcggggaggtgacgcggacactcaccttgggcgcgca

SEQ ID NO: 132016 - DNA, 93 bp, Homo sapiens
  chr19:50707093-50707186
  hyper
cgagggaggtgggggggcgggacgtctacactcccccaactccagttgccgccgtgtgcgaggcccggtcggggtcctcgttgtcagccccgg

SEQ ID NO: 132017 - DNA, 381 bp, Homo sapiens; identical to SEQ ID NO: 56508
  chr19:50708475-50708856
  hyper

SEQ ID NO: 132018 - DNA, 1139 bp, Homo sapiens
  chr19:50815345-50816484
  hyper
gggaaggggccacgccgacccctccctccctgccctgcgggtgggctgagaagacccgccattagcaccagagttggacgatttgcagacctcccctccccacactgtctccgaaccccgcccccatccctgagagcgccccctcaccactccccccaccagcgacaggctaggcccgccccgcccacatttgagtgagagaaacttattgctctgtgtgtgtgtgtgtgtgtgttggggagggtgagccgcggagctcaggaagaccccccgccattcattcctccccaatcgccccgccccctggcccgtgtccgtgcgttcccggagcgcaggaggggtgcgacatgcgtgtggggggcgcgtcatgcagcgcatgcgtgtaggtgcaggcaccctggcggccggggggaaaagggggagccggacttggaaagagtccctttagctcgctctctccctccccgaatcccacactattgacttgggggatggggtgggaggggaggagaatcacgttttgtagaagtttatcatgattgtggttattttgaaaagctgaactcaaaagctgggtacgtgtggcggactggcgagcagggggagacgttgggaagaggtcagtaccctttggaaaagaccctcaccccctttccccgcctccttcggctttcgtgaaggtcaggggaaacgggggggcttgttaaagaagttgaaccctttggcaatataatcagtccccaccccgtaccctggtgtctggagcccctagccctttgccccgcccccaccaaaacccgccccacccctcacccctgcttcaccagggtttagggtccgagggaaggatgggggggactcaaaatgccccttgcataggaatcgttgcatcgagaatcgtgctcagtgacgccccccatccaccctcgggtggggggttcctgaggccgtgggagcagagggagggaggtggctaattccgtgggaccccggctccaaaaggggggtccgctaaagagtctgggaccggtgtggtctctgggcttgggggaggtagcgcatccttgagccaggataggaggtgggaaatgattttccacccgcgagcgtgacgcggtgaggaccgctggggaaggggg

SEQ ID NO: 132019 - DNA, 32 bp, Homo sapiens
  chr19:50817681-50817713
  hyper
cctgcccctcaaacccgcgcatgcggcccctg

SEQ ID NO: 132020 - DNA, 304 bp, Homo sapiens
  chr19:50817942-50818246
  hyper
tgggggtgaggggcccgggggtgtctgctggcatcgtcatctcggttgcatattattaatgactttttgattttttttaaaaaaacccttttccccaccccccacccccagctcctttgaccttcttcccggtcacccccgagtccccccacaggggggaggggagcgctaaaggatggagggcagggtcgggggagcgcggcgggcggcccggggagagccagggggggtggcaaggggcgcgaggcgcagggacaccccgctcaggcccgcgatgctgctgaggctgcgggatttctcgtaa

SEQ ID NO: 132021 - DNA, 684 bp, Homo sapiens
  chr19:50818505-50819189
  hyper
ggagtcagtcaacatcgatgagaaagggggagacatcggggaggggggagagactccggattaggaggcaggttggtgcccaccgagcctcccccgccccattcccaccacagtccaccgcccttccccccctccactggtcccctcacctgaggcaaaaggtggggggcagcaaggcgggatggtgggcggcaggggcgtggggaggggctgggtggaatgcatgtgggagcagccagcggagagggcagggaacggtgcggccgccgtagcggggctgggggctgacctagttgtagggaaagagagcaggcagggggtggggtctgcaagggggctgagtggagcgaagctggcagtgcccttggggaatccgatgagaactccaggagcagtgggggggggtggggggggagggaggctcctccagaagattctaaggacggggtcgggggtggggggcggtgaggcggagggctggggagagggacatctttaaagggtccaagaaggctctgagcttctgacgggtgcgggaaggctctcacaggcatctcacagctaatgggactcaagatccagcaacagtgtgtgtggtttctgcaaagcctggggctgcctgcagggttctgcacccccgcagggagctctgtggcttttccaggcaacgctaagggagctgtc

SEQ ID NO: 132022 - DNA, 95 bp, Homo sapiens
  chr19:50819425-50819520
  hyper
tggggggatggagaaacgccgccgggatcatttcctcctctctggtgttttccgcgggaggggagcagtgaaatggggggcggctgagacatcaa

SEQ ID NO: 132023 - DNA, 352 bp, Homo sapiens
  chr19:50828890-50829242
  hyper
aggccttcgcagagcgcatgcctagttccccgccccctccgagccgggcgcgcggcgctagctgcggcaccgcagtgggggcgggccagccgggccggggggcggggcgcacggcggccagtaccgcggacagctcccccgccgcagtgcgcagccgcagcggctaggggccgtcttaaccccttccgggccggagcctattcaacgcgcagccgcagtgttgctgctttccggcgggaggccaagggccaagagtctaattaactccttccctcccagggcacagggaaaggtgggcacccgccgcagtgcgcagctgcagaggctggacggcgtcgggctggtttaaccc

SEQ ID NO: 132024 - DNA, 30 bp, Homo sapiens
  chr19:50829742-50829772
  hyper
ctccctcccccggcgcgaatgcggcactgc

SEQ ID NO: 132025 - DNA, 565 bp, Homo sapiens
  chr19:50831534-50832099
  hyper
accatgtgccgcccgcgccgcccgcgccccctggcggccccccggcgccgccgcccgcgtcctggaagcagaggcgcttgagctcgccgcccgctccgtccaggccgccgccgcccgcgcccgcctcgtcgtccaggcctccgtcgtgggcgcctgcggcgttggcggcgttggcggcgcccgcggggtcgggcgcctcgaaggagtcgagcgcctcctcagcgtcgcgatgctgccggtaggtcatccagcagcaggcctccacgtcggtctcgtcgatgccccagaagccgagctcctcctcaaacaggggcccgcacacgtcggctgggcagtgcagcttgccggtgcggtagtagttgagcacgtacgcgaagactcccgggtgccggtcaaagaagaactcgtcggcgcccgggtcgtagtcgaagcgtgccgccgcctcgggctccgtcaggccggccagccgcgtccccggcagggtgcgcagcgtcgagcggtacgtctcatggcgcacgccgcccacgttgatcacgatcttgccgctgtcgccaccgccgccgcc

SEQ ID NO: 132026 - DNA, 695 bp, Homo sapiens
  chr19:50832537-50833232
  hyper
ggacgagtcggggccgccaatgagacggagcgattggctctttctaagagagcagggaggaggggcggggcggggcgtcaagggaggcgggaccggttactactaattgtgttcggcagcactggtagccaggggaaggcggggctagatacgatagagagagaccttactgaactgaaaaaagtgcgggcggggtagagggaggaggggacacatccaagctatttaaagacgcccgactggcctggaggggcggggccaccatgagagaggccgtcctgattgggctgagaaaggggcggagagaaacaaaacagatcgcacgccctcacctaaaacaccgctaggcaggacctggtggggaggagcattgcttggaagagacagggccgcagaaagtagaaacggtccagatgagactgcatggggcgggaactagagatggaggactttcccgcgcaagggggacaggctggactgaaagaggacacgggaagaacaaagacttagactcggtgagaaggtgttgaaacttgagagagtcctggaaacccgagagggtctggataggcctaagggagggagcggggctgaggctccaaggcgggcctggttagtcggggctgggcccggagaatgagtgtccggatggatgagtggtactgaggaaggtgagtggggtcgacaaatagaaa

SEQ ID NO: 132027 - DNA, 645 bp, Homo sapiens
  chr19:50833792-50834437
  hyper
aggtcacagggtctcaaagggcgaggcgagaacttctaacgaacgctacaccgcggcggactgcagattggaggaccgagggtagatgaggactggtgaggagggggcacgcaaggaggcagagaggacgggagaggggagaggccaaagcgccaggaagcaccgtcaagactgaggcaatataggcaggaccgataaaaaatggggtgggctaggagtctcagaggtcgggttctggggaagaatggagtgaggggcggggccagaaaaaggggaccgcctcggagcgggccgtccccgccccctgggcggtcgtaggctccgagaggcagagcgcaggctcagggggctggggcggggccagcggctgcggctggggctgcggagggaggaggcggcgcctgcgggagcgaagggggcgggtcagggggctgcgggcgccctcgggcagcacagtttctggcccgccgcttcctgctgcaggtgcggcggctgattcgtatcgcctcccaaccccatcccacccccgctcccgtttctgggtttcttggcgtctctttttctcccttcttgagtatttgtgccgccgtctctgttcccacccctctgagtctccgacccctcgtttgtaaatctgccctcctg

SEQ ID NO: 132028 - DNA, 1401 bp, Homo sapiens; identical to SEQ ID NO: 12536
  chr19:50836198-50837599
  hyper

SEQ ID NO: 132029 - DNA, 31 bp, Homo sapiens; identical to SEQ ID NO: 12537
  chr19:50860731-50860762
  hyper

SEQ ID NO: 132030 - DNA, 241 bp, Homo sapiens; identical to SEQ ID NO: 12538
  chr19:50871937-50872178
  hyper

SEQ ID NO: 132031 - DNA, 213 bp, Homo sapiens
  chr19:50887229-50887442
  hyper
tggctgctgggcagcgacggggcagcgctccctacacggccccgggcgagaggcgggcggggggacgcggaggatgcgcgcgcaacacccgagggtgggaggagagagaacagaaccgcggcgcgcccagaccgcacgaggtcgtgaaggtagccgcgcggaggggcgtggcttcgggcagacaggtcatggggaggcggagttaagggaatt

SEQ ID NO: 132032 - DNA, 30 bp, Homo sapiens
  chr19:50922113-50922143
  hyper
gagcttgtggccagcgggcaccctcctccc

SEQ ID NO: 132033 - DNA, 30 bp, Homo sapiens
  chr19:50979141-50979171
  hyper
ccgctctggaggtagcgttggagccgtctg

SEQ ID NO: 132034 - DNA, 155 bp, Homo sapiens
  chr19:50979533-50979688
  hyper
cgtcatgatgcggagcgggctttatgacgtcacacaagagcgggctcctgatttgtgatgacgtccctggagggggcggctcctggagatcaggccaaaggggcggccccatcctgctgacgtcaggccccaggtgcggacgggtgccagtgcgc

SEQ ID NO: 132035 - DNA, 13 bp, Homo sapiens
  chr19:51014325-51014338
  hyper
ccgcaccccagcc

SEQ ID NO: 132036 - DNA, 30 bp, Homo sapiens
  chr19:51014742-51014772
  hyper
tagcttcctggcgccgcgctctcatgggtg

SEQ ID NO: 132037 - DNA, 31 bp, Homo sapiens; identical to SEQ ID NO: 12539
  chr19:51052519-51052550
  hyper

SEQ ID NO: 132038 - DNA, 30 bp, Homo sapiens; identical to SEQ ID NO: 56523
  chr19:51055346-51055376
  hyper

SEQ ID NO: 132039 - DNA, 30 bp, Homo sapiens
  chr19:51070905-51070935
  hyper
cagctggatacgcagcgaccgccggacgca

SEQ ID NO: 132040 - DNA, 165 bp, Homo sapiens
  chr19:51071279-51071444
  hyper
tggggtgcaaggcccgctgcggggaggcgcggggggcggggctgcggccgggcctggagcctctcgcgctctcccccctccccggctcctgggtggggagggggcttccgcagcggcggcggtggggctgggggggccgctctgcctcctcgcctcgcgcccgcc

SEQ ID NO: 132041 - DNA, 84 bp, Homo sapiens
  chr19:51111318-51111402
  hyper
gcgcgcggtggcctgcgggctcgcgggagctcacgcgaactcacgcgcgagctcacaagctgcggcggccggctaggcgactag

SEQ ID NO: 132042 - DNA, 33 bp, Homo sapiens
  chr19:51142308-51142341
  hyper
tggcagccgaggcggcggcgggcggcagcccat

SEQ ID NO: 132043 - DNA, 13 bp, Homo sapiens
  chr19:51142565-51142578
  hyper
ttcccggcaggtc

SEQ ID NO: 132044 - DNA, 170 bp, Homo sapiens; identical to SEQ ID NO: 56526
  chr19:51142587-51142757
  hyper

SEQ ID NO: 132045 - DNA, 388 bp, Homo sapiens; identical to SEQ ID NO: 56527
  chr19:51142834-51143222
  hyper

SEQ ID NO: 132046 - DNA, 952 bp, Homo sapiens
  chr19:51161301-51162253
  hyper
aggggccatggagagcgggcgcgtgagcagcatccgctttgagaacatgaacgtcatctgtgggactgctgggcgccggaaccggtgagtaagcggcgggggcggggcctggagcgagcgggaggggcggggcccggggcgaccgggtaagagcgtggttggttttagagcgctgagggacgtggccaagagtgaaagcatgaatgggcggggcccggggcgactagataagagcgtggttggtgtaagggtgctgaggggcgggccccggagccactagataagagcgtggttggtgtaagggtgttgtgaggcggggcgacagtggagtgacagcttgggggggcggggccaggagggactagataagagcgagattggtgcagagccactgaggggcggggccaagagtgagcgcggttggaggtaaggtccggtgagatcagagagaaggagggatctcgagtgagtaggggcccgagtttgagtgacccagtagtgaccgggatagaggtctgagcctggaaaggcagctgtgagggggtggaagagactgagcacatagtaggtgtggggccaggggtgatagggtggggacaggcctggagtgcctagggtagagcgcagcctgcagtcgccagtggagggtcgggcctttgggcggtttgagatggagcctcgacagacagtgattaggacgcagaaccaggctaagagagcgtaaggagcctagagcgacccaggcgagagggcagggctggaggggagtttagggacggagcgatggtccgctggaccagggcctgtaaacgactccagggaccaggcagggactcttcgacgatcaaagccagggctgaaacgacctgcgagttccttttccgtccccaccccccttacaggtggctcatcgcggtcacggacttccagacgcgctcgcgcttgctgcgct

SEQ ID NO: 132047 - DNA, 394 bp, Homo sapiens; identical to SEQ ID NO: 56530
  chr19:51162427-51162821
  hyper

SEQ ID NO: 132048 - DNA, 157 bp, Homo sapiens
  chr19:51170580-51170737
  hyper
ccagcaggggcagcccgttctcttcgctggccctcggggaggtcggggaggggggcacggaccggcgtgggctgggcggcgggacccccggcccgtcctccgaggggggaccccttccgctcgtcacaggggcccggggctggcagttttcaaggaa

SEQ ID NO: 132049 - DNA, 175 bp, Homo sapiens
  chr19:51170905-51171080
  hyper
cgggctggcgggaagggacttctcctggctgcccagcccggccctgtaccccagctcccggcgcgcagggtccggcggggaggccccccagagacgcagcactggctcgtggtgggcgtggggcgagtggtggtgcggggtgggcggcggggcctcgtagcggggcgatgggggc

SEQ ID NO: 132050 - DNA, 82 bp, Homo sapiens
  chr19:51171778-51171860
  hyper
cgcggccacggcgggcggcggctgcggggaggccggggacgtgggcgacggcgcgggcgggaggccgccgcccttctggggc

SEQ ID NO: 132051 - DNA, 42 bp, Homo sapiens
  chr19:51171949-51171991
  hyper
cgggggcagctggaaatagcgtagagccgggccctgggagga

SEQ ID NO: 132052 - DNA, 37 bp, Homo sapiens
  chr19:51197475-51197512
  hyper
aggcagtcacacacacgcacatcgacacagccacact

SEQ ID NO: 132053 - DNA, 30 bp, Homo sapiens
  chr19:51197731-51197761
  hyper
ccacagggagggctccggggaatgggggcg

SEQ ID NO: 132054 - DNA, 33 bp, Homo sapiens; identical to SEQ ID NO: 56531
  chr19:51198090-51198123
  hyper

SEQ ID NO: 132055 - DNA, 144 bp, Homo sapiens; identical to SEQ ID NO: 56532
  chr19:51198175-51198319
  hyper

SEQ ID NO: 132056 - DNA, 30 bp, Homo sapiens; identical to SEQ ID NO: 56533
  chr19:51198547-51198577
  hyper

SEQ ID NO: 132057 - DNA, 407 bp, Homo sapiens
  chr19:51198873-51199280
  hyper
gccgcgtgcacggacgcgcggacggagccccgcttccccggcagggacaccgcgggtgagagaggccccaggcggggacacgcagcccaccaccacagaccaacacgcaacgcacctcgacacagtcggcaagaaaggccaggacattcagactgggccccaaggccatgagcaacacccctcccccaccagagaagcccaggcggaggggcgaacacaccaccacagctccccgagagagcgtggaccccgagccagcgcggggagggggcggcacacgccaggaggggagacacacggaaggaccgcccagctccggcagggaggctggggttgggccctggctgccgggcgcacggcacagcacaggccaggccagcgcagacagggtccgggaagagcgggga

SEQ ID NO: 132058 - DNA, 32 bp, Homo sapiens; identical to SEQ ID NO: 56535
  chr19:51221588-51221620
  hyper

SEQ ID NO: 132059 - DNA, 30 bp, Homo sapiens
  chr19:51222444-51222474
  hyper
tcccatcaaggatgcgatctgggacggggc

SEQ ID NO: 132060 - DNA, 628 bp, Homo sapiens; identical to SEQ ID NO: 12546
  chr19:51227640-51228268
  hyper

SEQ ID NO: 132061 - DNA, 270 bp, Homo sapiens; identical to SEQ ID NO: 12547
  chr19:51228368-51228638
  hyper

SEQ ID NO: 132062 - DNA, 201 bp, Homo sapiens; identical to SEQ ID NO: 12548
  chr19:51228702-51228903
  hyper

SEQ ID NO: 132063 - DNA, 43 bp, Homo sapiens
  chr19:51307922-51307965
  hyper
cgctccgcccgaggcgtccaatacacacgcctgtttgggaaac

SEQ ID NO: 132064 - DNA, 30 bp, Homo sapiens
  chr19:51308324-51308354
  hyper
aagcgcccacgtggcgcagaattagaggcg

SEQ ID NO: 132065 - DNA, 217 bp, Homo sapiens; identical to SEQ ID NO: 12549
  chr19:51324263-51324480
  hyper

SEQ ID NO: 132066 - DNA, 331 bp, Homo sapiens
  chr19:51412502-51412833
  hyper
ctcacttctggaaacagtgtgcggctgacagcacccactgcggatgcaccaggacgcccgagcagaacaattcgttttccatgaccagtgccgcctgccagggctgcgagtgcgggctgcagtcctcgccgtttatgatttggctgcagctaccagagacgagcgatcctgagggcggagtcagggatgggatcgggaccaggaggcgggcccagggttcctgggggtgggcttaccgagcaggggcgtggtcagaggttcaggagcagtcagggctcctcggggcggagtcagggctgggaacgggctcaggaggcgggcccagggctct

SEQ ID NO: 132067 - DNA, 30 bp, Homo sapiens; identical to SEQ ID NO: 12551
  chr19:51415666-51415696
  hyper

SEQ ID NO: 132068 - DNA, 361 bp, Homo sapiens; identical to SEQ ID NO: 12552
  chr19:51415994-51416355
  hyper

SEQ ID NO: 132069 - DNA, 842 bp, Homo sapiens
  chr19:51520078-51520920
  hyper
attcctgaccacaccggaccctggcttctatccgttgcaggcaaccacctcctcctagagctcaaggagaatcagcgggagaggagtgacgggcccagaaatgcggaaaaggaccacaccgccccctggcggccacagcgcaagcccggtctctcctcctgctggaaggacaccggggaccgcacctccagctgtgggagttccgagagaccccgccctgcccgctcctccctggaggccgcctccacagccccccgtggcgtcctcggggatggatctcctcctacttgtttccgcagtgcgcggccgtcagcacccaactctggtccaccaggacacccgcgcagtggaacgagaggccgttgaagagcgagacctgccagggctgcgagccgcgcgcgcacggggagccataggcttcggggtccaagcgcgtgtcgttttgggggagcagcgccgcctctgcggctggagaaagaaaggggacggaatcaaagcacggagggcagggtctgggtttggggttggagctgggctgtggcactggactgcgttcggggacgggggacgcagccagaacgcgagggtggtagggaaatattgggggtttcgcgtgcaccgaagggaatgggaggagaagaagcgcgtgaaagtggaaggaagctgggatagggtagcgtggagtaatgagacagaatagggtgggtctggagggcagggactgaacgcagcgcgcctggagagctggctagaacgtcgctggtcgatagaggggcggggattgaacgcggcggggaggtaagggtgcggggatagaactcggggatcggggagaggaaggg

SEQ ID NO: 132070 - DNA, 1278 bp, Homo sapiens; identical to SEQ ID NO: 56545
  chr19:51521989-51523267
  hyper

SEQ ID NO: 132071 - DNA, 118 bp, Homo sapiens; identical to SEQ ID NO: 12555
  chr19:51527587-51527705
  hyper

SEQ ID NO: 132072 - DNA, 610 bp, Homo sapiens
  chr19:51568029-51568639
  hyper
cgggaggggctgctgcgagggtattttgggaggtgaagggtctggggtcggagggccaacctcagccgggaaaccaggtcacccagggacaagcaggaagagctctgagctgtccccactggacccggccccgagtgggcggggggcggagctcgcggctcccacgccccctccccctccggcctgacccctcctaccattgtcccgaatggccgccgcgcctccacccccgcgcattcttacctcctgacaaggccaaggtcagggaggcgatcactagggccaggggccacatggctccgggatcgggaggggagggcagggcgggcggggcctgaggagaaggtgaagggggtgttgagggcgtgcccggaacctccgcgtctgaaacctctctgctcctgaatgtctcctcgcctcattcactcttgacagccctgaccctggaatctgccccccgcctccaattccatccttggtgggggtgcagtggcgaggtgggaggaacagtgtgcaacctcctggggctccggcgtgcagcccctcaccccaggaagccgtccctcctcccctgccctctggcgagctgggtggtcggtgcactctcgcc

SEQ ID NO: 132073 - DNA, 30 bp, Homo sapiens
  chr19:51611657-51611687
  hyper
cccggaagtgactccgagactaccactccc

SEQ ID NO: 132074 - DNA, 30 bp, Homo sapiens
  chr19:51612160-51612190
  hyper
gctgtcgtgatgcgcgtgctggagacccag

SEQ ID NO: 132075 - DNA, 31 bp, Homo sapiens; identical to SEQ ID NO: 12557
  chr19:51815072-51815103
  hyper

SEQ ID NO: 132076 - DNA, 45 bp, Homo sapiens
  chr19:51830365-51830410
  hyper
cgcaccgcgctgggccgggccgccctcctgcgctgcgaagccatg

SEQ ID NO: 132077 - DNA, 204 bp, Homo sapiens; identical to SEQ ID NO: 12558
  chr19:51830798-51831002
  hyper

SEQ ID NO: 132078 - DNA, 180 bp, Homo sapiens
  chr19:51831120-51831300
  hyper
cgcctccatgcggctcctgcgtgcgtcttcgggcggggcggggccgggaaggtgggcggggccgggggcggggctagggaagtggagacgccgggaccgcccttcaggctggccctgaacttaggagatggacgctgagactgaaaagcaatgcgagtaagaaaccgatccacgcaatca

SEQ ID NO: 132079 - DNA, 30 bp, Homo sapiens
  chr19:51842321-51842351
  hyper
acgagcagcggaagcggaggctgcggtccc

SEQ ID NO: 132080 - DNA, 217 bp, Homo sapiens; identical to SEQ ID NO: 12560
  chr19:51842631-51842848
  hyper

SEQ ID NO: 132081 - DNA, 30 bp, Homo sapiens; identical to SEQ ID NO: 56552
  chr19:51843586-51843616
  hyper

SEQ ID NO: 132082 - DNA, 30 bp, Homo sapiens; identical to SEQ ID NO: 56553
  chr19:51869338-51869368
  hyper

SEQ ID NO: 132083 - DNA, 420 bp, Homo sapiens
  chr19:51869574-51869994
  hyper
cgccatcttcccgccgcagccacttacagggtcagcccgcaccctcagcggctcagtccagaagccccaccacccccgccccccgcgcccctctctgcgcctgcgcgcagcacggtcagccagtcaaccgctgcagagcccgcctccccgacagaggaccaatcgagaggccggaaggaagggaggtgtggcaagcaatgcaaaccaatgggaagcggatctcggggagcgagcgggacctggagagagaaggaaaggcctggcggagagggcagggcagagaactaggggaaaggtcgtgcactggagggaagcgcgcccggagtttatagatcctcccggtcctataaacacttcccggtatccccggatctgctctccctctccagatcccccacttcttcccggcctctccaagtc

SEQ ID NO: 132084 - DNA, 59 bp, Homo sapiens
  chr19:51870567-51870626
  hyper
ctctgccgggtctgcgggagtcgttagtgtgttggggagtccccgagaggtccccgggg

SEQ ID NO: 132085 - DNA, 30 bp, Homo sapiens; identical to SEQ ID NO: 56555
  chr19:51871218-51871248
  hyper

SEQ ID NO: 132086 - DNA, 165 bp, Homo sapiens
  chr19:51897345-51897510
  hyper
actgctcaagtctagcgtcatgggattgttctagcttgttcttttattgcttctcctattactaagatcaggatctgacgccatttggaaaccagggtctgaccgcttaccacgtacctcgccctttaaggctttttctgtcccgtcccccgtgcccctgcggcg

SEQ ID NO: 132087 - DNA, 30 bp, Homo sapiens; identical to SEQ ID NO: 56556
  chr19:51897776-51897806
  hyper

SEQ ID NO: 132088 - DNA, 261 bp, Homo sapiens; identical to SEQ ID NO: 56557
  chr19:51925113-51925374
  hyper

SEQ ID NO: 132089 - DNA, 30 bp, Homo sapiens
  chr19:52035272-52035302
  hyper
acagcctcatcccacgccatgagaaagtca

SEQ ID NO: 132090 - DNA, 30 bp, Homo sapiens; identical to SEQ ID NO: 56558
  chr19:52056549-52056579
  hyper

SEQ ID NO: 132091 - DNA, 480 bp, Homo sapiens; identical to SEQ ID NO: 56559
  chr19:52074271-52074751
  hyper

SEQ ID NO: 132092 - DNA, 654 bp, Homo sapiens
  chr19:52097284-52097938
  hyper
cccgagagttgcgcacgcgtggagatctgcaaaacgctccctttcagctccgcgcatgcacagagaccccaccccgcaagtccttgcccttcggcctgggcaggcgtccactcccatggctgcagggcgcgccgaagagcccactctgcatccccgagacgcggcccaatcctaggaatgtgcttagcgcaggtgctatcttcccttttcacattcccaatctctttctccgccccctcaaactcttgccatactcccacaacagcagaaaatctgaaaaaaaagtccatcccatctttgcactgacagcagtgcacagcagctggcagagaattctggcacggctattgtgcttgcgcaggcgcagacgggaagcgggccggaccggcctagtacactctgggaggcgtgcgcagaatgcgcagcgctgccgcgaggatctctgggaactgtaggcccagtttgtccgagagccgcaagtgtttcgggacgacgcaacgcaggggcacctgggagtcgtaggcggatgggcccaaagccttccgggagtcgtagtccttccgcccgctcctcgtttctttggaggttggcccttccagctccagttctgcccaggtgagcgcccatcccgcggccggccggtcctggcccttt

SEQ ID NO: 132093 - DNA, 31 bp, Homo sapiens; identical to SEQ ID NO: 12565
  chr19:52160024-52160055
  hyper

SEQ ID NO: 132094 - DNA, 30 bp, Homo sapiens; identical to SEQ ID NO: 56562
  chr19:52193761-52193791
  hyper

SEQ ID NO: 132095 - DNA, 749 bp, Homo sapiens
  chr19:52207057-52207806
  hyper
aaaaaaatacataaataaaagcagtttctaggggtaggttatgcgtaagggtttaaggagtgaggggaaggggtgcgtttagggcaggggagcgagaaggctcgggggcgggctcaaggctcagggccaggactccagggggcgtggtctggctcggggggcggggcttgtaggttactcagtggcaagccggagttgaggcgtttaaacccgcgtgtcccgcagctccggactcaggacttgtcctatttccgagatatgccgcgggccgaaggatacctggcgcggatccggccggctcagctcacgcaccgcgggacgttctcctgcgtgatcaagcaagaccagcgccccctggcccggctctacttctttcttaacggtggggcggggcgcggccgcgtgagtgagcggggtcgggagaggggtggggctcgtgcctggctgacgtgcgcgcccccgcagtgacgggcccgcccccgcgggcggagacagagttgcaggcctcgttccgggaagtgctgcgctgggcgccgcgggatgccgagctgatcgagccctggaggcccagcctgggcgagctgctggccaggcccgaggctctgacgcccagcaatctgttcctgcttgcagtcctcggggccctcgcatcagcgagtgcgacagtgttggcgtggtgagttctggggactccggagccccagcatctagctccccgctgtctcagatcccaccgagaagtctgggtt

SEQ ID NO: 132096 - DNA, 394 bp, Homo sapiens
  chr19:52222529-52222923
  hyper
gctgcgccacgcacacgcacctgcgagtcctcaccagcgcctccactgccagccgcccaggatcctccgcctccacctcccgataggctccggcgcccaccgcgcccgccgccgcgggttcccagggctggtggtagttgccgtcccacacgtacgtggcggggtcctcgtcagcgaagacctcgcggaacatgtcgaccatgtagaggtcctcggcgcggttgccatccaccaccatgaggacgcgcagccgcgcgcgcgggtacagcagggcgcgggcggacgccaggcactggcgcaggtacgcggggtcctcctggtaggcggagatggtcagcgccacactgcgcgcggtggctgcatccagcggcccccgcgccgccgccgccacccg

SEQ ID NO: 132097 - DNA, 252 bp, Homo sapiens
  chr19:52390957-52391209
  hyper
gaaacgaactccgagcgaggactccccgagagctccccgcaacacggacctcacgcgctagcgaacaacagaaaaaaaaaagcgcgctctccctgcccctgaaacattcccagaagcccacgcagaccagaccgatgacctgtctccactgctggaggcgagtcagggacccgaagtctctaaacactcgcctctacccgccgccccgcgaaccccacacactgcagacgcgacactcgcaagtttcgggga

SEQ ID NO: 132098 - DNA, 743 bp, Homo sapiens
  chr19:52407643-52408386
  hyper
cagccggcaagggtgggcggttatagtttcacaactcaaccccagccaggggcctgggcttgtaaaataccagattttacaagcctctgagccccacatgcctgggcctccccgaaacacttaacacacatccccgattcaccccaaaacctacaccacacaccctcgtacgctgcccagcaccccggcttcatcaccgactttaaactgcagcatttggagtgataataatggcgtcggtgataaagccggcgtgctgggcagcgtccccctagagttctccatccagtgatccagaggcctactaacagagtgaccctcagagaccccaaactctgacgccgagtctcagtcgctgaactcgacagacctttaacgcccgaccacaagaactctcccacgccggaccgcaaaggcaccccaacccaaaggctccaccgcccaggccgccagctctccccacaggctcctcagaagctccctacccctttaacctactccacggagagacccaaacactcacctgattttcttctggctacacctaaattccctgaatgcttcctttcctggcccttaaaccccggcactggcctatggcggcggacgagggcgcgagtcaattctgccgcgctaggacgatgggacatgggcttctcttcgaggaggtaacatgtccgcgccctgagccacggctctctgggcgcggccatcttggtagatctgccgtacagaagggaaac

SEQ ID NO: 132099 - DNA, 483 bp, Homo sapiens
  chr19:52430242-52430725
  hyper
tcctccacatgtagctagatgcgttttcgcggtatatgactcagggtgcgattgctctttttcctctgtggagaaagcgttttcacttgtacggacacctaagtgttaagatggccgcgcccattgtgtcattcccgtcattctttgtgcaaagcggatgacttttctccccagcccgctaaggtgcacgtagccataccatgtttgtcttggctaagctcgaccctctgaaaataaatgaaacttgggcgcaggatttaggtgccaaaatatggagttcttcaccgtcccgcgctatccctgaatacttgggcagaaaaggtccactttaccttccgtacgtgcaggattcaaagatggctgcctccagtatccgtgacgagaggacgcgaacttactacctcccagtcgtccgtgctccgtacacctgcaacttcagaccttcctcggccgccgtaggccggcttggaggctgggggaggg

SEQ ID NO: 132100 - DNA, 304 bp, Homo sapiens
  chr19:52489405-52489709
  hyper
ctgaacttgaccccccgatctgtaaatagccaccccaaggatcagaagagtagatatatggtttcgaactaatgctgggggctgtgtcgccttttgccccagtaaccgaggttcgaacctcaacccaggacccagggctccaaagtctcgaaagcttcagccctcacaagcctttgtaccacagacactggccccatgcctcttactcatccgaaccacggaccagacactctacagcgatggacatcctcccagactccaacatcactgagttccaaattaaatcctgaacccgaagcagacg

SEQ ID NO: 132101 - DNA, 547 bp, Homo sapiens
  chr19:52489782-52490329
  hyper
cgttgatcactacagacccttagtcactgtactcacaccaaaggcacgcggaccacagacagggggatcacagactcccaccaggtacctcccaaatgcctataccccggcgctccccagtcttcctgccaaaaactatgtggtccagggtacaccacgtcctcagatctcccaaaccttccactgagacaaaacctgaactaggacaaaaaactttcagggacaaaaccacacactgacctctattttctccagatacacaagaagggcctcaacgttacacttccgtaaactgctcctacttctggagtcctcgcacgggtttatggtccacctacggcggccgaggagaacctaaaatgtttaaaagagcaaggacaagcgcatttacggcatttcctactctgtaaaatggccgcgcccatagccgtggctcctgacggcagccatgtttgaaaattggacgcacagaaggcagtggcaggtttttgagccaggagccagggaagaagagaagtcactgaaatcgcctcgtttcctggcactt

SEQ ID NO: 132102 - DNA, 569 bp, Homo sapiens
  chr19:52511223-52511792
  hyper
ccctgcgataggaatcggacccacgctaagctcctgaaagaattccactggcgtcgccaaacgctggcgccgacagataccagtccatcaccactgtccacgaacacgcccagccacggacagaatttcctcccccgtcaccacagcgaccacccagtgactgaacttacttcccagaacttggtgggctccggcctcatctctcggcctcctcagtgcctgacggcgactatccagggtcggaggcgttcccagcgtttgcgcagatgcaagatggccgcgccctcgtcgccttggctccatgggggccgccatctttgagtatctgacgtacacaaggcaaagggcgcgttttggcgctggtgaccgggggtgaccgggggtgaccggggatggccgggaagatgaaagagcactgaaactgtcccatttcctggcacctcaacccttcataaatacgggtccatatacagaggctccagtttacacaagacaaaaatggcgtggaggtaaatccctttcagcagctgaatagaaggctaagatggccgcgacgtttacactttgta

SEQ ID NO: 132103 - DNA, 822 bp, Homo sapiens; identical to SEQ ID NO: 56569
  chr19:52531284-52532106
  hyper

SEQ ID NO: 132104 - DNA, 309 bp, Homo sapiens; identical to SEQ ID NO: 56570
  chr19:52551810-52552119
  hyper

SEQ ID NO: 132105 - DNA, 486 bp, Homo sapiens; identical to SEQ ID NO: 56571
  chr19:52552233-52552719
  hyper

SEQ ID NO: 132106 - DNA, 30 bp, Homo sapiens; identical to SEQ ID NO: 56572
  chr19:52598638-52598668
  hyper

SEQ ID NO: 132107 - DNA, 30 bp, Homo sapiens; identical to SEQ ID NO: 56573
  chr19:52598984-52599014
  hyper

SEQ ID NO: 132108 - DNA, 191 bp, Homo sapiens
  chr19:52642996-52643187
  hyper
gcctgttgcaggggcgaaggggctatgggtattttaaggtccgtagcgatccccagatcactggtacggagaagtgaggactgcaaagtgcacgtttaatccaggcagacggagcgaagtaatgtttaatccacgtagactgaaacacacacacagcgataaggcctttccctggcgcaatctgcttccgg

SEQ ID NO: 132109 - DNA, 115 bp, Homo sapiens
  chr19:52643386-52643501
  hyper
tttcatggggtaagcggggccgaaatagagcctgttatttactctggttcacaggcagcatgtctttggttttctgactacttcttgtcctgtgaagcagcgttgctgcctgcct

SEQ ID NO: 132110 - DNA, 36 bp, Homo sapiens; identical to SEQ ID NO: 56575
  chr19:52674676-52674712
  hyper

SEQ ID NO: 132111 - DNA, 48 bp, Homo sapiens
  chr19:52674934-52674982
  hyper
ccaggtgggctaagcgggacgggcggtgtgggcgggacctgtttggtg

SEQ ID NO: 132112 - DNA, 59 bp, Homo sapiens
  chr19:52693144-52693203
  hyper
aaatcggaagtgggcgggacttcacaagtccggaccaaagaaacgcgagcttagccctg

SEQ ID NO: 132113 - DNA, 161 bp, Homo sapiens; identical to SEQ ID NO: 12571
  chr19:52715131-52715292
  hyper

SEQ ID NO: 132114 - DNA, 30 bp, Homo sapiens
  chr19:52773241-52773271
  hyper
ttcgggaggggccgcgtcctctgcctggtc

SEQ ID NO: 132115 - DNA, 220 bp, Homo sapiens
  chr19:52800100-52800320
  hyper
cccgaccgcacggtcggcttaagattaactttaatagcaggaattttcctggatctaatcattagccgactttgctcagtcccggcaagagtacagttccgagacagctgagttgctccagtctccttgacaggtctccccggcaaaacccggaaaacagaggcactggaagcgaggcggagggaagcgcaagccccactccgccccgcccccgcccccg

SEQ ID NO: 132116 - DNA, 639 bp, Homo sapiens
  chr19:52800379-52801018
  hyper
gcccccgcccccgccccgctcggacccctccgctgcgcgcgcagtttcccacaaacccggaagcggatcgcgtggagtgaaggtcacgccgcggcgcgtgagtttccctttgtgtaaattaatctgcgcttcccaactcccccgcgcttctgtacccgggatctgaggggccacacagaccttgaaatcctcgcaccgctccctctaccccgaccaaattcaggcgtctccgtgagagtcaggcggtcgcttccctgtgtgtttaaatcgctcggcggcgggtcctgtcccccgtccttctgccacagggccatgtagtcacctcctgtcgcggagttttcctgtttcaagtccttcagtgatgcttacatccgccccgcacagcgtaaagtcctcccccgctaggcggattccggtctatgcggtcccccaagcctcgcctttgttggccctggagcacagcgctccaatctcaatccaggagaagccgcgtcttctgcccagtgctgggattctgcagacgccacccatctcttgatccagaccctacctttaccctccttgatacggggccccgctactccccaggcctcctcttcccagacaccgcttctcctaaccctgcgtgtggggaggtga

SEQ ID NO: 132117 - DNA, 334 bp, Homo sapiens; identical to SEQ ID NO: 56580
  chr19:52839383-52839717
  hyper

SEQ ID NO: 132118 - DNA, 340 bp, Homo sapiens; identical to SEQ ID NO: 56581
  chr19:52839741-52840081
  hyper

SEQ ID NO: 132119 - DNA, 617 bp, Homo sapiens
  chr19:52872916-52873533
  hyper
gggtagctaggaccacatgcgagcgcccctacagccgatttaaaattaattttaatagcaggaattttcctggatctaatcatcaacaaactttccctctgccgggacacaatctatttccagatagctgagttcttccagtctccacggcaggtctagcctccaaaacgagacgagctgggagcgaggcggagggaagcgcaggctccgcccaatcccacccgggcctggcctcgcctcgcctctcagctgcgcgcgcagtttcctggagacccggaagcagattacgtggagtgacggtcatgctgcggcgtgtgagtttccctttgtttagattaaatctgggatgctgagtcccctcgcgcttctgtacccggcatctcaggggtcacacagaccttgaaatccccgcatcgctccctccaccccgactaaactcagacgttctaatgagagtctggcggtcgcttccctgagtgttaaaatcgctcggaggctggtcctgtccccggtctttcaccacagggccatgtagacagctcctgtcgcggagtttgcctgcttcaaatccttcagtgacccctagacacggcccgcgctgcgtaaagttctcaccc

SEQ ID NO: 132120 - DNA, 22 bp, Homo sapiens
  chr19:52873570-52873592
  hyper
cgccctcttttcacaggcctgc

SEQ ID NO: 132121 - DNA, 255 bp, Homo sapiens; identical to SEQ ID NO: 56584
  chr19:52900860-52901115
  hyper

SEQ ID NO: 132122 - DNA, 208 bp, Homo sapiens
  chr19:52901156-52901364
  hyper
cgtgagtttccctttgtctatgttaagtctaggctagccagttcttctctgcttctatacccgggagctgaggggcatgcagaccttgaaatcccggcaccgctccctccaccccgagtaaattcagacatcctttgagagtctgggagtcgctttctgcgtgttaaaatcgcttggaggctggtcgtgtgcccggtctttttgtcat

SEQ ID NO: 132123 - DNA, 397 bp, Homo sapiens
  chr19:52956714-52957111
  hyper
cttctctcgggtctcgcccatccctggcctcagctgcgcgcggtttcctggaaacccggaagtgaatcatggggcgtgaactcgcaagcgcagtttcctgaagacccggaagccgatcgcgtggggagccggtcttggagcagcgggtgagtttccctttgtctagattagatccgcttccagcgcttctgtacctggtgttggcggaggggttcttacggatcttaaaatcctcccgccgttccctccatcctaggtatattaatacgtcgccaagaaattcggaggttaaaatcgcttggaggctgctggtcctttccctgagctctctgccttcgggccacgtagacgcttttcgtcccgtttacctgcttaaaaccctttactgaccactcct

SEQ ID NO: 132124 - DNA, 30 bp, Homo sapiens
  chr19:53030462-53030492
  hyper
ctaagcactccgtcccgcacccctggcggt

SEQ ID NO: 132125 - DNA, 39 bp, Homo sapiens
  chr19:53030695-53030734
  hyper
actttctggcgctctcgcctccacaacctaaaaacagag

SEQ ID NO: 132126 - DNA, 735 bp, Homo sapiens
  chr19:53030790-53031525
  hyper
cgccctctgccggttctaaagggcaaggtctcagcgcctcgcgccccgccgctacctcgcccaggccccgcccacctcctcccacctcccgcccaggcctggcttccgtcctgcgcgcggagattaacgcaaacccggaagcggatcgggtggagtgaaggtcacgtcgccatggtgagttttgctctgtgttgcattaagtctccgcttcccaggtccccgccgcttctgtccctgggacgtggggtccccacagacctggaaattctcgcccgtcttccttcgcccagagcaaattgagacagcccagtgagaggccgggtgtcgcttcctttcgggtttaaagtcgtctggaggctggtcccgtcccgggtctgtctgctatagggcaatgtatacactttctattgcgtagtttttctgctcaaaaccttcttctgactcttccctcctcgcgctatttaaagtcttcacccacgaggtggattcttgcccggggcgcacctcccagccacccctcgtcggcccctggagcgtcgcgccgcagccccagtcccagggaggccgcgtcctctgcctggtcctgggatcttgcagaccccatccttctcccaaggcgccgtcccccctcctcccacctccctactcgtgccagagcctgcggctccccaggtctctcctccgcagtcaccgcttccattgaacccacactgggaaggacgcagggccctgtcc

SEQ ID NO: 132127 - DNA, 459 bp, Homo sapiens; identical to SEQ ID NO: 12580
  chr19:53073313-53073772
  hyper

SEQ ID NO: 132128 - DNA, 240 bp, Homo sapiens; identical to SEQ ID NO: 12581
  chr19:53073819-53074059
  hyper

SEQ ID NO: 132129 - DNA, 1094 bp, Homo sapiens
  chr19:53104068-53105162
  hyper
agcaggtggtgacttcgctcctccctggcctgagcactccgtcccgcatcccaggcggtggccctagggaagtctctgaagctgagcacagggtggactctgcccccaccgccgacccgccctccccgaccccgagtgaatggagaatagaaagggagaggatttctgttctgtcctgtgggccctcagtatgaaatcgtagttctgcccaggcaggactttgcatttcacattctagtttgcatccccgttccagacaattccagggcttttgactcatgcctcagccttcccggccagtctcccttccaaaacccgaaaaacggaggcgctgggctcaagactgactctgtcccgccccggccccgccctctgccggttctaaagggcaaagtctctccgcctcgcgccccgcttccgcctgcccaggccccgcccacctcctcctggaccccgcccaggcctggcttctgtcctgcgcgagcagatcagcgcgaacctggaagcggagagcgtggagtgaaggtcccacggcagcgcgtgagtttctctctgttttatattaagtctgtgcgtcccaggtccccggcgcgtctgtacctgggacgtggggtccccacagacctggaaattctcgcccgtcttcacccagagcaaattgagacttccctttgagagtccggggttcacttccttttgggtttaaaatcgccttgaagctggtgcggtctctggtcttgctgctatagggcaatgtatacactttgtattgggtagttttcctgctcaaaacctttttctaactcctcccgccccgcgctttttaaagtccttacaggtgaggtggattcccgccctgggcgcctcccaccctcgccttcgacggcccctcgagtgcagcgccgtgcccccagtcccgcggaggctgcgtcctctgcctggtcctgagatccttcagaccccaccattgtcttaaggcgccgtcgtcccccacctcccttctcgtgccgggccctgctgctccccaggtctcctctccgccgtcaccgcttcccctgagcccgcgttgggaaggtgtccggggcctgtcctgt

SEQ ID NO: 132130 - DNA, 725 bp, Homo sapiens; identical to SEQ ID NO: 56592
  chr19:53140893-53141618
  hyper

SEQ ID NO: 132131 - DNA, 136 bp, Homo sapiens; identical to SEQ ID NO: 12584
  chr19:53141647-53141783
  hyper

SEQ ID NO: 132132 - DNA, 815 bp, Homo sapiens
  chr19:53193124-53193939
  hyper
tcacaggacaggccccgggcacctccccaacgcgggctcaggagaagcggtgactgcggaggagagacctggggagcagcagggcccggcacgaggagggaggtggggggcgacggcgcctgaggacaagggtggggtctgcaggatcccaggactaggcagaggacacggcctccccgggacaggggccgcggcgctgcgcttcagaggccgacaagggcaaggctgggaggtgcccacggcgggaatccacttcgcgggtgaggacgttaaaaagcgcggggcgggaggagtctgaaaatgattttgagaaaaaaaaaaaaaaaacaacaacaactacgcgataggaagtgtatacattgccctagagcagaaagacaggggatgggaccaacctcagggcgactttagacccaaaaggaagcgacttccagactctcacggggatgtctctatttgctctgggtgaagacgggagagaagttccagatctgtggggaccctaggtccgagggacagaaacgctgaggacctgggaaatgcagacttaatacaaaacagcgaaactcaccgccgcggtgtgaccgtcactccacgcgatccgcttccagatttgcgagaatctgcgcgcgcaggacagaagccaggcctcggcgggccccgcgaggtggtgggcggggcctgggccgggtggcggcggggcgcgaagcagagagactttgcggtttagaaccggcagagggcggggccggggcgggacctgtgtgtctcacatcctggctcccagcgcctctgtttttcgggtttgggaggcg

SEQ ID NO: 132133 - DNA, 30 bp, Homo sapiens
  chr19:53194235-53194265
  hyper
gtgcaggcgcgaaggcgggagcctgaggtc

SEQ ID NO: 132134 - DNA, 841 bp, Homo sapiens
  chr19:53237618-53238459
  hyper
tgcatcccggaggagcgcattttccacgccctggagctccgcaggcaagaataccccgtgccgcaggacaggcccctgggacctccccagtgcaggttcaatgaaagcggtgactgcggaggggagacctggggagcagcaggccccggcatgaggaggaaggtgcggggcggggggggggggcgcgacggcgccttaggaccaggatggggtctgcaggatcccaggacctggcagaggactcggcctccccgggactggggctgcggcgcggcgctcccggggctgaggagggggaggctgggaggcgccctgggcaagaatccacatcgcgggtgaagactttaaaaagcgcggggcgcgaggagtcagaacaaggttttcagcaggaaaactacgcaacagaaagtgtatacattgacctatagcagaaagaccggggacgagaccagcctcaggacgactttaaacccaaaaggaagcgaccctcgggctctcacggggatgtctcaatttgctctgggcaaaggaagacgccggagaatttccaggtctgtggggaccccacgtcccagggacagaagccctgggaacctagttagcgcagacttaatacaacacagagcaaaactcaccgcggcgatatgacctacactccacccgatccgcttccgggtttgcgttaatctgcgcgcgcaggacaaaagccaggcctgggcgggaagtgggaggtaggcggggcctgggcgaggtaggggcggggcgcgaggcggagagaccttgccttttagaaccggcagagggcagggccggggcgggatctgcgcgtctctcagcctcg

SEQ ID NO: 132135 - DNA, 30 bp, Homo sapiens; identical to SEQ ID NO: 56596
  chr19:53289509-53289539
  hyper

SEQ ID NO: 132136 - DNA, 30 bp, Homo sapiens
  chr19:53360197-53360227
  hyper
aagacgcctgcatctcggagaagcgcattt

SEQ ID NO: 132137 - DNA, 160 bp, Homo sapiens
  chr19:53360443-53360603
  hyper
ggactggggtcgccgcgctgtgctccaggaacccaggagagtaaggctgggaggcgcacagggtgggaatacacctctagggtgaggactttaaaaagagccgtgcggaaggagtcaaaaaacggttttgagcaggaaaactacgcgataggaaacgtat

SEQ ID NO: 132138 - DNA, 35 bp, Homo sapiens; identical to SEQ ID NO: 56597
  chr19:53360912-53360947
  hyper

SEQ ID NO: 132139 - DNA, 696 bp, Homo sapiens
  chr19:53400383-53401079
  hyper
gctttcttgattgcatatattcgttttccaggagttggaactaggtagcaacaccgcacaaggagggaggtggggagcgacggagccttcggacaggggtggcgtctgcaggatcttaggaccaggcagaggacgcggcctcccgggaaccggggttgaggcgcggcgctcctgaagccgccgagagcgacggtgggaggcgcctagggctggaatccagctcgcgggtgaggacttgaaacagcgcgaggcgggaggacaggtcaggaagggttttgagaaggaaaattccgcgataggaggtgtctgcacgaccccactgcagaaagaccgaggacgggacctgcctcagggccactttaaactcgaagggactcacggactctcacccggacgtctcaatttgctctgggttgagaaagaggggccgcaatttccaggtctgtggggactcaacgtccccggtatagcagcaccacaggactgggaagcacacataaaacagagcgaaactcacgcgctgtggtgtgaccttcagtccctgccatccgcttccgggtctatgccaatcagcgcaggacagaggccaggcctgggcgggacccccgagaaggtaggcggggcctggactaggccgggatgagacgcgaagaggtgggcggggcctgaacaaggccggggcggggttgagaaaca

SEQ ID NO: 132140 - DNA, 755 bp, Homo sapiens
  chr19:53426104-53426859
  hyper
ggaaagcggtgactgcggaggggagacttggggagcaacagggcccggcatgaggagggaggtgggggggagatgacgccttcggacaagggtggggtccgcaggatcccaccaccgggcagagaacgcggcctccctgggactgtggtgtcagcgctgggctccaggggccgacgagggtgaggctgggaagcgccagagcagggatccacctctcgggtgaggactttaaaaagcgcggggtgggaggagtcaacaaacggttgtgaacgggaaaactacgcgatacaaactgtatacattgccctatagcaaaaagaccgaggacagggcagcctcagggcgactttaaacccaaaaggaagtgacttccggactcctaggggaatgtctccatttgctcttgttgaaggaagaagggcgagaatttccaggtctgtggagaccccacatcccaggtacagaattgccggggacctggaggcacagcctcaatacaacacagagcaaaactcaccgccgcagtgtgacttccagtccacgcgatccgcttcctggtccgggcgaatctacaagcacaggacagaagccaggcctccgtggagccaacgaggtgggcggggcctgggcgaggtaggggcggggcctgggcgaggtaggggcggggcgccaggcggagagacctgccctgtagaaccggcagacgcggggcgggggcggatctgtgcttctctcagccgcgtacctagccgctg

SEQ ID NO: 132141 - DNA, 706 bp, Homo sapiens
  chr19:53445361-53446067
  hyper
cgggctcaggagaaacggtgattacggagggaagacctggggagcataagggcccggcacgaggagggaggtggggggcgacggcgccttaagacaagactgggaggcgcccagggcgggaatccgcctcgcggtaaggactttaaaaagtgcgggttgggaggagtcagaaaaaagttttgagcaggaaaactacgcgatgggaagtgtatacgttaccctatagcagaaagattcgggacgggaccggtctatggtgactttaaacccaaaaggaagcgacccccagactctcacggggacttctcaatttgctctgggtaaagaaagacggaggagaacttccaggtctatgaggaccccacgtcccaggtacagaagcgcctgggacccgggaagcgcagacttaacacaacacagagcaaaactcacccccgcggtgggaccgtcactccacgcgacccgcttccgggtttgtgcgaatctgctctctggggacagaagccaggcctgggcgggacccgcggggaggtaggcggggcctgagcgaggtaggggcggggcgcgaggcggagagaccttgcccttcagaacagacagagggcggggcgggggcggggccggggcgggacctgtgcgtctctcagcctggctcccagagcctcaatttttcgggttttggaggcgagaccggccaggaaggctg

SEQ ID NO: 132142 - DNA, 157 bp, Homo sapiens; identical to SEQ ID NO: 56602
  chr19:53446325-53446482
  hyper

SEQ ID NO: 132143 - DNA, 1089 bp, Homo sapiens
  chr19:53465692-53466781
  hyper
ccaggagtggccacaaagcaccggccaccctggggctgcggggctgcaacgctgcgctccaggggccgactagagcgaggctgggaagcgctcttgcccagggcaagaatccagctccgggtgaggacttgaaacagcgcgaggcgggaggacgcgtcagaaagggttttgctaaggaaagtttcgcgacaggaggtgtctgcacggccccactgcagaaagaccggggacgggaccagcctcagggcaactttaaactcaaaaggaagcgactcacggactctcacccggacgtttcaatttgctctgggttgagaaaagaggggccggaacctgcaggtctgtggggaccccacgtcccctatatagcagcaccagacaactaggaaacgcacacgccgccgtgcaactttcagtccacgccatccgcttccgggtctgtgccaatcggcgcaggacagaagcgggacctgggccagatccccgagaggtgggcggggcctgggcgaggccggggcggggtgcaaaggacaaggggcccggcgcggaagagaagagtcttgggctgggaggagtccgcgggggcgggaaaggggcggggcctgagcttttctccatctcgctctccgcgcctctgttttcaaggttttagaggtgaaacccgccagtgaggctggagcagctcagcagtcagggaaatagtacctccctgagaagtcgccgtgtggcggtaattggatccgggaaagttccttgctattgaaatttattttagcaatttaattccaaagcctggaagttgtctacggcaggaatgcaaactagaatgcgaaatgcaaagccttgcctgagcgaaaggtacaatttcatgctgacggtccacagaacagaatagaaatcctctccctttcaattctccattcactggagtgggagagtccacactgtgctcagctcctgagacttccctagggccaccgtctggggtgcggagcagaggagtgtgcttaaacacagcagggatgcgggcggggtggcaggagtctggggtccccgctactcaggaagcaggggcgagaggatcgctga

SEQ ID NO: 132144 - DNA, 388 bp, Homo sapiens
  chr19:53496054-53496442
  hyper
gcgagcagcagggcccggcacgaggagggagttagggggcgacggctccttaagacaagggtggggtctgcaggatcccaggaccaggcagaggatgcggcctcctcgggacgggggaggcggcgctgcgctccagggaccgacgagggtgagggtgggaggcgcccagggtgggaatccacctctcgggtgaggactttaaaaagcacggggtggagggagtcagaaaatagttacaaacaggaaaactacgagatacgaagtgtatacgttgccctatagcagaaagaccggggacgggtctagcctcagggcgactttaaacccaaaaggaagcgacttctggactctcaccgggacgtcaaattttgctctggggattagccgg

SEQ ID NO: 132145 - DNA, 165 bp, Homo sapiens; identical to SEQ ID NO: 12591
  chr19:53496621-53496786
  hyper

SEQ ID NO: 132146 - DNA, 589 bp, Homo sapiens; identical to SEQ ID NO: 56607
  chr19:53496813-53497402
  hyper

SEQ ID NO: 132147 - DNA, 770 bp, Homo sapiens
  chr19:53561217-53561987
  hyper
ggcacctccccaacgcgggcgcaggggaagcggtgactgcgaaggggaggcctggggagcagcagggcccggcacgaggaggagggaggtggggggcgacggcgccttaggacagggtagggtctgcaggagcctaggaccaggcggaggacgcggtctgcggcgctgcgctccagggccgacgacggagaggctgggaggcgctcaggacgggaatccacctcgcaggtgaggactttaaaaagcgcggggcgggaggaggggtcaggaaagggttttatgcgggaagaagacgcgaatggcaggggacagggactggtctcagagcgagttttacccacatggcgaggtccgtatttacctcgggtgaagggcgcgatgcggggattttaaggtcagcagagcgggtgtggaaaagcgggacggcgaatcgaaggcttaatctacacctaggcacactcttgctcggcggtgtcaccttcacacaccgcgatccgcttccgggactccaagaaactgcacgtgcgcgcagagcccgggtagcctggggcggagcccggggagaggcggggtctgcagagggaccgcgggggcggggcctgtgcagttgtaaggtaaaaagcatagagttgtgtgggccccttctgttggaaagcaaaatgttttcttcccaccaagatgaaaacggtttatctcaaaactatttttgccagcaggttggacccgatcctgctagggagtctcctgcagctcagcggtctgggaactgc

SEQ ID NO: 132148 - DNA, 1171 bp, Homo sapiens
  chr19:53606065-53607236
  hyper
tcacaggacgggccccgggcacctccccaacgagggctcaagggaagcggtgactgcgaaggggaggcctggggagcagcagggcccggcacgaggaggagggaggtggggggcgacggcgccttaggacaggggtgggatgtgcaggatcccaggaccaggcggaggcgcggcctccccgggactgggtcggcggcgctgcgctccaggggccgacgagagcgaggctgggaggcgcccagggcaggcggtgaggactttaagcgatgcggggcgggaggaggagtcagtaaaggattttaagcaggaaaatcctgcttaaacgtttaaaaaaccgggaaaggccgtgtttacttggcccaaggcagaaagaccgggggcagggaccagcctcagggcgactttaacccaaaaggaagcgtctccgggcccacacagcaaggcctatttacctgaggtggagggtgcggtgcggagattttaagtccgtagcgacccccgggcatcgggtgtgcgaatgggggacggcgaggcgcaggttgagtctacacagaggaacactcatacgccatggtgtgatgcttgctccgcacgatccacttccgggtctgtgggcaactgcgcgaaggaaagcgaccgagcggcccggggcggggtccgagatgggcggaaccggaaaagggcggggcgttgagagagccgggctgaagcaggggccgccaggcagggaccccagggaaggaacggggaggagccaccggggaggggtggggagtgaccaagtggagggacccgggggcgggccggggaggagccgccggggaagggcggggaggaaccgcgggaagggaccgcgggggaggaaggcgaagggaccgcgggggagggaggcagagggaccgccaggaagggacccgggggagaggcggggctggacgggacacgttagggtctgcgatttcgtgtgatgcccacagcccagcgcccagagccatctgtagtgtcttgtggaacggcgtagatgtttcaaacggtttcaagttaaaagcacagttgtgtaggttattttggaaaccaaactgctttcctcttagaatggaggcggtttatgttgaaagcattttttgctagcgcgtttacccagtaatgttattgacgctgaagcagccca

SEQ ID NO: 132149 - DNA, 247 bp, Homo sapiens; identical to SEQ ID NO: 56611
  chr19:53635516-53635763
  hyper

SEQ ID NO: 132150 - DNA, 466 bp, Homo sapiens; identical to SEQ ID NO: 12597
  chr19:53635784-53636250
  hyper

SEQ ID NO: 132151 - DNA, 457 bp, Homo sapiens; identical to SEQ ID NO: 56613
  chr19:53661430-53661887
  hyper

SEQ ID NO: 132152 - DNA, 517 bp, Homo sapiens
  chr19:53662186-53662703
  hyper
tagcgagcccgggaactggctgcggaaacggggcacggcggttcgcaagtttaatccatactgagggacactcacgctcggcggcgtcacccgcacccaacacgatccgcttccggaactgcagaaaactgcgcgtgcgcggaaaagagcccgggcactctgggggcggggcctggggagaggcggggtctgcggacgaaacgctggggcggagctggggcggggtctgcgcttccctcagcctgcctagcccgcagtctcatttttcccggtttagaaacgctggagtgttcactatgtccccgggagcaccgttccaatttgaagcagttttaaggtgaaagaatagacttacgtggaccacttatgatagaaaccaaaatgatttcctcttaccaagttgaaaacggtttatgttaaaattgtttgccggcgggttggacccagtcctgctagggagtctgctgcagctcaggaacggggatctgggaatcggggatctcggtctgggaactgg

SEQ ID NO: 132153 - DNA, 650 bp, Homo sapiens
  chr19:53696014-53696664
  hyper
tcacaggacaaggcccgggcacctccccaacgcgggctcaggggaaacggtgactgcgaaggggaggcctagggagcagcagggcccggcacgaggaggagggaggtggggggcgacggcgccttaggagaggggtggggtatgcaggatcccaggaccaggcagaggcgcggcctccccgggactggggctgcggcgctaacgctccagtagctgactagggcgaggttaggggacggtaaaatcctgcacccacttcgcagatgaggacttcacagggcgcaggtcagtaaagggttttaagcaggaaacggcgcaggaaaggaggtgtctgcatggtctgaaggccgaaagaccgcgggcaggaccagcctgtgtgattttaacccaaagcgatgcgacccccagagtctcgcggcaaagtctgaatttacatggaatggagggagccgtgcggggactttaagggctatacgaacccccggacatcgggtacggaggagcaggggactccgaaacgcaggtttaatctagatagagggaaactcacgcggcgactaacagccttcactccaagagatctgcttccgggtttgcaagaaactgcccgcgcagtaggcaaaggggcgggttgcggtggggaaaggcca

SEQ ID NO: 132154 - DNA, 622 bp, Homo sapiens
  chr19:53700095-53700717
  hyper
ccaggtggctggaaacgcaggctcccacccgccttccttaggtccctcccggccccgccccctgcctgtccaggccccgccccacccttcgcgttttctccccagcccactccctgtgccggtcacgccccgcctaggccccgcccctaggccacctcagtcccctccggccccgccccctgccggtctctccctggccaggccccgccccttccccgcccccagaccgcccagtctccgctgcgagcggttttctgtagacccggaagcggatcgcggggagtgaaggctgcgccgccgagcctgagtttcgctctctctagattaaatctgcgcttcgcagtcccccttcttccatcccccgggtctggaggggtccctacagatcttaaaatgaccacaccgcgccctccaccccaggtaaattctgacgttgctgtgagaatgcggagatcgctttccctttgggttaaagtcgctctaagcctacttcctgaatctggtctttctgctttgcgctaggtaaacatggcctttcgtgtcttttgctgcctaaaatcctttaccgatttttcttcccgccacgcgggagggcacttttttttttaagacggagtctcgc

SEQ ID NO: 132155 - DNA, 507 bp, Homo sapiens
  chr19:53757804-53758311
  hyper
ttttaagcagagaaacgacgcggtgggcggtcggtgtccacactgacctaaagcaaaaaggtcggggccagtacccacttcagaacgattttaatccgaaatggacgcagatctctagaccctctcggagcgacgggactgggaacgtcttagggccacgccgcgagaggaatgagcaggttcggggttttaacctacagggcgaccccaaaacccgacagcggagcgtgggaacctgtggcccgcgaggcgcaggcttgaacccgaaagacggagactcacccgagagcgccagtagccccgcgagatccgcttccgggtcggcaggaacctgcgcgtacgcgagtgcactggggcggcgcaaggggcaagggcaggggcagggcgcggacaactgtggggatgggcgggcaaatggcggggatgggcggggacaatggcgggatgggcggggacaatggcgggatgggcggggcctaggggtcggactgccggacctctcctcgg

SEQ ID NO: 132156 - DNA, 236 bp, Homo sapiens
  chr19:53811770-53812006
  hyper
cctgctctggaagcgcgggtctgcttagatgtcctaagcaacttcttgcaccaggcgccgccaatgaggagttcggtggatttctaaccaagtcccatttcaccgagagcggagtcccgcggggaccaggaggttccttctcgctccgggagagggcgctcctgcccggcgtttgtagcggcggcttcctggctgcttcccagcgtggatttgcacccggtcgatttcctgcgggt

SEQ ID NO: 132157 - DNA, 232 bp, Homo sapiens; identical to SEQ ID NO: 56619
  chr19:53836985-53837217
  hyper

SEQ ID NO: 132158 - DNA, 253 bp, Homo sapiens; identical to SEQ ID NO: 56620
  chr19:53837281-53837534
  hyper

SEQ ID NO: 132159 - DNA, 1010 bp, Homo sapiens
  chr19:53868339-53869349
  hyper
aggaagggagccctgcgggagggggtgttactttgtcgcccaggctggcctggacccccaggttcagcgatcctcccgccctgcttcctgagtagatgggacctcaggctcccgcgcccgcgtccgcatccttgctgtgtttatccggcaggtggtgacctcactcctcgctggcctgagcactccgtccagcatcccaggcggtggctttagggaagtctctgcagctgagcacagggtggactctccctccggagtgaatggagaatagaaagggagaggatttctattctattctctgggccgtcagcatgacattgtaagttctgcccaagcagggctttgcatttcacattctactttgcatccgcgtttcagacaattccagggcttttgaatcatggatcggccttcctggccatctcgcctccaaaacccaaaaacagaggcggtgggagggaggctgagagacgcacagatcccgccccagcccagccccgccccgccctctgccggtactaaagggcaaggtctctccgcctctacccctacctggcccaggccccgcccacctcctcgcaggccccgcccaggcctggcttctgtccttccccgctcagacgcgcgcaaacccggaagcagatcgcgtggagtgaaggtccctcagcggcgcgtgagtttcgctccatcttgtatgaagtctgctcttcccaggtccccggcgcttctgtccctgggacgtggggtccctacagacctggaaattctcacccgtcttccttcgcccagagcaaattgagacgtccccgtgagagcccgggggtcacttccttttgggtttaaagtctccctgaggctggtcccgttccggatctttctgctatagggcaatatatacactttctatcgcgtagttttcctgctctaaacctttttctgactcctcccgccccgcgctttttaaagtcctcacccgagaggtgaattcccgccctgggcgcctcccagcc

SEQ ID NO: 132160 - DNA, 178 bp, Homo sapiens; identical to SEQ ID NO: 56623
  chr19:53869376-53869554
  hyper

SEQ ID NO: 132161 - DNA, 165 bp, Homo sapiens
  chr19:53934719-53934884
  hyper
gggaactcaggctcccgcccccgcgcctgaatccttgctgtgtttatccagcaggtcgcccctggctggcctgagcattccgtcccgcatcccagggggaggccctagggaagtctctgcagctgagcacggggtggactctccctcctgagtgagtggagaata

SEQ ID NO: 132162 - DNA, 105 bp, Homo sapiens
  chr19:53934943-53935048
  hyper
cccaggcagggccttgcattttacattctagtttgtatcccgttccagacaattccagggcttttgagtccatgcgtcagccttcctgggcggtctcaccttcac

SEQ ID NO: 132163 - DNA, 311 bp, Homo sapiens
  chr19:53935265-53935576
  hyper
ggtgccaccgcggcgcgtgagtttcgccctgtcttgtattaagtctgctcttccaggttcctggcgcttctgtacctgggacttgggatccccacaaacctggaaattctcagccgtcttccttcactcagagcaaattgagacgacctcgtgagaggccgtgggtcggttccttttgggtttaaggtccccctgaggctggtcccgtcccgggtgtttctgctacagggcaatgtatacactttctaacctgtagttttcctgctgtaaacctttttctgactcctcccgccccgcgctttttaaagtcc

SEQ ID NO: 132164 - DNA, 27 bp, Homo sapiens
  chr19:53970396-53970423
  hyper
ggggtgttactttgtcgctcaggctgg

SEQ ID NO: 132165 - DNA, 557 bp, Homo sapiens; identical to SEQ ID NO: 12604
  chr19:53970482-53971039
  hyper

SEQ ID NO: 132166 - DNA, 479 bp, Homo sapiens; identical to SEQ ID NO: 56626
  chr19:53971109-53971588
  hyper

SEQ ID NO: 132167 - DNA, 684 bp, Homo sapiens; identical to SEQ ID NO: 56627
  chr19:54023877-54024561
  hyper

SEQ ID NO: 132168 - DNA, 323 bp, Homo sapiens; identical to SEQ ID NO: 56628
  chr19:54024620-54024943
  hyper

SEQ ID NO: 132169 - DNA, 81 bp, Homo sapiens; identical to SEQ ID NO: 56629
  chr19:54206967-54207048
  hyper

SEQ ID NO: 132170 - DNA, 1002 bp, Homo sapiens
  chr19:54371621-54372623
  hyper
ggctggaatctggtacgtggaggtcctttaggaggggaagcgcttagggttaggtgtcctgggtttgggaatgagaatggaaggaattcagaattactgacccctccccatccaggggacagacagaatcggaactttgggctcctgaaaggccgagggaggggggtgttaagatccagccccgtgcttccgaagtgcagaaggagctgggaaaggaggagaagacagggctgcgtcccgcacctctgggtgccgagagccgaagctggggttccggggcccgattctcagcgtgagcgatgggtgtggcgtctggagtggacgagggaggacactgaggggctgggtgtggcccggagagtcgggtgcgctgcgaggaatcccggaggggtgtttcctcaccctccagggtctggctgcgcattcctgagctctgatctcgggcgatggctggaggccctaagggcggggtggacccctcccctcccctcccctcggcgcgcccccctcccctgcgcgcccccctccgcggctagcccaccttccgcgggggacagaatgagtgacgccctcgctcgtcctcctcccctgcttgggacggggcagtagcccgccttctagagcacgggacgctgggccagtcccgatttccttctccttcgagggtcctggaggggcgtgggggcaggcagtgtctggctccgggtggagcctcccaggtgctcccgcaagccccgaatggcgattagggaggccgtgggaggcgtagctgggcctcgggcctgacgccagcaccgcgtgcagtttccggcctggagcctgagcccctcagaggcccgggtccctgcccactccggtcttagagatgctcttgggggggctctcagcccatgtttatagggatccagaaatgcaggcctccaaccctgagagtcggggtccccaccccccggaaatccgggagagggcgggcagccccggaggcgggcgggggtccgggca

SEQ ID NO: 132171 - DNA, 417 bp, Homo sapiens
  chr19:54372682-54373099
  hyper
cgcggagacaccggctctggctgggccgcccgcctccacagccgccgcccagggttctcccgccactgccgcccgcacccccgcccccgcggggttaagatcacacacgcgcccacgccggcccgcggggcgtgcactttcgctgggttccgtccgccgcagcccaaacagttaactgaacggggaggggagggggcggggcttacccggggtcaccgccagggccctgctgggttccacgccacgttcctgtctccgcagggcgttcgatccctagagggaggagcctgtccaaacggacgctaacggcctacctccccctcaggtgctcttacagcctgttccaagtgtggcttaatccgtctccaccaccagatctttctccgtggattcctctgctaagaccgctggtgagta

SEQ ID NO: 132172 - DNA, 610 bp, Homo sapiens
  chr19:54382388-54382998
  hyper
atacgttggttaactcgggaaagaactcaaggacactggactagaacgtggtgggattcctaggtcggtttcggggccatccccgccgcctatccttcgccctaggtcacctggaggtggctggaaggccagtggactccacatttagggagagtggttacaagaggactcggattcccccaccttcccttcggctttgggaatcccaggaaacccgccccgaacccctgaaaagtcccagagaaggtaagctgggcgtccagagtccctcccaggcgccgccgcagcgtcccgcccagcctcgcggggcacgccgggaggcggagttctcggtcgtgtcccgagagtggctggtccgcaggctcggactaccagtcccagaatgcactgcgcccgcagcccggggcgggccgtggttgcccctggcaacagagagggtctcccgggagcggggactgggaagcgctcccgagccggggaggcgcagagcccgaccagagagaggcggggacgcgggtagagcgaccaagaggtgtggaggccggaagagactgaccgcgccggcccttggagagacccctttcctgagagggggcgcacagagaggatg

SEQ ID NO: 132173 - DNA, 601 bp, Homo sapiens
  chr19:54385475-54386076
  hyper
agctcccaccgccgccgcccgtgcctccggctgccggcgcccctgcctttggctcttcctccccactcgcccgctccccctggcggagccggcgcgcccggggtgccgctccctgcctggcgcgctccgcacctggaggtgccttgcccctctcctgcccacctcggaatttccctgtggctcctttgatccttcgagtctccagctcctctcccttccacctgtttcccccaagaaaggcaggatcctggtccctgctacgtttctggggccatggctggtctgggccccggcgtaggcgattcagaggggggaccccggcccctgttttgcagaaagggggccctgaggcagaaggtggtccacgaagtcaagagccacaagttcaccgctcgcttcttcaagcagcccaccttctgcagccactgcaccgacttcatctggtgagggaagggggctgggggactgggggacgaggggactaggggtgcagactcctatcacgccgacccctgtggaaggaagaaggagggggctgtagtcccgactcccaggttctaggatggccagggaacgctgggagcttcgactcctgggtttc

SEQ ID NO: 132174 - DNA, 30 bp, Homo sapiens; identical to SEQ ID NO: 12612
  chr19:54401930-54401960
  hyper

SEQ ID NO: 132175 - DNA, 280 bp, Homo sapiens
  chr19:54410015-54410295
  hyper
tgacccctccagaccgcctagtcctggccagcatcgaccaggccgatttccagggcttcacctacgtgaaccccgacttcgtgcacccggatgcccgcagccccaccagcccagtgcctgtgcccgtcatgtaatctcacccgccgccactaggtgtccccaacgtcccctccgccgtgccggcggcagccccacttcacccccaacttcaccaccccctgtcccattctagatcctgcaccccagcattccagctctgcccccgcgggttctagacgcc

SEQ ID NO: 132176 - DNA, 728 bp, Homo sapiens
  chr19:54411188-54411916
  hyper
cgcagagacccagcgcgtccgtgttcaccagagcagccacgcaagctcacatgcacccccaggctcagacaccggggagaagtccttcccaagcggggagatcacagtctggcctcttcttgagagacctagagacctgatcagaggaagagacccccacgccagagcaaccaaaaacagccagaacccgagagcctaggaatcggcgacggaggcacacggcaggcagacgcgccttctgggcctctttcccttgacccacttgagagtctggggagtgccggggaccgtgcagatggactacatttccccgcaggcctcgcggcagacccttcccccaagtgcggctccttgccgccagggctgatgggaaatgtagtctccggtcagggccagaccagtggagcggtgtgccttgtctgtgtgtttggaggggactgagccccaaagcttcgcagtcttccttgcggacccgggcacgtcttcttccctgcagtctcctgggtttccatgacccggtccgggtggatgctggggctgcccctctctccctcatcaccgccgcgacacccccatccagtgcccgcaggccccagcccccgctccgaccctcggcgggcggcctgcccctttaagagtggccccgctgacatcacggcggggggggggggtggcccggctcctggctccgcggcggctgcaggacccgactccgctctgcgcccgcc

SEQ ID NO: 132177 - DNA, 189 bp, Homo sapiens
  chr19:54412559-54412748
  hyper
gctcccggctccgtccgccgagtgaggccgcggccgcggggggtggggggtgggaggccgggagggggccgggacgccgggctccggggcgggggcggggggcgcgggcaccggcgaccccggtggcggcggcggcggccgggggaagcctcggggccggtcatgcggctgcggggcccgcggcccgga

SEQ ID NO: 132178 - DNA, 161 bp, Homo sapiens; identical to SEQ ID NO: 56638
  chr19:54412808-54412969
  hyper

SEQ ID NO: 132179 - DNA, 99 bp, Homo sapiens; identical to SEQ ID NO: 56639
  chr19:54413008-54413107
  hyper

SEQ ID NO: 132180 - DNA, 54 bp, Homo sapiens
  chr19:54413509-54413563
  hyper
ggaccaggcagctcgcggtcaaacccctgagccgccaggcgggggatgggagga

SEQ ID NO: 132181 - DNA, 31 bp, Homo sapiens; identical to SEQ ID NO: 12614
  chr19:54415929-54415960
  hyper

SEQ ID NO: 132182 - DNA, 564 bp, Homo sapiens
  chr19:54445558-54446122
  hyper
cggagctccccctgcctcctcctcctcctcgtcttaggggggtctccctgcaatgcagcgcccccttccgtcctcgggactcctcgctcccacccggaggaggctgcgccagctttaggccccgccctcctcccaatggctccgcccacagactcccttatttcaatggccgcgccctcttttcccgacctctccttttcattggtccctctcactcccaaatgactcctccccttcgttggcccgcccctttcctctggcccctcctctccaagaaaattagctcctccctcgttctccacctgctctgagctgggagcagccagaggcggtgcaagcgcccagctccccagagctccccaacctcggacctcaccgcaggggcgctgggctggagagcaggttcgggcagccgtcgggaataccgaccatcctcttctcccttctaacctgggcttcctttttccctgcctaatctcacctcctgacctgctgggtcctccggtgcagtgggagggccggcttgctccacccgcagccccggggtggcgtagggaagggggc

SEQ ID NO: 132183 - DNA, 30 bp, Homo sapiens
  chr19:54446368-54446398
  hyper
gcatcccgccctaggcgcacaccagacggc

SEQ ID NO: 132184 - DNA, 30 bp, Homo sapiens
  chr19:54446700-54446730
  hyper
gcacagtgctgtacacggaaccagaatggc

SEQ ID NO: 132185 - DNA, 214 bp, Homo sapiens
  chr19:54461000-54461214
  hyper
atttttacgaggatcgggtcttgagtaaacggcttgcctagagccacgtgcaatcccacttcccatccgcgttctcacttggttggaggcagcttctgtgccctttataaccaagagcaactgagtatagaggagaagaagtgttttgtccaaggtcacacgaagccttgggagcatccgtgaaatttggacccaagaccgaactttcagactc

SEQ ID NO: 132186 - DNA, 30 bp, Homo sapiens
  chr19:54463033-54463063
  hyper
gacgtcccctcctccgtgcatcggagagtt

SEQ ID NO: 132187 - DNA, 319 bp, Homo sapiens; identical to SEQ ID NO: 12616
  chr19:54465292-54465611
  hyper

SEQ ID NO: 132188 - DNA, 482 bp, Homo sapiens
  chr19:54466172-54466654
  hyper
ctaatgcgagatctcgctccttgccctccaccagccgccgaccatggccgcgctctgaccccctccccggccgcagcctcctcctcgccgcccccctccccagccccgccggccccgggccccccgcttctgcctgcgctgtgaacccccccccagccgccggcacggccccgcccccgctgccccggtggtggcccacggccccccggctgcccgtggtcaaactggagtcgctgaagcgctggaacgaagagcggggcctctggtgcgagaagggggtgcaggtgctgctgacgacggtgggcgccttcgccgccttcggcctcatgaccatcgccatcagcactgactactggctctacacgcgcgccctcatctgcaacaccaccaacctcacggccggcggcgacgacgggaccccccaccgcgggggcggcggcgcctcggagaagaaggaccccggcggcctcacgcactcgggc

SEQ ID NO: 132189 - DNA, 30 bp, Homo sapiens; identical to SEQ ID NO: 56645
  chr19:54480936-54480966
  hyper

SEQ ID NO: 132190 - DNA, 133 bp, Homo sapiens; identical to SEQ ID NO: 56646
  chr19:54481304-54481437
  hyper

SEQ ID NO: 132191 - DNA, 435 bp, Homo sapiens; identical to SEQ ID NO: 56647
  chr19:54481540-54481975
  hyper

SEQ ID NO: 132192 - DNA, 391 bp, Homo sapiens
  chr19:54482913-54483304
  hyper
gagagaaaatcagaccgagaaatagagaaattttaaaaacaggagagagaatgaggcaacagtaaaataaaccagaacacagccggagagagagaatcacagaactgtcgggaggcgccgcgagatggggggccgggaagggggcgcaggcggccgcgtctgaccgccctcgctctccctccttttcctttccttcctcccccgcaggagttgtccgggcctccagcatcttccccatccttagcgccatcctgctgctgctcgggggtgtgtgcgtggcggcctcccgcgtctacaagtccaagaggaacatcattctgggcgcagggatcctgttcgtggcagcaggtgagaggcagagggagggggcgaccggggcggcccacctggg

SEQ ID NO: 132193 - DNA, 5 bp, Homo sapiens
  chr19:54483364-54483369
  hyper
cgcgt

SEQ ID NO: 132194 - DNA, 91 bp, Homo sapiens
  chr19:54483483-54483574
  hyper
cgccttcggaggagtaaaccgacacaggcaggtgtctggcgcgtaagacgccgggcgcttaggatcccaagcccgccgtcctggagacgga

SEQ ID NO: 132195 - DNA, 274 bp, Homo sapiens
  chr19:54485372-54485646
  hyper
ccaacgcgggcgagccgggcccgaagcgggacgaggagaagaaaaaccactactcgtacggctggtccttctacttcggcgggctgtcgttcatcctggccgaggtgataggcgtgctggccgtcaacatctacatcgagcgcagccgcgaggcgcactgccagtctcgctcggacctgctcaaggccggcgggggcgcgggcggcagtggcgggagcggcccctcggccatcctccgtctgcccagttaccgcttccgctaccgccgccgctc

SEQ ID NO: 132196 - DNA, 324 bp, Homo sapiens; identical to SEQ ID NO: 12620
  chr19:54485672-54485996
  hyper

SEQ ID NO: 132197 - DNA, 229 bp, Homo sapiens; identical to SEQ ID NO: 56653
  chr19:54486106-54486335
  hyper

SEQ ID NO: 132198 - DNA, 30 bp, Homo sapiens
  chr19:54527371-54527401
  hyper
ctggggccacggaacgaaaggcgtcatccc

SEQ ID NO: 132199 - DNA, 178 bp, Homo sapiens
  chr19:55597885-55598063
  hyper
ggtgagtggtggggacgccggctgcggggagcggtccttatccttgctttccaggcagagaaacgggggctcagaaagagcaaagggactcccgtcccattctggggacgctggagcgcccccccgccccgccctctggccccaggacccctcgccctgagcccgcactccctacctc

SEQ ID NO: 132200 - DNA, 6 bp, Homo sapiens
  chr19:55598488-55598494
  hyper
cggcca

SEQ ID NO: 132201 - DNA, 30 bp, Homo sapiens
  chr19:55627713-55627743
  hyper
ctcagaggacatcacgtggtgcagcgccga

SEQ ID NO: 132202 - DNA, 30 bp, Homo sapiens
  chr19:55629264-55629294
  hyper
ggaggggtgccccacggcatactaggaagt

SEQ ID NO: 132203 - DNA, 30 bp, Homo sapiens; identical to SEQ ID NO: 56656
  chr19:55672021-55672051
  hyper

SEQ ID NO: 132204 - DNA, 582 bp, Homo sapiens
  chr19:55677499-55678081
  hyper
tcctctgagtattctgggattcgcagtccgcagacaggacctcggggctgcccctgggagcgcgccctctgccgctggagcgttggagaacgttagcgccccccttgccaccgacgctgggactacgagctctaaaaggccgtctgctcaggctgggaaggcagacggtgtatcagaccttgcgtgctgggactcactttcagcctgcaggtccagcgccggggacaggccccaccaggacacggagccgaagccgctgccggagccggcaggtgtggtcatcaccctgcggaaaagacattctgggaatcgcacacattgcccgccccgctcccctctcaccgcccctcacttctcgcccctttgcctccacatgataccttgcccacacctttatcctccaaatatcccgggacgccccttcctctctgctcagtgcagcactgtggacccgcggcactccacaaccgctgcccagagtccccgcccttttcgaggaatcaagcaatggaagcatgtgggatgggaccacagcgagcaactgaccaatgagagtgagcgaggcccgccctctacaaactt

SEQ ID NO: 132205 - DNA, 30 bp, Homo sapiens; identical to SEQ ID NO: 56658
  chr19:55678404-55678434
  hyper

SEQ ID NO: 132206 - DNA, 87 bp, Homo sapiens; identical to SEQ ID NO: 56659
  chr19:55684867-55684954
  hyper

SEQ ID NO: 132207 - DNA, 30 bp, Homo sapiens; identical to SEQ ID NO: 56660
  chr19:55685277-55685307
  hyper

SEQ ID NO: 132208 - DNA, 1158 bp, Homo sapiens
  chr19:55690196-55691354
  hyper
tccaggatgacgacccgggatcccagccggattttccagcccgcctgcccgagtacacccgtccgaatcccgcccctcggaatcctggccaggctttctctctgctcggccccccacccccgggtcttgctcacctgggccgtggctgatgcgactggagtcgggaggcgtgtcgggcgatggaggccccggggttgggggctccgggaacatggtggcggggtcctggagtcttttctgcagagacactcaagcaccctagtcccccattcccaccccagacgtcctttgagccccacgcacaacaaagaactccaactcccatgaggcctttgcgcgaacagccgcgcagaaaccggacagccaccgcgagtcatgctgggagttgtagtatcagcctccccgcacttgagagggggtgtccaggacctagttccatcctaaagggataccctcttcctccacggccccacaggcatcccgctgacttctgcctcgtcctcgcccctccgcagggtctgaaccggaagcgggcgaaggcagacgtgggaaccagcagaccgcgttgcccagagcaacagccgggctcctctcaagcggggtgagagcaaagctggttgcccgggcaacgggttgttgccaggacaacgggcggggctgacgcacagacgcggagtcccggcggggcaggctcgctccggggcccaccggtgcctgggaaccccccaatagcccgactgggatcctgaggtcccgcgaggtggggagcgggcagcctgtggtccgagcgcccacagccgactgctccctccgcacctggtcctgggagctgagacgcaggttccctcttccctctccccaattttgctggagggcgggtcgggggctgcccggtgcctgtgctgagccccctcatccttcttggcctgttggtctctccacgcatccgtgctgctctcgtgaccgcctcggtctccacgctgcctcttgaccccacataggcgtcttccctgtgtctgcctccccaacccgcctgtctctcttccctatcgcctggcctctgtctccagggtctctccctctcccctccgcctgcgccccactccccgccctcggctctttgtcttctccatacctgtctcgcgtccccagatccct

SEQ ID NO: 132209 - DNA, 97 bp, Homo sapiens
  chr19:55691679-55691776
  hyper
tgtattgtgtgtgcccgtatttggtctcgggtaggcggaaagccctgccccgcccctcctcccgcctccacccgggaacctcgatgacgcccacaga

SEQ ID NO: 132210 - DNA, 677 bp, Homo sapiens
  chr19:55727965-55728642
  hyper
ctcttcctggccttgcgggcagccaggattgaaagatccaggaagtgacaggggcctgactcatcaacttgtaagagagctggggttctcctagatccatgctcgcactgaggtgagaaatgagaagccagggccgggagcctcctgggggttggctgccaacgccaggcaggcggggaatggtgattttcgcttgtatcgtggaggatgccacgcacagacgtgaatagaaagagcctggaccgtgtcctgaggtcagcgactgaggtcctgggtggggccagccaggacctgcccgggggctactgccctctgaatcaatacctccagggaccctacgttgacacccatggcctcccactctccacccctcagtcctgcgtgcggcacgtagtgctcactgggcgtctgtgtagggggttgaaggctgaggctggaacaagggcgtggcggtcgcaggctccagggcacgacggtccttcctcttccccttctcagccacatctggggctccgtccctgcagccaaggctccctggcgctgtccttggtgctgacgcggttctggaagtgcggtgccagggtggctggtgcggctcccgatggaaaagccccaccaaccccacaaagcagactcgggagagaacacgccaccgtctttagcgaatcttaccaacc

SEQ ID NO: 132211 - DNA, 22 bp, Homo sapiens
  chr19:55764189-55764211
  hyper
gccactgcgcctggctgtacac

SEQ ID NO: 132212 - DNA, 190 bp, Homo sapiens
  chr19:55770717-55770907
  hyper
tttggctccagggtcgggctcttgcgaaatccagacctggttttcgctccagccaaagccaggcgccttcgttccgtccggctctcgcgcttagccgcctccgagcctcagaggccctcagtcgtttccgtctgctggcgatagtcccggccgggtcgctggtgttgccagttccgcccaaagcagcttc

SEQ ID NO: 132213 - DNA, 13 bp, Homo sapiens
  chr19:55791393-55791406
  hyper
ggatctcacctcc

SEQ ID NO: 132214 - DNA, 30 bp, Homo sapiens; identical to SEQ ID NO: 56666
  chr19:55813324-55813354
  hyper

SEQ ID NO: 132215 - DNA, 30 bp, Homo sapiens; identical to SEQ ID NO: 56667
  chr19:55850629-55850659
  hyper

SEQ ID NO: 132216 - DNA, 250 bp, Homo sapiens
  chr19:55851025-55851275
  hyper
cactgacaacagttcgcggcgtttgacggcggcgggggcgtggcggggttttatctgtgtattgacgagagccgggcgcggagggaaagagtggggcttggccaatgggagcgccgtgagcttcgtagcaacggaggagtggcggtggctgtggccaatagaaagcctcagtggccttggcggggctggcccggagagcagatgggaggtgcggcgacagtgtttgacgagagccgaaggaggctgtggg

SEQ ID NO: 132217 - DNA, 353 bp, Homo sapiens
  chr19:55864913-55865266
  hyper
ccaccaccaccacgacgcatcgctggctgggcattaagaagaaacatcagcaacagcataccattattcgtggcttagacactgggaggtaggggtggataaccgagacccggggctccgcgagacaaaaagatgcaggatcactgcatcttcagaggaagccgcgctggggcagtcagattttgccggcgaaaatcccgttcttgatctgctcgttccagctctccacctgggaagcagaaaggcagggagcgggacgccggctcagcctcggccgagccctgcacacgcctggcccggcgccccctctgccgactcacccagctgatggggcacagcgagtggtacacgcg

SEQ ID NO: 132218 - DNA, 643 bp, Homo sapiens
  chr19:55865816-55866459
  hyper
tggggaagcgcgggtcgaagggcggcgtcgaccatttccccttggggggctcctgggcttccacatccaacatccacgaaggaggcaactcctgcgagacgggacgggacggggactccgtggggccgagggggcgccctcgctccgacccgtctccccatcctgacccccgcccctgaaccccacccgtcgtgccctcaccagcctgacgttggcggccactggatctgctgtgggatggtcccggggtgccgctcgcttctgagtccgcggggtgcggtcccacccgggtcaggagaaacgcaccccgcggccggattggctaggacgcccgagccccagccaatgggagccgtcgtgcaccgcggggctggtaggggcgcccccaccccaccccttgctcccccgacgccccctcgggggcctgcgcgtgcacacaggcaccgaggtgcgactcgctgagtctcaggctcaagctttaatctctgcgaagttgggcggctccacgggctcgcccccgcccccccccgccccccaatatataaaggcatatccatagttctggtatctaccagagggggcaaatccccccaagcggctttcaacattccgcttcctacagtcggtgcgcacagaaccctcg

SEQ ID NO: 132219 - DNA, 30 bp, Homo sapiens
  chr19:55880578-55880608
  hyper
gcccgcgggcaggtcgcagggccaggcggg

SEQ ID NO: 132220 - DNA, 30 bp, Homo sapiens; identical to SEQ ID NO: 56669
  chr19:55896827-55896857
  hyper

SEQ ID NO: 132221 - DNA, 205 bp, Homo sapiens
  chr19:55919625-55919830
  hyper
tgactggtgggtcacgagactcgcatgggccaatgactgatagagaccggtcagagggcgacccagtttcgtgcagatcaaaccgctgccagccaacgaaatccgttgatttttgtatatgcaaatgaagtgtgcgctgccgcccgcgccccctcctttgagccgtggtggaggtgggcgctggaactccgactacatttttcta

SEQ ID NO: 132222 - DNA, 203 bp, Homo sapiens; identical to SEQ ID NO: 56670
  chr19:55951858-55952061
  hyper

SEQ ID NO: 132223 - DNA, 434 bp, Homo sapiens
  chr19:55952676-55953110
  hyper
gtctcacgcgcagcccgcataatttaaaaaatggacagatggcatcacgcccgagctcaggaccctgcagtggccccatcacacttaggataaacccgggcccgcctacttctcctcacctcctgctgcccaccgccgccagctgcacgggcgcttccctgccctgcaggccaccgagggcctttgcacgcggttcccctgcccaaaacctctcgcccacagatctctgcgtggttcgctccctcccttcgggtctccgttcagaggccttttcggatcacttcctctaatccagcgccctctctctcaacactttccgctgattttcttcacagcagtcatctaaaattacactgcacatgcttacggactgggccactgatagttaatgagcccttaccgtgtgccaggaccctgcacgaatcaactcagtt

SEQ ID NO: 132224 - DNA, 1363 bp, Homo sapiens
  chr19:55953357-55954720
  hyper
tccctgcatcactccgcaacagccgggccggctctggcgcgactttctcagcccctgcccaccttcagctacgccggcggccgccacctgggtctctgaccaccacgccctatccctgcagcccctcctcctcggatggctccacctcccttgctgggccccgccccaggctcgcagtcctcccgcccgagagcacacgcacctgggcacgttgatatcccggtgcgcccggggcgcacgggacgccttgctgaaggccactttggcgccgacgcccacggccagggcgaagctgatgaccccgcacacgacgtaggctgtgctgcccccggggccctcgcccccgcggcccccggcacccccagtccggcccccttccaaccacccggcctggccgggccctggccccccgcccgcacccccagcgcccccggcgcccccagctagcggcggcggcgtggtggcccagcgcggcgtgtcgtagttggagcaggaggcctgcgccaggcgcatgtgacggtgctcacagcagaagcggtagtggcaggtgccacagcagaagcggtaggagccggtgctgcagttgaaggtggcgtcgtactggcccatgacatcgtagtagccgtggcagagctcggcgggagggggcgcccgggccgccgcgcccgccccgcccgcggggccggtcctggtgccgttggcgcctgggctcgccgcgcccccgccgcccgtcagcgccccggtcaggcgccgcaggtgcgccagcagggcgggcagcgggcccgcgggctcggcgctcgtggcgttggacgggcgcgccctggcctggccggcgctagaggccaggagtacgaggagcaggagggccggcatggggcttgcagggggtcgcactgggccgccaggctgcggggagaacgagagcagaggttggagcgctgggcgggagagaaacggtcagagggtgagaaacgtagagatgggtgggcagagaggctggggagggcgggcggggggcggcagagtgtggggagcaacaggcgccaggaggcaggaagggcggagggagctgagctgcgtgggcccaagttggccgccccacgcgcggtgggcgacgatgggagagtaatggaaacgcgcccgggcacggctgggggagagaaatgagcatgggcggacagaaccgggatcaggcgagagatgaatgcgggagaagcgattgggagggtcgacagacaccagaggggtgtgcagacattaggacgaggagcgaggcgaggcgcgatgtaaggagaagaaacgggggcggcgaagaggagagggcaggggaggcagctggagggaggcgcgcgaaggggagggg

SEQ ID NO: 132225 - DNA, 50 bp, Homo sapiens
  chr19:55954937-55954987
  hyper
ctgacattcggggaccgatgctgctttgtggtgagcgcctgtcctgagcg

SEQ ID NO: 132226 - DNA, 30 bp, Homo sapiens; identical to SEQ ID NO: 56673
  chr19:55958478-55958508
  hyper

SEQ ID NO: 132227 - DNA, 256 bp, Homo sapiens
  chr19:55962683-55962939
  hyper
tgcgttcaagaggaggcgggcccgggcgggtggggaaagcccagagggaaggggcgggctcttgctggagggcgcggggaccccagttccgggcgccaggggcggcggggcggggagaccctgggggctgcacgggggcgccgtgcctcgcgggccgcggggaaggcagggaccgagcgagggaggaggaccctcccccgacccgcagcccaggcggcggccggtcccggcgcccccgcccagatccctgcgccgc

SEQ ID NO: 132228 - DNA, 288 bp, Homo sapiens
  chr19:55963044-55963332
  hyper
cgggggtctcagccctcgtctgtcgctgcgggtctcctcgcatctcggcgtctctctccgcgtctctctccgtcccggcgcctgtgtcccgggctgtccccagctccgagcctcagttccctgcgcgcctccatttccctccttcccccgcccggtctccgtcacccctctgtctccacatcccgcttgtctctccttcctggctccacgtctctttctctgtcccaggtttgctgtcgtctgatctctgtctgagtgtctgtgtctccactcgcccccgacccggcc

SEQ ID NO: 132229 - DNA, 30 bp, Homo sapiens
  chr19:55972489-55972519
  hyper
aaggccaaagggggcgtggctggaggtggg

SEQ ID NO: 132230 - DNA, 39 bp, Homo sapiens
  chr19:55987548-55987587
  hyper
tggatgagcgtgcacgaagcacacgcccgaaaatcctga

SEQ ID NO: 132231 - DNA, 30 bp, Homo sapiens; identical to SEQ ID NO: 56675
  chr19:55987794-55987824
  hyper

SEQ ID NO: 132232 - DNA, 30 bp, Homo sapiens
  chr19:55988635-55988665
  hyper
gctctttcagggcacggatatctcttttaa

SEQ ID NO: 132233 - DNA, 201 bp, Homo sapiens
  chr19:56015146-56015347
  hyper
tcccgcaggagagtctcgccgcaagcgtcctttcccgccttttttttttctggcgctcagcacgcatgcgcaggcgcggtgggcccgggaatggagggacgggatggggcaggcgttcatctgcctcgcacctcgtgacgtcacaggcgcgctgcgcctcctgattggccagccggcgcatcgcccgcagtaataatagct

SEQ ID NO: 132234 - DNA, 30 bp, Homo sapiens; identical to SEQ ID NO: 56677
  chr19:56028672-56028702
  hyper

SEQ ID NO: 132235 - DNA, 30 bp, Homo sapiens
  chr19:56092126-56092156
  hyper
ggcttggtcctggtcgctggggctgggttc

SEQ ID NO: 132236 - DNA, 30 bp, Homo sapiens
  chr19:56092444-56092474
  hyper
gggctcccagagggcggagggtgctgaggg

SEQ ID NO: 132237 - DNA, 68 bp, Homo sapiens; identical to SEQ ID NO: 56678
  chr19:56098516-56098584
  hyper

SEQ ID NO: 132238 - DNA, 277 bp, Homo sapiens
  chr19:56111237-56111514
  hyper
aaaaaaaaagaaagcgaagtgcgccaactgcaatacagagctggaaaagaccggcaccatcttatccacttagcactccatgggcttcgaagcctgtccggtgccatgttaattacgggcactgggcagccattttcccgctcctcatcattcggtatctgtctttgggtcacccgactgtgggctttgtgagaggaaaggcgtttcgaggtggttggggatgtggtgctgggttatttcccactggggacacaccagggccgccggtgcgcaggcg

SEQ ID NO: 132239 - DNA, 30 bp, Homo sapiens
  chr19:56112073-56112103
  hyper
ctccccctttccaccgttccaaagaccaga

SEQ ID NO: 132240 - DNA, 176 bp, Homo sapiens; identical to SEQ ID NO: 56680
  chr19:56112770-56112946
  hyper

SEQ ID NO: 132241 - DNA, 30 bp, Homo sapiens
  chr19:56116367-56116397
  hyper
cagggcttctattccgcatggtctgagcag

SEQ ID NO: 132242 - DNA, 414 bp, Homo sapiens; identical to SEQ ID NO: 56681
  chr19:56151955-56152369
  hyper

SEQ ID NO: 132243 - DNA, 30 bp, Homo sapiens
  chr19:56153466-56153496
  hyper
tagagaaatctcggcggtcaggaggcccgg

SEQ ID NO: 132244 - DNA, 30 bp, Homo sapiens
  chr19:56154887-56154917
  hyper
gaccggatcttcctcgcttgggtactttcc

SEQ ID NO: 132245 - DNA, 30 bp, Homo sapiens
  chr19:56155136-56155166
  hyper
ctgggtacgggggccgggaggaggaagggg

SEQ ID NO: 132246 - DNA, 776 bp, Homo sapiens
  chr19:56159254-56160030
  hyper
caccgccacccaatccggggacccccggagactcgccagctctccaggatgggaatttcgtgatgttccctgcctgagcttcggggagggcgggggagtgctgtaaggggctatcgcgcaagtgcagaccctctgcttctgccgcaaacggcgggcctcacctggacccggggactcttcaacgaggggcgctagcctggcccgactgggcgagtccccgcgtccctgcccgttccgtcgctcagttccacgacacgctcccctgccgccccgcctgttcgcgggtgggtgggcgcttccctcggctccccgtgacactttgcagacgctccccggcgccgggcatgggcgccgccgccgtcggtccccgagccggattccgcgagcgggtgggtgagcgcggggggcctcggcccctcggaccccgggcacccgcgggcgggggatggtggccgcgtttgcacccccgccctagtgcatgttcccgctggaatcgttccacgaccgctccccctcccacccgcgggacaaagggcgggggcggggggggcgcacccccacgcgtgacctttccccgtactgcgcacgcgcccagcccccaccaccgggggacggtccgcccgcccacgcgagtgcgggggaggggtgtgggggccccgaaggtagaggaggcagcgcgcacgggctggacctcctcctaccctgggaagttggggcagtttccccctgcacctgcctcttccttaggcctggcagtggcccgcgatgagagaggg

SEQ ID NO: 132247 - DNA, 30 bp, Homo sapiens; identical to SEQ ID NO: 56683
  chr19:56165292-56165322
  hyper

SEQ ID NO: 132248 - DNA, 30 bp, Homo sapiens
  chr19:56166149-56166179
  hyper
tcggcgaaaccctacgttcgggtgttttcg

SEQ ID NO: 132249 - DNA, 30 bp, Homo sapiens
  chr19:56166403-56166433
  hyper
cgaagcggctggagcgggcggcaaggcgag

SEQ ID NO: 132250 - DNA, 30 bp, Homo sapiens
  chr19:56167042-56167072
  hyper
atgcttggaggccacgggcccctcgcgtac

SEQ ID NO: 132251 - DNA, 31 bp, Homo sapiens; identical to SEQ ID NO: 56684
  chr19:56186172-56186203
  hyper

SEQ ID NO: 132252 - DNA, 30 bp, Homo sapiens
  chr19:56623161-56623191
  hyper
agcaacgggcagccgcggtaccagtccttg

SEQ ID NO: 132253 - DNA, 30 bp, Homo sapiens; identical to SEQ ID NO: 56685
  chr19:56632731-56632761
  hyper

SEQ ID NO: 132254 - DNA, 86 bp, Homo sapiens
  chr19:56633033-56633119
  hyper
gtggtggagagggacgctcgtgccaccccgggtcctcctaccgtctctatcatggtaaccccttctctgccgctgcacctcccagt

SEQ ID NO: 132255 - DNA, 30 bp, Homo sapiens; identical to SEQ ID NO: 12632
  chr19:56652051-56652081
  hyper

SEQ ID NO: 132256 - DNA, 30 bp, Homo sapiens; identical to SEQ ID NO: 56687
  chr19:56652495-56652525
  hyper

SEQ ID NO: 132257 - DNA, 35 bp, Homo sapiens; identical to SEQ ID NO: 12633
  chr19:56728567-56728602
  hyper

SEQ ID NO: 132258 - DNA, 130 bp, Homo sapiens; identical to SEQ ID NO: 12634
  chr19:56728658-56728788
  hyper

SEQ ID NO: 132259 - DNA, 31 bp, Homo sapiens; identical to SEQ ID NO: 12635
  chr19:56809209-56809240
  hyper

SEQ ID NO: 132260 - DNA, 30 bp, Homo sapiens
  chr19:56825629-56825659
  hyper
gaccaagcgaactgcgggaggcagggttgc

SEQ ID NO: 132261 - DNA, 30 bp, Homo sapiens
  chr19:56826029-56826059
  hyper
agggaagctaaagtcgttaccatggtgacc

SEQ ID NO: 132262 - DNA, 541 bp, Homo sapiens; identical to SEQ ID NO: 12636
  chr19:56879474-56880015
  hyper

SEQ ID NO: 132263 - DNA, 198 bp, Homo sapiens; identical to SEQ ID NO: 56692
  chr19:56904505-56904703
  hyper

SEQ ID NO: 132264 - DNA, 605 bp, Homo sapiens
  chr19:56904723-56905328
  hyper
cgttcttctcaggcctgagacccaaccggcccgggcaccagctcctgctggaccccagagcgcctggaaagctccggaacctctcacctgccgcctcctcgggtccaagtgccaccgcggccgcgcccccggcagcccagggcgcgcttccaccacggtaccggtggattcgccgtgcgcagccggaagatggcgcagacgcacaaagcacaccgatgctgcgccatgatagggccggcgccgcagtgtcttccgggaaacatagtctttaggcgtaaaggcagcagcccggccttgaagccggatctcgcgatgtttcagggtgagccggacgcaggcgtgcctgcgcagtgcgcggaggagtgctgttcgtgtgttcgagtccctgggttgcttcctggggtctgtggtgctgggtgtgctatctgcgtgtgattctctagcgagagattgtgggcgagtgaccgagtgggcaaggggccgtcactgtgtgtgcgtgattttgacagtgtgtggtggtagcttctgactccgcgtgggtcgttgaatgtatgactgggaccgtttagcggtggatacacaactgtgtgcggctgtggaagatt

SEQ ID NO: 132265 - DNA, 841 bp, Homo sapiens; identical to SEQ ID NO: 56694
  chr19:56915126-56915967
  hyper

SEQ ID NO: 132266 - DNA, 161 bp, Homo sapiens
  chr19:56987541-56987702
  hyper
ccaggagtcaacaccagacagcggggcgccacagtccatgctcttatttttccaagctaccttggtaggaaggggacacaaccatacttagcgtcagtggagggctctgtcctccactcaaatgtacacatgcagaaaactgacgacgcaggtggttggcg

SEQ ID NO: 132267 - DNA, 172 bp, Homo sapiens; identical to SEQ ID NO: 12641
  chr19:56988111-56988283
  hyper

SEQ ID NO: 132268 - DNA, 280 bp, Homo sapiens; identical to SEQ ID NO: 56697
  chr19:56988383-56988663
  hyper

SEQ ID NO: 132269 - DNA, 137 bp, Homo sapiens; identical to SEQ ID NO: 12643
  chr19:56988963-56989100
  hyper

SEQ ID NO: 132270 - DNA, 178 bp, Homo sapiens; identical to SEQ ID NO: 12644
  chr19:56989173-56989351
  hyper

SEQ ID NO: 132271 - DNA, 124 bp, Homo sapiens; identical to SEQ ID NO: 12645
  chr19:56989501-56989625
  hyper

SEQ ID NO: 132272 - DNA, 176 bp, Homo sapiens; identical to SEQ ID NO: 56701
  chr19:56989696-56989872
  hyper

SEQ ID NO: 132273 - DNA, 1137 bp, Homo sapiens; identical to SEQ ID NO: 56702
  chr19:57018806-57019943
  hyper

SEQ ID NO: 132274 - DNA, 167 bp, Homo sapiens
  chr19:57049617-57049784
  hyper
tcacccatcagagtgatcctccggactccggaggcccccaagattgcctttcccttcccggtcggcagtgacgctcccgcaaggagctgacgcccaggcccttagcacctgtcacagccaagcacccttttactccggccctgcggtcccacccctcgccgcaagcc

SEQ ID NO: 132275 - DNA, 179 bp, Homo sapiens; identical to SEQ ID NO: 12648
  chr19:57049807-57049986
  hyper

SEQ ID NO: 132276 - DNA, 62 bp, Homo sapiens
  chr19:57050064-57050126
  hyper
cgaggccacgcccggttccggcggcgctgcctgcgcactggaagtgggaagcgccgggcttc

SEQ ID NO: 132277 - DNA, 102 bp, Homo sapiens
  chr19:57050185-57050287
  hyper
cggggcggggcggggcagcggggaggggtggggaggggcggggcgcggccgggggcggggcggctccgcggcgcggcccagtggatgccgggccatggggga

SEQ ID NO: 132278 - DNA, 206 bp, Homo sapiens
  chr19:57050428-57050634
  hyper
gctcccgggtagaggcgccccccgcacaaagccccgggcgggccgaggcccgactgtagggactccagccaccttggccctccctgcccggggaaggccgcgctcaaggaatggcctcgcatccaaaggccagcgaggagcggcccctacggggcctgggcacagaggtgagagtgacaggtgtttggggccgagcggacagggac

SEQ ID NO: 132279 - DNA, 948 bp, Homo sapiens
  chr19:57078350-57079298
  hyper
tcctcacttttctatcgcgtaggccccgcccgcgccccaagccccgccctgtcatggttttcctctccagagggtagccgctacgccttaccgactgcgtttcagtgctgtcccactgctcctgcacaccccacgcctgcgaccctacccaccacggacaggcgctcctgcgagctggaagccagttctctgcgtcctgagcctggcagctgcatctgaacactcggagcctggcgatggcttccagaaacccctgcgccgtgggtcgcttcagtgaaggggcctgtacttcggcgacccagactccgggctgagaggcctcctaatccaaccaggaggaccaggagaggcccaaaaggggacacagggcagtgaccgccaggcttggagaggagccgctcctggcaaagccagcgccctatttctgaacgccgcctccgttccggactacacttcccaggggctattgcagcggaggacacgcccacttccggaaaggacccaaagccgggcgagtgcacgtcccgccggttgctgaggagaagggaggtctgggcggggcagcggccgaggctggactggggcgcggcgggggcggtgtcctggttcctgtgtgggcggcgggcgtgagcgtgcgcgtgtggcctggtggctgtgagtgcccatacgtggtgagcgtgcggtgctgtgctgaggaggggcgagcgcgcgcggggatggcggcccggtgtgtgactgtccggtgcgtggccgcgaatctgcgcctgcgtgcatggcccggcggcgtgcggaaggcggtgtgtgttggaatgagtgaagcactttaagtggccaagagcaggaaacccggccggaggaggcttaccccgttctcccctgtatcgactgcgtagagcccagtgtgggcaaagtcctagagcccggggaagttgcccgggcggggcagcc

SEQ ID NO: 132280 - DNA, 27 bp, Homo sapiens
  chr19:57106523-57106550
  hyper
agctcagttggctccgctcggctccac

SEQ ID NO: 132281 - DNA, 412 bp, Homo sapiens; identical to SEQ ID NO: 56709
  chr19:57106588-57107000
  hyper

SEQ ID NO: 132282 - DNA, 249 bp, Homo sapiens; identical to SEQ ID NO: 56710
  chr19:57149402-57149651
  hyper

SEQ ID NO: 132283 - DNA, 287 bp, Homo sapiens
  chr19:57182839-57183126
  hyper
tatacgggctgacaccgctaagtgaacaggtgcagacacaatggcactcggggacgggctcacacgcggtcacacacctgcaggaacacgcgcacactacacaccgttgctctcgcctcccggtatcaccttcgaacgcgctggccggccccctcctagcctggtgcagtcggctccgcttctactcagtctcgggtcctcctgggccaacgcagaccctggtgcctccttccttagacgagctaaggtcaagacttctgctgctgcggaggagcccgcgcaccagg

SEQ ID NO: 132284 - DNA, 22 bp, Homo sapiens
  chr19:57183373-57183395
  hyper
cgcttccagtaactcaggggtg

SEQ ID NO: 132285 - DNA, 396 bp, Homo sapiens
  chr19:57276593-57276989
  hyper
tatgcctgggaaaaggcaggccgggtgccgggatgtagtgcgcctgcacgccgtctccagactacaactcccagaatgcgcggcgccccgagcgtatttccgcttccggtggcgttttagcgggagatccgagcgtctcggctggtggaaggggcgaggagctttgcagttgtgtgcgagtgtgtacaggtgagtttgtccgtacgcgtgattaagtgtgtgcgtgtgatcaagtgtgggggcgagtgttgcgtgagcaaacctgtgagagggtgagagtccgtccgtgtaggtgagggagctagcaagagtgtgagcgagtgcgaatgtccctacaagtgtgggcgcgtgatgtgtttgaaggtgtgtttgttcgagagggtgtgtgttggggtc

SEQ ID NO: 132286 - DNA, 152 bp, Homo sapiens; identical to SEQ ID NO: 12651
  chr19:57610675-57610827
  hyper

SEQ ID NO: 132287 - DNA, 62 bp, Homo sapiens; identical to SEQ ID NO: 12652
  chr19:57610895-57610957
  hyper

SEQ ID NO: 132288 - DNA, 94 bp, Homo sapiens
  chr19:57617621-57617715
  hyper
ctgacctgccagggccggcccccgcttgggtcttggagggcgctgcgcaagcctgcgccccgcactcgcccgggaagggaagggcagggaaggg

SEQ ID NO: 132289 - DNA, 338 bp, Homo sapiens
  chr19:57617831-57618169
  hyper
cgaaaacggcctgggtccggcttcctcctcccctgaagcagcgaaggggcgtcactggcgcgctgttaaacgtcttcgccatcggttccctgcatcctccctcctgcctgggtagccagctcctgggcgcgcccaggcgcacacgcttccctcgctcctcctgcagccacaacgcccccaccccccccgcccgcccgccttgtgcggcagcggtgaccgccttctcctgctgccaccccctccaccccctgttcaaggtctgtcaccgtagggggcgggggggcgcgtggagccgctgggggttcggcccaccccgcgaaccgagctcccggccctgt

SEQ ID NO: 132290 - DNA, 15 bp, Homo sapiens
  chr19:57618408-57618423
  hyper
cgcgttgggggattg

SEQ ID NO: 132291 - DNA, 446 bp, Homo sapiens; identical to SEQ ID NO: 12653
  chr19:57683239-57683685
  hyper

SEQ ID NO: 132292 - DNA, 212 bp, Homo sapiens
  chr19:57683805-57684017
  hyper
cggttgatgtcaggcagtgctgggaggcgttgctctccgggttcgcttctctcctgttgtcctaactctgcatctctcccgggtgaatcacagagctgtaaactaaaaatcaaattctaagctcccagccaactgaatggacccctcctctcagctaagagcatggcaaacttaaccggaaacactagttcggccgcgataggaaggagatg

SEQ ID NO: 132293 - DNA, 753 bp, Homo sapiens
  chr19:57702681-57703434
  hyper
tgggaggaaaacttgcgccgtgaagcgttcctcccgttgttgaacacatgaggaaaactacactacttagaaggctgtgcattatgcgtacggcgggagctgggccaacgacggcctaggacggggacgtttccgacggctcacgccggtgggggcgggacttccgggttgctcgctgcggacgccattttcttctgcacttctgtctggagaggtctgtagccactgagggccccggtcggggccgctttgcaggtccctagtcaggaccgagcaggggagtaggataggaatccccgccgcacctttgtacgagcctgaccccttccgtgggtttgttcctgggtcgccgtcaagctgcggtctctcctcccccgcccttcagccccgcggtctccaggggcggcgccctgggtctggaacgcggttgccaccgaggaggcggcggccctgcgtctggaacgccgttgccaccgaggaggcggcggccccgagcgcgcctggaagccccgggcaaccggccagggtcgggcacaggtggggtccgtcaggccgcccggggctcctctgtcccagctctgcggcccagggggtgacgtgatggcggcagcggtgctgacggaccgggcccaggtgagtggacggtggcttcgcggttgccgcttccttgccagcgctgaggcggtttccgaagtgggtgggagcccaggtatcccctggatttgtcttcgcagtcgtcgttcgctttggtgt

SEQ ID NO: 132294 - DNA, 124 bp, Homo sapiens
  chr19:57751575-57751699
  hyper
ctgtataagaggatccggaggggaaataatgcaaggtggaagtcagagtccggagcctggtccagggtctctgcactggccctgaccctggcaaatgtccctgactcctggggctcgatttcct

SEQ ID NO: 132295 - DNA, 404 bp, Homo sapiens
  chr19:57751722-57752126
  hyper
cgcttggtccctggcctccgagttgtgcccccaggacagaggcaggtctgagccgggctgtaggcccgctgcgacttttacaccgaggcctgccggctcaggatctgtcccctttgcaggtggtttgtagagaaaaactacattaactacaaggcattgccaggtgcgacggcgggccctggggccaatgatggtccaggacaggggcgtttcctgtgggttgcgaagcttggggcgggacttccggcatttggatgggacgtaatttgggagcgacggttccgtccacgccggctctagggagggggcggtgttccgtggccgcctccctggcggcgctggggaaatgagcaggtaggaggccgacagcgacctccgcgtctcggagcgaaccgtgagcctcc

SEQ ID NO: 132296 - DNA, 178 bp, Homo sapiens; identical to SEQ ID NO: 12656
  chr19:57791724-57791902
  hyper

SEQ ID NO: 132297 - DNA, 464 bp, Homo sapiens; identical to SEQ ID NO: 56720
  chr19:57831522-57831986
  hyper

SEQ ID NO: 132298 - DNA, 409 bp, Homo sapiens; identical to SEQ ID NO: 56721
  chr19:57832024-57832433
  hyper

SEQ ID NO: 132299 - DNA, 577 bp, Homo sapiens; identical to SEQ ID NO: 12659
  chr19:57862380-57862957
  hyper

SEQ ID NO: 132300 - DNA, 35 bp, Homo sapiens; identical to SEQ ID NO: 12660
  chr19:57863221-57863256
  hyper

SEQ ID NO: 132301 - DNA, 914 bp, Homo sapiens; identical to SEQ ID NO: 56724
  chr19:57874396-57875310
  hyper

SEQ ID NO: 132302 - DNA, 31 bp, Homo sapiens; identical to SEQ ID NO: 12663
  chr19:57901091-57901122
  hyper

SEQ ID NO: 132303 - DNA, 84 bp, Homo sapiens; identical to SEQ ID NO: 12664
  chr19:57901384-57901468
  hyper

SEQ ID NO: 132304 - DNA, 30 bp, Homo sapiens
  chr19:57922381-57922411
  hyper
cttaagttcagaagcggggcaggcagtggc

SEQ ID NO: 132305 - DNA, 30 bp, Homo sapiens
  chr19:57923019-57923049
  hyper
gtgaggcggagtctcgcctgggagggcagc

SEQ ID NO: 132306 - DNA, 30 bp, Homo sapiens; identical to SEQ ID NO: 56727
  chr19:57946272-57946302
  hyper

SEQ ID NO: 132307 - DNA, 477 bp, Homo sapiens
  chr19:57988570-57989047
  hyper
gaggaatcgttcattcgaagctttgggattcagagatgggggtcagcgcgcagactcgcagacgcagcacccacctgtgccgggcccatcggctcagccgccgccatcaggcctgtggactacggaagggtggcgacaagtgcaggaacctgggatcagctgtccagggcccagcccagcggctaggtcactcaggcagcgccactgtcaagcctcaggcccacctctcttcagggaagaagacactctctcacgttttcccttttctgtcacctcaggtctgacattgcgttctggaaactaaaccagtggattaatggaaaagcaaacaaaatgtccacccgaggatggtagaggaagtcccgccctgacgttggtgaggaccaacggaaacgcctatttcctgggttttcattggcccagagccgccaagtttcctgggtaatgtagttcccacggcaccaacactagtaagcg

SEQ ID NO: 132308 - DNA, 13 bp, Homo sapiens
  chr19:57989098-57989111
  hyper
cgtggaaatggtg

SEQ ID NO: 132309 - DNA, 496 bp, Homo sapiens; identical to SEQ ID NO: 56728
  chr19:57998875-57999371
  hyper

SEQ ID NO: 132310 - DNA, 432 bp, Homo sapiens; identical to SEQ ID NO: 12666
  chr19:58011064-58011496
  hyper

SEQ ID NO: 132311 - DNA, 15 bp, Homo sapiens
  chr19:58038569-58038584
  hyper
cagcgcggcggactg

SEQ ID NO: 132312 - DNA, 376 bp, Homo sapiens; identical to SEQ ID NO: 56731
  chr19:58038923-58039299
  hyper

SEQ ID NO: 132313 - DNA, 814 bp, Homo sapiens; identical to SEQ ID NO: 12669
  chr19:58070514-58071328
  hyper

SEQ ID NO: 132314 - DNA, 98 bp, Homo sapiens
  chr19:58090382-58090480
  hyper
gaagcccagggttccggtgccctccctgagattcacccggaacaagggctaagcggcccgcggagggcgctaggaaaaggcgcgacaccaagagcgag

SEQ ID NO: 132315 - DNA, 860 bp, Homo sapiens; identical to SEQ ID NO: 12670
  chr19:58094924-58095784
  hyper

SEQ ID NO: 132316 - DNA, 718 bp, Homo sapiens; identical to SEQ ID NO: 12671
  chr19:58111072-58111790
  hyper

SEQ ID NO: 132317 - DNA, 825 bp, Homo sapiens
  chr19:58125364-58126189
  hyper
ttgagggtcctttaaaaggagcgaagccacgccctgacctcagagtctcagggcataatttctcagcgcccctcgcagtaccatttggcctttgcccagcgtgcaggggagttagccgtcaccacggccaagtgcacatgagaactgcattgcccagaaacctgtgcgccgcccggcggcggcactcttaggggcgtctccctgcggacggaagctctctgggcgggacttccggtatcttcctcgcggtggacatcttgtcggctcttaggtggaaccatcggagcagaagctcggggttgctgggcggttccgaggtgacggaagcgggagggtgcgggagaagtcgctgttcgctctgcggagtggctcgccagcgaagaccccgcctgcgcccccggggacggacgaccgcggtgccagggtcccgcgacctgggaccccctcgcggctccgggtggtctacgaactgtgatggcggcggccgcggtgatgggcccggcgcaggtgggtgctgcctttcccagactttcgcccgccccaaatcctgaagttccaaatgaggagcgcctgtctgagtccctgcagcgcaggccccagtgtccaaggcagcggggcgctggtgggtgggggcgagtgtgactggcagaggggcagcctgagcataggtttggagctggactgagcccgtagcagtcgggagcgtgtgtgaaccgtagtcaggcctgcaatgtcgaggggagaagttgctccttcattgcgaggacgataggagccatggcgggttttgaatggtggagggaagggatccgaaaaaggattttt

SEQ ID NO: 132318 - DNA, 839 bp, Homo sapiens
  chr19:58144180-58145019
  hyper
gctgtctctggggcaagaggtcggggagctggaagaggcaggaaaaggagcacactcgaagtaacgtttattggggaaaaaaaacgcctacgtgtaaatggacccgcacagctcaaacctgtgttgttcaagtgtcaacctacttaagacctcaaacaccgaagcccctcagtcgccctggaaggcagcagacgcagcttcctagcgctcccagctgtctgcacacaaggcgccctccgtcgcagcctgggggagactacattacccagaaagccttgcgtcgagcggcagtactttgatccaatgaaaatccaagacaggggcatttccgtgtgggtctacccccgccccccccagggcgggacttgtggcgtcttcgcagcggtcattttggctgccctcccggaggtccgttctgtctgtcagccgctttggtacgctgcatcgggatcgaagtgacggaccgtgaaggcgcgagagtcaggtctgagggtcgggggcagagccgcccgcgaggccggcctggggatagcgatgctcgggttccccccgggtcgcccgcagctcccggtccagctccgcccacagactcggatggcgaccgcactgagggacccggcttcggtgagcgctgcgatctccgggcctcccccggccgagattcttaagtcccaagtgagaggcaccagctcacgtctctgtagcacagggtcggggacactgaggctcgtgggtggggcccctatttctgacatccgatgtggtgggcagggggacaagggacaggaccggcgcgtgcagggcttggacgggcaaccgagaagggggcattcaggaac

SEQ ID NO: 132319 - DNA, 576 bp, Homo sapiens; identical to SEQ ID NO: 56737
  chr19:58175630-58176206
  hyper

SEQ ID NO: 132320 - DNA, 829 bp, Homo sapiens; identical to SEQ ID NO: 56738
  chr19:58193122-58193951
  hyper

SEQ ID NO: 132321 - DNA, 441 bp, Homo sapiens; identical to SEQ ID NO: 12676
  chr19:58219951-58220392
  hyper

SEQ ID NO: 132322 - DNA, 110 bp, Homo sapiens; identical to SEQ ID NO: 12677
  chr19:58220515-58220625
  hyper

SEQ ID NO: 132323 - DNA, 98 bp, Homo sapiens; identical to SEQ ID NO: 56741
  chr19:58220669-58220767
  hyper

SEQ ID NO: 132324 - DNA, 413 bp, Homo sapiens; identical to SEQ ID NO: 12679
  chr19:58238325-58238738
  hyper

SEQ ID NO: 132325 - DNA, 249 bp, Homo sapiens; identical to SEQ ID NO: 56743
  chr19:58238987-58239236
  hyper

SEQ ID NO: 132326 - DNA, 669 bp, Homo sapiens; identical to SEQ ID NO: 12681
  chr19:58258067-58258736
  hyper

SEQ ID NO: 132327 - DNA, 808 bp, Homo sapiens; identical to SEQ ID NO: 56745
  chr19:58280745-58281553
  hyper

SEQ ID NO: 132328 - DNA, 30 bp, Homo sapiens; identical to SEQ ID NO: 56746
  chr19:58326431-58326461
  hyper

SEQ ID NO: 132329 - DNA, 30 bp, Homo sapiens; identical to SEQ ID NO: 12683
  chr19:58330901-58330931
  hyper

SEQ ID NO: 132330 - DNA, 78 bp, Homo sapiens; identical to SEQ ID NO: 12684
  chr19:58331142-58331220
  hyper

SEQ ID NO: 132331 - DNA, 546 bp, Homo sapiens; identical to SEQ ID NO: 56749
  chr19:58361165-58361711
  hyper

SEQ ID NO: 132332 - DNA, 246 bp, Homo sapiens; identical to SEQ ID NO: 12685
  chr19:58385531-58385777
  hyper

SEQ ID NO: 132333 - DNA, 439 bp, Homo sapiens
  chr19:58400079-58400518
  hyper
gctgcttttgggtgacgatgaggtgacctgaggacacagaaggccccacaattacctgagcggagagcctcagcgtagccgcggcagccatcgaaccacgtggttttaagcagagtcgggaggatagggcgaccagccaggagatatgggcacgacggtccgtatcctggcccaggagtgggtcacgctgggcgccgtcacagagctccagagtagcctctgtgcagcggaggacaactgctccccgacttctgggttcagtcaccacagtgcggacctagcgctcaggagcctctcctacaaataaatccaacaccaatcaaaatggccgccaccagagggcgccggaagtccggacccattgtcacgtgcacacaggaaacgcctttattctgagccctcagaggtcttctacgctatcattcgaggctgagttttc

SEQ ID NO: 132334 - DNA, 88 bp, Homo sapiens; identical to SEQ ID NO: 56752
  chr19:58446252-58446340
  hyper

SEQ ID NO: 132335 - DNA, 378 bp, Homo sapiens
  chr19:58446423-58446801
  hyper
cgacgccgggtccgggctgcagacctgtgaacagtcgccgctctctcgctgcttcaggattcgggttaggatgaggtgacctgagggcagggaaggcacaattacctgagccgggagcctcagcgcggccgccgccatcccgagtacgcggggaaagcactgccgggagcggcgggcgccgttacggggcctaagatctgcctctgtgcagcaagaaggactcttcaccttctgggttcagacaccgcggttcggacccatagctccagcgcctctcacctcacaaaccgcagaaacacacccaacattaaccaaaatggtcgctaccagagaacgctgagaatcccgccactacgttacgtgcgcacacagaaacgc

SEQ ID NO: 132336 - DNA, 90 bp, Homo sapiens
  chr19:58447336-58447426
  hyper
acggaccaatgaaagcgcagatttattgaggggaaagtacactccacagaagtggaatgtaggtgtgggagcaggcgaccaagcggctca

SEQ ID NO: 132337 - DNA, 464 bp, Homo sapiens; identical to SEQ ID NO: 12686
  chr19:58458426-58458890
  hyper

SEQ ID NO: 132338 - DNA, 394 bp, Homo sapiens
  chr19:58458978-58459372
  hyper
cggatgatgctgacccagcgctccggggctttctaccaagtaatcagtccagacaaatgccaaaacgaccgccacaaggaggacaacggaagtcccgccgcgaccgcgcgtgcgcttacggaaacaccacctttcggaggcctcattggctgaaggtcgccgtcgcccaacgcaggccattctgggtaatgttcccacaggcgcacggcgggagagtgagggtcgcctccacctccttccggaagtaaaggccaaacccctgtagggggcgctgggaaatggacactccaggttggggcggaggcgaggcttcgttctttcttaaaggagacgtacccaggtttctaccgattgctgtctgccagtgtttgtttggagacgtgtcatttcatgt

SEQ ID NO: 132339 - DNA, 1148 bp, Homo sapiens
  chr19:58513563-58514711
  hyper
ccaacccaggtctgacgtccttcacagtgctttgtgtgaactggcagggggagaaacgacggctggggaacgaacggggttattcgtcccatcaatggcctcagaagcatccttatcacctgcttccagagctcccgacccaaatttcctcctcaagaccgacgcggccgcgacgctgcaaaagctcgtcccggcctcacctggctcgcggccggcggtcccccttgaaggcggcgcagcaggatcggggtctgcccgcctggggcgtttggcttttgtcccgcgccgaggtccggcccaggagtgcgcttgggagctcccggcgcggcctcggggacaaaggcccgcggagccgacgtgcagcagagttcacccaggcccgtccgaccagaaaacgaagaacgcccggaggcgggaggccggaggcaggctgctggctggagaaccgacggcaacgacggcgcaaagccggcgcggaaagggcaggcgcaggacccaccctgacgccgcctctcccagccggctctcctgaccccccaagccccgcagctacggcggccccacagcctgagcaaaggcctcacctcagccgcggacaatggcggctgcttccccggcgtcgaccggagcgcgccgcggggtctgctgggagctgtagttccaggcgggcacttccggcgtcgggcagcggcgccgccatgacaggttcctgggccgcgccgcctcgccctgcctgggcggggttgggacctttctggcacctgcgtcgaagccggcggcaggatggactttgttgtcccggtcccagaccaccctcctccaccgtcgcctcccactgcaaaaaggcctgggtaagtcgcggccccgcgggcctcggtttgcccatccgcaaaatggcgcctcgtggtaccgggtttcccgggaggagctcggcgagttctcagcgctctcgagggatccttccatttggcgttcgcaagattgtgagaaagtgactgctgttattctctttaagataaggaacctaattcgagctacccttctctgtgaagctcgacggctgagaacgtcagggctcgttcccaagtctctttccagaggccaggctttatgggagcatgggttaccagcgacgcaccctgtgagtt

SEQ ID NO: 132340 - DNA, 608 bp, Homo sapiens; identical to SEQ ID NO: 56756
  chr19:58520707-58521315
  hyper

SEQ ID NO: 132341 - DNA, 267 bp, Homo sapiens
  chr19:58545120-58545387
  hyper
gcgtgtctggaatgccgtcgttttgccccgcggccccatcgtacatgcgcatccccgcagccgccaccgtctccactttccgcagcagcgtccctgacgctgcgcgacccgttgccaaggcgactggaaccgcggcccgaggtaactggagggcacggcgggggcggggcgctcatcccaggcggcttctgattggcctcggccgcctcgtgcgtcacagccccgcccctgcccgggagtcccgcagcggtgacttgtcaccgacgc

SEQ ID NO: 132342 - DNA, 12 bp, Homo sapiens
  chr19:58545577-58545589
  hyper
cgggacgcccac

SEQ ID NO: 132343 - DNA, 253 bp, Homo sapiens
  chr19:58545651-58545904
  hyper
gtcgggggaggcgggcccgggcccgggagggggcgggccgggccggggttccagagcccatcgggagtcctgaggtcgccgtaggggagggaaggggaaggctagaggccacgcggggcggggactgggggggctggggccgccccttccgcagggaccccgacccctgttggcatccgcctgtccgtttgaggccgaagcccctctacgtacccccattgcccgcccaaacaccgctcggccgcgtccaagt

SEQ ID NO: 132344 - DNA, 4 bp, Homo sapiens
  chr19:58570426-58570430
  hyper
cgcg

SEQ ID NO: 132345 - DNA, 127 bp, Homo sapiens
  chr19:58570949-58571076
  hyper
cgccccgcccctggccccacctctgccccacaccgggcactgggccgccacctttgttgatggaagagagaaactgaggcatagtgcccagggccaggggaccgcaaccacccggcccttgtcactg

SEQ ID NO: 132346 - DNA, 116 bp, Homo sapiens
  chr19:58609243-58609359
  hyper
agcgcctcccctccacgagcctacacggggtgggggttgcactagttccctacctgcctgcagggcccctcaccgatctggatctcagccacctccggggggacccggcccctgcc

SEQ ID NO: 132347 - DNA, 53 bp, Homo sapiens; identical to SEQ ID NO: 12690
  chr19:58609472-58609525
  hyper

SEQ ID NO: 132348 - DNA, 434 bp, Homo sapiens
  chr19:58609712-58610146
  hyper
gcatggccaatcagacgcgagtgtggcctcccggcgtcccgcccactccggcgcctgcgtcattttgggcaccatggcaacgaagtaaacaagcgggtaaataatagacccctgacagccagagacccggagaaacaaagacggtgagaaacggagaaacaaagacaaaaagacgcgcagaccgggagggagagaagcatgaaggcccacagacgctcgggggcagaccaagacgccctggggtccccgaaacagagatgtacagagtcggacacggaaagggagagaccagctcacggttaagaaaggagggagaccagcccaggatcaagaaagggaaagaccagcatgggctcaagaaaagaaagagaccagctcaggctcaggaaaagagagagacccagagaaaaggagcactcgaggctgagacagat

SEQ ID NO: 132349 - DNA, 49 bp, Homo sapiens
  chr19:58629357-58629406
  hyper
agagtagagggctcgcgccctgcggggagaggcgttagggggtccgcgc

SEQ ID NO: 132350 - DNA, 653 bp, Homo sapiens
  chr19:58661654-58662307
  hyper
ccactggctcacggccgccaattcagccggaggccgacccaagcctacactgcccctcacacctgacagaaaagctgcagactcgggggttacccccggagacggaccaggacacccagcaggcgtggcaaaacagtctctatgggagggcgggctagagatgcgagcgcggaactcacgggtgacgctaaggaaagagcgggggcgtccagaccagccccggagcgacctcgtcctcagaggagtgaccccaatcgccacggagcgtccccacccaccaggagaactacgcccctggccagaccctcgccctagcgggcccgacatgcccaccacccaggtgaaacccacccgcggacgcgcccctcgccgccccacaaggacccggcggacctccacccgccaagacttccctccgcaggaaacggaggcagcgcagggctcagggatgcgtcggcacttacggttggcggccggcggcagccatgttccgggcgattgcgcttgcgcggctgccgggacaaggatgtgcgcgtgcgcggagtccccgagcttcccccgcccaacgctggggcggccgcgggtaccgggttattcattaccctggcgtggacttgcctcggggcggacgcgcaggcatttactttctccta

SEQ ID NO: 132351 - DNA, 542 bp, Homo sapiens; identical to SEQ ID NO: 12693
  chr19:58665952-58666494
  hyper

SEQ ID NO: 132352 - DNA, 407 bp, Homo sapiens
  chr19:58666550-58666957
  hyper
cgcggcgctccaccgcttccgccctcgggttgcgttagccgcgacgatggcgccccccagtggcagcagggaggctgtgggggtgctgggcgttgcggtgtgcaggttttctgggaggatacctggcgccgaccttgaagggaccccaacgtgagagggaaagacgcccgtgatgccaaggcttgggcagcggacagccaaaatcctgaaaccccgcggtgctccctgtgattcactttccagaggcccctcagtgccccgacgctggcccggagggcggtcgctgactgtcttgagactgaagctcactttcggatcctgggcgttcttgccaggttttttttattaatacagagaaaaccagtggctttgtgacagttagttttgaaactccctgaggagggccg

SEQ ID NO: 132353 - DNA, 1036 bp, Homo sapiens
  chr19:58694196-58695232
  hyper
tccccactccccccgcgacttccgtcttccagtccccctccttccccaaaagttgcgtggactctagccccgcctcctacattctccccgccctccctgtccccgcccctccacccagatggacggccagttaggcccgccccctgcacttccggccctacccgcccttcctcttcccaagggacgtcataattaatcccgcccccaccgccacccaaccaagcatcacccattccagcacttccggcctgacccctgtccagcgcctttcctttctccagcttctgctctgccccaagagtggtcgccttcgtggcagggcacgactctctcccagctcgggtcgccgcccacattagtgtggggccctgcggcctagcgtccctcaccagaggcctccccttgcctagctggaccgccgagggacatcgacgagtatcctcctcctgctgtccccggcttcgcctgccgcccctaaccggccagtcaagatggccgccgctgggtgaggcaagctggcgcgccgcgggggcgtctgggagttgtagttcgggacggcgggctgacgcacttcgccgccggccgacgggcgccattgtgcggcgcgcgccgggtgagtgccgcgcgaaacctgcgtccgtcgggggctgcgctgggcgggtccagaaccgttagttgggggcgagcgcggcctctgcattttccgccgagctcgggtaccctgagccggccgtgcctgcagtcctcccgccgctctgtgggatggggtcggtgacccggaaccccgaggggagacagtgctttcggggcgccgcggtggagagaacagatcgcctccggaagcgtggggtctgggccagggaggcgatcccctccgatgcgcgggacagaggaggctcggtgtcctctcggggaggggaaaactggtcctatccagtcctgtgggagtcctatgactcactctgggcgttttccagtttgggtggacttgtcatttcccgctgagggagccgttcctgggcggaggctgcggtag

SEQ ID NO: 132354 - DNA, 920 bp, Homo sapiens
  chr19:58739673-58740593
  hyper
ccacagaaagccaaataggctcgactgagcgatcacctaggacgaatcgcctccagttagcgtgcttccaccttccactcggaatgctccaagcagggcactcccggggctttgtttctatcactaggacgcgtccccacgcccaggctgtccctgagtccctgccacaggcgcagatgttggcgggcgcccttgcccctgagctcccggttaacggccttggactgttctcatggctcagtcttggtctctctccccagcagggcaaggcgccgggaaggcacccgagatgacagcgccgagccccataggcgctagtcccgccctggacgccgaccgccgcctccacagtctcggcttcggttgctggatgagaaccagcgtggcccgtttaagggggaggggacaggcgctgcaaggagcagagccgcgggaagcaactccctaagccacaatgctagtcgcgaacacaggaaaaagctcatcccgccgccgcggggccccatgctcccgccggcaatgactatgcctgtgggagcaacggctaccggcgcgcggccttctgggagttgtttgttgcgcggagcgcgggcacgtccgccggccaccggaagcaccgccattggccggtgcgtgcaggtgagtctggcggcctcaaggttggctcggaggtttcactgttagccgggtgcggccggagcgcaggaccaggccagagccgccccaagtgatctgggcgtgccggagaaacgagcagggcctgcgggggtccctcatgcggcgaggccgagcaagggcaggggcctgatgggatcgggatctctccggcctcagggacggggaaggccggtccagtcaggtttcccctgcaggagcgcccggctgggtctgagcttgtcgggaggctctcctgctgcaga

SEQ ID NO: 132355 - DNA, 35 bp, Homo sapiens; identical to SEQ ID NO: 56765
  chr19:58789723-58789758
  hyper

SEQ ID NO: 132356 - DNA, 1175 bp, Homo sapiens; identical to SEQ ID NO: 56766
  chr19:58789817-58790992
  hyper

SEQ ID NO: 132357 - DNA, 30 bp, Homo sapiens
  chr19:58816707-58816737
  hyper
accaggcggaagtgcgtaccggaagtgccg

SEQ ID NO: 132358 - DNA, 8 bp, Homo sapiens
  chr19:58838198-58838206
  hyper
cgcctttc

SEQ ID NO: 132359 - DNA, 90 bp, Homo sapiens
  chr19:58838427-58838517
  hyper
ttggctagtctctgcggccacctccggaagggtccgccggctgtgctggtgaggtgggtttcgggggtgttctccgtcctgatccaggct

SEQ ID NO: 132360 - DNA, 196 bp, Homo sapiens
  chr19:58858560-58858756
  hyper
cggttcctcgcccgcaattcccccacgagccctggggagacccagcgctaaccaggggtgcccaagggaggagccgggagaggccctcctggaggtgggcacagcccaggcaaacatcagcagacggaaccagcacccgggacccagggaaacgtcacctgccaccaggagctccacagggtcgctgagctccgat

SEQ ID NO: 132361 - DNA, 27 bp, Homo sapiens
  chr19:58858901-58858928
  hyper
cgaaggtgacgtcggggatgggtccct

SEQ ID NO: 132362 - DNA, 30 bp, Homo sapiens; identical to SEQ ID NO: 12701
  chr19:58859150-58859180
  hyper

SEQ ID NO: 132363 - DNA, 333 bp, Homo sapiens
  chr19:58874183-58874516
  hyper
gcgtttctccccactgcgcctgcgtaactatgccgcggctgcgggcgcgcgccttctggttcccatggggacggcgccacagccaagctactcgggcgtcctgcgttgccatggatgcgctccgccccttcctgcacccggccagcctctgcggcacacacccaacagctacacaggcgcctggggctgcccgggtcgcggacgcaagtcgggccaacgtagcttctccctggcggtcctcctccggccccaggccgtctttaccacccctggaaccttgctgagttgacgccactgagctgcgtctcacacccacgcgctgtggaacaccca

SEQ ID NO: 132364 - DNA, 114 bp, Homo sapiens; identical to SEQ ID NO: 56772
  chr19:58892480-58892594
  hyper

SEQ ID NO: 132365 - DNA, 30 bp, Homo sapiens
  chr19:58898057-58898087
  hyper
cccagccagaggctcgggatccggggctcg

SEQ ID NO: 132366 - DNA, 399 bp, Homo sapiens
  chr19:58898385-58898784
  hyper
tgcgcttttgcaggcgcccacaagacagggcaactacggggtagcggacatccgccaggcacgcttctagggccgcttctgcaactgcgcatgcgcttgggctgcacccattccgtctagcccaaaaggttcctctacaaccttcctccggattggtctatagggacacgatggccttttacgcaagcgtcacccgtgctgacccggaagttttcttcccagttaaaagtgttggcccgcggcgcgcggcctcttcctgtctgtaccagggcggcgcgtggtctacgccgagtgacagagacgctcaggctgtgttctcaggtgagaccgccgcggggccggggatcctagggacggttcatggtctttcggggatagtgccccgcggcctgggccttt

SEQ ID NO: 132367 - DNA, 61 bp, Homo sapiens; identical to SEQ ID NO: 56775
  chr19:58907575-58907636
  hyper

SEQ ID NO: 132368 - DNA, 30 bp, Homo sapiens; identical to SEQ ID NO: 12703
  chr19:58912403-58912433
  hyper

SEQ ID NO: 132369 - DNA, 20 bp, Homo sapiens
  chr19:58919417-58919437
  hyper
ctgctgaccttccccctaag

SEQ ID NO: 132370 - DNA, 379 bp, Homo sapiens; identical to SEQ ID NO: 56778
  chr19:58919475-58919854
  hyper

SEQ ID NO: 132371 - DNA, 72 bp, Homo sapiens; identical to SEQ ID NO: 56779
  chr19:58920315-58920387
  hyper

SEQ ID NO: 132372 - DNA, 30 bp, Homo sapiens
  chr19:58920795-58920825
  hyper
gggtaaactggggacgttgtgctgggggtg

SEQ ID NO: 132373 - DNA, 201 bp, Homo sapiens
  chr19:58951199-58951400
  hyper
cagggctagccctgccgctgggccgaaccctcacacttccgctgggtgacggtcgcactcaggacctgtcttcccaaatgcaaaatgcgcgcaaggcctctgggcaccgcagggacgaaggctgggtatggagaccctggagacgcgtggcgctggctccactttcgggaacaccttggctcataaaagcagagtaattag

SEQ ID NO: 132374 - DNA, 554 bp, Homo sapiens; identical to SEQ ID NO: 12706
  chr19:58951525-58952079
  hyper

SEQ ID NO: 132375 - DNA, 98 bp, Homo sapiens
  chr19:58962922-58963020
  hyper
cgcaagcgtctgcgcgcgtattggggcaatgtgagctctgggggctggacttccggcgttgggactgtcacttggctgctcgcgtcaggccacaccgg

SEQ ID NO: 132376 - DNA, 30 bp, Homo sapiens
  chr19:58986984-58987014
  hyper
ggtccacttggaagcgagtcccagcgaact

SEQ ID NO: 132377 - DNA, 285 bp, Homo sapiens
  chr19:58987607-58987892
  hyper
ggagggcttggggtcgccctctggggcctgaacggctcctgctgtcggcgccctggagggcccgcccacttcccgacaggccgcgcgcgtcacctcagccttcgctcaggcctttcctaccctcaacgccgttccggggggccgggcctggcaagtcctcttggaacgcctccctcttgccttccccttttggggacagatcccgaagttcgagcatccctcggataggccgggtgtcaggcctggtctctcaggcccgtccaggtgggcgtctttcactgcaga

SEQ ID NO: 132378 - DNA, 526 bp, Homo sapiens
  chr19:59010486-59011012
  hyper
cacctggcacgcacacgccatacacgttaacctgttgcaagaagtccacctgcgacaacacgccctccacctcgtgcgtggacacgttctcgcccttccatctgcaaggagggagccggcgcttgtgaccacgcccccgggaaggagaggccccgcctcttgcccccgccccgccccttttggggatcaggaggcccagtcagccccgccccctcgaaaatcgagaagccccgccttcgcgtgagaagtcctgactccaagttccgccctcttacgacaggaaagtcccgcctcttcagcctgactccctctaggatctgaaagcgtccgtggccccgcgccagccccgccccgagaaaccctgcctcggaccggaaggtgtccccgaggcggtcgcggaagtagaggaagccttcgcggtccatggccagtacgtccccggtgttgtagtaaacgtcgcccgattgccgcacgttgcgcaccagcttccgttccgacagctctcgggggccgcggtagcccacga

SEQ ID NO: 132379 - DNA, 30 bp, Homo sapiens
  chr19:59030738-59030768
  hyper
ttcctcagtcccgacgccgcaaggccggcc

SEQ ID NO: 132380 - DNA, 30 bp, Homo sapiens
  chr19:59031066-59031096
  hyper
cctcgcccgccctgcggcagggggatgccc

SEQ ID NO: 132381 - DNA, 30 bp, Homo sapiens; identical to SEQ ID NO: 12707
  chr19:59031448-59031478
  hyper

SEQ ID NO: 132382 - DNA, 589 bp, Homo sapiens
  chr19:59049735-59050324
  hyper
agccaggggccagggcgtcttcagggtggtgggctggagggggcgggccggctagcgaggcgtggccctatgaaggggcaggctgggcgtggaggcggtgactatgccgcggatggggtgggcccagatctggggggccgcgcgcccgggctggaacaaaggcagaggcggggacaaagccccgcggcccccagtccccatcaggaacaaaggccacacccggcccagcggtcgacgcgcccgtgctgcagccacgtgcggacacctgggagcggggcccggggaggcagtgccccgttaccctcacgccccgcccggctagccacctttacctgtgcgcgccttgggagtggcgaatgggtttcatggttgttcgcgccagtcctcgcggcctccaaacatcctccggaagctgccacctaccccgcccccagccgttgtcacctggaccggagacctcacgaccccaggggcaccgcacagggggctgaggcccacccccccggggccagcctcaatgcacccacccaccacgttttcaacgcgctgatagtccctaggcgggttcgcctctacctacagaccctgc

SEQ ID NO: 132383 - DNA, 207 bp, Homo sapiens
  chr19:59055681-59055888
  hyper
ggactaggagttggcgcgtgcgtactggcggcctctcccgcaccgaccggcctgggccccgcccccgggcgtgaggcgcccaatgcgcgtgcgcggcggcgtcggcgccagttatttctgtcccgccccccggcctcggctctttctgcgagcgggcgcgcgggcgagcggttgtgcttgtgcttgtggcgcgtggtgcgggtttcg

SEQ ID NO: 132384 - DNA, 309 bp, Homo sapiens
  chr19:59066307-59066616
  hyper
cgcccgcacgcccgcccgggatccacggtccagcaggggccactcaccggagctgggacggacacccgtttccgcttccgggtcacgcttctctttctgggatccccgacttgcccaccaactaaggcccctcggtcctgtcgccgccgccgccgtttccggattaaacgacgtgacgtaacatgccccgcccgcacccggaaggttgggaaactccaggagcgcgcgtgcgcccgtgccccggaacgggccagcgtccgagcgcatgcgcaacagctcccgtttcctctgcgcgtccgagtgtttcat

SEQ ID NO: 132385 - DNA, 150 bp, Homo sapiens
  chr19:59070406-59070556
  hyper
gactcgggcatttccgttcatggagatgacgcttcggcggccttgcaggtcacttccggcgactttcgcggggccgggcaggaagcggagttagtcgccatctttgagtggggcagacgtgggccgcttttgctcgcggtcacttcatct

SEQ ID NO: 132386 - DNA, 30 bp, Homo sapiens; identical to SEQ ID NO: 56788
  chr19:59071084-59071114
  hyper

SEQ ID NO: 132387 - DNA, 30 bp, Homo sapiens
  chr19:59084573-59084603
  hyper
ctcccttcccctagcggtggtcgcaatgat

SEQ ID NO: 132388 - DNA, 65 bp, Homo sapiens
  chr19:59084980-59085045
  hyper
gggcgggccctgaacgtctccatggtaacctggggacacgactcgacatcgcctgggtaacccgg

SEQ ID NO: 132389 - DNA, 30 bp, Homo sapiens; identical to SEQ ID NO: 56790
  chr19:59086688-59086718
  hyper

SEQ ID NO: 132390 - DNA, 30 bp, Homo sapiens; identical to SEQ ID NO: 12709
  chr19:59087186-59087216
  hyper

SEQ ID NO: 132391 - DNA, 30 bp, Homo sapiens
  chr20:271169-271199
  hyper
gtgaagtacgcatgcgtattccgcctttct

SEQ ID NO: 132392 - DNA, 30 bp, Homo sapiens
  chr20:278080-278110
  hyper
gatacctttgagggcgcggcgggggagggt

SEQ ID NO: 132393 - DNA, 30 bp, Homo sapiens; identical to SEQ ID NO: 56792
  chr20:278976-279006
  hyper

SEQ ID NO: 132394 - DNA, 116 bp, Homo sapiens; identical to SEQ ID NO: 12710
  chr20:291046-291162
  hyper

SEQ ID NO: 132395 - DNA, 160 bp, Homo sapiens; identical to SEQ ID NO: 12711
  chr20:291220-291380
  hyper

SEQ ID NO: 132396 - DNA, 30 bp, Homo sapiens
  chr20:304963-304993
  hyper
ccgctacgccccagcggaatgccaccttaa

SEQ ID NO: 132397 - DNA, 30 bp, Homo sapiens; identical to SEQ ID NO: 56795
  chr20:305902-305932
  hyper

SEQ ID NO: 132398 - DNA, 30 bp, Homo sapiens
  chr20:306349-306379
  hyper
cggcgggggcgcgccgagcccgcctgagac

SEQ ID NO: 132399 - DNA, 30 bp, Homo sapiens; identical to SEQ ID NO: 56796
  chr20:307305-307335
  hyper

SEQ ID NO: 132400 - DNA, 502 bp, Homo sapiens
  chr20:327660-328162
  hyper
gctgcaggcggccgccgtctgcagagccaggccctgaggcgggccggcgccccctcccccgccccgaactgcggcgcaggcgcgaaccggacccgcctttgctcggcggagacagcaggcagagaggtgagcttagccctgccccacgcgcggccaggccccagccccagcccctggagaacccccgcgctctgcccgcatcctcagcccgggccgtgtcccgccagggccgggacctttgcgcctgagcctcggctttgggaggtgggggtcccagggaagcagcaggggcgggagacagaaacagccccatcgcccctcgacgcctcagggttgataggctgggtagaggcttcaaaggacacccccacccccgccaacacttcaaaaacccattcctacccctctctgcctcagtttctctctagggaaaaggacgcagttggtgtggagcagggcatcggtggtcctgtcaggaagagtggcgcgggtgccggtgggg

SEQ ID NO: 132401 - DNA, 30 bp, Homo sapiens
  chr20:328655-328685
  hyper
catctatttggagtcgcggaagcggtgaat

SEQ ID NO: 132402 - DNA, 30 bp, Homo sapiens; identical to SEQ ID NO: 12713
  chr20:329001-329031
  hyper

SEQ ID NO: 132403 - DNA, 30 bp, Homo sapiens
  chr20:335224-335254
  hyper
ggctctctcagaggcgccagcccctccctc

SEQ ID NO: 132404 - DNA, 30 bp, Homo sapiens; identical to SEQ ID NO: 56799
  chr20:361888-361918
  hyper

SEQ ID NO: 132405 - DNA, 42 bp, Homo sapiens; identical to SEQ ID NO: 12714
  chr20:362797-362839
  hyper

SEQ ID NO: 132406 - DNA, 113 bp, Homo sapiens
  chr20:388458-388571
  hyper
cttgggtgagcaggcgccgggctcgcagggcgcgctcctaacccgtccccagcggctcgacgctgtggatcccgccgccctccagccccggctccggcgccgactcctgctca

SEQ ID NO: 132407 - DNA, 30 bp, Homo sapiens; identical to SEQ ID NO: 12715
  chr20:443316-443346
  hyper

SEQ ID NO: 132408 - DNA, 30 bp, Homo sapiens
  chr20:443625-443655
  hyper
tgggagcgccatttacgtagacgttcacgt

SEQ ID NO: 132409 - DNA, 427 bp, Homo sapiens
  chr20:524228-524655
  hyper
ggaagcgtgagggtcggccgcgctccgctgccctatcctgggcccaccccacccgccaacgacctcgcctggctgctccctaggtacctgtggtggaagcggcagcggcggcggccgctctcccctctgctcacacagacaatatggcggcgatggaggaggagacacacggctcggccgccagccgcagggaccagagcgaggctgcagccgctgctgccggaagcggaaaccccctcctaccaggaggcggggcgagacagcttccgactccgcccccagaggaatctctctgaatgcggccatgctgggatgtcctattgtaaccttagggattcagttctggcctagggtgcaaaatggaaggaatccccaacgcaaagcagaataaggagacttgcaatagttaagcgcattttatttcaat

SEQ ID NO: 132410 - DNA, 295 bp, Homo sapiens; identical to SEQ ID NO: 56805
  chr20:590303-590598
  hyper

SEQ ID NO: 132411 - DNA, 107 bp, Homo sapiens
  chr20:590967-591074
  hyper
ggcccccgccttataggcgagggaggggccaatggcaaggccgccccggccgggggcggagggctccgcccggccaatggggaggcgtccgcccggccaatggggag

SEQ ID NO: 132412 - DNA, 273 bp, Homo sapiens
  chr20:644552-644825
  hyper
ccctgcagcagccagggccgcgagaaggccttgccgcagacgccgcacttgtggcgcaggttgtgcgtgagcaggtgcatggcgagcgcgggcatggacacgtaggccttgccgcacgtcgggcatttgcgcgccagctggctgtccaggctgcggtgcgtctgcttgtggcggctcaggttcgacgacgtggcgtaggtcttgccgcactcggcgcacgcgtgccggtgcccgccgcccgcctgcgcccccgcgcgccccgcgcgccccccg

SEQ ID NO: 132413 - DNA, 201 bp, Homo sapiens
  chr20:644985-645186
  hyper
cggggtcgctgtactcctccggcgccgccggcgggtacgcgggctcggccggggccagctccaggcccggcttctggtccgcatcgtagctgctcgggggcaggcggtgcggggcgtaccctggagggggcgagaagtggaggggcggtgagaggaggcgccgaagagggtttcccgctttgagcgcgtcaccctttgcgc

SEQ ID NO: 132414 - DNA, 216 bp, Homo sapiens
  chr20:656431-656647
  hyper
gatcgcgggagctgcgctcagcactccggctgccggctttatatgggacgcaggctggagatcaggtggtcccctagcaatggaaccgctcggcgctctaatccatcaaatgtcccccaggacaatcgctccgcacacgttcccctgaaccggcggcggtgggggcaggcccggagcaggcaggaggggagaaagtgagggcgagaaaggcgcaga

SEQ ID NO: 132415 - DNA, 418 bp, Homo sapiens
  chr20:656931-657349
  hyper
gtgcaaaagagagggggaagccgaggggaacggagggaaagcggtcccgagcaggcggggttcaggcacatggggccgcagggaaggggatgcagaggaaagagtgcgcactggccagcggccaccctcccgcctccagtcctctccctctcccccagttctgaagtggccagggtggacgctcagctttcactagagtaagtctcccctcccccctgctcgggctcccactggagccccctgttgggtttggggttcaactttcttcttccagaactggtggggggagcaagtcccccacgccgatgcctggccttgctcggttggtcctgttccggtgcctagctcaggcgggcgctgcaagaggaagtgaaaatcgtccagtaattaattttcctgctgccggggggtggtggtt

SEQ ID NO: 132416 - DNA, 361 bp, Homo sapiens; identical to SEQ ID NO: 56809
  chr20:708540-708901
  hyper

SEQ ID NO: 132417 - DNA, 474 bp, Homo sapiens; identical to SEQ ID NO: 56810
  chr20:708944-709418
  hyper

SEQ ID NO: 132418 - DNA, 30 bp, Homo sapiens
  chr20:814106-814136
  hyper
aagtcccagctggccgcgggagggaggagg

SEQ ID NO: 132419 - DNA, 320 bp, Homo sapiens
  chr20:865712-866032
  hyper
tcactcacccggggccgaggcgttagccctttcttgcaccaggtgccgcaacaacaccagcagctggcgcaggctgtgctgctggtcctgcaggaggctggagttgtgcctgacaccgcgcaggccgcgctcgatgttggtgagggcggcgctctggcggctcagcgtgttcagcagcttcgccttcttgctgaggatgctggccagctcctcctgctgcttggtctccagggcctgcaaccgcttctcgagcgcgctgcggggtagggggcgcacagaggtgagcctggcatcctcgcgaagcacgcacccccgcgcgc

SEQ ID NO: 132420 - DNA, 122 bp, Homo sapiens
  chr20:982676-982798
  hyper
cggtctgccccgcagcgcctgcccggccgccctgcccagccaccccttgtaccttgcttcttccttcggttcagggcgagcatgtccacggcgtgggcgacgagcaggagcaggcagagtgg

SEQ ID NO: 132421 - DNA, 307 bp, Homo sapiens
  chr20:982891-983198
  hyper
gggggctgctgtgggcgcgccgggcgcatccgccaggcgcgggtcggtccggccgccaggtctagtgagggcgttggcggagccggggcactgccctggcggggaggagccggcgcggcgggggcggcgcgttaaccagctcggggcccgggagcgcgcgcggggagggggcgggggtcacccgggtcggggccctcgagttcgatctgtcccgcagccggcggtcttgcgtctttcccgcccccagcactgcccccgagcacgtgcacgtgcccaccgccagccacaggtacgcacgcgcgcgcag

SEQ ID NO: 132422 - DNA, 230 bp, Homo sapiens
  chr20:1098999-1099229
  hyper
cccagccccttccccggcctagcataccccattttgtggatgggaagtctgcctctcagcaaggtggcctcttggaggacgctgtgcccgcgtcaggcgatcctgtcgactgccgccaagacccggcttccggctttgaggggccacgccccgctcgcactccctggcggaacctttcagtgctgcgctcgcgttgccaacccggcgcgcctcacgcagttgcgcccgct

SEQ ID NO: 132423 - DNA, 30 bp, Homo sapiens; identical to SEQ ID NO: 56811
  chr20:1099721-1099751
  hyper

SEQ ID NO: 132424 - DNA, 287 bp, Homo sapiens; identical to SEQ ID NO: 56812
  chr20:1165688-1165975
  hyper

SEQ ID NO: 132425 - DNA, 133 bp, Homo sapiens
  chr20:1206200-1206333
  hyper
cccaccaacgccctgcgccctcgtccctctcagtcccggtcctctccactctagcgcactgccctactctgtccgtacccccagccgccgccgccgccgccgcgcccagtccctcggtcgctggcccgccctt

SEQ ID NO: 132426 - DNA, 722 bp, Homo sapiens; identical to SEQ ID NO: 56814
  chr20:1206687-1207409
  hyper

SEQ ID NO: 132427 - DNA, 105 bp, Homo sapiens
  chr20:1294286-1294391
  hyper
ggggcgagaggagacgtggctccacgcggccactagggggcgtcaaagtccatgcccttaaaaagccaggaaaacggggagggaaggggcgaggatacaggaaga

SEQ ID NO: 132428 - DNA, 30 bp, Homo sapiens
  chr20:1306266-1306296
  hyper
aactcccctggcctcggaacaccatttgta

SEQ ID NO: 132429 - DNA, 30 bp, Homo sapiens; identical to SEQ ID NO: 56816
  chr20:1306603-1306633
  hyper

SEQ ID NO: 132430 - DNA, 329 bp, Homo sapiens
  chr20:1372853-1373182
  hyper
tcaaaagtaaaaagacggaagaaggccgtgcagctctacttcccccaaggccaggaagggccaaagcaatgacttaggaagtgggatgtttccccaccctaggcaaaggggcgaattccgagttccccggaggaagcagcagctctgcagactcggaattacctcgtcctcatctccagtgaagggagggatggaagtgggggcaggggcacagaaatggtacaaatccttcctaatggtccctggccagagctctgcccattcctgaaagtgtgaccttgggaaagtgagaccttgggaaagtgacttcgcctcgccaagcctcagtt

SEQ ID NO: 132431 - DNA, 30 bp, Homo sapiens; identical to SEQ ID NO: 56817
  chr20:1373578-1373608
  hyper

SEQ ID NO: 132432 - DNA, 30 bp, Homo sapiens; identical to SEQ ID NO: 56818
  chr20:1373901-1373931
  hyper

SEQ ID NO: 132433 - DNA, 30 bp, Homo sapiens; identical to SEQ ID NO: 12722
  chr20:1447713-1447743
  hyper

SEQ ID NO: 132434 - DNA, 30 bp, Homo sapiens
  chr20:1783067-1783097
  hyper
cgaagctggcttctccggtaaacccctgct

SEQ ID NO: 132435 - DNA, 985 bp, Homo sapiens; identical to SEQ ID NO: 56820
  chr20:1783320-1784305
  hyper

SEQ ID NO: 132436 - DNA, 160 bp, Homo sapiens
  chr20:1874959-1875119
  hyper
gaagcggggagcagccgcgcggccggagtccggaggcgaggggaggtcggccgcaacttccccggtccaccttaagaggacgatgtagccagctcgcagcgctgaccttagaaaaacaagtttgcgcaaagtggagcggggacccggcctctgggcagcc

SEQ ID NO: 132437 - DNA, 1055 bp, Homo sapiens
  chr20:1875155-1876210
  hyper
cggcgcaggtccgggcccggcagggacggggaggggcagagcgggaccggtcggggctggggaccagccgcgcgggcttctgaacgggcacgctgtcggagccggaggctcgtctagtcccgagccccagcgggccgcggcggctcgcggggccgccttcccgggacagcagccggggcccgggcgccggcgcgggggaggacgctgccctccccggccgggcgcgcagctcgcagccctcgctccctcccccggggcgcgcaggcgggcgctcgctcgcagagaaggtgccggcggggccggagccccgaagcctccccgggcggcgggaagacgggaggaggggaaagggaaggagggagggggtcgggctgccgggagggcgggggcagcggccgggactgcgggccgggagcgagcccagccgcccgcgccgtgtggagcccgggcggggcaggtgggcagcggcgggggcggctccgcgcggccgggctcggccgtgctgcccctcgcccctgctcgcgcggtcctctctcccgcgcggtctgtcggtctgcgcgccgcctcgctcctcgctcctcgctctccccctctttctccccctctcgcctctccgtgtctctggctctctgcctggctcccttgggtctgtttctctctcctgccgcctctctctggccgcccctggctttatttctcgcgcgcttggggtctctcccagtctccgtctctccatttctcctggggggcggggagggggggtctccaaaaaccgcggcggcggcggcggccgctccaggcgcccgttccggagtcggggggaggcccagccgggaggggggaagggggggagccttagtcatttccccgctccagcctgctcccgcccgagcgcgcactcacggccgctctccctcctcgctccgcagccgcggcccatggagcccgccggcccggcccccggccgcctcgggccgctgctctgcctgctgctcgccgcgtcctgcgcctggtcaggtaagcacccccccgctccccaccgctgcactccccaa

SEQ ID NO: 132438 - DNA, 292 bp, Homo sapiens
  chr20:2082270-2082562
  hyper
cagtatttattaggcgcctactgcggacggttggtcttcacgcagatcaggcgagaagggatagtgatgcgcgggccgctgcggagacccggagcccgccgcggatcacgggaatttcgcgcctattttttgttggctgggtgttctcgccagtgattgggtcccggcaaggcgtgccggtgcgctcggctgcggctgctccgtcgacctttgcaggaccgggcggtgcagggctcactcggctggcgtcccgggggatgggccaccaggagtctccgctggcccgggcgcc

SEQ ID NO: 132439 - DNA, 30 bp, Homo sapiens
  chr20:2083178-2083208
  hyper
gctaacagagagagcggagagtttgtgctt

SEQ ID NO: 132440 - DNA, 30 bp, Homo sapiens
  chr20:2083835-2083865
  hyper
gaacgtggagctggcgctggctgaattctg

SEQ ID NO: 132441 - DNA, 850 bp, Homo sapiens; identical to SEQ ID NO: 56823
  chr20:2187673-2188523
  hyper

SEQ ID NO: 132442 - DNA, 278 bp, Homo sapiens; identical to SEQ ID NO: 56824
  chr20:2444390-2444668
  hyper

SEQ ID NO: 132443 - DNA, 30 bp, Homo sapiens; identical to SEQ ID NO: 56825
  chr20:2451193-2451223
  hyper

SEQ ID NO: 132444 - DNA, 195 bp, Homo sapiens
  chr20:2489031-2489226
  hyper
aaaaacagaaaaactcggtgatgcaggactcaagacgctccccagccaaaaaccacccagggatgtgcggacctagccacgtccccaccccagccgcggggatgttggtccatttggccctggcagaactcaaccccacagcccaaataaaccccaggacgcacgactggggccgccctccgtattcgaaaactg

SEQ ID NO: 132445 - DNA, 30 bp, Homo sapiens; identical to SEQ ID NO: 12726
  chr20:2489270-2489300
  hyper

SEQ ID NO: 132446 - DNA, 30 bp, Homo sapiens; identical to SEQ ID NO: 56827
  chr20:2489877-2489907
  hyper

SEQ ID NO: 132447 - DNA, 89 bp, Homo sapiens
  chr20:2502470-2502559
  hyper
agacgtgggtggtcgcggtcaaaatcaatttctcaaaagcggcctttatgccaggccggaggggctccccctagcgagtgagggaagca

SEQ ID NO: 132448 - DNA, 30 bp, Homo sapiens; identical to SEQ ID NO: 56828
  chr20:2505963-2505993
  hyper

SEQ ID NO: 132449 - DNA, 485 bp, Homo sapiens
  chr20:2539193-2539678
  hyper
cgcgccgggggcagcccaagcccggggtctccccggaggaagcaaacagggcgcaggagacacagagaagagctgggggagcaggagcggggcgaggcagagaggacctgcgagggcaggagaaagcgcgacgagagggcctccttccaggagcggacagcagccccaaagagggaaaaggagattccgaggagggaggagaagtcgaagcggcagaagaaacccaggtgtgttgtggctccgattctgggcattcgctccgcgcgctcccgctccttcgcggcccttccccttcccccgtgagggactgatgcccccctccccggggagaggcagcccgtgccctcgctctggcttccgtgcctcccagcccttaccactgccccactctgcggtgggttcttcatcccagaaccgggatgaagatcgcgggtccgcgcgggggagtggccgcgggctctccactccagcgcctcgtggcaccc

SEQ ID NO: 132450 - DNA, 31 bp, Homo sapiens; identical to SEQ ID NO: 12728
  chr20:2627686-2627717
  hyper

SEQ ID NO: 132451 - DNA, 240 bp, Homo sapiens
  chr20:2632927-2633167
  hyper
cggacctcccgccccgacttcacccagctctgctgcccgtaactcatatgacaagaacatcaggaaccggactattaccccgaaagggccttcccaagtcgtttcgccgcctgcagtgcccgaccgggggccgcgcgtccccggcaaccacgcccgcccgcgcagctgcagaggccggaaaaggcccgctcgcccgcgctcggcaccacccagcccgcgctccgggcgataccaccctgg

SEQ ID NO: 132452 - DNA, 56 bp, Homo sapiens
  chr20:2633217-2633273
  hyper
cgggggggcgggggcgtggcctctggagcctggttccgcgcgccggagcgcgctag

SEQ ID NO: 132453 - DNA, 114 bp, Homo sapiens; identical to SEQ ID NO: 56832
  chr20:2633590-2633704
  hyper

SEQ ID NO: 132454 - DNA, 30 bp, Homo sapiens; identical to SEQ ID NO: 56833
  chr20:2644634-2644664
  hyper

SEQ ID NO: 132455 - DNA, 202 bp, Homo sapiens; identical to SEQ ID NO: 12729
  chr20:2668733-2668935
  hyper

SEQ ID NO: 132456 - DNA, 88 bp, Homo sapiens
  chr20:2674066-2674154
  hyper
catctccccgcccagcgccccaggaggggaggggacagcgccggcgcccgcggacccgctttctccgagggagcgcccaagaggcgag

SEQ ID NO: 132457 - DNA, 22 bp, Homo sapiens
  chr20:2674696-2674718
  hyper
cgggctgtctatggctctgaga

SEQ ID NO: 132458 - DNA, 166 bp, Homo sapiens
  chr20:2723862-2724028
  hyper
ggttgttctcacgttcgcccttccagcctctgcggtgtgtctgtctccccctggtgggcaaggagaggaccaggcagcggcacccggagggtcggcagtctctctaggtccaggggagagcccgggcactgctcctggttctagaccccaacggaagtcctctaat

SEQ ID NO: 132459 - DNA, 134 bp, Homo sapiens
  chr20:2731109-2731243
  hyper
cgagcagtgaacacacgtggagaggcagtgtagaaccccccagcctggctctatttggccgctggccgagtcttctccatttccatcctcccgccccgccccagctgagccacccacttctcctctccacccca

SEQ ID NO: 132460 - DNA, 1049 bp, Homo sapiens; identical to SEQ ID NO: 12731
  chr20:2731391-2732440
  hyper

SEQ ID NO: 132461 - DNA, 23 bp, Homo sapiens
  chr20:2780741-2780764
  hyper
tgcactgtgagtgtgagtgtgcg

SEQ ID NO: 132462 - DNA, 622 bp, Homo sapiens
  chr20:2780883-2781505
  hyper
cgtgtgtgcgcgtgagtgcgagtgtgcgtgcggggtgagtgtgcatgactgtgagtgtgcgtgggtgtgcgtgtgcccgcgtgttagggagggatcgccccacggggcaggagagccgggcagtcggcttgcgggggagcggaccgtcggtcggggaactcaccgttagctgtctccgccggcggctgtgccgggctgctatgcagggccggggtcgagcctgggaccttggtggtcccgggctgcgcgaggcccagcaccgagttcctgggcgcccccagagccgggccgacggccggcgcgaaggcggccagggcgagcaggagcccccacatggcggggattgagtgccaggggcgcgcgggctacggcgggtggcgggtcggtctcttcctgccgagtgcgccgagccccccgccccttcctgccccccgcccctccgcagcctcctgcccgcccacagcccgctgcccgcctcggacctcggagaggaggagagggccgggaggagcgagcggggctgacctccaaggggccgccccaagtctcaggaccgccgactctgcccttcctctccgccgtctggggccaacccgcctcgttggcgcgctgcgcctttata

SEQ ID NO: 132463 - DNA, 30 bp, Homo sapiens
  chr20:2781916-2781946
  hyper
agttcttttaccacccgggagccaaccact

SEQ ID NO: 132464 - DNA, 282 bp, Homo sapiens; identical to SEQ ID NO: 56840
  chr20:2785584-2785866
  hyper

SEQ ID NO: 132465 - DNA, 6 bp, Homo sapiens
  chr20:2785955-2785961
  hyper
cggtgt

SEQ ID NO: 132466 - DNA, 37 bp, Homo sapiens
  chr20:2801695-2801732
  hyper
ccgtggtcacagacgcgccgggagggagggggccacg

SEQ ID NO: 132467 - DNA, 261 bp, Homo sapiens
  chr20:2801857-2802118
  hyper
cggagcggggcgagggcggcagctggagggcgtcgaggccggagcgatgaccctcgggcagagggggacaggccagggtctgaggctgggagagaaatcccaagcccggcccggttgggaggccgtgggcatccacacggggcatgtgctggcggccctgaagcgccgatgtccccggactcgccgcacgcggactggggaccgacagcgcgcaaggagagccctctggctctggcaacgaaggggcgggcttggcggggg

SEQ ID NO: 132468 - DNA, 570 bp, Homo sapiens
  chr20:2820434-2821004
  hyper
tggagtcccccaagatgaccacgaacttgttgtgtagcagctgctggacttccgaggcctggaagtggaccatgtcgcttcgcagcgggcggcgcggctcctcgctcgacagacagaagaccatgccgccaccagcaacgacaggctgcagggagaggccactaagcagcgcgatggtggggactctgggcaggtcagcctcagggctagcccctccggggctgctcaatgctaaagggaggaggtgacggcagcagagccatggtggcgccagccttggtcacacttggtaccagaggcagggggtcgtccagccagcaggcctccagggcactggggagcttcccgcgcggcgccgccctgcgcctcgccacgtgcccgccgccgtcccgcgcatgcgcgcacccgctcgcgccaattaccaagtcccggggctccgcggtgttcacccgcgacccgggtatgcctgcgcaccgcgcgcctggcccgcagcgggctcctagccaagcctcatgttcccgcgccccagtcggccagtcggttctgcaaagctcccgccccgcagagacc

SEQ ID NO: 132469 - DNA, 153 bp, Homo sapiens
  chr20:2821252-2821405
  hyper
acgggctggggtctcggggcggcagccaagtgaggctgcccacagtggtgatggccgcggcggcggcctcgccacgtgacccggacgggcggaagcggaagtgccggcctggagcccgctctaggtgggtgtcccctcggtgcttcccagctg

SEQ ID NO: 132470 - DNA, 30 bp, Homo sapiens; identical to SEQ ID NO: 56842
  chr20:2821801-2821831
  hyper

SEQ ID NO: 132471 - DNA, 36 bp, Homo sapiens
  chr20:2853881-2853917
  hyper
ggcactggtgcactcgcagccggtccttccggggtc

SEQ ID NO: 132472 - DNA, 30 bp, Homo sapiens
  chr20:2854154-2854184
  hyper
ggcgctgacagagacgcgcgcgcgcgcgat

SEQ ID NO: 132473 - DNA, 30 bp, Homo sapiens; identical to SEQ ID NO: 56844
  chr20:2854619-2854649
  hyper

SEQ ID NO: 132474 - DNA, 233 bp, Homo sapiens
  chr20:3026335-3026568
  hyper
cagcccgagagccccgccccgccccgccatcctccaataaagtgtgaggttctccgaagctgttgcgtcgagttctgtccttcgtcccctccctgtcttccccgctgagacccttccctgcgtgggggctggagggacgcgggtccggccccgcgggcgggagtaactaagggatggccccgggccctggcgggaaggccgggccagagcctgggggcgggatgcggacgtcc

SEQ ID NO: 132475 - DNA, 583 bp, Homo sapiens
  chr20:3052453-3053036
  hyper
ggggagggagggacccgcagccacaggggcgcgccccgctccggcctcgcctgagaactccaggagctgagcggattttgacgccccgcccttgaccgcggtcgaggcccccacggcgccccagcgcgtctcagccccgctgtcccgcccgaactccgaaccccggaccccagcatccttgcccggcgcaccccggccggcctcgcagggtcctccgagcgagtccccagcgccgccccggctcccgctcaccccgcccgtccccgcagtgcctcccctgcggccccgggggcaaaggccgctgcttcgggcccaatatctgctgcgcggaagagctgggctgcttcgtgggcaccgccgaagcgctgcgctgccaggaggagaactacctgccgtcgccctgccagtccggccagaaggcgtgcgggagcgggggccgctgcgcggtcttgggcctctgctgcagcccgggtgagcggggcaaggcgctccggggccagggggaggcgggcgggggtgcggccgggattcccctgactccacctcttcctccagacggctgccacgccgaccctgcctgcga

SEQ ID NO: 132476 - DNA, 426 bp, Homo sapiens
  chr20:3063059-3063485
  hyper
cgggacctgttgcttctctggggtggatctgcccacgacctcaggtccggggactggccggtgggcgtggtggcgggggtccgcgctcccacctctctccctttccctcttcccgccagagactgagacagacgcgaggccgtgcattggcggaggtttattgtccgtgctgcaggggcgggcgcgaagagcgcgccggtggggcgagcgcggggctcagtaggcgtcgggctgggcgggctcgaagggctcgggcgccccggccagctgcaccagccgcagcagcaaggccccggccggcccgtccagctgcgtggcgttgctccggtcgctggcgcgggcgcggcggtgaaagccctcgcggcactcgggctcggtcacgcagctctctgccgggaggacgtgtgagcacgggcgccctggggc

SEQ ID NO: 132477 - DNA, 30 bp, Homo sapiens
  chr20:3063751-3063781
  hyper
agcccagctcgtccgcgcagcagatgctgg

SEQ ID NO: 132478 - DNA, 106 bp, Homo sapiens
  chr20:3073285-3073391
  hyper
cggggacaatgactgcggccctggggtcccacagacgttccctttgctagacttaaggaagagctaggcctgtccgcgctcccagcccccacgcagccagacaccc

SEQ ID NO: 132479 - DNA, 359 bp, Homo sapiens; identical to SEQ ID NO: 56847
  chr20:3073560-3073919
  hyper

SEQ ID NO: 132480 - DNA, 100 bp, Homo sapiens
  chr20:3140537-3140637
  hyper
ttccgcctgctgcgcgagtgacggatgcggccgaggctcaaaagactctgtcagcgtttcccaaggacattttccactggaggacgttgttgaggaggca

SEQ ID NO: 132481 - DNA, 301 bp, Homo sapiens; identical to SEQ ID NO: 56849
  chr20:3154655-3154956
  hyper

SEQ ID NO: 132482 - DNA, 49 bp, Homo sapiens
  chr20:3185343-3185392
  hyper
cccaatctagactccgcccactactcggagccccgcccagcggcacatc

SEQ ID NO: 132483 - DNA, 30 bp, Homo sapiens; identical to SEQ ID NO: 56851
  chr20:3189662-3189692
  hyper

SEQ ID NO: 132484 - DNA, 30 bp, Homo sapiens
  chr20:3189920-3189950
  hyper
ggagtggtctcttccggttcttgaagatag

SEQ ID NO: 132485 - DNA, 208 bp, Homo sapiens
  chr20:3218712-3218920
  hyper
caggcgcagttcccccgacccccgtcacgcgccccgggtcacacgggggccgacaggcaacggtctccagtcctgggaccgcgtcccggccgcctggaagccagagccgttggtccaaaagggagaacaattgggggtgggaggagtatctgagggacacatgggtcgggggaggctgcgccctccctgggccggtccccggatggtc

SEQ ID NO: 132486 - DNA, 941 bp, Homo sapiens; identical to SEQ ID NO: 12741
  chr20:3220009-3220950
  hyper

SEQ ID NO: 132487 - DNA, 372 bp, Homo sapiens
  chr20:3229107-3229479
  hyper
ccaatcacctgaagctatctgcggaggctacaccctttcccccgggccagcttccacatctgcccagtggggcatttccccttgtcccacccagcgactggttgacaggaagcagggtgtctatggactggcggcgggcgccccttttcctcacctccctgcgcggccagcgggggcccggggtgtggtcaggtgggaggcccgcgccacgtgcggcaggaaccgcctggcgagtggaacccgagcttgcacggggacagctgatgcctttctggtcgctcctctagagctccgcgggctccggcaaacccccccgttagaacttgcggttccaacgcgcagcgccaaatctggcccttacttgacccgtca

SEQ ID NO: 132488 - DNA, 291 bp, Homo sapiens
  chr20:3229526-3229817
  hyper
cgccaagctttcactgcgcggaaacgcgcccatcaggctggaaaggcgtggttcctactacagctcggccgcggcaggctggggccgagaaccggcacccgtgcacggcggactaagacgagggtgagggacacgggtgggccgggagagccccgttcccatagccggcttccttgagcccctccccaagttctgggactccccaagttcccaccccgcaagccagtgtggtttcttcagatgaattttattcttactctccacgggctgctccggcgtctagggagggag

SEQ ID NO: 132489 - DNA, 453 bp, Homo sapiens
  chr20:3387901-3388354
  hyper
ccattgtggggaaaccgttgcggggttgtccaaaggggagccattgtggggcctctacagagggcgccgttcctgggaaaaattcctccctgagccgttcagcaaagaaccgtcccgaggaagccatgtcggaccacgccctgcggcgggaggcgtcgccggaccccgacagcccgcatcccccgcccggccgcccctcggctgcctctgccccgcgtacctgacggagggtgacccgcggctggagccgccaggggaccgagcgcggggcagcccctgccggcgcggggggtacacgtccatggcggcggacgactggcggcggaggaggacggtgcagctgcgagggtctcagttgcccgcagggcggctccacgctagctgcggccgggcggggcggcagggcgtgccgggtgggagggggcgcggcgcgcgggcccggcgggggcgggg

SEQ ID NO: 132490 - DNA, 670 bp, Homo sapiens
  chr20:3388397-3389067
  hyper
cgttgggagcggctggagttgggggtcggcgcacggccacagggaccccacttcttaagctgcgaggccgccggaccggatgttgggagcgcgtgtccgcagggtgagggttgccacagcgccgcccggcctcgtcctcaagcccggcatcatagagcggggctctgcgcggcgccccccggccacgcacacggacgcgcccgggggcggagcctctcccagcccggccccgcccctccgcctctgcccgccccgccccgcccgaccagccccggcctccagcgaagtcttccgctccggcgtcaggatccagcgcacctccccagtacccagcgcacctccccagtacccggctcgcttccctgttctccggaacggtgtcttcccgcttcctggtcatcaattccgcacccacccttcaaacatccaatagattcctagccggcctcgggttagcgcagcagtgcgcacccagccctgcgcagggcatgagcgttagaggcgcacaggatcccagaagacccctaacctttactgttaagatcctagctctaccggtttctgcagggacatgtacaagaaacttgggaaatactgcactgatagttgccaggagtcctgtatatacaggacgtatttaatgattattggcctgcgtccttcgttgacc

SEQ ID NO: 132491 - DNA, 437 bp, Homo sapiens; identical to SEQ ID NO: 12744
  chr20:3451348-3451785
  hyper

SEQ ID NO: 132492 - DNA, 167 bp, Homo sapiens
  chr20:3452158-3452325
  hyper
cttcaggtgagtggcgggtggtgtcggagggtcgggtccaaccagaggctggggctgaggggcgttcgagacggctccaggtcagagggagatgctggacagaaagtggagagggtagggccgccctatggggtttgagggccatttgcttccggggagatcatcgt

SEQ ID NO: 132493 - DNA, 30 bp, Homo sapiens; identical to SEQ ID NO: 12746
  chr20:3632574-3632604
  hyper

SEQ ID NO: 132494 - DNA, 237 bp, Homo sapiens; identical to SEQ ID NO: 56860
  chr20:3641310-3641547
  hyper

SEQ ID NO: 132495 - DNA, 190 bp, Homo sapiens
  chr20:3641773-3641963
  hyper
cggcgcagggcccggcggcagcgggcgcggggacagcccccctgcgcagcccggcccaggcactgcgccacatactcggagcgcaaacgctggcaccgcgcgtccgccgtgcaggcttcggccgcgtccacacatcggttccctccgaccgagctcgccgaccctgggaaaggcgcggggaggctgcagg

SEQ ID NO: 132496 - DNA, 448 bp, Homo sapiens
  chr20:3653532-3653980
  hyper
cggaaacgggtgcctaccggcacggggagggcattgggcatggagggacagtcccccaacccccgcgcttctctgatccccacccctgggcttggctacagccgccagacgcgcagagcccagagaggggaagtaacccgcgcaaagtcacacaacaagcgggacaggggacgatgcggccccaatagtgagcagcccgggacccaaggtggaatcgcgacccgacggtgctcctcccggtgtaggagtaacctcgccaggttactcggaaaataatcttcataccgttgagaatccactttgcctgagcttcttccctttaagcctcataaaccaccctgaagcggacactatgatcattatccccattttacagaagaggaaactgagggacgaccaaagaaacgcagcggaggaagtccccaggactagccgccccgccgcagcc

SEQ ID NO: 132497 - DNA, 30 bp, Homo sapiens
  chr20:3657339-3657369
  hyper
cctcccaaagccaccgcatcttggtccctg

SEQ ID NO: 132498 - DNA, 584 bp, Homo sapiens; identical to SEQ ID NO: 56862
  chr20:3662531-3663115
  hyper

SEQ ID NO: 132499 - DNA, 30 bp, Homo sapiens
  chr20:3748367-3748397
  hyper
ctgcaggagctcaacgccgagcacgaggaa

SEQ ID NO: 132500 - DNA, 1037 bp, Homo sapiens
  chr20:3758242-3759279
  hyper
ctgctacgggcacatcgtcgatgtcctccctactcctggcgatcccacgcctcaccccttcctctccagctgctgcggtctccgtcgccgaggtgggtcccaggtaagctcccaggaggggcaggggagcccctcagcggcccgggacagattcccccatggctgagggcatggggaactagcctggatggagacgccgccgtcctcggagctgggcggggacctgattctgggggtgtggacagagccaagggaccgccccccaaggcccagcgccgggagatgcaaggccgggcccaaggtgttggacactgctttgggggacaggctaggtctctgcacgtggcttctgggctctggaaagcggtccattctcctgacccggatctccggagtggtaggaggcggctcagtcccgggcctgcgctcctagagttcctgtcccatctcctcccacgctcacccatcccaaggaaggagggcactcgggccccagcaggctcgtgagagcagcgggctccgccctcccaatggtctatccatcggtgggtgggtccggcgcggcgtcggggctctggcgggtacccgggcgtccccgcgcggcccgggccgccgctcaccgctgcttacgctccgcctgctggagccgccgggagaggtcttcgatccgcacattcttgagctggagcaggtgctccaggcgccttaccttcatctgcaggacctaagccgcaccgcgcaggcgtcaagcctggcggtctgctccctcctgcccggcctctgctggccgcgagcccccacccgcagccttcctagacccctcacctgcacggtctcttgagaggccaacagctcctgctccttttcagcgatctggaggacgaagctggggtcgccctgcaacgcccggttatacgctggaggccgaggcgccggcggccggtcccagctggggtgggaagcagcttagcggaggcttggacctcgggccctacactcacccttccagggccctcgaccaggccttcccttctccc

SEQ ID NO: 132501 - DNA, 30 bp, Homo sapiens; identical to SEQ ID NO: 56864
  chr20:3762152-3762182
  hyper

SEQ ID NO: 132502 - DNA, 58 bp, Homo sapiens; identical to SEQ ID NO: 12749
  chr20:3766678-3766736
  hyper

SEQ ID NO: 132503 - DNA, 30 bp, Homo sapiens; identical to SEQ ID NO: 56866
  chr20:3766946-3766976
  hyper

SEQ ID NO: 132504 - DNA, 33 bp, Homo sapiens
  chr20:3767610-3767643
  hyper
atcgctactgcgcccggcggacagcgacttgct

SEQ ID NO: 132505 - DNA, 30 bp, Homo sapiens
  chr20:3777240-3777270
  hyper
tggcgcccagcgtccgggccacctcccggg

SEQ ID NO: 132506 - DNA, 113 bp, Homo sapiens
  chr20:3801038-3801151
  hyper
gcaaggccagcccacgccgagggtccaagcatcgggatatgccgccagcacctggctgctgcagcaccgcgctggacatgagcgctccgcccaacccgacggcgtcagctggc

SEQ ID NO: 132507 - DNA, 171 bp, Homo sapiens
  chr20:3801162-3801333
  hyper
cgaccgacgtgcgcaggcgcccacgggccgcgcagccgccattgctctcctgccacggaggggagcgcttggtggcagtccgcgggcccggacggaaggctgaggcgacgcctcgacgacagcggaccggagctgcaggggcaacacattcagggcggggtgccccattta

SEQ ID NO: 132508 - DNA, 19 bp, Homo sapiens
  chr20:3869439-3869458
  hyper
acctctctctccaacgcag

SEQ ID NO: 132509 - DNA, 183 bp, Homo sapiens
  chr20:3869510-3869693
  hyper
cgacggcagctgcggaactaggccgagggacaaaggctaaggtcagccgcggttcaagccctttcgtctgccgacgaccagcggccagacgctgcgggagcactgctgggctggaggagggctcgagctgcgaggacggcacggagcagcggggtgggactcggggtcgccccaggagagttc

SEQ ID NO: 132510 - DNA, 30 bp, Homo sapiens
  chr20:3870554-3870584
  hyper
ttcgggggcccccccgcacccattggtatg

SEQ ID NO: 132511 - DNA, 980 bp, Homo sapiens
  chr20:4129264-4130244
  hyper
agggagggagggggtgcgggcccagatgtgggcgtgggacccgggtttccgaggcagggatccagcagtctccggcttcaggggcttctagcttcccggctcccggcggggcgggcccggggaggagctcggcgggtccccgcccagaggcggagcggagggccgggccggagcggggtgggtaggggacgcgaggcggagcggggccccacacaggccgcggcggctggctcgggcccctacggtcccggcggcggctggaggaggaagccaggcggctggcggaggaggagagacggaggaggccgagaccggagcgccgctcgccgcagacttacttccccggctcagcagggaaaggtacggtgcgcccgctctccggccccgggccccggctctcagcctcccccgggcgcaggcaggggctgcggccgccgcgagagggtgaggggcccggagcggtccccgagggctcggccggcccggggcttgggcggccagcgcggcgctcgggcgctcgggcgggggtgcggggcgttccgggaggctcgcggggagcagggggcgccgcgcccccctggcttccgccggggtaagcagtggtgtgggccggggtggcggcgatcccggcgccagggctgctcggcccgggccgggcgccgggggtagagggccggacggacccccgggctacgtgcgggaggggagcgtcccgggcgccctgcaggcgcgctccgtgggcgcagacaaagccgggcgcggacgccccgcgacgactcgggctgccgggagggtgggcaccggggagaggacagaaggctcccgggtgatggcccgaacgccaggagaggctgtgctgacttccccctctgggctccgggcgtccgggtggtccccttggggccccgggcagggtgaggagcagctttctcttaagggccaactaggggctcacgggttgtcccgggcttggcgggagc

SEQ ID NO: 132512 - DNA, 30 bp, Homo sapiens
  chr20:4153032-4153062
  hyper
ccgccccgtgcaggcggccacatcctcacc

SEQ ID NO: 132513 - DNA, 1047 bp, Homo sapiens
  chr20:4229348-4230395
  hyper
ccgccgtgccattcacgtcgccgcccgcgcccgcgctccccggctcccccgcggagctccggttgtcctcgccgctgcctgcgcccaccacgccgccgccgccgcccgcgccccccggcacgccgcccaccgccgggccctccgagggggccgcgccgcccgcgctgcccccgccgccgcccgcgctggagccccctgcgctgctgtccgggcggggtccctcgaaactgacgctcaggagatcgcggaaagtcatctcaacgcgcggccgtcggtggccgggccggggcacagaacgagcggccggcagggaggggagcacagggcatagccgcggggctccagatgcagctccgcgcacgggtcccgtcggggtcctgcccaagttcctgtgacgcggagcgcggctgtccgagagcggagctgcctggcccgggcggcggccgggctccccgaggccggccgtggagtagcaccgaagagccggggcccgctacgcgcgcggcgctctgagcgtgcccggcaagcgggcaaagcggcggctccggggccgggcggtgcaggcagcggccactgcggcgctcccaactcggcgcggggggcgggaccgaggaggggcagcgccaggaaggaggagggggcgacccgggccgagagacgggcgccacactccagggtagaagggacccttcgctcaggacaagcgattgtgtcggggtccggggggctgcggcgctggcgcgcgctcgggtcccgcagcagccacccacgcctctccgcaggtgcccaagcccgcgctctcccctagcggtgccctttgcgttccttcccgctcctctcccggaccccctcccccttggccctcagcggcgtccctcttcctcccgccctctcccccgagtctctcggtcactcgctggtgcccttgggcgcgcggtgcgttgaaggcgtgagtcccgggtcttcgggatcccggctttggccgccagagagcagcaagcgcctgggatctgcggactgcggaccggacggcgcagtgccgctgcg

SEQ ID NO: 132514 - DNA, 30 bp, Homo sapiens
  chr20:4666833-4666863
  hyper
ggagcgatggcacccgcaggcggtatcaac

SEQ ID NO: 132515 - DNA, 30 bp, Homo sapiens
  chr20:4667347-4667377
  hyper
ccgctcgggtgaggcggcttggcttcgctt

SEQ ID NO: 132516 - DNA, 1406 bp, Homo sapiens; identical to SEQ ID NO: 56872
  chr20:4803015-4804421
  hyper

SEQ ID NO: 132517 - DNA, 1173 bp, Homo sapiens
  chr20:4981354-4982527
  hyper
gcatctaggaccaaacgaaggagaaaatcctgcgccttaaagtagtcacactcgaaatgtcattttttccccccgaaaggtggcaaggagggggactcgcgaccccccagggaacaggccagaaaggccccggggtcggaggagctgcttctaaaattacttcgcgcagtctttgtagaagggaagaaagcaagaatgtaaaaggcaccctcttgccgcccctcctgatgcccctgaattccagggggcgagacgatgcccgtgcgcaccaccgggggaggggcgagggaagcgaccccaggacgcgcgggcgcagagcccgggaggaggcggcggcagccagtggggttctgggggcgccccatttgcctccccgctgcgcggcctgagggcccgagcgcgctgtggctcccgtggcgggaaggggtgggtaccccgggggcccggcccggccggcagaacggcaggagctgagggccgccgggcatcttgggccccggggccagggtggccggcgggcgcggggtcccgggagatgggtcggggtgggggcgcgcaggccgcgccgcggggccggtgggtgacagcgcgcgggggccgtgccaggccggcctcgtgggcgcggcgagcacctcgcggccccgccggcaggtgcggcccgcaggccgggcagggggcgcggcggccgggctctcacctggctgcagctcgcgtggttcccgtcctgccgccgcgcctcggcgccgcagtgcccgctgcagcctccgcctccggtccccgcgacagccgcctgcaaaatggcgccgcggaggggcgggccgggggcggggtgcagcggagccgcccgcccccgcgccggtctggggcccacctccctccccgcccccgacccctgccctcgggcctccccccggggaggggctgctccctggcacccggcagcgctccccggaacatcccgggcctcgcacccagccgtccccttcccgttcctttcatttccctcccctgcgcagaaagatcgccccccttcgcgacccttcccaccagtcacacctgttcctggggacccacctggcaagcagagcgctggtccctgagtgtcctggtccaggtcccccctttttaccccgcctgccaccgagccctgtcattgctcgagcgtgataagca

SEQ ID NO: 132518 - DNA, 30 bp, Homo sapiens
  chr20:5059278-5059308
  hyper
ggaaagtgaaactggcggttagagccgcta

SEQ ID NO: 132519 - DNA, 34 bp, Homo sapiens
  chr20:5093917-5093951
  hyper
tacctccgctgtggcgggcgagcacctagggtcc

SEQ ID NO: 132520 - DNA, 30 bp, Homo sapiens; identical to SEQ ID NO: 12756
  chr20:5100005-5100035
  hyper

SEQ ID NO: 132521 - DNA, 364 bp, Homo sapiens
  chr20:5100558-5100922
  hyper
acctagaaagacaacgaccactctgctacgcctgcaaccgtttaatgccgccgcgtccgcaagcgcgcgctctcaccctgcgccgcgttgcgacgtcaccacgctgtccagcccacggccttgcggggaagactttagggccaatcgtgtccatgctccccgcgaggcccgccccctagagcatacattggaggaagcgggcgcagggcggggcagcgtcgcgcaggtctccccgcctctttgactcctgaacccggccgcagaacaagtccgggcatatgtggagatcgggtcccggtcccggctcgtcaagccccagctttatggtggctcctcagcctcccactacgtgggtagaaagttt

SEQ ID NO: 132522 - DNA, 391 bp, Homo sapiens
  chr20:5107245-5107636
  hyper
cagggcgccagctccggccatccgcggttaagcgggagctcccattggctaatcgcacactgaaacgcacgccttttcccgcccctgacgctgccgtccaatgcgcgcctctcgactctgctccgccccgccccgcccccgtcgccctgcctccctggcgtatttgcgccattggtggatattccggaccgtgatggtggcgctgcgcgtgcgcactcgctccgagccctgctcccgggagagggagctctcgggtcggggctagggaaggctgaccccgctcggcccgggtgaaagggcggtgacggcactgggtggggccgagctccagggctggctgctgggctgctaagggaactgtgagccgctcagagccgcgcgcctcccgggc

SEQ ID NO: 132523 - DNA, 790 bp, Homo sapiens; identical to SEQ ID NO: 12758
  chr20:5296191-5296981
  hyper

SEQ ID NO: 132524 - DNA, 42 bp, Homo sapiens; identical to SEQ ID NO: 12759
  chr20:5297005-5297047
  hyper

SEQ ID NO: 132525 - DNA, 193 bp, Homo sapiens; identical to SEQ ID NO: 12760
  chr20:5297225-5297418
  hyper

SEQ ID NO: 132526 - DNA, 168 bp, Homo sapiens; identical to SEQ ID NO: 12761
  chr20:5297672-5297840
  hyper

SEQ ID NO: 132527 - DNA, 137 bp, Homo sapiens
  chr20:5591803-5591940
  hyper
tacgcggccgagggcggccgggcatcccccgtgtccccgctgcccttctcagccgaccccggcgcccgcacgttggagagctgccctggggtcataggcttgtactgtggtccaccaaagccgccttagaaataacc

SEQ ID NO: 132528 - DNA, 757 bp, Homo sapiens
  chr20:5891857-5892614
  hyper
tggggagcaggctgaggcactcgaagcgggacctcccgcctcccctaccatctcagatctgcactactcccctcggccgtccattctttggcccgcctttcccccacccccgctccagaccctgcacaccaggcgactggactggcgtaaatttccgcccatttgcgtcgccgcctgggggtgctgcttcgtgacgtcagggctgagctagggggcgcccgctcctggctgcccgctcctcccggccctgcggcccccgcctgccctttaaaagagcggggcctgcgccggccgcgccacaccgcggggaccaggaggcacgctggttttccggggccgctccatcgcgccttcctcctgcgcctcgcttctccggtccagccgccatcttcctttccgcacaggggccgccgagcggggccatgcagccaacgctgcttctcagcctcctgggagccgtggggctggcgggtgagtgggcgcggcgggccggtcagcaccgcggacagcgccagcctcgctcttccccgccgctcccgcagccaggctggcggatcccgggagagagggagggttgaggggaaggtttacctcttgcttcgtttcttctcctccctgggtgttttccttcagctcctcccacccgtttgacttggaaaaagctagagggcttcctagcccaaccaggggagcctcagtctttctgtatctgagttttcctctagataggaaggaagaaaacgtgccatacctgcaa

SEQ ID NO: 132529 - DNA, 30 bp, Homo sapiens
  chr20:5931166-5931196
  hyper
ccccacgtgttgcacgccgcttccgctttc

SEQ ID NO: 132530 - DNA, 43 bp, Homo sapiens
  chr20:5931594-5931637
  hyper
cggacagatctgcgcgtatcctggagccggcccagttgtgaac

SEQ ID NO: 132531 - DNA, 178 bp, Homo sapiens
  chr20:5986816-5986994
  hyper
atggagaagcggctcgccagtgtcccaggctgctgagctctcgccgcccgagaccccgcggcgcggccgcagggccatgctagccttgcgcgtggcgcgcggctcgtggggggccctgcgcggcgccgcttgggctccgggaacgcggccgagtaagcgacgcgcctgctgggccctg

SEQ ID NO: 132532 - DNA, 787 bp, Homo sapiens; identical to SEQ ID NO: 56884
  chr20:6032594-6033381
  hyper

SEQ ID NO: 132533 - DNA, 646 bp, Homo sapiens; identical to SEQ ID NO: 56885
  chr20:6103387-6104033
  hyper

SEQ ID NO: 132534 - DNA, 30 bp, Homo sapiens; identical to SEQ ID NO: 56886
  chr20:6404265-6404295
  hyper

SEQ ID NO: 132535 - DNA, 1683 bp, Homo sapiens
  chr20:6747981-6749664
  hyper
ctgaaagttgaataacgggcccagcggggaaataagaggccagaccctgaccctgcatttgtcctggatttcgcctccagagtccccgcgagggtccggcgcgccagctgatctctcctttgagagcagggagtggaggcgcgagcgccccccttggcggccgcgcgcccccgccctccgccccaccccgccgcggctgcccgggcgcgccgtccacacccctgcgcgcagctcccgcccgctcggggatccccggcgagccgcgccgcgaagggggaggtgttcggccgcggccgggagggagccggcaggcggcgtcccctttaaaagccgcgagcgccgcgccacggcgccgccgccgccgtcgccgccgccggagtcctcgccccgccgcgctgcgcccggctcgcgctgcgctagtcgctccgcttcccacaccccgccggggactggcagccgccgccgcacatctgccgccacagcctccgccggctacccgaacgttctcggggccagcgccgagtggatcaccggggaccgcgaggcacccgcgcgccgcagaccccgcgcgggctggagcacccggcagagcgcgccacagcgccgtggcctctgctgcccgggctgcgccagagccgcggacgggcgcgcagagcgccggggactccggagccgatccctagcgccgcgatgcggagcacctactgcaggagatcgggggcctgggacgcgctggccgaggtgtgatcggaccccaggctagccacaaagggcacttggccccagggctaggagagcgaggggagagcacagccacccgcctcggcggcccgggactcggctcgactcgccggagaatgcgcccgaggacgacggggcgccagagccgcggtgctttcaactggcgagcgcgaatgggggtgcactggagtaaggcagagtgatgcgggggggcaactcgcctggcaccgagatcgccgccgtgcccttccctggacccggcgtcgcccaggatggctgccccgagccatgggccgcggcggagctagcgcggagcgcccgaccctcgacccccgagtcccggagccggccccgcgcggggccacgcgtccctcgggcgctggttcctaaggaggacgacagcaccagcttctcctttctcccttcccttccctgccccgcactcctccccctgctcgctgttgttgtgtgtcagcacttggctggggacttcttgaacttgcagggagaataacttgcgcaccccactttgcgccggtgcctttgccccagcggagcctgcttcgccatctccgagccccaccgcccctccactcctcggccttgcccgacactgagacgctgttcccagcgtgaaaagagagactgcgcggccggcacccgggagaaggaggaggcaaagaaaaggaacggacattcggtccttgcgccaggtcctttgaccagagtttttccatgtggacgctctttcaatggacgtgtccccgcgtgcttcttagacggactgcggtctcctaaaggtagaggacgcgggccagggcccggggtgggtggtgggtgggagggggatttgggcagccactgcggtagagcccttccttacgtccaggccagaagtaaacagacccctctccagtccacgtgcaacggagccctgcaggg

SEQ ID NO: 132536 - DNA, 30 bp, Homo sapiens; identical to SEQ ID NO: 56888
  chr20:7812334-7812364
  hyper

SEQ ID NO: 132537 - DNA, 30 bp, Homo sapiens
  chr20:7999683-7999713
  hyper
tatctaaaagcacacggtttgcttgcagat

SEQ ID NO: 132538 - DNA, 30 bp, Homo sapiens; identical to SEQ ID NO: 56889
  chr20:8000153-8000183
  hyper

SEQ ID NO: 132539 - DNA, 30 bp, Homo sapiens; identical to SEQ ID NO: 56890
  chr20:8000573-8000603
  hyper

SEQ ID NO: 132540 - DNA, 1596 bp, Homo sapiens; identical to SEQ ID NO: 56891
  chr20:8112346-8113942
  hyper

SEQ ID NO: 132541 - DNA, 1862 bp, Homo sapiens
  chr20:9048354-9050216
  hyper
ttcctcctggccagccggaccggctcaggcggctgagcatgcctagtgcagctgcgagcatggccccagtccccaatgcgcaggtgccacgtctccgggttttggtggccgccggccgggagaaggaggaggcggagtggggaggagggagccctccggagttcgggagcagcacgttgtgagggtccacacaagggtgatgccagaccgaacaccattagggcctgggtgtgagtgtgactcggaggcacctgggggccgttgtagggccgggaaaagccaggaactggctggagcagcaccccagcatcccagggaccaaagtctgggggatttgcatgtctgaggttgcacttgtgggaagactttttggaaccacttaatctctgtggctctgtgtaagacccgcgaaataaaaagaggcagtagtactctttggaagattgttttagggattaaatgaataaaaagcgtttagaacactgcaggacgcattgtaggcgctgtatgggtttatgaaaccgaatataaacaaataagcacgtcccccacccagccaacggctttgggggccccgttctggccagtcctgagcccctccacacggcccacggcgggctgcgggtctcccatccgaggagggtgccgcttttctgcccccgctccctgggttctgcgcccagcgccatcccgtgcgcccccgacccttgggcatggggcacatgccgcggggagccgccagggagaccccagaggagcgcgccgcgggccggcttccccggatgccccacccacctcctcttggcgctgcccaccacctgcctcggctgctcggcccccggctcgcgaggctgcgcccccgacccagtcggcgcccactcctcgccctgcgggctcgcggcaactgggcggccggcccggcccctgcccacccccagcccagcccggcgcgccgcactgggcatgctccgtagcctgggcaggttggggctgcgaggcgacagctcgggctctggagccgggaggcgagaacgaggagggaggctcgggggcaggggaggaggaagcggctggccgctgaggggcggcggggcccggagcgggggacgcgcagggcccggcggtgggcgggcgggtcggcgctgccccgtgggctcgctggggagccacggcggagacccccgccctcaactgaggtaaggaccgcgcggcgcggagacggggaggcggggaggccagggagggggtgcggaggcaggcgggagggcgggactggggtgcgccgggagggggcttggcggcggctctttatggcgaggagggggtggtggcgccgcgccgggagcagtaagtgagctgcaccgccaacaagatctctcacacacagacacacacacgcacacgcacacacgggcgcgcacacacacgcgcgtacacactgggtctccaggcagcggccgtcgccgcatccccggcagcagctccaggcaaagtgacaggtaggaaaaggcatttcgggtcccgcccgaggatgctcccgcccgccttggccctcagggcttgtttgctttccgcgggtgcgtcccggacgcgcgcgcgcgcgcacccggatgcccagcggggaccccgtgcaggtgccgggtgccaggcgccctgtgcgcgcgggaggcaggggacccagacgccatcccccttcccctgcagtcatcgcctgctgggtttcctcagactctctccagacgttcaccctcttctgggctagaaatagctcggctcgacgtgtatatgattattttggttggaaatagttggcaccgtgcaacgcatgtaaatgtgtatgcgtgtggatcttcttgcctctt

SEQ ID NO: 132542 - DNA, 30 bp, Homo sapiens; identical to SEQ ID NO: 12766
  chr20:9112082-9112112
  hyper

SEQ ID NO: 132543 - DNA, 30 bp, Homo sapiens; identical to SEQ ID NO: 56894
  chr20:9329023-9329053
  hyper

SEQ ID NO: 132544 - DNA, 6 bp, Homo sapiens
  chr20:9487139-9487145
  hyper
cagtgc

SEQ ID NO: 132545 - DNA, 508 bp, Homo sapiens; identical to SEQ ID NO: 12767
  chr20:9487211-9487719
  hyper

SEQ ID NO: 132546 - DNA, 209 bp, Homo sapiens; identical to SEQ ID NO: 56896
  chr20:9487788-9487997
  hyper

SEQ ID NO: 132547 - DNA, 76 bp, Homo sapiens; identical to SEQ ID NO: 12769
  chr20:9488205-9488281
  hyper

SEQ ID NO: 132548 - DNA, 1468 bp, Homo sapiens
  chr20:9488328-9489796
  hyper
cgcacctggcgggctggaccgggacagggggcggtgcgcaccggggctcccaagcagccttagcggtggagaccttccgaggggaggcgagcctgcggtttgtctcccgttaaggtggaagactggatttttcctccagttccgatctagggtgaagtcccttctcccgcgccctcatgcccagattggggaatgaggggacagcagaaaaaaagccctgacatagcccagagcctccagcagctttgggcgccctgaggcgttggaggtaggaggaggtgtgaatttcattcccgcctctctgggcatggagcttagcttagcgaatagggaccctacagagggaacaccaatgaatgagtccaccttctctcctggtcctagggcccgaacccacttgtctccagggctggcgccagccccgcgcacaaacaccgcttcctctgggtaaccgcctggactgcctgcgcgccctcggagcccgcctggttggcagtctctgcttcgatctcctctaagcagaatctattttctgtttggaaaatctcttacaggtcctggggttgtcccaggaccaaactgcagcgaggccgcgcgcccctggccctggaacgcagcatcctccccattttacctggaggctagatcgttggggctcttcgggggaatttccctgggcacggatactgtgctggcggtttagaaaagaaaaagaaaaagaagcgaagcctctgtaacctggtctcctccctctcctcggtttaataccctgcctcccctactagtctccaggcttttctctggacaggggagggacccgagaagcccgcggccagtgatcgccagggtctgtctcgtcgcccatcctccccgccccagagcaaggtcggcagaggcttcccggggcataagaacttcaaagaaagtctcagaggagccacgctaccaggaactttcgtcgccctttaaaattgtcagatagacaagtaaaaacagtaactaactaagggaacaatggactcttgtgacatgtgtaactcttccaggtaccccaacactaaagaccccgtggttcctgtcgccatggcctgaacgtactcaactccagccccggggctgacctctctccctgagctttggagcgggtttggacctagccgttgcaagtaggcatgacttttatcacccatcgctatacccagagcagctgctcgaatgtgccaaggagcccaactcgggtgcaaagcgccgacgtctttcccaggttgaggacatcgcgagccagaggtgcaggcagcgaggcgcccaacagtagaatgcatcttccttcccgcgggcagaagccgtcaagtctggagtccgcagcgggcgcgcgggccagcccagggatactgagccatgagcaaccaggcccacctaccgccgcgccatccaaaggtaacaccacagaccacgggccatgtgtcct

SEQ ID NO: 132549 - DNA, 758 bp, Homo sapiens
  chr20:9494982-9495740
  hyper
ccaccgttttctttcgggaaccagatgcgttttcagaagacagtactccagtgataaggtatctacaccacttaataactgtacctggtaaggagatttaataaggctgagggtggtattaagtttctcagaacagactcatctttgcggatgcagttgcagaacaggaaacagacccagggagaagtttagtccccccagatctcattggccctccgcacaagccaagccacagccactcctgccacacaatcggattgctttcagcactcgcagccgtggaccgccgtgcggtcctttcctccgcagtgagccgatttgctctgccagcagctgtcggtgccgcgctcgacaccgagtcctagctaggcgctcacagaatacgcgctccctccctcccccttctctgtcccccgcctctcgctcaccccggcccactccagcggcgactttgagggattccctctctggcggcctctgcagcagcacagccggcctcattcggggcactgcgagtatggatctccaaggaagaggggtccccagcatcgacagacttcgagttctcctgatgttgttccgtgagtagcgatttggcgactgggagagaggacgggcactctttgcagagaacagagccggcaaagtaaagtcaattagcttgagataaaaaatatggcccttaatgttttgcggtgttttttctttttttcttttaggggaggagggagggccttcctcgccggtggcagggaatt

SEQ ID NO: 132550 - DNA, 99 bp, Homo sapiens; identical to SEQ ID NO: 56900
  chr20:9495961-9496060
  hyper

SEQ ID NO: 132551 - DNA, 200 bp, Homo sapiens; identical to SEQ ID NO: 56901
  chr20:9496330-9496530
  hyper

SEQ ID NO: 132552 - DNA, 930 bp, Homo sapiens
  chr20:9496580-9497510
  hyper
cgccctttacagcccccgccccggggccgggcgagctgagggggcgcggggcgtctgtgttcccagctgatcacagaacaggccgatatcgcattgacccggggagctgaggtgaagggccgctgtggccacagccagtcggagctgcaagtgttctgggtggatcgcgcatatgcactcaaaatgctctttgtaaaggtaactccgagcccagcgggcagaggggccgcaggctccgcgtgggtgtgggaagtggcggcccctaggtttaagaacccagacgctgcggggacgattgaagcgcacctccccggctcaacaggaaagccacaacatgtccaagggacctgaggcgacttggaggctgagcaaagtgcagtttgtctacgactcctcggagaaaacccacttcaaagacgcagtcagtggtgagtggaggctggcatggctggggagggagcctgggaactcgcagaacaggcttggagagagaattcctcaaggttttggaaaccgtcccacgctttgaggtcccaggccaagtcttccctcggcttgctctttagggcggaagaggcgggagcgcccatgagtcttctgggtctcaggccttgtagatccgccaggaaccgcaggcgtggggacccaaacgtcacccgtggcctgatcctagataagaagtcccttgaaggcctgtcgttccctggtgcttcaaaacgacctcttatgatttggcctttgaaggaccacggagaagggcaaagctgcattttaattttcttccgcatcctggttttgtttcttatgcgctaaaactgcaagggggcagtgcgactttccttttcagtcaggatgtgatggccttcagtgtctttttgcgcatggcagcatggctcgcacgggatattcagtcatcgactgcagctacct

SEQ ID NO: 132553 - DNA, 487 bp, Homo sapiens
  chr20:9818836-9819323
  hyper
gcacacacacacgcgcgcacacacacacacacacaaataacaaaggaaaacacagcctcataaaggctcagctattgcatcctccagtccacacctgccaaaagacaaaaaccatgcgggaatcctgctctggcaatatgtccaacacttctcgggaaaagcagcgccgtggcacccccagggcgtgcgctgctgtatacacacaaagaactggtgctgggcttgcgagcagttcggggtaccagcacgctctcagggctggaatccggggttctcctccacgccctcccgcccagcaaaatggaaccatcctttatttggttggtagagagcccaggctggatagtagcgcatgggttgagggtgggcggtcccctatccctaccctccaggcagcaggtccctagcctttgcatctcctaggagatgcaggatcgcgctgtcacagtggtcctcttcgcatcctctcccggcaaagagagatgct

SEQ ID NO: 132554 - DNA, 321 bp, Homo sapiens
  chr20:9819466-9819787
  hyper
cgctcccagcgccatgttcccggtctccccgggcgcacgctggggaactactactggctgggtaggggcaaggggggcgggggccagcgggagggggtgagaggcagagccacagctttctactctccacccaaacctcccccagctactgagcatgcccagctgcccggcttcgcccctcggaggactgtccatgagcgtacgcagctgctccgggttttcgtggcagccggcgggaggcaggctgtagcggcggccgggggtggaggtgagggggagggtcggggggcgtgtctacactcagggtgcaggagccaggag

SEQ ID NO: 132555 - DNA, 24 bp, Homo sapiens
  chr20:9819833-9819857
  hyper
cgtccccggcgggggcagctcctg

SEQ ID NO: 132556 - DNA, 512 bp, Homo sapiens; identical to SEQ ID NO: 56906
  chr20:10015467-10015979
  hyper

SEQ ID NO: 132557 - DNA, 592 bp, Homo sapiens; identical to SEQ ID NO: 12780
  chr20:10198138-10198730
  hyper

SEQ ID NO: 132558 - DNA, 64 bp, Homo sapiens; identical to SEQ ID NO: 12781
  chr20:10198940-10199004
  hyper

SEQ ID NO: 132559 - DNA, 874 bp, Homo sapiens
  chr20:10199240-10200114
  hyper
gttgcgggatgaacgcgtttgcccaagaccgagtgttaaaatggagtcataagagtcgccccgtgcgggtgtttatagaaggtgaaaacacgcaggtttgcaggccagcgcactgggaaccgagtcaagcgcgccgcagcccgggccccgcccccgcccccgccgtgccccgcccccacttcctcccgcccctcgctgggcggctattaaaagctgctgacgtcaaaacggacggccatctttgatgagggcagagctcacgttgcattgaagacgaaacctcggggaggtcaggcgctgtctttccttccctccctgctcggcggctccaccacagttgcaacctgcagaggcccggagaacacaaccctcccgagaagcccaggtaagaacccccctccccaggtcgtggctctggctcgggatggctgcatacccagaagggacagcagctgggcagtccgagtgggcttgggtaaatacaagtattggtgcacttagggtgcggtattccgtgtgtgcacgtctggtgggggctttataaagtgttttcgaggtgagctgctggggaaaagggaaacgggagccctgcaaatggagcgacggggaggaagagcgagggtacgtaccgaataataacttactcttttgaaacagtagtgggaccccctctttcttccattttgcgatgcagttttcagagatatttaggctgttgagttttcctcccctgtcgttctaaccctattattatgactgttgtcgttagggtgctattatccagggaagaattaagggggagacagggtgtgggtgctggggaggcgaaaggagaaagggggagttcccgccccgggcaagctgagctgctgca

SEQ ID NO: 132560 - DNA, 173 bp, Homo sapiens; identical to SEQ ID NO: 56910
  chr20:10200153-10200326
  hyper

SEQ ID NO: 132561 - DNA, 97 bp, Homo sapiens
  chr20:10200350-10200447
  hyper
cgcctcatctgcctgcggcagaaatgcctggccggggctggatgtgccagggctggagaccaaattgtctccctgagaccccggtcttacggagacc

SEQ ID NO: 132562 - DNA, 30 bp, Homo sapiens; identical to SEQ ID NO: 12783
  chr20:10414357-10414387
  hyper

SEQ ID NO: 132563 - DNA, 757 bp, Homo sapiens
  chr20:10415352-10416109
  hyper
cggagtttcgcagctcgtactcttcacagattagataattcacccggcatttccccatcctgcttctgggttccaggacaaaacttttattctcttttaacattaaaaaacatataggaagttatgttcaaacatggctatttttattaaaatttatccggcactgtgaaagctacctttcctttctcacaatctttcgcaccgaatatatgttccattcttgagctagtcattttccaatgttaagaaaacacaccacagaaaagcgtttttttttctctcggtcagttcaactgcctagcaccgtgagttaccatgatacgttatttgctaatgagagtcattggggtcccagcctttaaaaatagcctgcgtccggcgccatttttgttttgggcccactttgaaagccgcgatattctgaacagaggccatttttcttttgggcagattccacgggccatcgaagtgtttcgctgccatcttaaatcctggctgtggcctcaatcctgcagcgaagctgcccagatcattttgtgtttgggcggcggctgagttcccaaacgcgcgcggagaccctgggaaggaggaagtaagcgcgaaagtgcttcccttaagcttctgaaggttggctgcagttccggctacctgtgtagtccgagtttccacagccaggtactactccgccagtgaccctggacagtaacaaaacatataaagcccgagcccaaaccccgccaccatcataggtaagcac

SEQ ID NO: 132564 - DNA, 31 bp, Homo sapiens; identical to SEQ ID NO: 12785
  chr20:10491693-10491724
  hyper

SEQ ID NO: 132565 - DNA, 30 bp, Homo sapiens; identical to SEQ ID NO: 56915
  chr20:10653149-10653179
  hyper

SEQ ID NO: 132566 - DNA, 401 bp, Homo sapiens; identical to SEQ ID NO: 56916
  chr20:10653623-10654024
  hyper

SEQ ID NO: 132567 - DNA, 30 bp, Homo sapiens; identical to SEQ ID NO: 56917
  chr20:10654405-10654435
  hyper

SEQ ID NO: 132568 - DNA, 1020 bp, Homo sapiens; identical to SEQ ID NO: 56918
  chr20:10654668-10655688
  hyper

SEQ ID NO: 132569 - DNA, 30 bp, Homo sapiens; identical to SEQ ID NO: 56919
  chr20:10961919-10961949
  hyper

SEQ ID NO: 132570 - DNA, 30 bp, Homo sapiens; identical to SEQ ID NO: 12789
  chr20:11667840-11667870
  hyper

SEQ ID NO: 132571 - DNA, 1710 bp, Homo sapiens; identical to SEQ ID NO: 56921
  chr20:11871114-11872824
  hyper

SEQ ID NO: 132572 - DNA, 30 bp, Homo sapiens; identical to SEQ ID NO: 12794
  chr20:12947867-12947897
  hyper

SEQ ID NO: 132573 - DNA, 30 bp, Homo sapiens
  chr20:12989829-12989859
  hyper
ttatcccatcccctcgcagactgaaaacta

SEQ ID NO: 132574 - DNA, 445 bp, Homo sapiens
  chr20:13200599-13201044
  hyper
agggggaaagggaggcgtgccgtcaagaaagagttgattatttatttaatttcattcaccaagggagaattcggaggctccatcccggaggcactggggtccgggacgcgggaaaggcttggaaatgtgcgacgcggctgtgtgcgaacgcgtggactaggtcttggctcgctgggagggaagggctgggccggcgctggggaggaggaagggagggaacgggtaggaggaggggaagcgcagtataaaagtcccggccggactgagcgtccgctactccgagtcacttcggtaaggcgggagcccgagcaaggtcaaggagggaagtgcgcggtgccacggaccgacacagttcgctctagcatctgacgctcggactccgcgccctcagccggatcccagagcccttccattcgccaaccgcccactgcaaggcatgagccgc

SEQ ID NO: 132575 - DNA, 1732 bp, Homo sapiens
  chr20:13201055-13202787
  hyper
cgaggctgcagcgcggtcatgaggcggtggcccgggatcgacagctgcgcgacgccagcccccaaatcccctctgggcgcggcacccccgggatgagccccccacagaggcaagcccactagagctgagattcactccgagttcctgagcgcctgagccgcgggcactgcgtctctgcagcttccagccaacacctgcgcccgtgaccagacgaacgcctagagagtcggactcccctcccttcccaggctctacggggcgccgcggatccgcgaacagccgtgcccggctagcgggcggcccagcaagtgtcaagacccttcggaacgacactttggcactcctcctctcccccgactgcttcaggcaggggtcgcaggcagacgcatggcttgtccggcgccccctccgttttccatcactgcaactccagctccagtttgccaataaaggtttctaaagcagcccaggcaccaccccacccacccacagccccgagcctcagtgtgcacaagggctctacccgcgcccgtcacagcgacctcggcagcgggcacttggtacagcccggcaggctgacgctgccgccgagggcgccccggctaccgccaaaccgtgacaacctcggtgtgcccggggcccccatctggaaccggccctccccgggactccgagtgcggggcggcgcggcaggcggccccgaggagcgcggagagtagtggaggtggcttgccgggtgagtggctcggggcggcgagggcgggggcgccaagcgtggaggtaactcccggccgcagctgaagccctcctactcctcctcctcctcctcctcctcctcctcctcctcctcctccttctccttctcctcctcctcctccccgcgcttctctggcggccgctcccgctccagctgcggcgccgcggccacatctggggcgcccatgtgcgctcgggggctcggctgcgcccgccccgccgccgaccccgcagccccctgccagcagggtggcctccggcccggcccgggtcccgggctgtcccgggacccagtctccgtctccgccgccgccgccgccaggcagcgccggggcttgctccgcagccggcttggacacccccggcctcgcggtggctccgccgtggtgcggcggcggcggcggcggcggcgccggcagctcctgctcccccggccccgcacaccccgccgcgcccagcgccagccccgcgggcccgggaagcggagccctggcgggagccgaggcgggagccgcgctgccgggctcccgggctcctactcctcctcccccggcgtcaccgccgccgccgccggccgccgcgccgggtcctaaagccgcgcgtctcaaaaggatggtgcgcctggcggccgagctgctgctgctgctggggctgctgctgctcacgctgcacatcaccgtgctgcgcggctcgggagccgccgacgggcccgacgcggccgcgggcaacgccagccaagcccagctgcaggtgagtgcgccgccggagagggccgtgcgcggctgcggggacggtttgtggggcgggggtgctgagctagtgccgggtggatgcagggaggcaggtcccctgccccacctaagagcaactgttttggcagtagttttgcccgggccacttgacttaggcagaggcggagcgggggcacgtgcctggaggctgcacccggcttccaggtctgcgggctgcgctcctt

SEQ ID NO: 132576 - DNA, 271 bp, Homo sapiens
  chr20:13619538-13619809
  hyper
acccgcttcagccccgagccttcactgcaccggaagtagtcacccgcccgttgccagggtgaggaagcggggctgacatcaagtctccccattggtcattcggggtaccacgtggtcggaagcagcctcccacaagcggctctgactccgccctccgcttcggagcggctcacctggcctcagaggtgcagcgctaactccacctggggcttcgttctgagctgcgcatgcgctattgcttatctctacccaccccgcccctgaataagcc

SEQ ID NO: 132577 - DNA, 131 bp, Homo sapiens
  chr20:13765648-13765779
  hyper
gtagacacaaaagccgcgctggcgcatgcgcacaaaaagcgccggcaattggggtcgcagctggagatgctgcggccggcagggctctggcgcttatgtcggcgaccttgggcggcgagggtcccagcgga

SEQ ID NO: 132578 - DNA, 970 bp, Homo sapiens
  chr20:13976112-13977082
  hyper
taggcggtgcctgcgcgggtgttaggttagcgcgaggcgtgacctagttgacaggctctgaggtgctgctgtggcggcgtccgcggggctgaggcgggtgggagccggagccgagcgcgggctgagggaggagggcggcgactggagagcggcgagcggcgagcagcgcaggacgcagagcctctttcactttttccctgctgagtgccccctcccacccctcccactccacacacaccctgtttgcccgtgagcctggggaacttgcagcttaaagccagccacccccacggcaacatgtaccccagcaacaagaagaaaaaggtgtggagagaggagaaaggtaaccggcccgtcgagtcctgggggtgcgggcggtgggggttagggtgggggcgggggtcaggctgtgtgtgccgcggcgccctccgcccgagctcccgcctcgcgccctcccggccggtgccgcctccctccggtgtccgtgtgtacacacgcgcacactcgcgcgcactccggcgtgcacgcgccgcccctgggcacctgcagctcgcgcacgtgtgggcgcacgcccctctctgttgccctcggcaccccgtcaccttctcccgaggcggtgctgcgttcgcctcgcttgcggcggggacccccaggcggcagccccgggcgcggcacaagttcctctgcaccgcagctgggacttgggcactgccggcctgggtgtcccgcggacaggtgcccgtcggcgggcgctcaggctgcagctgccgctgtgcctccgcgctccgtgcaccctcatttctttccttctcgcccctgtccccccagcccccgaatggcaaagcgtacccaccatcgggtgtttaccccttgtctaggtttccttccttcgctgccgcagcgtgacttttgaaacctggaactctaggggagccctaaaacgagcgtgttgtccgtgaggataagtgcc

SEQ ID NO: 132579 - DNA, 30 bp, Homo sapiens; identical to SEQ ID NO: 56932
  chr20:15816804-15816834
  hyper

SEQ ID NO: 132580 - DNA, 507 bp, Homo sapiens
  chr20:16553757-16554264
  hyper
ggccagggaccagccggtgacacttttaagtccaggctggctttgggggagctggaaacaggcttcctctgggtgggggcgcgacgagggggcggggcgcgggcggccccactcacctgcgattcatgggccggaccctcacggccaccttgaccgatgccatcgctcatcccgaaccagcccgcgcggggtcccactagcccagaactccgcggtcgccggcgacgctggctactcagatcgcggctcccgcccacttccctctcgcccccgcccctctgctcccggccggacctggagttccgcggcagccccacctgccaggccactgagcatgcccagaacggctccggcccgcgtgatccatgcgccacggtttggcggcggccgggcggtgcagaggggcggggccgcggggcctggaagcagcctccgggatctgcaagtctggaaaggccacgttgtggaccttggcgcagaggttatgggggcgacccggagcggatg

SEQ ID NO: 132581 - DNA, 30 bp, Homo sapiens
  chr20:16802289-16802319
  hyper
gctcttacccaggaacgccatctactggct

SEQ ID NO: 132582 - DNA, 454 bp, Homo sapiens; identical to SEQ ID NO: 56935
  chr20:17206507-17206961
  hyper

SEQ ID NO: 132583 - DNA, 956 bp, Homo sapiens
  chr20:17207231-17208187
  hyper
ggcacagaggccggcgcccctgctcccctcggggcctctgagagcggcacacaccgtaattcccttcccagagcctacagattcccacaaacaatgacatcactccgccgccgctggcctgattacagctggggggattttcctgggcgcgcggcgggccaggctgagatgggggagctctccggtgctgaaaggggcgggggcgcgggctcgctgcgctgcgctgcgctgcgctgcgcccccagaaggcggaggcggccgggccgggccgggccgggggtgggcgggggcgggcccggggcggcccagggcggggcccgccgcttcccccgccctcattggccgctggcggactcacgtcacccgagctggtgctctcccccagcccctagggaattggagctgaggaggagctgaaaatgcagatttagcatcaagcacagacctacactcgctctttctctccggtacacacagctccccacattcgcacccctgcccgcgcgccgggccgcctgactgcacggcttcccctccagccagatgctggagaacacacactgattcgctgctttccaagaccctgttcagtctctttctctatacaaagatttttttaaaaactatatataagaattctttatttgcaccctccctccgagtcccctgctccgccagcctgcgcgcctcctagcaccacttttcactcccaaagaaggatgaagggtggttgtgtctcccagtggaaggcggccgccgggttcctcttctgtgtcatggtttttgcatctgctgagcgaccggtcttcacgaatcattttcttgtggagttgcataaagggggagaggacaaagctcgccaagttgcagcagaacacggctttggagtccgaaaggtaagctctcccatgcatttcgcatgttgtttcaaaacggggggacgggggggcagccct

SEQ ID NO: 132584 - DNA, 238 bp, Homo sapiens
  chr20:17208418-17208656
  hyper
gaggtaccaagttctcgaggctgcctggggatggagggatgaagccctgaacagctaagcctggcgttggctacttggccagggaagtctcccccacccccatcccccggagaaagaatagtttcctacagacgaggctggacgtttggacactgcaattcacctcggtgtttctcccaccccgcgccgggaggacttccctcccagggacttcggtccctgctcctctccgggaaca

SEQ ID NO: 132585 - DNA, 117 bp, Homo sapiens; identical to SEQ ID NO: 12803
  chr20:17208739-17208856
  hyper

SEQ ID NO: 132586 - DNA, 388 bp, Homo sapiens
  chr20:17209339-17209727
  hyper
acttcccaagcctcccgcctctctcccagccaccgccagggctcctccaggtgtgggggcctctccctcctcctaagggcgtaggcagtaccggaatttcgaccccagaagggtctggcgacgagtttgacagaggtctgggaagaggctctgggtccgccggtggcgcgcgggcgggtcttgcggaaaggaacttgttgctctggaaagcgtgggtggagcaggggaaagaaggcgccggcggagggagcaccccgctgtggttttggcccgtggcctgccggctgttttgagagacaccaacacaataaagaagccgaccttccttcttcactcccccccaccccaaacttggcaagacccaggacccaaacgccattataaaata

SEQ ID NO: 132587 - DNA, 30 bp, Homo sapiens; identical to SEQ ID NO: 12804
  chr20:17429350-17429380
  hyper

SEQ ID NO: 132588 - DNA, 30 bp, Homo sapiens; identical to SEQ ID NO: 56941
  chr20:17511464-17511494
  hyper

SEQ ID NO: 132589 - DNA, 30 bp, Homo sapiens; identical to SEQ ID NO: 56942
  chr20:17512193-17512223
  hyper

SEQ ID NO: 132590 - DNA, 30 bp, Homo sapiens; identical to SEQ ID NO: 56943
  chr20:17518082-17518112
  hyper

SEQ ID NO: 132591 - DNA, 479 bp, Homo sapiens
  chr20:17549572-17550051
  hyper
tcccacaaaaacacccgcagcaaaaacgctgggattcatctgggccctctgaaaaccgtgtttccgacgcaaccgcccattagaaaaacacaattccaaattaaaaacccggagaactgagcggcggggctggcgccaccgtcccgggacagcgcggcctttcccagccacacccctgcgcgccgccggcctccttccccggcagttcccaaagataaataaatgctccttgtttttccagacctgaaattaacggtgactcacagagcactctgcatggccacggtcgcctcgggaaggaggaaaaatgtgcagacttttttcccctcacgcgagggcaggacaagccagactgggccaatcaggggagggcggcgggaatcgcaccaaagtaggtaaaaaatgcgggaggcgtccccgctgccgcggcccgcgactccgctcccgtgggtcctcccccagtgcgttccccctcctcg

SEQ ID NO: 132592 - DNA, 30 bp, Homo sapiens
  chr20:17550423-17550453
  hyper
ccccgccgaggaggcgaaggaaggccaccc

SEQ ID NO: 132593 - DNA, 30 bp, Homo sapiens
  chr20:17661329-17661359
  hyper
agtaggcggccagtacgtggtccggggtgt

SEQ ID NO: 132594 - DNA, 188 bp, Homo sapiens
  chr20:17661563-17661751
  hyper
aatggagaccccgaacgaaacaacttggtcggggtcaccctcgccagccggggcactctagagctaaaactcgcgacttatcattcggagaggggtccctgaagcactgcgggcgccccactggaagcgcagaccccggcctgcctcccctaatcagggcgcagcgggagagccggccgggccggggc

SEQ ID NO: 132595 - DNA, 30 bp, Homo sapiens
  chr20:17663368-17663398
  hyper
cagggttgcgcaaccgcgaacagccaagga

SEQ ID NO: 132596 - DNA, 161 bp, Homo sapiens
  chr20:17919823-17919984
  hyper
gggcaggtggctgtgctgggtcgcccctgccgcctacaggcagaaagcggatggtgcaaggtttccttccaaacggaaatcgcccttcacagagctgagcctgggaattaccacaaagaaacctcacaaagaaaaggtgcgcaaggcaaatgttcagaaaa

SEQ ID NO: 132597 - DNA, 296 bp, Homo sapiens; identical to SEQ ID NO: 56947
  chr20:17949250-17949546
  hyper

SEQ ID NO: 132598 - DNA, 30 bp, Homo sapiens; identical to SEQ ID NO: 56948
  chr20:17950596-17950626
  hyper

SEQ ID NO: 132599 - DNA, 135 bp, Homo sapiens
  chr20:17976772-17976907
  hyper
aatttcctgatttctcgcatattctctaacacaagagttgtgagcccctcttctgacggtatgaaaaccattttttttttggaacagcattaacgcgtgaataaaatctgctttaaaacgcgactgtcatctagt

SEQ ID NO: 132600 - DNA, 711 bp, Homo sapiens
  chr20:18037455-18038166
  hyper
cgctgctgctgccgccgtcgctgcggcagtcctcgggggggtcgtggagcaggcggcctaggcccactgtggagggaggggccgcgccccgacacacacactcggcgtcaacccgcacgcccgcggcagtttgacctgcgggcggtgctgccgccgccccgccccggacctgggcacctcgccaagtgggcaacgtcgcgggggaggccagtaagccccgaatcggcccacagagctagcttggggtgctcggagcctctttccggtcccagccaaggcgcccacgaggaaccgggcggccacgagcggcggaggaccccgcgcgccaagtttcctctcagggcgggggaggcggatctgacctctccccagctagccccagaagggttggcgagcctttgtgcacccccatgaggacgtgagattgggggtagcctctgctggctttcaatccctttcctgggccaccttggcccgcgctgcagccaacggtcccgccgccgggcaattagaggctcccactacggggaagggggcgcctagagtctggggcatcccagtccctcattgcctgccctaacccgcctagaagacccccgcgtgccccccggaagagggggatgaggtggggagcccgcccctgccgatgagcagagaagacccgccaccccttcccccaccccgggagcccagcgcccaggcccggccccc

SEQ ID NO: 132601 - DNA, 128 bp, Homo sapiens
  chr20:18038209-18038337
  hyper
cgggagctcatcccagctgcggaccgagacccccaggctcctcctcttcaccaggaagactttgggcatggtggggtcccctctcccgactgcggccccctcctcccggctgctccccgctaggggca

SEQ ID NO: 132602 - DNA, 286 bp, Homo sapiens
  chr20:18038356-18038642
  hyper
cggctcccggcggccagagcccaccttcccgcctcgcctgccctcttcctccaccccccgccgcggcgcggcccaggcctctcccccgcacgcctggcgactcccagcctcccggctcggcgacacctatgccttaaatcgcgagtgagaccacgccggggaaaaagtttcataaggtggaatagaaaaggcaccaggaaacttgggactgagcatgcgccctgcaacataacggtgtcaacaagctcgctacctgtccgaccggttccggcggccggggctgcct

SEQ ID NO: 132603 - DNA, 45 bp, Homo sapiens
  chr20:18038849-18038894
  hyper
cccccctcccccgcccggtggatttgtcttcgacgagccagaaaa

SEQ ID NO: 132604 - DNA, 168 bp, Homo sapiens; identical to SEQ ID NO: 56953
  chr20:18039163-18039331
  hyper

SEQ ID NO: 132605 - DNA, 468 bp, Homo sapiens
  chr20:18039559-18040027
  hyper
ggccttgttcgggtgcgcccaggacaaccggcacagcctcttgtgtcgctgcggtcgccctcctccaggaggtcgtcagacgtgtgccagctgccgggtgctgcgggggcgcgtctggtcagggatgccctggagcccaaggctcacccaacagccagcctcacctgtctgtaacctgaccctccgcgctcccagcctacagggcccgggaatcaacacagcggttttccctgttcccttccgccctgaatggcccttggggacacaaccgcctggtaacggatttctcggcgctactggcggactcgcgcggcgcagggagccggggcgcagctctgccggggctgcgggcgggaccggtgcgcggcgcctctaggtctgccctcaaggagtcaccctctctggactgaactctgaactccagcttttctctaagaaaaaccagctaagaacgaaaaagactttgat

SEQ ID NO: 132606 - DNA, 106 bp, Homo sapiens
  chr20:18118329-18118435
  hyper
cctagaatttgaatcgggggtggtctaacgctgtcgcctgcggggtgtgcaggaggcccctagtgaagccaagagttcgtagagcctgggcgccgctctatgctcg

SEQ ID NO: 132607 - DNA, 36 bp, Homo sapiens
  chr20:18118691-18118727
  hyper
gcaggtcggtgtcacgtgaccgtctcttccgggccc

SEQ ID NO: 132608 - DNA, 296 bp, Homo sapiens
  chr20:18268963-18269259
  hyper
ctcgggagctcctacgtgttttatgcacgtggttaagaaaaaagagggagaattcaggtgccacagtggccattctccggtgaccggagcgtgttactcagaaacggatccgtcagaggccaatgggagctgccggccttcagggcgcgcctggtggcgccgagcatcctgggaggtgtggtccgggcgctgtgccgaggattcggggtagtgtagtcctggcgccccgctggaggagctccccagctggtggctggagcgaccccttgttctttggtggcgctggtgagtgaggc

SEQ ID NO: 132609 - DNA, 92 bp, Homo sapiens
  chr20:18447680-18447772
  hyper
gacgcggcgagccgcgccccgcccactgggtgctgggcagatgattggtggagactcagcttcttagcaactagaccggcccctgccgctcc

SEQ ID NO: 132610 - DNA, 61 bp, Homo sapiens
  chr20:18448015-18448076
  hyper
gaccggctgcgacacgaggaagaaggcccctcggcctcagcagagcgctatcctccactgg

SEQ ID NO: 132611 - DNA, 158 bp, Homo sapiens
  chr20:18477824-18477982
  hyper
ccagagttccccagcgcgggtccagcggagctgagcccagcctgctcccgcagggagcctgcgccgcggcatcctgggagttgtagttgcggggacctgggaggccgggctctttcctccttggcctgccttccgctggctgcgtggggcagccaaga

SEQ ID NO: 132612 - DNA, 30 bp, Homo sapiens; identical to SEQ ID NO: 56959
  chr20:18488002-18488032
  hyper

SEQ ID NO: 132613 - DNA, 84 bp, Homo sapiens; identical to SEQ ID NO: 56960
  chr20:18488297-18488381
  hyper

SEQ ID NO: 132614 - DNA, 30 bp, Homo sapiens; identical to SEQ ID NO: 56961
  chr20:18488607-18488637
  hyper

SEQ ID NO: 132615 - DNA, 108 bp, Homo sapiens
  chr20:18547798-18547906
  hyper
ggaagtaaccttttcggataccgtctggagcccacgaaggcattacaattttgcaagtgagaagcttctcctctaagttgtcatttagtcctcgtcacgtggtaaaaa

SEQ ID NO: 132616 - DNA, 30 bp, Homo sapiens; identical to SEQ ID NO: 56963
  chr20:18548220-18548250
  hyper

SEQ ID NO: 132617 - DNA, 30 bp, Homo sapiens
  chr20:18568272-18568302
  hyper
aggcttagtgatgacgggttcttaggttcg

SEQ ID NO: 132618 - DNA, 30 bp, Homo sapiens
  chr20:18568534-18568564
  hyper
gcctatcgccaggccgagagtgggcgtggc

SEQ ID NO: 132619 - DNA, 143 bp, Homo sapiens
  chr20:19186753-19186896
  hyper
gctgccaccagggggcgcaccgccacagcgatcctaggaagagcatctggacccaatcattctgcagttctggggctggaaacctgggcgatgaactgagatgaggagatggacacagcactgtataacgtgagaccatccca

SEQ ID NO: 132620 - DNA, 1394 bp, Homo sapiens
  chr20:19192500-19193894
  hyper
gaaacccgggaggcccgcgagaagaggcgaggccagaggctgggcgcgggcagccaagcgcactcgcggcgccccgactccaggtagcacgtagagaggaggctgaagagcccctcggttttccgaaagtttccagcgaatccttcttggtgaagatcggcctctgggaggcagcgtgtgtgcttcccgagagggggccccctgcgccgtccctcttcccctggcacagaagggttgaaggactgcacacagggatccctccccagcccagtctcctcccagcgcgccccctccccgccatgccggccagcgccgggctgtgtcccaggcactgccccccgccaaccctggcccgaccagcctcgccgctgcaggctgccgggagctgcgctagctcatgctcccagctcgctcggtgctccctgttcgctccggcccggccccggcccccatcgcgccgaccatggaataggcgggcggccccgcgaggcgctcctgcagccggcgaggccagagccagtccggggtggctttgccaaccggcggagttggccagcggcgggccctcctaccgtcggtccttccccgctcctcctcctctgccccctccgcccccgcctcccggccgcccccgccgcccccgccgcgccgccgccccaggccgagcgcgggcgcggagcgtgggagccatggcgcgcgaggaggagcgggaccccgagcgccgggaggcggcggcgcgggcgagcggcgaggaggaggaggagggaggggaggagggactgggcgatagcgacgaggagggcgacgacgaggagacgggcagcggcgaggaggaggaagaggaggcggaggcggcggccgggtgggagcgcagcgaggacgcgcggctgctgcgcgcagggctgcctcctgccgctgtccccgccgcggccgcccgcgacaggagcggccgccgcccgccgaggccgccgcccggccgcccgaggatgcggccgtccggcgacgaggaccgcgcgcgtcgccgccgccgccgccgccgccggagggaccttctgctgagccagctctgcttcctggcctcggtggcgctgctgctctggtcgctgtcgagcctgcgagagcagaagggtgagtgcacgctgcctgccccgagtgggcgctgcggctccggcggctcggggctcccggggctgggcgcggggctccttcgggcggcccggccggagccccaggataagcgggctgggttggcggggggagtgggatgccaggcacgaggactccccctgccccacgcagaggcatggaggtggggaccctgagcgccagcagccagcaggcttaggcgtctggccgccctgggaacatttacctgtgcccgcctgtgcgctgct

SEQ ID NO: 132621 - DNA, 120 bp, Homo sapiens; identical to SEQ ID NO: 12812
  chr20:19673386-19673506
  hyper

SEQ ID NO: 132622 - DNA, 539 bp, Homo sapiens
  chr20:19738145-19738684
  hyper
acggagggctcccagcgccgatccaaaccgcgttccaggcggggtgggcgggcccctggccagcgaggccgaagcaaaacaacccgcccaggcgtccagagcgtatccaaccctggagaacctgccccggaaccaagagccgcagccagctcaggcctctcgagtggggcctttccagcccctgcaacagatcccgggatctgtagttgggcggaggggctcgttatgggaaaggggtgcgtgcgcgtttgtgctaaaacaagaaaggcaagaatctccgagaacaaaactctggtcctcgcctggccggggaccgcagaagacaggggcggcagcgccaaggcgggtcaggggccggtccagccaagtttgctccggcttagataaactttctgatggcagtttttcctggttgcagcctgggttccttgtaacagggtaagcgtagcgggtggttgtcaagaggggcggaggctggcggttacagggaatggagggatgggccggacctggggtcgcgcaggcgccttggtcgctgc

SEQ ID NO: 132623 - DNA, 152 bp, Homo sapiens; identical to SEQ ID NO: 56970
  chr20:19739199-19739351
  hyper

SEQ ID NO: 132624 - DNA, 134 bp, Homo sapiens; identical to SEQ ID NO: 12815
  chr20:19739431-19739565
  hyper

SEQ ID NO: 132625 - DNA, 324 bp, Homo sapiens
  chr20:19739612-19739936
  hyper
cgggcggaggaggagccccggattcctgccgggaagggacggggccactttcccactttgaggcctccccgcccccttctgggcttggcctccacccttggcctgggctcccaccagctcggcgtccacccaccggcggtggcgcgcccctcgaccgcgcggggacagcaggatttgcagaagttcagcttgaaagcctatgatatgttgccaagaaatacagggcaagatcggtcccctgggccctgagaggcgcctgtcttctcagagctcttaaatccctggggctttcctaattccgcagtgtagcggcacttccttgcg

SEQ ID NO: 132626 - DNA, 189 bp, Homo sapiens
  chr20:19997707-19997896
  hyper
gtggctgcgaactccgctcttctgcttgggtttccgcatcaccagcagcttctttccttcccaggtgtcgccgcctgctttctgcagccgctgcctgggaggggttccgaggttctgggcagccacagccccggaggccttacaggagcgacctggcaattcccgccgccggccgccagaggaagctgc

SEQ ID NO: 132627 - DNA, 41 bp, Homo sapiens
  chr20:19998404-19998445
  hyper
ctggggtgatggggcgagctggagacgcggcctggagccca

SEQ ID NO: 132628 - DNA, 189 bp, Homo sapiens
  chr20:20033010-20033199
  hyper
acctgtccccggcacggacgctagaaatcggctctgagagctcaccgaaaccacaaagctttcagaaaacaaacaggatctcggaaccggaagcggaacttgcaggactgacctttgacctctcgcttgagccgtgacggaggcggcaccgtttccatggtgaccaggctgcgcgtcctccttgcggca

SEQ ID NO: 132629 - DNA, 177 bp, Homo sapiens
  chr20:20343528-20343705
  hyper
gcagggagcagggctcgaaagtcgctgagcgccgagtgcgaggagctgttgattgttttctggttgaaagaagaagtgatgataaggctgggataaagtgagcgccggcaggggcgcagagcccgcagctgtatgctaatgctcacagaaaccaagcctccgcgtcccccattaaag

SEQ ID NO: 132630 - DNA, 1360 bp, Homo sapiens
  chr20:20344270-20345630
  hyper
gagaagagggaaaggcggaggagagaggaacggcggtggggggggaggagcacccgccaaccccatagcaagaacgctcgccagggtagaaagtatgcccttgtggaccccaggagtctggctgcctcttcgtcctcctgcggcaggcgaggcggggtgcaggtgtgagtggggtgggaggaaggggaaaggatcggggtcgccgcagcctttctggtcagtttcgctgggttttgtcagttccgtttgagaccgaggcgcacggactagcggccgccagcacctcacaggtggaggacacctcttgcgccccaaggtcaatgtcatcccgatgggtcccgtgccgtcctgactctccctgacctaattctttggttatgactttctcaccttctgggcttcgcctctgccagctttcgccgacgtcgcccttcccgccgcccgcccgggccttcctacccgctctcctccctccctggcccgacggtcccactgaggcaaaaacaaacagccctgagggcacttcaaggagcgtgcagtggccccgacggtactctcggggggataaaagaggtggccagccacgccgtcggcccccggccgaataatgggcgcgcagcagattgccagggggcacttgaaactcgaggggagggaaatacttgagcgcggtccctccccgcgaggacgcacgacgcagcctcgcggatcgtcccttgttcgctctctttcatgcactctccttttgtgtggaattatctaaacgggagatccctggcagctttatgctaatgcgccgaacaaaggcaacggcccgcgggcgggaggcccggaaggtgcctggggccgggccgggcggggtggcggccaggcgggctgcgcgtgtctctcgcgtgcccctgggactgacacaacaacccctcattcctgcaaatacaaagcctctcaccggctcgggtcgggcgcacccggcgcagggaggcgctggtccctccgggcggcgggcactgcagcggtaacgcacggttcctgccggttgtggctcgggggactgagggccgggagtgggggcttctgtgaagccagaagagaagtctgcagcagagtggtgatgaggggcgctgacacctcacccccaacgccgacgtctccaaacgcgataccctctgcggggtgagaatgcgggcccgcccggctcctcccgtgaggccagggcctcctgttctcctagacaccccaaggagccaactcctccgcagaagttccccgcttctgctcttatttccaagcttcgcgctttctacaaactccctgttgccttgactttgatttccagccgtggtgagggtcagagtgaacc

SEQ ID NO: 132631 - DNA, 489 bp, Homo sapiens; identical to SEQ ID NO: 12818
  chr20:20347220-20347709
  hyper

SEQ ID NO: 132632 - DNA, 485 bp, Homo sapiens; identical to SEQ ID NO: 12819
  chr20:20347736-20348221
  hyper

SEQ ID NO: 132633 - DNA, 2586 bp, Homo sapiens; identical to SEQ ID NO: 56978
  chr20:20348257-20350843
  hyper

SEQ ID NO: 132634 - DNA, 31 bp, Homo sapiens; identical to SEQ ID NO: 12822
  chr20:20692668-20692699
  hyper

SEQ ID NO: 132635 - DNA, 30 bp, Homo sapiens
  chr20:20692748-20692778
  hyper
ggcctccaggttctccgggagcgcaggcgc

SEQ ID NO: 132636 - DNA, 30 bp, Homo sapiens
  chr20:20693049-20693079
  hyper
agcacgtccttcttcgggtccagcaccttc

SEQ ID NO: 132637 - DNA, 121 bp, Homo sapiens
  chr20:20693387-20693508
  hyper
ttgggcgctacgcacgcgcacacaggccgaactctcctggcgggacactagcccgtccgcgccaaaacctagcggggacgcgctcagagggccgagaaggcgcctcgaatcacaaaggagc

SEQ ID NO: 132638 - DNA, 614 bp, Homo sapiens
  chr20:21080342-21080956
  hyper
attacttattttacacgttgtcgtctgctgatgtttaaaagataagaagacatttgtcagggcgggtgcttgaggctctcagaggactccgggagacactgccaaaacgtttccaaactgaatagtcattgggctgccagataattcagaaactatctgtatgagctgtttatcaaattattaaccgcacagatgttgtttggctgaagagcagctgaatcccctctctggcagccgcggagacaaaggtctccaggaataattggagatgtgcatggaatattaaattaatttactgctcttaattcttatgcaaattctgacctccgatggcgcctatcaattaccccgcccgcagtgaaagcgaaagcgacagtttcttctcttcgcttttttttcttttttaagaactcgaaaaaggaaatatttgcaataagcaggcggtagtagcacttcgtagctggaattatttaattgaatcttcaagtttttagggatgcccgtagaggataaaaccccagtgctcagcggagagggtgggaggggtacagggggcggaggaatctgttggtttgactgtacacctgcgggcggcggcaaaatacagccacgag

SEQ ID NO: 132639 - DNA, 816 bp, Homo sapiens; identical to SEQ ID NO: 12825
  chr20:21081028-21081844
  hyper

SEQ ID NO: 132640 - DNA, 29 bp, Homo sapiens
  chr20:21082094-21082123
  hyper
ggctctggcccggaaagagagtgacagag

SEQ ID NO: 132641 - DNA, 702 bp, Homo sapiens
  chr20:21082215-21082917
  hyper
cgggccccaggttggagtagccacgctagcggctaggccgttccaccgggtagctccgcccttccttttgctcaggcagctaactttggagccgggcaagacgtgttttcccgctccttcgaatttaaccgcccagtgcctgcctcctggaaaagctgtcacgattgggcttgggcttgggcttggccttggtcaagaaaggtttcctcggctgcgccaccgtggggatggaggtgggagttggaacacagccccctagctgagtgcaggggccagaggctggcgggggcacgcgggggtggttgggggcggagtgcggcgaggggtgagggcgcgaccgccttggggcaggggcggcgatggagtagctccgggctctccacggactcgattggacagccccaggccggctttggatccttggaggcggatacgcaaggccagacctggtggcgtggccagttgggcatcgcggtatcttccccaggcctggagggcagtgctgaaggcccgcggccgaggttttgctttaagtatacttgggcctcgcaactcagctgtttgcgaacagagacctggcgaatcgccgaggagcggcgcggctccgcgtccccacttcaaggccaagtggagagtgaggacacgctgaggccccctgctacctatcatgccatcttaagcgggcaccgactccttacccag

SEQ ID NO: 132642 - DNA, 53 bp, Homo sapiens
  chr20:21083204-21083257
  hyper
cctgaagtacattcacgcaaatgtgagaaagacttcaacgcacagaatcgcca

SEQ ID NO: 132643 - DNA, 1129 bp, Homo sapiens; identical to SEQ ID NO: 56985
  chr20:21083480-21084609
  hyper

SEQ ID NO: 132644 - DNA, 48 bp, Homo sapiens; identical to SEQ ID NO: 56986
  chr20:21085662-21085710
  hyper

SEQ ID NO: 132645 - DNA, 384 bp, Homo sapiens; identical to SEQ ID NO: 56987
  chr20:21085767-21086151
  hyper

SEQ ID NO: 132646 - DNA, 1104 bp, Homo sapiens
  chr20:21086194-21087298
  hyper
cgccggccccctcacccggcgagggccctgcgctcacacttcttccaggggaaggagtggccacgcctgagcccccctaaacgacctcttcaggagaaaagagtgccggccaggagtccctccagtaacctcagtttagatcgggttttcgcgcctcccctaggaatccggctggaaaccccggagactctgcgcctagagttttgcgggcgtctctctgcctccccgcagcttccggctctcgcaggcttcatccactccctcttcccccggacctgcctgaaccccgccgagcactaggcaaggccgggctctgcgggctggggaaaagaaggggcttggggtggcccaacccgaccgccacctcggcccggcctgcggggaaaccccacaaagtcaaggcgcggggcggggtcggggggatgggatccagagagagactcagaggggcgccccttccccccaggggtctccgaatcctagggactctctaagcccccgtggcagagaaaagaggaatttttaaaaacaaatcttcccttgcctgaggccattttccagccttccacgcgcctttgccggggaaagagtcgatgactcgccctgctcatcggctcagaccagagctaccctgagcccacacctctcctcctctctgcaagacatcccttccgccacccccagtcccgccgtcctcccctctccagacccactgaccttgggaaggcgcagacccaccgctcgccaagcctcgccccgcactgtgcacgggaagagggggctccgcgcgcagcccagtccggttagctggtcggcgtcggcggggctgccgaggtggcgcagagctcccctcccccacgccttataatttaatcacacgcgatattaaattatcaagctgctcattaatcatcacgcgagttattgggactgaacacgccgccgcgtgttttgacagcccagaaccattcgcgggggtcggggtgtgtctgggtttgggggctgggggatgtctagccactctagagaaacactgcgagccccacgcgggctggtggagcctcttgcctggaaaaagatgtggaaacgcgcaggctgggcgtc

SEQ ID NO: 132647 - DNA, 233 bp, Homo sapiens
  chr20:21106748-21106981
  hyper
gcagcagcatgagccggaccctcgcatcggccgtgcccctgtcgagtcccgactactacgagaggctgggccaactccagcacgggctgcgggacaggtaagggcactggggcgggggtggggagtcggcccgcgccgggggtcttccgcgtgccctgccccattttccttcccgctcccccgtccgaggttccccggggcccaggcccgcgcgcaacgccccccaggctccc

SEQ ID NO: 132648 - DNA, 30 bp, Homo sapiens
  chr20:21283793-21283823
  hyper
cagccttcgccacccggtccgccgccggac

SEQ ID NO: 132649 - DNA, 7 bp, Homo sapiens
  chr20:21372185-21372192
  hyper
gcggcgc

SEQ ID NO: 132650 - DNA, 396 bp, Homo sapiens
  chr20:21372294-21372690
  hyper
cgcccggcgcctgggtctcccctgcggctcgctagtcgcccggcccagcccgcagaccccgcggctggccctcccgggagccccgcgagccggccgcacgcacaggatgggcgcggaaagccccttcctctaccctcgggcgcaccctccttcctcgtccgcggcgccgcagcttctcaacctgccgctgcatctcaactccctgcaagcagcagagctgtagaataccagaaatggtcttccttccgaggctgccgttttaagttccaagtgtgaaagtaaccgaattttgctatgcttagaaatctaaaatctggacattccctgaagagtcaacttagagtccccagtttctcgatctggctccgtcccactgactgacgcctcctgcccacc

SEQ ID NO: 132651 - DNA, 15 bp, Homo sapiens
  chr20:21376321-21376336
  hyper
accacctcaaagcct

SEQ ID NO: 132652 - DNA, 31 bp, Homo sapiens; identical to SEQ ID NO: 56992
  chr20:21376702-21376733
  hyper

SEQ ID NO: 132653 - DNA, 252 bp, Homo sapiens; identical to SEQ ID NO: 56993
  chr20:21376876-21377128
  hyper

SEQ ID NO: 132654 - DNA, 167 bp, Homo sapiens; identical to SEQ ID NO: 12831
  chr20:21377473-21377640
  hyper

SEQ ID NO: 132655 - DNA, 849 bp, Homo sapiens
  chr20:21377737-21378586
  hyper
cgagacgccgggcggcatgtggtaggtggcggccgccgccgccgcagctgctgccgccgccgccgcggccgccgcgttgtgacccgccatggcgtgagaaggctgcatgcccgccacggtcgccgcctgcgaggagggcccaggtggcggcgcgcggtaggcggccgcggcccccaggggcgcccccaggccgggtggcgcgccgtccatggcgccgctgaacttcttgtaggtctcctcgatggggctcaggatgtcggacacggagaagggcgtcgtgtgctttgggctcaacgacatggctcggcgggcagccaggtaggggggcctggggcgcgcgccggcaggacgcggcggccgctcgtcgccgccacctcggccgcggcagctgagcctgtgacgaggagtcggcggctcggcgagccccccgggctgcgggatctggggtttattttagtccggcgccaggtttacgacagactcggggggcggagcaacatcccaaacgagcaaacaatggtcattgacatctttttctctcgcccccccaacccccgccccataatggaggcaaaaaaaggtaaaaggggcagttgggtgtttcttggaaagatcactccccgttgcttttcccatctttgcttttcccatcctttgcttttcccatccttcgctcctccatccgcggccgttaccccagccctcgagcaccagaaatagaaactcggaggctggcgtcgaggctagacatggactccgcgcctggccccttccagatcccagttttctaaagtgacttcgcaccaaagtccggtataattgcggaatggggaacgtgctgctaagttt

SEQ ID NO: 132656 - DNA, 39 bp, Homo sapiens; identical to SEQ ID NO: 12833
  chr20:21378678-21378717
  hyper

SEQ ID NO: 132657 - DNA, 748 bp, Homo sapiens; identical to SEQ ID NO: 56997
  chr20:21485911-21486659
  hyper

SEQ ID NO: 132658 - DNA, 131 bp, Homo sapiens; identical to SEQ ID NO: 12835
  chr20:21486785-21486916
  hyper

SEQ ID NO: 132659 - DNA, 720 bp, Homo sapiens
  chr20:21486954-21487674
  hyper
cgccgccacctcttggcaccactcaccgggctccgacccgggccgcgagtccgctgatgcgcagctgcctccggcggctcccgggctctgcccggacccgcgcgcagagacgctcgggaacgctgggctcgggcgcctcctggcggcggcagcacgcggcacacgctcggttctccggcccgagggggcgcgtggagcgtacgcgggatccgcgcgcgggcctgggctgctggcccacatttccccgcttgctcggatggcggcgctgaggcctattcgcctctttattaataacgatgcctcgggagggaaaaaatagagcctttaaaaatcagagtgcgagagaggagtgtgtgtgtgtgtgtgtgtgtgtgtgtgtgtgtgtgtctcggggcgttggtgaaagcaataaaactcagatcgcttccttggcgagatagcggcggctataatgcgccggggggatcaggggtttatttgcagatcctggataaaagatgatatatcgacacggtttagagtgtcactgcgcttggcctctcagggagccacaagtacatatttcctgaaataccgcccagcacagtatctaatccgcccgccacttaacaccgggaggggaacttcagcagcgcacaagcgcgctcccggtttcctggttctgggtggggagagcccaaatgagaaggatctggtatgcctagacgccccctcccctgg

SEQ ID NO: 132660 - DNA, 253 bp, Homo sapiens
  chr20:21488260-21488513
  hyper
aattttgtaagcacgcgatacaggagacattgaaaattaaagaggaagtatctccctcctccaacatggggagagacgctgttggaagaagtttctgaagtggtttcccatcgcaccaagaggccagtgggatggatccccgcgcataattcaaaggaacgcgcgcgtctttagctcttcggggttggtaaccaagtggtccggccgggcgcaagtcgccttggaaccggctgcagcccaagtctagctgggc

SEQ ID NO: 132661 - DNA, 21 bp, Homo sapiens
  chr20:21488591-21488612
  hyper
cggggccggtcggttgcgaaa

SEQ ID NO: 132662 - DNA, 72 bp, Homo sapiens; identical to SEQ ID NO: 57002
  chr20:21489086-21489158
  hyper

SEQ ID NO: 132663 - DNA, 207 bp, Homo sapiens; identical to SEQ ID NO: 57003
  chr20:21489239-21489446
  hyper

SEQ ID NO: 132664 - DNA, 264 bp, Homo sapiens; identical to SEQ ID NO: 57004
  chr20:21489621-21489885
  hyper

SEQ ID NO: 132665 - DNA, 615 bp, Homo sapiens; identical to SEQ ID NO: 57005
  chr20:21490147-21490762
  hyper

SEQ ID NO: 132666 - DNA, 531 bp, Homo sapiens; identical to SEQ ID NO: 57006
  chr20:21490814-21491345
  hyper

SEQ ID NO: 132667 - DNA, 32 bp, Homo sapiens
  chr20:21491616-21491648
  hyper
cggcgcagtaggacaaacgggagggcagggat

SEQ ID NO: 132668 - DNA, 101 bp, Homo sapiens
  chr20:21492308-21492409
  hyper
cggcgtagagttcagccctctcccaaggttcagaaggagaggcatgggcagagctgggtgggtggaatctgccactccaaggagacgcaggcaacctcccg

SEQ ID NO: 132669 - DNA, 318 bp, Homo sapiens; identical to SEQ ID NO: 57007
  chr20:21492507-21492825
  hyper

SEQ ID NO: 132670 - DNA, 1003 bp, Homo sapiens; identical to SEQ ID NO: 12840
  chr20:21492990-21493993
  hyper

SEQ ID NO: 132671 - DNA, 1378 bp, Homo sapiens
  chr20:21494360-21495738
  hyper
cgtggcgctcccctgccccggcgggcgggggaggggggagttggggggagggactgggggaggggaggggggaattggctttaattattgggataattattatttttaaaaagagaaagaaactggggatggggaggaaaaaaatgaagcccaacccagtgcctctctctgtcttctttgaaagcacgcggaaatggacgcaggaagccgggcggcctgcgcgccgagcgccgcgggccccggccttagtttctaactccaggaggggtgccaaggcggcgtcagctcgggctccggcggccgctcggcgcgcggtggcggctggtggcgaggaaaaaatgggccattgcccgagcgatcagtccatataaggctgggctccactcacgaacctggggaggcggggagagggggagaaagagagggagggagggaaagaaagagggagggagggggagcgagagagggagcgggagaagggtggaaaaaagggggaagagacattaaaaacgcaaaggttggccacgtgtgggcgggtcttgggagtcaagtggatgaagacagtatttgcagatgtgaaattgtgggttttggggagctccgcgctcccagccaacggccctctagagcaagatgagaggtgtaacgtgtcaattaattgcaaagacggggcgagcctttttttttttaaacccagtatttacatacaaagggccaccgcgtcgctcgcgagtccacacacttgaaagggccgttttaacaaattgcatcttaaaaaaggtgggggtggggaggaggaggggagaaaacaaaacagaaaccaggaggagggaaaaaatcctctttaacattcaccggttcctacctccccgcccccgcgcgcccacccccggcaagccggaaaattggcgatttgtggcgcctttggaaaagggggagggggcgaaggccgagctgcggaaatctctcctttccatcgttggtggttgcctaaacaagatccggttcaaatggcaagagcccaacttctgtaagcctcctaggtcaatattttggttgaggcttaaggatgagtgctagaaatgacaaggcaagtaattgattccagttaaccgcgagagagcccaaaacccaggagagagctccgctccgggccggccagagccaccaccaagcgacccgcccccttccagccgccctttatttgctaaagactcatttatttccttcactccgcctccccccacctcccacccccaaccccccgcctccacctctctgcggccaaggaggacgcgcagttcactttctgctttgcgggcggtcccggggagggcggggtaagagtgaggagctccaacttcgtctggggtcggac

SEQ ID NO: 132672 - DNA, 535 bp, Homo sapiens
  chr20:21495942-21496477
  hyper
agacccagaaagctgcgggggaggggggtcgctgggtggcccgacgatgcctcgttttctccccagttttcttctcccacgcgagttctttagtgtggtctctttttggacgccttgggtgcgttcggagtacgcgctccacgtttccaggttaagtcaggttagtgtgaagtttccagccactctcggctctgggaactgaactttcccgggacttgcacttcctcctcggcgctggggttggaaaagaccacgccgcatttgccaccccttcttctagttaaaacttttttggggggggggtgcaggggtgtagattggctacctgatgctcgttcgccccagaggagtgtcaggaaggagctttgtctgggggcggggaggggcacagaaggccacccctgcggggtccaggtctagtcttcccacaacctgggctcctccgcgcgggccaagctgagcgcgcgggcaccgggtcctcctcgcgcgcagctgcagcggacgccgccgcgccccagctgcccccgggttgcca

SEQ ID NO: 132673 - DNA, 94 bp, Homo sapiens; identical to SEQ ID NO: 57013
  chr20:21496683-21496777
  hyper

SEQ ID NO: 132674 - DNA, 203 bp, Homo sapiens
  chr20:21496992-21497195
  hyper
ttgaatcgtcttcctcgaacccattacttttcgtgctttttttttttttttgctcgctttccgtctctgtctttctcagcgccccccctcctccgccctttcacgtgggagctcgtcgctctgccccgtcggaggagggaagttggttctccaggagtcggggaagcgtcgagtttggatccaggggcgggagtgggcctgcc

SEQ ID NO: 132675 - DNA, 456 bp, Homo sapiens
  chr20:21497414-21497870
  hyper
ttggcagcaagtgtcgtttctcgcatatccccagagccctcttaggtgggggagtgcccgcagaggcctcccaaagcgtgttcatttcttcagctgggaaccacctcgctgaagttccatgtagttcccaacttctctcccccttccccagcatagtgaccctttcttctcaggatctaaatcagcaccgctgctattgatcaagtcccctcccctcacccgtgggagcctgcaaggtccgcagagcgcctgagagaggattgctttcctaggggaatcctggctcctggaattaatcacggggagggagtgctgccataggcgcctagagaaggaggccctcagcccagttctcaaaggtcgggtttgcctttgcgcctgccccttagcctcaatgaccagccgaatccttctgggtctcagcttgcggtgtcctcttgtcggagcacctgaggc

SEQ ID NO: 132676 - DNA, 229 bp, Homo sapiens
  chr20:21498080-21498309
  hyper
ttccccatcacttctcgtccgtgtggttcccgcgtccatttccagagcgttaacatttgcaattgaaaaggcgctgggagaccgctgggaggtccgtaattgaaggggagaaactgggcttgttagtggaagatcataaaatgcaagtcccccaggagcggcctgtggacgccgggaggcctgcgcaggcccagctggcggccagggcaagtccggtgcccagagcaca

SEQ ID NO: 132677 - DNA, 543 bp, Homo sapiens; identical to SEQ ID NO: 57017
  chr20:21498562-21499105
  hyper

SEQ ID NO: 132678 - DNA, 473 bp, Homo sapiens; identical to SEQ ID NO: 57018
  chr20:21499132-21499605
  hyper

SEQ ID NO: 132679 - DNA, 397 bp, Homo sapiens; identical to SEQ ID NO: 57019
  chr20:21499955-21500352
  hyper

SEQ ID NO: 132680 - DNA, 202 bp, Homo sapiens
  chr20:21501157-21501359
  hyper
tgcatccaataaaataaaaggcgaggaaagccgtttaactttcatggatgttaaattgaacacgaactgtggctccgggcacgctacaaaatggaaccggcctctctccaatattttctttaaaaacctagctttaagcccccctcgggccaaacgagcctgtcccagccaatccattatcaccggtttattggggaaccaa

SEQ ID NO: 132681 - DNA, 700 bp, Homo sapiens; identical to SEQ ID NO: 12848
  chr20:21501444-21502144
  hyper

SEQ ID NO: 132682 - DNA, 256 bp, Homo sapiens; identical to SEQ ID NO: 12849
  chr20:21502443-21502699
  hyper

SEQ ID NO: 132683 - DNA, 336 bp, Homo sapiens; identical to SEQ ID NO: 12850
  chr20:21502837-21503173
  hyper

SEQ ID NO: 132684 - DNA, 557 bp, Homo sapiens; identical to SEQ ID NO: 57024
  chr20:21503454-21504011
  hyper

SEQ ID NO: 132685 - DNA, 30 bp, Homo sapiens
  chr20:21504339-21504369
  hyper
gcctcgggcggtggtcgactccagtgtcgc

SEQ ID NO: 132686 - DNA, 421 bp, Homo sapiens
  chr20:21681907-21682328
  hyper
agtggccagtgtcagcggaaacggtgctccatccaccacagctgacccgactcattttcgataataaacatttccagggtagcgaacatcatggaggcctaggcaaagaaccaactttacgaccgccttggtcagcagcaggccaaaggaaaataagccgcgggaatgggtccgcgaagccaaggacgttatttctcgctcttgggggctctgttttaatgccagttggcagggtcctcaacaccttccatttggggtctggagagtctgtgtgtcctagtcaggagaggcaggttctgtgcaaaacgcactccccacctcgtccttgaggatccactctgttgggaggacgctctgaccttgcgctccgaggcggcgctcacaggcgccaattcagaatctagtcttcctctccccttcc

SEQ ID NO: 132687 - DNA, 158 bp, Homo sapiens
  chr20:21682361-21682519
  hyper
cgcggagtttcgttgtgttgttacacaagccagcttttggtttgttagttgttcgcattcccccagggtttgcagctccccgatctggctcagctcttcttcccatagtttctttgcagctagcagctcctcatttctcttttcgtcaattttcttct

SEQ ID NO: 132688 - DNA, 30 bp, Homo sapiens
  chr20:21682830-21682860
  hyper
gaagacccgggatcccggccctgcggcccc

SEQ ID NO: 132689 - DNA, 517 bp, Homo sapiens
  chr20:21683254-21683771
  hyper
agtaaccccccttgccgccaacccccagtccccagaagggcaggcaccccttcgcgcctcctttttgactcccgctttcggcaaagagtttacctctctttcttttcctgccttgggaaaactgggcgagggcccgaagcctctggggtaccctcagatccatcctctgccctgctaggagtccagccccaggcggaggagttttgccccaggtttctgagtgcgccctcagctaacaggctcccgcgaccctggaagcggaactttgttgcactccgcttccagaggacgctgaaatacggtgccaaacccagccaagcaaaaacgcagaatccgcgagctctttacctctgtgcgctcagcgctgactagtagctgtccccgggccatggagagggctaagctgcctccttgggaggtgggagagacgtttcttttccttctgcaatctcatcttagggccatctctcaccaagcctagcctgcagctcgggaacccgcgatacccggccggggg

SEQ ID NO: 132690 - DNA, 310 bp, Homo sapiens; identical to SEQ ID NO: 57028
  chr20:21683899-21684209
  hyper

SEQ ID NO: 132691 - DNA, 111 bp, Homo sapiens; identical to SEQ ID NO: 57029
  chr20:21684347-21684458
  hyper

SEQ ID NO: 132692 - DNA, 75 bp, Homo sapiens
  chr20:21685757-21685832
  hyper
aggagccctgcaccgcgctggacgctcaccttgacactcccagccagctggggtactgatcccacccttccccgg

SEQ ID NO: 132693 - DNA, 1176 bp, Homo sapiens; identical to SEQ ID NO: 12855
  chr20:21686206-21687382
  hyper

SEQ ID NO: 132694 - DNA, 45 bp, Homo sapiens; identical to SEQ ID NO: 12856
  chr20:21687755-21687800
  hyper

SEQ ID NO: 132695 - DNA, 43 bp, Homo sapiens
  chr20:21689628-21689671
  hyper
aataccatgaccccttcacatcgttatttgtaacagtttgagt

SEQ ID NO: 132696 - DNA, 30 bp, Homo sapiens; identical to SEQ ID NO: 12857
  chr20:21690021-21690051
  hyper

SEQ ID NO: 132697 - DNA, 347 bp, Homo sapiens
  chr20:21693261-21693608
  hyper
aaatctataagatactgcatacgcacaaagaaaatgtattgcttttatttgttaaagataacttgcagcttcgctccagttacctctgcctcgggattggttcttggaagatcctaaaagtaaactttgtcaaagagcactaggtcgctggcattgtcgcacccggacgctggcaaccccggcctccgtttgacccagccccggggatcccttcccagacccgtgcctcccctcagcggtggtctcagagtgccctgcaattgcagttgaatatttaaaaaatgcctctccccattcttagcccctgaattaaatgagcctgacctaggccccggcctccgagggcc

SEQ ID NO: 132698 - DNA, 30 bp, Homo sapiens; identical to SEQ ID NO: 12858
  chr20:21694292-21694322
  hyper

SEQ ID NO: 132699 - DNA, 240 bp, Homo sapiens; identical to SEQ ID NO: 12859
  chr20:21694602-21694842
  hyper

SEQ ID NO: 132700 - DNA, 30 bp, Homo sapiens; identical to SEQ ID NO: 12860
  chr20:21695758-21695788
  hyper

SEQ ID NO: 132701 - DNA, 30 bp, Homo sapiens; identical to SEQ ID NO: 12861
  chr20:21696452-21696482
  hyper

SEQ ID NO: 132702 - DNA, 139 bp, Homo sapiens
  chr20:21748377-21748516
  hyper
gtccctcggagaggccgcacccgggagaaagcgctgacgcctccgacccagctccgcgcacagcggcgcccccttctggccctcgtcccgccggagctgcgcttgcgtgaacagccctcaaatgcgtgtttgccctgct

SEQ ID NO: 132703 - DNA, 30 bp, Homo sapiens
  chr20:21789864-21789894
  hyper
gccgccaccagggggcgcgagagagcagca

SEQ ID NO: 132704 - DNA, 30 bp, Homo sapiens; identical to SEQ ID NO: 57037
  chr20:22515568-22515598
  hyper

SEQ ID NO: 132705 - DNA, 852 bp, Homo sapiens
  chr20:22557157-22558009
  hyper
tgcacattccagatctcatctcggccacccctccctccaagccagggccacctccagacccccggatgtgtagaagcatgcactgccccgaagaaaacgcgttgcccccaggtaacttcaggtacctcctagggctaacgcctccttctatgccatattgagccttatctcttgcttcttcccgcccccctcccacattaaaaggcccccaaagcattgaggagcggcttctctttatgaagctggggagaaggcgggcgataaagattgggcgtttaaattggccatttggaagattacatctcttcagcgagggtctttctttcaaaactcgcactgaattaagggtcatggctactccgtacccggctctcaaaggcacggcacctttgaattaggttgcggagtggcctgggcgaggggacccggggccatcaaaggcccgagggaaggccgtggggcgacacccgtctaatgacaagtaattgaaggattcgacgccgcgcattaccagcggaacgggaggcattaattatttaaaaacgattagccttgccgtgtgtcctgcaggcgtcccatcatgttcagcgaagataaccagccacccgaggcgagccggggctcggagggcggcgggcgcgctccccagcaggcttcgggtgcggtggacacgggcgcacagcccaaggcaccagggaaggagaggaggggccaccaagggtccccacacaggaaggtgactacataacactgaccctgctgaacaacgaaacagatttctgcccacttgggttcgaagtctggtgactgcggcgcagatgggaaaagctttccggtcgggggtggtgggca

SEQ ID NO: 132706 - DNA, 1966 bp, Homo sapiens
  chr20:22558240-22560206
  hyper
acgcctttccgcaggcggcggaaagacgcggctggttctgttgggtcctacaaactcgcgtcctccggaattcccgagggcaagcccggcacgcgcgagcgtgctcctgcccgtggaaggggggaaatcggcgactgggttgcagggagaatgcgatgataaatggccctgcgtctgctttctgactttctctcctggacccagctcgtaaccccagaggctccccaacctgcctgccgccaagcacggctgtgcgcaaaaggccaccagccgcttcctgcagccagagctaaggttcactcgcctcttagaaaggcgcggcccctcccctgctgctgcttgatgacgatccccatcgtctcctcggcctgcctgtgtccgagaaagagttgagactggactcgaacccctgcgcgccaaggggagggcgtcaccatgctccggcctcagcctcttcaaactcccatgcaccacgcacatcattttctgctgacccccacactagattctggggccaagggggttccccacaccccaccctccactgttctctggaaacatgctgctctcagatcgaatccccagacccgagccgctcgaggggcctgtgtggcttcctcggggccctaccaaactcctctaactgagctcagagcctaagcggtctgagtttgcaactctacgacccctcatccttccaagtcatgcactttccgaaccccctgcaaaaaaacccaacgccttgagtctcagttggctgagcttaccaccagccaagcccgcccgggcgtccgagccctggaagggagaaggactggctgggggaggggcggtgagcggacaggagtggggtgcggacgctgaggaggggagccgggcgcggtccccgggtgggcgcgctccctacctgcggcggccggcgggccggctggcgggcgggctgcggagcgtccagctcgcggagggaggaggccgactgctccgagccgaggcatccccgcatttatttgagctcaaaccaagcgactgttgactttagcacacaaagcaaagatttcactgcccgctagtttaaaaatgaatattttaccaagatatcgatcagcgttataaaattcagttaagtacaatgggatcctggcaaaaaaaaaaaaaaaagaataataaaggaggggggaggcaatataatatctgtgcaaatttgctgaagtgtgacgtggcatggaaagtttaccctcctggaattcggatctagaatgtttttttcggttgtttacagactttgtttattcacagatcatggttgcttaaaccggcgcgcggaaagcgtggggaaaaaaggaaaaaaaggaggggggagagtctctgcaccccacaatgagtagagttggggaaagcgcgcagtggcgatttgtgagctcgttatctcggaacccgggctaggggagggatttaagcgggaggggggcgtgaaagacacaagaagcacagaaaagcctccgaaagcgcctgctccccgacatcctttttatgtattcggacagaactatatcttatcggccgggatcagtgaaggggggcgcgctaagtagtttaaaacgaccctcgcacaatgggcgtgccatacgaaacatagcaggttagggcagcgctttcagcctccattgtcccccactcggcccccggccctgcctctcggctccttcgccacgggagccttttatgtgataatgaaacacatttcaggccgggctcacgacgtgtgtgtccttgctaggaggagagacggcctgattgctggctgtggcctccggatccccccctccccaatttctcttccttgtgttcttcgggacaatgtggcatgttaagaaagggatttggtggcgggaggggggcagtggcgggtgggaggcggaggcgatgccaaacccccctcaagcgcgtgggaaggccaggcttgttg

SEQ ID NO: 132707 - DNA, 30 bp, Homo sapiens; identical to SEQ ID NO: 57043
  chr20:22560465-22560495
  hyper

SEQ ID NO: 132708 - DNA, 116 bp, Homo sapiens; identical to SEQ ID NO: 57044
  chr20:22562392-22562508
  hyper

SEQ ID NO: 132709 - DNA, 317 bp, Homo sapiens
  chr20:22562568-22562885
  hyper
cgttttgttcgtgaccgggcccatggccaagctgccaggcatgggggaaccgtagccggggtagtgcatcacctgttcgtaggccttgaggtccattttgtggggttggtggtggtggtggctgtggtggtgctgctgctccgaggacatgaggttgttgatggagaacgggtggttgaaggcgtagtggtgttccggcttcaggtgggcctcaggcggcaggcccgggtggtggggcgggcccagcaggtgggccgcggcctgctgctgctgcccgggagagggcgccggctctggggggctcagcgccgcagccg

SEQ ID NO: 132710 - DNA, 397 bp, Homo sapiens
  chr20:22563238-22563635
  hyper
cggatggagttctgccagcgctgctggttctgccggtagaaggggaagaggtccatgatccactggtagatctcgctcagcgtcagcatcttgttggggctctgctggatggccatggtgatgagcgagatgtacgagtagggcggctttgcgtgcgtgtagctgcgcctgtaggtcttggggtcgcgggcgcggctcaggcccgcctgcccgtacatggggctcatggagttcatgttggcgtagggggccaggccgcccatggccccggccgcctgccccccgagcgggctcaggctgggactcaagtgcggccccatgcccgccacgccggccgccccggccgagccgcccatgcccgccatggcgcccgcgccgggggacatccccgccaggg

SEQ ID NO: 132711 - DNA, 1630 bp, Homo sapiens
  chr20:22563663-22565293
  hyper
cgacatgttcatggagcccgcgctcatgttgcccgagccgctgcccatggcggccgccgacatgctcatgtacgtgttcatgccgttcatccccaggccggcgttcatgttgctcacggaggagtagccctgcggacagagccccgggagggaggcgacagcgttagcaccgcggctggagggtgcccagacctcccacccaccgcccaggcctccgcgtccggggaggcctccggggagccctttcgtccccgatggcccagtctccggactccgagtctgtttcattcagggagagtcatgatcgatcgcccttgggaaggtggcgagcggattgctgcttgggcatgtggcccgttcctagcccttctccacctcgcccagattctagaacaggggtcccatggagtactcccaagccagcaccccaaatacattcccctaccccagagtctccccaaactctcccaccagcatactgagctggcgccgaggcccgaagtccccggacgccacctccggtcgcagcaagcaacctgcgggacaacgcgcggggcgcctcgggctgcctccagcgaagactgtcccgggccccctctgtccggtctccctccagggaccccctcccttgtcccagggaaactgcaaggcagtgcctgtgcggagtgcgggggcggctggaggcactgaacggggcaatagggaaagaaccgagacctgaaccacacgcggctgagctttgcaggcaaaaactttctttctctttgtccactagtctttgactctgcctccacttcagcccccaactcctacccatcttctcctcctcagctccccaccccctcgccggccgacctcccacccctccccagccgcgcgctgccaaacataactctgttaggatagtgcgtggctcggccacgaagaggatttggaggcgccgcaagtcaatatttgatcacaaagttaatattatctcaaggctaacagtgtgtcgtataaaaaagagacccatttgattccaaggagggcggaaaaggcggctgcccagaaaggctggggttgtggggcggggtgggggggtgccagcgagggaagcggtcctgaggttggggaaggagcgagcgccgccgctccacttccccctggaaaagacgagcgcttacctcgggctctgcatagtagctgctccagtcggacggctcgtgcccttccatcttcaccgctcccagcatactggaagccgagtgcatggcagtttaaaatttaacagccacaacaaacgaccagcaatcaccccccacccccaccctcttttaaaaaaaagtcagccaaagcaccgtcccctcctccctccctctctcgcgctccctctccctgggctccactccctctctctccctgggcaggccggaggcggtagttggaagtgggcgggaggtgggggggggcgaggagcggaggaggcccaggccagcgccccgcggtagggagcacccgccgccgccgcgctcacgggctgccgggtggcggctgaggttggcagtgccgagctgccccgaggcggcgggaagcgcgcggcgcgggggctagtgggggggtggggaggaggaggaggaaggaggaggag

SEQ ID NO: 132712 - DNA, 249 bp, Homo sapiens
  chr20:22565352-22565601
  hyper
ggtgtggaccgcggagcggacaagtgccgcagtgacgtgggaggctggtgatatagcgcggcgcgctggcgcgggcctccaatccccagacccggggcagcccatttgaataatcagctcacacctaggtgagaggtagccgcagccggcgctccgcacctgcccctcagcgcctgccgtccgccccaccgccgcggcgccccgcactcctgggcgggccaggggagcgggctgggcgggcgatcgggc

SEQ ID NO: 132713 - DNA, 579 bp, Homo sapiens
  chr20:22565634-22566213
  hyper
cgggtccacagcgagtcccctgaggaaggagggacctgggaggaaaccaccctctggggcggctccggcctccagcccccgccccgtctcatcgcgccgggcgcccggtgcgcctgtcggagggcgcgtccagcctcagtgcccggcagatccctatgaaagccggatttatttatgccgggtttcttcgctctcagtgctcattctctgtcaaaacagcaagtccatgacagccaatttgcaaagcgctgtcctatttagaaaaactacgtacacacctttaactcgcccgctgctgctcctgcgaggcccctccctgttacagttcagacccggaacggcctcgggagaagcgcggggcgcacggtctggccgcctcggctctccgactcctcagacaccggccgccagggacccgcagtggggcggccggcgcctggcgcaagcagcccctctagcagcggccgacggttgggaggctgagatttgtctctgatattcaggccggcgtgtttcaaggttacttttcagtcacaaccgaggtgcccacagcatttcgtaactaaaacaaacagggca

SEQ ID NO: 132714 - DNA, 154 bp, Homo sapiens; identical to SEQ ID NO: 12871
  chr20:22567410-22567564
  hyper

SEQ ID NO: 132715 - DNA, 228 bp, Homo sapiens
  chr20:22567605-22567833
  hyper
cgccttcggggggactcggcctttttggagccccaacccctaggttctgcgcgaacccaaaacggcctcctgcaccctggcgaggttctgggagctccggtagggtagggctggatgacgcctcctagagtctcggagcagccgctcccgcaccctcccggcacgcctgcccatgggaatgcgagcggggtctacggttagctttaggtagctgggagcgggacacca

SEQ ID NO: 132716 - DNA, 116 bp, Homo sapiens
  chr20:23029115-23029231
  hyper
gttgacacagcgctgcggacacggactgggctccagtatgcagtcatccacgtcctcgcaccggtgttggtcggccgccagccggtagccggtctcgcacatgcacgagtaggagc

SEQ ID NO: 132717 - DNA, 497 bp, Homo sapiens; identical to SEQ ID NO: 12874
  chr20:23029588-23030085
  hyper

SEQ ID NO: 132718 - DNA, 1419 bp, Homo sapiens
  chr20:23030291-23031710
  hyper
cgaggcagcctctgacatgcggatcggccagggctcgagtttataagtgcccggccctccctccctggacgttcgggaaaaggaaggaagtgcctggtgggaagggctgatgccgcatactcggattgctgggttctctggccgcccttgcgcccgccctcgcgcatgggatcacctcgccgggatgagtaaaccctgccctggcgcagggaggttctcgggcggggccgacaggggcaggcgccagggaaggccagcacccctgtaacaagacgactgtccccgcccaccactcgggcccccacgcgtgcagccctctttcatctcttggtcctcctttctttcttttcatacatgttacagccacttccaaggaaagcctggattgcaagagctctgggaaccggagacttcagagaagagggctttgaatggggagtgggggaggtggtgcacaggacctgcaagacgctgggaggggtgatcggcaccaagggcactttgggaggacctgcctaggacgtggacttccccgaagacaggatcgcaaggagagacagctggatcctgtccgcggccaaggtgcctggctcaggaaaccagcggagcgcgcttggcctcacaggacagtgggtgtggctggggtgacggggcagggtggggaagactggcctaacaccagcgccctctgccccatggctggccagggacccgcgagtccctggacacgcactggccaacgccagaccccatctcatcgggtggggaagtcgcggggacactgtcagggcgccgaagtccggacccggctcagaggcggtggcaggtgaattgctgcggcgccgggtaggggcgggcgcgtgggagcgagtcagcctggccagtttcggcccagcttccgaaggatggtgcttcttgcaccccaacagagtggctggcaaccccccaggggagcgcgcaggatcccagctgatcccacccgggtcggctaaggaggtttccatttcgtccagagtccgaattgatacccacgtgcatagaaacgccacttgctcggcaaagggcactgaagagccaccgtcctgtggatgggcagggtggggggggggctggaggaggacatgggaatccgtcactttcgacctcttccggtggttcacttaccgggaatgcggaagagtgggtctccccctcgggtcgcccccataatggtgagaggcaaactgtttaaaaacacccttgcctctctcctctactgtcctcacaacgagcgccagggggcggcgctgtcgagctctaaacaaagccaaggaagttggagaagtttcgggctaaaaagggttaaggtgtaggagcacagagtcctccttctggggttggaagctccgttcccgggcagctcagcgtggattccgctgc

SEQ ID NO: 132719 - DNA, 327 bp, Homo sapiens
  chr20:23331167-23331494
  hyper
ccccgctctaggtgcgggacctaagaggtttggcccaatcaggcatcccacctaaccagacgggccggagtctgtggcccggttggaccaacgaaaactctagggcggatttgccgggatttctgggaaagtgacactcccggaagctaccgcctcttataagccacacatgggcggagttagccttccggcccgcagtcccactggctgacttcgctgcccgtcacgggaatgcgggagagggcggcgccggggcgctcgcgtctgcgtggagaccggctggccgcgcgcgggaagccgcggaactgcgccggaaagtcccccggc

SEQ ID NO: 132720 - DNA, 30 bp, Homo sapiens; identical to SEQ ID NO: 12878
  chr20:23338902-23338932
  hyper

SEQ ID NO: 132721 - DNA, 30 bp, Homo sapiens
  chr20:23343088-23343118
  hyper
tttgttctctgggtcgtctttggagtggcc

SEQ ID NO: 132722 - DNA, 30 bp, Homo sapiens
  chr20:23400721-23400751
  hyper
tcaaaagaaaacaacgaaacaggcacacac

SEQ ID NO: 132723 - DNA, 30 bp, Homo sapiens
  chr20:23402243-23402273
  hyper
gtgagccgagcttgcgcaccgctagctccc

SEQ ID NO: 132724 - DNA, 756 bp, Homo sapiens
  chr20:23617971-23618727
  hyper
ctgtgcctgcccccgcgctgcggcgcagctcgagctggctcctggaagctgatcttaggcgccgggcgcggacctgacgtgtccgtgcggttccaggccaggccagactcagggcattcccggacacgcccgccaagggctcgggggtgacagcgaagaccgggaacagggtccgggtgagaagcccaggcgccggagaggagcagcacggggtccgggagcagcgcggggggaggctgggacggcggggccggggcttcggaccctgcggggggcggcacgcacctgcttgcgggcgcgcaccacctgcagcgcgcggctgtggtacatgtcgttgctggctttgttgtactcgccgacggcaaagtccagtgcacgccgcacaccctcctcctccacgctggcgtccatggggcctcccactaggcgcggcggcttgccgggactggagccggccgcggggctcacggccagggccacggccaggatggccagcaggagcagcggggcgcgcaggggcccggccatggtcggctaggacgcgggacgcggggagtggggcgcaggcgagaggctggagctagatagagaggacccgctgcgataccgaggcgaggccgtgagccccgcgaggccggcgactgcggttttatcccttccggccttcgccgccccaccccaccgcggcctgcactcccttttccggaacgcctcgtccctcccacctcccttctccctccccgcctcccctgcctc

SEQ ID NO: 132725 - DNA, 944 bp, Homo sapiens; identical to SEQ ID NO: 57059
  chr20:24449759-24450703
  hyper

SEQ ID NO: 132726 - DNA, 1363 bp, Homo sapiens
  chr20:24450819-24452182
  hyper
cgggttcgggctgcccctcggagtgacccgaaggagaccagccagggctggtgagccgggcggccacggagctggggacctaggtctgtttgggagtaggaagggaaacagactaattctccgagcggagcggcaggcaaggtgcaagcgcgcttgggatggggaatcccgacgggcgaccgtggcggaagcagagactcctggagcctctttcctctagccaggacaagacctgccttcaaaagctgtctggcccctggcagccgcgacagcctgcagccctgggagccacagccctggcgccgagatgggagcgagcacatacgcttttttggttccaatttgaatctcgctttttcctagtcgtgatttctgcctcttcatgtgcactctctgggcagtgaggaggaaggaatggctcactggatgagttgggcacttttcttagggaaggggctttgtccctatgcgctttttgcaagaccctactagagtggctctggcagccgagctttgaggaggcggccagaggggccgcttggcgtttctgaaagacgagaggaaggggtcttctggtagtcctgttttcctttgggggtttcgttgcacgcagaggcttgggcgcttggcacccagacttcaggtgcgcacagtcctcctgcgacgtcagatgcgctggcgccgcggcgctcctggctcggaccgatgcctgcgccttccctggccacgtcctggtgtttagtgcagcagacaccggccgaaggcttggctgattgggggtgtcgaggggaggggggctgggcgttacacagtggctccgttttctggttggaatcagttggtgaggcgtgcgcgcgcgagtccgtgtatctgtccgtctccctcctacagcccagcgtgtttggtctgagtccaaagaaggaggtggtgtgtgtgctgcgtagacctgcgcctgtggggtgagcagcctcatagcccccagagccggccaacttctccgtgctaggctgcgacctcaagggctgccgcgtcggggatcggaagtggtcttcaaagaggggtctaggtcgcgaaatcctggcagcagccgaagtgaaaaggagctgctaggaggcgggcggggggcagtctgatgtccgttctggcgcggacaggaagaaactgaagtcgaatttttagttgaattgcgtgctctgtgtttggcggtggtgtggcccgttcttttggaggtccacaccacaggtatgaggcctgtgggccctgaggaagcgcgatccccttaattcctccctcccctctctctccaccgcccgcccctttgcaaggagcaagcctgacagtagctgatcggcgccctctctca

SEQ ID NO: 132727 - DNA, 31 bp, Homo sapiens; identical to SEQ ID NO: 12884
  chr20:24564177-24564208
  hyper

SEQ ID NO: 132728 - DNA, 31 bp, Homo sapiens; identical to SEQ ID NO: 12885
  chr20:24638561-24638592
  hyper

SEQ ID NO: 132729 - DNA, 30 bp, Homo sapiens; identical to SEQ ID NO: 57064
  chr20:24973684-24973714
  hyper

SEQ ID NO: 132730 - DNA, 30 bp, Homo sapiens
  chr20:25038376-25038406
  hyper
cgtcctgggtctcccgaagcccactcacca

SEQ ID NO: 132731 - DNA, 30 bp, Homo sapiens
  chr20:25038771-25038801
  hyper
gagtgggtgcctcacgcccggggcgccccg

SEQ ID NO: 132732 - DNA, 502 bp, Homo sapiens; identical to SEQ ID NO: 57065
  chr20:25058267-25058769
  hyper

SEQ ID NO: 132733 - DNA, 21 bp, Homo sapiens
  chr20:25061767-25061788
  hyper
gccggcagaggagcgcggtac

SEQ ID NO: 132734 - DNA, 333 bp, Homo sapiens; identical to SEQ ID NO: 57067
  chr20:25061978-25062311
  hyper

SEQ ID NO: 132735 - DNA, 135 bp, Homo sapiens; identical to SEQ ID NO: 57068
  chr20:25062510-25062645
  hyper

SEQ ID NO: 132736 - DNA, 110 bp, Homo sapiens; identical to SEQ ID NO: 57069
  chr20:25062707-25062817
  hyper

SEQ ID NO: 132737 - DNA, 10 bp, Homo sapiens
  chr20:25062870-25062880
  hyper
cgccgttccg

SEQ ID NO: 132738 - DNA, 56 bp, Homo sapiens
  chr20:25063850-25063906
  hyper
ccaaccagccctcatcgctcggagccctgcgtcccccgcttcccaatcccagaacc

SEQ ID NO: 132739 - DNA, 756 bp, Homo sapiens
  chr20:25063993-25064749
  hyper
cgggaacccggcgcggctgcctgcgcgcacgcagggaccggagcccgagcctgggccctgcaaagtgggtctcccactcgctgcgcgttcgagtggggcctccgctaaacatgcagattaaacaaggggcttccgataaggataattacaggaggctgcgcattgactttccgttactaaaggaagacccaaatctcccccttgcaagctgttcccgggattaccaaaacaatcactttcttttgagatcattgtcttttgaaccactccagctcggggcagaacgctttagacgctggcgttgttttccgctccgcgaggaattttcccccagatttatctctgggtttagggaaggcgttgggcattcgggactgcgtagtcgtttgtaaatccgaatttggggtagcagttaagtgagatacctacgcttccacacagtttgtagcccgagaccagtcaggcaggcagggtagtcgattctaaggtggcccgaccggggtcgcccgcgaatggaaagcctaaggggcgagggcggacgcgggcgccgtgcctgcagccccgggtgccgaccaagtggcctcacctgggacaggtcttggggtctccctcccctaggtctccctggaaggtaggcgatcacgggagtgacagaccccgagtagatagccagtgatccaaagacaccaaaaggccaggcggtaggagcccagcctcagacactctctatagtgaccgcggcgcctcgggaaggat

SEQ ID NO: 132740 - DNA, 711 bp, Homo sapiens
  chr20:25065018-25065729
  hyper
ccttgtgtttcgcagcgtggcggtggcaggagcccagcgcgggaggacattttcatagcctcctacagtgagaaacgccccccacccgacgctgcgctcatctgtgtccccgctgttgccggggctctggtatccacttgcgcgccctatgtggtggggatccacccagagcccagcgtcaagttatacgggcgcttcactcagcgtcagccaagaccagggaagcgcttcttgccgtttaggagacgtctgcaagagataaaaagctagcccacgatccacccacaatcctcgtgtccccggggtgccctcgcagttgccaaacctacgggccgcgtttaggggaagcctccgcgtcctggcggccaaaagaatgggctccttccagcttccccctaccggataccacctgcaaatctattgccagaggcgcagctcccgcgaacgttcccgccccgggcggcccccaggagtcgttttgggtccctaaatccgttgagggttccgaatctgtcttcatcagccaggattacccgggatttaactaatgaataaaggttcctcagctcattattttctaaggaagatttccagcccctctgtcgccgaccgcgaatgtgccttggcagcgccaggctgaggttggacctgctgtgagtggctcagcaggcacccctcttgggcttctcagagccgcggctggccaggctg

SEQ ID NO: 132741 - DNA, 166 bp, Homo sapiens; identical to SEQ ID NO: 12890
  chr20:25129464-25129630
  hyper

SEQ ID NO: 132742 - DNA, 318 bp, Homo sapiens
  chr20:25176134-25176452
  hyper
cctctctgggccgacgccagcccggctgtggactggagaaaaccgcaaggccacctgcagaaagaaaagaaggccatcgcgcctacgcagctgagcacccatactccgcccgcgcctgcgcaactgggtcccccgacccccacctcctctcccgcctgcgcatgcgcggctgggtgcgcccccccgcccagcctgtgacgccacgtgcatggggcggagcccaggccctagggaatcgtggggtcgtatcccgcgggtggaggccggggtggcgccggccggggcgggggagcccaaaagaccggctgccgcctgctc

SEQ ID NO: 132743 - DNA, 30 bp, Homo sapiens
  chr20:25177012-25177042
  hyper
cgaatgccctggaccgagggagggagagcc

SEQ ID NO: 132744 - DNA, 30 bp, Homo sapiens; identical to SEQ ID NO: 57076
  chr20:25203124-25203154
  hyper

SEQ ID NO: 132745 - DNA, 84 bp, Homo sapiens; identical to SEQ ID NO: 12891
  chr20:25228117-25228201
  hyper

SEQ ID NO: 132746 - DNA, 41 bp, Homo sapiens
  chr20:25228554-25228595
  hyper
tggcgtggacaggtcgctgccgcctcggactacaccagaga

SEQ ID NO: 132747 - DNA, 30 bp, Homo sapiens
  chr20:25228884-25228914
  hyper
acgtggccgaggtgcggaagagcttcaacc

SEQ ID NO: 132748 - DNA, 30 bp, Homo sapiens; identical to SEQ ID NO: 12892
  chr20:25370882-25370912
  hyper

SEQ ID NO: 132749 - DNA, 30 bp, Homo sapiens; identical to SEQ ID NO: 57080
  chr20:25371424-25371454
  hyper

SEQ ID NO: 132750 - DNA, 30 bp, Homo sapiens; identical to SEQ ID NO: 57081
  chr20:25371685-25371715
  hyper

SEQ ID NO: 132751 - DNA, 30 bp, Homo sapiens
  chr20:25388034-25388064
  hyper
ttcttgaacctaaacgagaatgaatgaatc

SEQ ID NO: 132752 - DNA, 69 bp, Homo sapiens; identical to SEQ ID NO: 57082
  chr20:25565599-25565668
  hyper

SEQ ID NO: 132753 - DNA, 568 bp, Homo sapiens
  chr20:25565825-25566393
  hyper
gtcgggaaaccgggttttcaagcgttcggcccagcgggcgctgtattttagggcgtgacccccgccccgccctcgagggcgaccggaagagcaggcaccacagcagatgcgccgagtctgcgccccgcaccgcgaggagcacccgaggccgcgctcccggagccgggtctggtgactaaggcgcgggtcgcgacgcaggggcggccccggactctcgaccccaccagccgcctgaatgtcccgccggacgcccgggccggctcacctgggaggcgcctccgccgtccgcccgcgcggggccaggagcgcggcaccacccccgtaccgccggccgctctttgtgtctggaggccgcgacgcaacactcctcccggcctcgaggcaccgccccctcggtgtcccggcgcagtgggcgaacagggggcggggcgagcgaacgggagagggggcgggtcgggtccgggattgcggggcggggtgggggcaaggcggcctccgcaaatctcagggcggctctggccagtttggagcctggggtgacccttggagctgacctcgctggtccctg

SEQ ID NO: 132754 - DNA, 66 bp, Homo sapiens
  chr20:25566411-25566477
  hyper
cggagcttggcggttcgcagctctcggggtagcatcttctggaaacaagcccggaggccggccagg

SEQ ID NO: 132755 - DNA, 30 bp, Homo sapiens
  chr20:25603961-25603991
  hyper
aagaagttctgcggcgacaattctctaaag

SEQ ID NO: 132756 - DNA, 49 bp, Homo sapiens
  chr20:25604725-25604774
  hyper
attccctgcgccgccgagaaaagtgagatcccgcgagactcccagggta

SEQ ID NO: 132757 - DNA, 30 bp, Homo sapiens
  chr20:25676869-25676899
  hyper
gtcctcccctgtcccgcctcccacaataaa

SEQ ID NO: 132758 - DNA, 101 bp, Homo sapiens
  chr20:25677481-25677582
  hyper
cgctctgcgccgcccgggactacactacccagaatcctcagcgcggccgggactacgctacccagcatcctcggcgcggcccggaggctatgcgaccctgc

SEQ ID NO: 132759 - DNA, 16 bp, Homo sapiens
  chr20:25677622-25677638
  hyper
cgggagtcgtccaggt

SEQ ID NO: 132760 - DNA, 263 bp, Homo sapiens
  chr20:26188698-26188961
  hyper
gggaggagagaggatcggcgggcggcgggcggggaagggggcgcagacaggcaagggccggggaccgcgagggcaagggcacctgggagcccgcagaggggcggctgagggagaaacctcaggcatggccgggccaccaggaaaacacggccgcgggatcccaccgccacagacacgagggcggtcccgcggcgccccgcctgggacgccggaaggccctcggcacccaccaagacctgcctcacgagcccctggtcccgcca

SEQ ID NO: 132761 - DNA, 355 bp, Homo sapiens
  chr20:26189330-26189685
  hyper
cgctcggccaccaccgcggtggccggcggaaccctcgctctccccccgtcaccccgtcgagggggaagctgaggagggttcctctgcaagcgagtcgctactgcagcgctaccataacggagagagagacagaggcggcaggccgggggatcccgtaccccaaggcacacctcttggatcgctagagaaggctttctcaccgaggatgggtcacactccccacccgccagccgcccctcgtggggcccgaggggcccgcagaggcgctcagggaggcctggggaagggagggggcctgtggtaccaggaaaaacctgcgtgcggcaaccttgagcgttcgcggtcagggcgggga

SEQ ID NO: 132762 - DNA, 531 bp, Homo sapiens
  chr20:26189956-26190487
  hyper
cgtgggaggggcgcgtctcgtctcactcaaccgcctcgaaccccacaccgacgagctccctcaggacccacgcgcggacaccgaggcgccgaccggaggagggggcgctgggggtgggaacgacacaccaccgctcggcctcgggaacctgagggacaacccggagcgctccaggagcaccgcaaaggcccagggggagccaacgctcgcgcaaactccccgggagggcagcacgacgggccggcgggacagcacccccaccgctgcggaggggggccgcccgcaagtcgacaaccacaggaggcgagagcgaggggtgcctgccgcgtcagaggaccccccgacccaccccgcgaggcagaaggcgggggcgggacagcgaggtcaggccgggttccgcaccccatgccttcccaacgcaccacccgcaggcgaggaagaggagagacaaggggcccccgcgggcgggacgagaagaagggtcccattcgccacgaatgtccgcccctcgcccgtcgcggctcggacacg

SEQ ID NO: 132763 - DNA, 309 bp, Homo sapiens; identical to SEQ ID NO: 57087
  chr20:30062955-30063264
  hyper

SEQ ID NO: 132764 - DNA, 30 bp, Homo sapiens
  chr20:30102840-30102870
  hyper
cccccactgcgactcgggcactgattgttc

SEQ ID NO: 132765 - DNA, 17 bp, Homo sapiens
  chr20:30169624-30169641
  hyper
gggcgcggtggctcacg

SEQ ID NO: 132766 - DNA, 30 bp, Homo sapiens
  chr20:30192515-30192545
  hyper
ctgggtaggccctccgggtctcaggaacac

SEQ ID NO: 132767 - DNA, 1362 bp, Homo sapiens
  chr20:30192833-30194195
  hyper
tccttccagaggagcccagtgcggccctcgcctctacccgctgccctgcccggtgccctgccaccgacccacccttgctgttctgaaacccgggtcgtctttccacactgcgagcaggcactagacgagcaggaggctggacctaggagcgcgggtcacgcccccatgccgcccattggctgcttttgaacgttctgagcccgcccctccgggggccgtggcgtgtttataaaagacaagctgtggctccgcactctcattccacgttcttaactgttccattttccgtatctgcttcgggcttccacctcatttttttcgctttgcccattctgtttcagccagtcgccaagaatcatgaaagtcgccagtggcagcaccgccaccgccgccgcgggccccagctgcgcgctgaaggccggcaagacagcgagcggtgcgggcgaggtggtgcgctgtctgtctgagcagagcgtggccatctcgcgctgcgccgggggcgccggggcgcgcctgcctgccctgctggacgagcagcaggtaaacgtgctgctctacgacatgaacggctgttactcacgcctcaaggagctggtgcccaccctgccccagaaccgcaaggtgagcaaggtggagattctccagcacgtcatcgactacatcagggaccttcagttggagctgaactcggaatccgaagttggaacccccgggggccgagggctgccggtccgggctccgctcagcaccctcaacggcgagatcagcgccctgacggccgaggtgagatccagatccgaccactagatcatccttataccgacggggaaacggaggccagagagggcgtgggcgcttgcaccacttccgtcccatccttgcgggtacctggctatgcgggggtgcctaaggagcctggaaaaagcgctcccccgtcgtgcttcctggggaagggggcgttcgctgcgctcggagcggcgtcccttccaacccgccggtctcatttcttctcgttttcacaggcggcatgcgttcctgcggacgatcgcatcttgtgtcgctgaagcgcctcccccagggaccggcggaccccagccatccagggggcaagaggaattacgtgctctgtgggtctcccccaacgcgcctcgccggatctgagggagaacaagaccgatcggcggccactgcgcccttaactgcatccagcctggggctgaggctgaggcactggcgaggagagggcgctcctctctgcacacctactagtcaccagagactttagggggtgggattccactcgtgtgtttctattttttgaaaagcagacattttaaaaaatggtcacgtttggtgcttctc

SEQ ID NO: 132768 - DNA, 304 bp, Homo sapiens; identical to SEQ ID NO: 12896
  chr20:30196328-30196632
  hyper

SEQ ID NO: 132769 - DNA, 248 bp, Homo sapiens
  chr20:30310625-30310873
  hyper
ggaaccagccccctcgcttgcttcctcctccatcgcccggatcgagggcggccgctccgcagccgcggcctcctgccacccgggagcccagccccctctctcttgcacgccccttggctctccgcctcctactgggagccaggagtactctcccggaggtggctggtatggatttagttggtttttgtttttcttttttctatttaagcaccagcccagggtgaggtggaggcgtccgaaaccctaaa

SEQ ID NO: 132770 - DNA, 30 bp, Homo sapiens; identical to SEQ ID NO: 57091
  chr20:30311224-30311254
  hyper

SEQ ID NO: 132771 - DNA, 30 bp, Homo sapiens
  chr20:30326905-30326935
  hyper
tggactcacgcaggcgcaggagactacact

SEQ ID NO: 132772 - DNA, 30 bp, Homo sapiens; identical to SEQ ID NO: 12897
  chr20:30327414-30327444
  hyper

SEQ ID NO: 132773 - DNA, 30 bp, Homo sapiens; identical to SEQ ID NO: 57093
  chr20:30410841-30410871
  hyper

SEQ ID NO: 132774 - DNA, 448 bp, Homo sapiens; identical to SEQ ID NO: 57094
  chr20:30448990-30449438
  hyper

SEQ ID NO: 132775 - DNA, 305 bp, Homo sapiens
  chr20:30457819-30458124
  hyper
gggacacatgcagacggagagcaggactcactgggagacagcctgggagtgacagccacagcaagacagcgagagacacacagagtcacggagagagggcggacacagcggggacagagacgcagggtcagagagggggagacccgacagccgcggtctcgagtcacagggacacggagatgccgccgcacggagaccggcgagaacagaaggtcagaggcgggcggaccgagctggtcagcgccgggccgcggcggccggggcggggaccggggaggctgcgcggggcccgccccctaccttgg

SEQ ID NO: 132776 - DNA, 54 bp, Homo sapiens; identical to SEQ ID NO: 12900
  chr20:30458609-30458663
  hyper

SEQ ID NO: 132777 - DNA, 70 bp, Homo sapiens; identical to SEQ ID NO: 12901
  chr20:30458690-30458760
  hyper

SEQ ID NO: 132778 - DNA, 30 bp, Homo sapiens
  chr20:30467596-30467626
  hyper
aggcgcctgtctgtcgccttggcaacggga

SEQ ID NO: 132779 - DNA, 30 bp, Homo sapiens; identical to SEQ ID NO: 57099
  chr20:30539529-30539559
  hyper

SEQ ID NO: 132780 - DNA, 30 bp, Homo sapiens; identical to SEQ ID NO: 57100
  chr20:30539893-30539923
  hyper

SEQ ID NO: 132781 - DNA, 1282 bp, Homo sapiens; identical to SEQ ID NO: 57101
  chr20:30555390-30556672
  hyper

SEQ ID NO: 132782 - DNA, 248 bp, Homo sapiens
  chr20:30582820-30583068
  hyper
agcgagaggaaccagcgcgcgggagcctgagcaccgcgtccttcccgcaggtacctgcgcgccctgtacctggggctgcagagccgctggcgcggggagcggctgcggcgccacttctactggcagatgctgttcgagagcgccgacgtgagcatgctgcgcttgctggagaccttcctgcgcagcgcgccgcagctagtgctgcagctcagcctgctggtgcaccgcggtggcgcgcccgacctgct

SEQ ID NO: 132783 - DNA, 30 bp, Homo sapiens
  chr20:30606478-30606508
  hyper
tctgaggccaggggcgcaggcgtcgtgggg

SEQ ID NO: 132784 - DNA, 30 bp, Homo sapiens
  chr20:30607158-30607188
  hyper
gaccccagccccgacgcctactgcaacctg

SEQ ID NO: 132785 - DNA, 30 bp, Homo sapiens
  chr20:30619002-30619032
  hyper
ggctgacatcacgcacgacatcgaggcgct

SEQ ID NO: 132786 - DNA, 1672 bp, Homo sapiens
  chr20:30639045-30640717
  hyper
gactcctcccctcccccgaccacctcccccagcttgggagtcctctgagctgccaggaagccagggtggttccttcgggcagggaactttgcatggccatggtggttccttcgagagaggaactttgcatggtgtctgaatggagcaggcctgcggaagagaaaccgctgaccacagacctgcctggaagtctcgggccgcggagttggggagggccgggccagaagggaggggtcggagtggtggggaaaagagatcacgatgcttccggggtagggtaaggcctttccagggtgggttggaatctttgaagactgtggcaggaatcccttgataggtggggttaggatctctgaagggcagggttggaatctttggaccggcggtatagacccctgggtattaaaactcttaggcggcgggaggttagatcgcgcaggagcaggagcggtattggaaccctggggtttgtgttctaaatcttagggcagggttagaatccactgaagtgagagttcggatccttccactgggcagattagaatctttgggggcaagttgagtttaaaaatccttcagaggtgggattaaaaatcctttggcggggcggggttagtatcttgggagccttggagcgggtgctggggttcttagacgggcgggttcgaatccctaggagtgggatttgggatcctttggagactggggtaggacgctgggcggtgggatggggaggtgttagggaaagtggagcggaagggatgggggttcgcatccttggtggacgcgttagaagcctcctatggatggtgctaatattttttttctcttcgtggagggtttgggatccttcttgcaggagacggaggttatgaccctcggggagccggttaggatcctggggtggcgtctgaatcttcggggaggtgttaggacacttggggcggagttagcctcgctcagggcgcggctaaggcgcccagatggcctgcgggcgccaccacgtccctggtcccagctcgggagcacatcagaggcttagaggcgagtgggaagggactcagacagtgcaggacgagaaacgcccgcggcaccaaagcccctcagagcgtcgcccccgcctctagttctagaaagtcagtttcccggcactggcaccccggaacctcaggggctgccgagctgggggggcgctcaagctgcgaggatccgggctgcccgcgagacgaggagcgggcgcccaggtgagtgccgcgcacaggggaccgggaatacccggcccgcgaggggtcccaggaggcggagggagcccaggagcctggggagggctggctacgggtgcggctgggggcagcgaggggagacggaacgtcgggggagccgcgggtagcccgggggatgaggggtcgacagcgagtggagggtgccctagggaggggcggcactgttgcggactgctggattcccggggaaggggacgctcgggcccgtgcagtgactttatccaccacttctctgggccgtccaggttccccttcttgggggggggcggggattttttttttaatttaaaaaagaaaaagaaggaagggatggggcttcacagaacccgggaaggggaaggcccttacggttcccggtgggggccgggtcacgccgggttggcagccag

SEQ ID NO: 132787 - DNA, 299 bp, Homo sapiens; identical to SEQ ID NO: 57104
  chr20:30697226-30697525
  hyper

SEQ ID NO: 132788 - DNA, 510 bp, Homo sapiens
  chr20:30777839-30778349
  hyper
gcttcgtcccggacccggccattttccaggctcggagtagtcgccgtggaggccgcttccccgcgcccaggggaagggaaggcggtcccggggcccgctgcggggtggagggacccgcgccccccagcttctcgggcccgggccgcggggaccgtgcgcgcgtccccctcccgggcaaggccgggcggcgggcgcgccgcggcttctggggtccccgccctcttgtccgccatcgcctgcgggagcctctggcctggaggggctcggggcgcgctggcgactgcgggctcggcgacaggggcggctggtggcgggaggacagtgggaggaaggctccgccccacgcgcccccctctcggatgtgattcgccggggtctcccgcagccggggcgagcggcttggaagcccggaggaggggtacggaactgcccgatggggatgcgaccgcgggcgccagacgaactgtccccacattcgttggcgctggcggtggaggtggggagaagtgt

SEQ ID NO: 132789 - DNA, 99 bp, Homo sapiens
  chr20:30795268-30795367
  hyper
ggcctatctggggccgggttggcgcagaccgggccccgggtcgggggtgtgggcgaccgcgctgaggggcccgagatgaggcgcgccgccgctccgggt

SEQ ID NO: 132790 - DNA, 30 bp, Homo sapiens
  chr20:30865386-30865416
  hyper
attgaaattgacaccggttgctaaggaagt

SEQ ID NO: 132791 - DNA, 96 bp, Homo sapiens; identical to SEQ ID NO: 57107
  chr20:30946057-30946153
  hyper

SEQ ID NO: 132792 - DNA, 111 bp, Homo sapiens; identical to SEQ ID NO: 12905
  chr20:30946218-30946329
  hyper

SEQ ID NO: 132793 - DNA, 290 bp, Homo sapiens; identical to SEQ ID NO: 12906
  chr20:30946345-30946635
  hyper

SEQ ID NO: 132794 - DNA, 30 bp, Homo sapiens; identical to SEQ ID NO: 57110
  chr20:30947126-30947156
  hyper

SEQ ID NO: 132795 - DNA, 84 bp, Homo sapiens; identical to SEQ ID NO: 12907
  chr20:30954185-30954269
  hyper

SEQ ID NO: 132796 - DNA, 30 bp, Homo sapiens; identical to SEQ ID NO: 12908
  chr20:30955515-30955545
  hyper

SEQ ID NO: 132797 - DNA, 110 bp, Homo sapiens; identical to SEQ ID NO: 12909
  chr20:30956816-30956926
  hyper

SEQ ID NO: 132798 - DNA, 387 bp, Homo sapiens; identical to SEQ ID NO: 12910
  chr20:30959965-30960352
  hyper

SEQ ID NO: 132799 - DNA, 296 bp, Homo sapiens; identical to SEQ ID NO: 12911
  chr20:31015929-31016225
  hyper

SEQ ID NO: 132800 - DNA, 105 bp, Homo sapiens; identical to SEQ ID NO: 12912
  chr20:31017139-31017244
  hyper

SEQ ID NO: 132801 - DNA, 154 bp, Homo sapiens; identical to SEQ ID NO: 12913
  chr20:31017702-31017856
  hyper

SEQ ID NO: 132802 - DNA, 360 bp, Homo sapiens; identical to SEQ ID NO: 12914
  chr20:31019122-31019482
  hyper

SEQ ID NO: 132803 - DNA, 107 bp, Homo sapiens; identical to SEQ ID NO: 12915
  chr20:31020681-31020788
  hyper

SEQ ID NO: 132804 - DNA, 635 bp, Homo sapiens; identical to SEQ ID NO: 12916
  chr20:31021085-31021720
  hyper

SEQ ID NO: 132805 - DNA, 4889 bp, Homo sapiens; identical to SEQ ID NO: 12917
  chr20:31022233-31027122
  hyper

SEQ ID NO: 132806 - DNA, 30 bp, Homo sapiens
  chr20:31070834-31070864
  hyper
cccgcgaccctgggcgctcagggccagaca

SEQ ID NO: 132807 - DNA, 30 bp, Homo sapiens; identical to SEQ ID NO: 57122
  chr20:31071929-31071959
  hyper

SEQ ID NO: 132808 - DNA, 117 bp, Homo sapiens; identical to SEQ ID NO: 57123
  chr20:31072614-31072731
  hyper

SEQ ID NO: 132809 - DNA, 30 bp, Homo sapiens
  chr20:31124472-31124502
  hyper
tattctgcaggagacgttaatcccctctcc

SEQ ID NO: 132810 - DNA, 30 bp, Homo sapiens; identical to SEQ ID NO: 57124
  chr20:31124861-31124891
  hyper

SEQ ID NO: 132811 - DNA, 30 bp, Homo sapiens; identical to SEQ ID NO: 57125
  chr20:31170807-31170837
  hyper

SEQ ID NO: 132812 - DNA, 75 bp, Homo sapiens
  chr20:31172327-31172402
  hyper
gccccgcggcgggacccgcccgcggccgccgcgcgcgcactcaccgagcccgtcttgaccggcacatacaccact

SEQ ID NO: 132813 - DNA, 72 bp, Homo sapiens; identical to SEQ ID NO: 12919
  chr20:31172881-31172953
  hyper

SEQ ID NO: 132814 - DNA, 87 bp, Homo sapiens
  chr20:31173450-31173537
  hyper
cccgcggggagtagggcgcagaccccagcccagacgccgacctcccggccgccccgccccacttagccaggccgggaaggtgtaggg

SEQ ID NO: 132815 - DNA, 589 bp, Homo sapiens
  chr20:31350974-31351563
  hyper
tgccatgcaggtgggcgtccgccccttgcaactgggatgtggggtcttcaggcgaggcgctgtcccttcccccaatcccagctttaggaaagagctcgtgagtgtgggcttagactcgcgcgggctggggtgtgcgccgtggagggcgtgaggcagagggcgacctcccggggtgctcctgagctgagccatcaagcgcggggagcagcggggctgccctctgcctgtgcacacctggcccgggaggagccggccggaggggcggcgcctccctgtcccggccacgccgcctaccctggggtcttaccttccattcttagcctaactcccgtgtgcggctggccccacttcccagactcgcacactaaggcctcaaaacctctagcaccagctcctggaagataagcttcccggctcgtggttgcatggggagggtgtattgagctccactttatcggggagaaagtggaagcggagaaagacctaacaagttgtaagactgcgctgcccttgggcccaggcttcccgctggaggatctcacctgtggatggagttccgagcccaggtcttgcccgcgcctccagcttt

SEQ ID NO: 132816 - DNA, 30 bp, Homo sapiens; identical to SEQ ID NO: 57130
  chr20:31408108-31408138
  hyper

SEQ ID NO: 132817 - DNA, 141 bp, Homo sapiens; identical to SEQ ID NO: 12921
  chr20:31797661-31797802
  hyper

SEQ ID NO: 132818 - DNA, 30 bp, Homo sapiens; identical to SEQ ID NO: 12922
  chr20:31989402-31989432
  hyper

SEQ ID NO: 132819 - DNA, 180 bp, Homo sapiens
  chr20:32031786-32031966
  hyper
gaacccagtgagcccgcgcagggggctcggcgctcggaatgcccatcgagggccgggactgtaactcccggacgtgggagcgcatgaaaaagagacagaaccacgtatcctggtgcgaagcactgggcatcgggctgggctgcatatggcggagggctgggctgcgtatggtagagcgtt

SEQ ID NO: 132820 - DNA, 30 bp, Homo sapiens; identical to SEQ ID NO: 12924
  chr20:32032428-32032458
  hyper

SEQ ID NO: 132821 - DNA, 30 bp, Homo sapiens; identical to SEQ ID NO: 57135
  chr20:32077504-32077534
  hyper

SEQ ID NO: 132822 - DNA, 30 bp, Homo sapiens
  chr20:32077951-32077981
  hyper
gcggctgcagatctcgcggcgacgcctgcg

SEQ ID NO: 132823 - DNA, 31 bp, Homo sapiens; identical to SEQ ID NO: 12925
  chr20:32090525-32090556
  hyper

SEQ ID NO: 132824 - DNA, 30 bp, Homo sapiens
  chr20:32251494-32251524
  hyper
tactgctgctgctgcggcggcaagaggcgc

SEQ ID NO: 132825 - DNA, 350 bp, Homo sapiens
  chr20:32262416-32262766
  hyper
gaacctaggggctgcgggcctacccagagggacaggatgaccaagccagtgccgaggtcagggtgacacaagtgggtaaaacccaccaggacttcaccttttggggcgtctgtatcctcatctacaaaaatggtactggcagacaccctatgcaattgttgggactcattcaatgtcaagtgcttacaacgggggctggcgcagaggaagcccacaggtccgtgcggccgaatcccaggcatcccgacgcccgccctctctggcactaagcgcagccctttcccctcccctccgtgactctggccctcccttcaacccgttctccacacagcagccggggggagctttta

SEQ ID NO: 132826 - DNA, 30 bp, Homo sapiens; identical to SEQ ID NO: 57138
  chr20:32273878-32273908
  hyper

SEQ ID NO: 132827 - DNA, 30 bp, Homo sapiens
  chr20:32274372-32274402
  hyper
cggggcggggcgcgcgcaggctttgtccgg

SEQ ID NO: 132828 - DNA, 364 bp, Homo sapiens; identical to SEQ ID NO: 57139
  chr20:32307858-32308222
  hyper

SEQ ID NO: 132829 - DNA, 30 bp, Homo sapiens
  chr20:32308785-32308815
  hyper
tgctgggattacaggcgtgaacccagccgg

SEQ ID NO: 132830 - DNA, 30 bp, Homo sapiens
  chr20:32319704-32319734
  hyper
ggctgggggctcggcggcggctcctgggcg

SEQ ID NO: 132831 - DNA, 30 bp, Homo sapiens
  chr20:32320178-32320208
  hyper
cggtctggaacagccgcggccagggaggcg

SEQ ID NO: 132832 - DNA, 30 bp, Homo sapiens; identical to SEQ ID NO: 57140
  chr20:32320538-32320568
  hyper

SEQ ID NO: 132833 - DNA, 30 bp, Homo sapiens; identical to SEQ ID NO: 12926
  chr20:32342006-32342036
  hyper

SEQ ID NO: 132834 - DNA, 241 bp, Homo sapiens
  chr20:32398867-32399108
  hyper
ccactcctacagagcgcaggccaaggagactacatttcccagaatgccacacgccctttgaccccagctacagcaaaagacgcgccggggagcgcctgaagccggaagactatagcttcccggcatgcagcacgcttccccctattagatttgaggcgcggccggcgcgttgcccactgggagttgtagtcagtggcgcgttgccctgacgcctgccgggccgggcgtgggggcctgtggg

SEQ ID NO: 132835 - DNA, 30 bp, Homo sapiens; identical to SEQ ID NO: 12928
  chr20:32699010-32699040
  hyper

SEQ ID NO: 132836 - DNA, 16 bp, Homo sapiens
  chr20:32699881-32699897
  hyper
cgccgggctcagatcc

SEQ ID NO: 132837 - DNA, 105 bp, Homo sapiens
  chr20:32700167-32700272
  hyper
gtcgccaggcatgccgggacttgtagtccatttataagagggttgcgcttgcgctgtagccgcccagcgacctgtgcgcggcgtctgagcgagctgcagccggaa

SEQ ID NO: 132838 - DNA, 89 bp, Homo sapiens
  chr20:32891250-32891339
  hyper
gccggaggggatttcgatccctgaaaagaagcctcagaatttcacaaggcgtggccccaggagtctcactcaccggtccggaagggagc

SEQ ID NO: 132839 - DNA, 521 bp, Homo sapiens
  chr20:32899333-32899854
  hyper
ggggcggagagggggcggagggcgcacaagcctgccctttggccgcggggctttagcctgccctagcttcagcatccccgctcgcctcccggcggtcctgcgtctcactctggattaactggaggcttcgagatgggatagagaggggtgcaggcgctgagaaagcccgctgatggggatggagccggattaagcagttctgtggagttcctcccttcttgtccaccccgctaggggtctctcctttcccgctgtatccacgcccctccctccaggccccctgggcccacctcgaagtcaccgctgggctggggagtacagaggtgggggacttcttagagaccctgggacagggcccccctctctccctcaatccttctcatcccacgcggctccgctgtgagtcgggcgtcccaggagctgccggcccacccatccgcgggtttcttccgttgggggagccctccagactcgtagaatataagagagcgcccctccctagccgcgggccatctctaagc

SEQ ID NO: 132840 - DNA, 30 bp, Homo sapiens; identical to SEQ ID NO: 12931
  chr20:32900061-32900091
  hyper

SEQ ID NO: 132841 - DNA, 30 bp, Homo sapiens
  chr20:32950894-32950924
  hyper
ctgggagccgctcgcgcccatctcacctgg

SEQ ID NO: 132842 - DNA, 30 bp, Homo sapiens; identical to SEQ ID NO: 57149
  chr20:32951395-32951425
  hyper

SEQ ID NO: 132843 - DNA, 634 bp, Homo sapiens; identical to SEQ ID NO: 57150
  chr20:33103990-33104624
  hyper

SEQ ID NO: 132844 - DNA, 30 bp, Homo sapiens
  chr20:33265090-33265120
  hyper
tgcagaaggtggggcgaaaccttctacgat

SEQ ID NO: 132845 - DNA, 34 bp, Homo sapiens; identical to SEQ ID NO: 57151
  chr20:33292056-33292090
  hyper

SEQ ID NO: 132846 - DNA, 69 bp, Homo sapiens; identical to SEQ ID NO: 57152
  chr20:33297164-33297233
  hyper

SEQ ID NO: 132847 - DNA, 30 bp, Homo sapiens; identical to SEQ ID NO: 12934
  chr20:33345729-33345759
  hyper

SEQ ID NO: 132848 - DNA, 30 bp, Homo sapiens
  chr20:33413545-33413575
  hyper
cccacgtgaccagacgtccccgggagcgcg

SEQ ID NO: 132849 - DNA, 399 bp, Homo sapiens
  chr20:33460459-33460858
  hyper
gtctcccagaaaggcgtcctcgtccttgcggcccctcagcggggccgcgggcgccggctcgtcctcgggcagccgcgggaagctggtgatgctcatgtagtccactggcgagtaggcgcccagggcgctctcctggctggcctcgttctccgccgccatcctcgcccgcgccccccagcagcgcagcgcctgccggaagtggctgcggcgggggagtgggagggcggagggcggggcctgatcttcgcgacagccgggagggggcgcctctcccagccctcggccgtgtcccggtctgactcgcccccgtctgctcagcgctatcagcctgcagctggcacacaggtgcgtgtagatggacagccaggaaggcagcgcagggtcgaggggagagcgcgg

SEQ ID NO: 132850 - DNA, 590 bp, Homo sapiens; identical to SEQ ID NO: 57155
  chr20:33464342-33464932
  hyper

SEQ ID NO: 132851 - DNA, 30 bp, Homo sapiens
  chr20:33543664-33543694
  hyper
acccatacctttggcgctgagtcgaggcca

SEQ ID NO: 132852 - DNA, 30 bp, Homo sapiens
  chr20:33548769-33548799
  hyper
tggtggttgatggcacgagggccaactcta

SEQ ID NO: 132853 - DNA, 30 bp, Homo sapiens
  chr20:33680164-33680194
  hyper
ccagggttcgtacacgccatcagtgtccac

SEQ ID NO: 132854 - DNA, 132 bp, Homo sapiens
  chr20:33680633-33680765
  hyper
tttctacggggcggcggaggggtcgccgcagcgcccccagtgggccgtcggcggaggcgcaagccgcgtggcagggaccgtgtgcggcgtggaggctactgggaattgtagtcctgcgcggcagcggggtag

SEQ ID NO: 132855 - DNA, 30 bp, Homo sapiens; identical to SEQ ID NO: 57157
  chr20:33734736-33734766
  hyper

SEQ ID NO: 132856 - DNA, 30 bp, Homo sapiens
  chr20:33872539-33872569
  hyper
taacaagctccgcacgcggcgactgtacct

SEQ ID NO: 132857 - DNA, 30 bp, Homo sapiens
  chr20:33891685-33891715
  hyper
tcctggaggttcctcgaagccagctggcgg

SEQ ID NO: 132858 - DNA, 67 bp, Homo sapiens
  chr20:33999824-33999891
  hyper
cctccttttgccggcgaaagactggcaaggggggcgcaggcgcaaagaggtcgctacgcgcacgcgc

SEQ ID NO: 132859 - DNA, 30 bp, Homo sapiens
  chr20:34042855-34042885
  hyper
gggaggccctgcgccggctcagtctgccta

SEQ ID NO: 132860 - DNA, 30 bp, Homo sapiens
  chr20:34043088-34043118
  hyper
gtgctcgggttaaccgtccgaggcccggag

SEQ ID NO: 132861 - DNA, 301 bp, Homo sapiens
  chr20:34129686-34129987
  hyper
tcgttgggcggggccgcctgtaagagaacgcggctaaaggtggggccaagcgtgcggtttgctgcgcctgcgtgaggaaaaagaggggggcgtggctccaggccggaagagggagtctgtaggggcgggccggctggcgtcccctttccggccggtccccatggaggcgctggggaagctgaagcagttcgatgcctaccccaagactttggaggacttccgggtcaagacctgcgggggcgccaccggtaggccgcagcggggccggggtcgcgtggaggggggcgtcctagagcttagc

SEQ ID NO: 132862 - DNA, 6 bp, Homo sapiens
  chr20:34188625-34188631
  hyper
ggtgag

SEQ ID NO: 132863 - DNA, 341 bp, Homo sapiens; identical to SEQ ID NO: 12938
  chr20:34188747-34189088
  hyper

SEQ ID NO: 132864 - DNA, 325 bp, Homo sapiens; identical to SEQ ID NO: 12939
  chr20:34189166-34189491
  hyper

SEQ ID NO: 132865 - DNA, 451 bp, Homo sapiens
  chr20:34189679-34190130
  hyper
cggagtcggggccggagccgcggcgccgtgggccccggagggacttacctcctgccccaggaaagacacccgcacatagggctccaccaggacgcgctggtcgtgcagggcgcggaccaggctgcccagcagccccaggcgcagcgcgggaagcccctcggcgcggtacaggcgcacgcggagccgcgcccatggcctctcggcgggcaccccgcgcggcaggagcaggttcctaggggagggggcaccgagcggggggggagaaactgggatctcggcccctccccttatccgcgccccacggccacccccggatccatgtcctcctccccacctcaccccggctcacttctcgatgtccgaacagtgccctggggccgggggtagcattggagggggcaggtccccgcgcgccctcacggacaaggtgaccttaatgaaacccttggtc

SEQ ID NO: 132866 - DNA, 6 bp, Homo sapiens
  chr20:34190145-34190151
  hyper
cgggga

SEQ ID NO: 132867 - DNA, 30 bp, Homo sapiens; identical to SEQ ID NO: 12941
  chr20:34203950-34203980
  hyper

SEQ ID NO: 132868 - DNA, 30 bp, Homo sapiens
  chr20:34204978-34205008
  hyper
agcaatctgcggcccggtctcgaggggaaa

SEQ ID NO: 132869 - DNA, 496 bp, Homo sapiens
  chr20:34252601-34253097
  hyper
cgaaggccccgccccgggccaccaaggggcaccacgagccccgcacagccccacccgttcaggggctgcgggagtcttaccggggaaagctgcgcggcaccagaacccagaccccgaattaccccccgcgcgagtgcctccgccccgcggccgacagccccagcccgaacggcttcccggagcccaacgcagccaccacctccttcgccgcttcacaaaatggccgtcggcccgctcagcggctccgcgttccagaagggggaggaacggcgtggttgacgtcaaggggccgcgcaagcgcgctgacggtctcgggcgatctcccggaagttactgggttttgtgctaagagggggatattcagtccctgcttgcgactgttggcgcacaggaccgaccttgggctagtggccctggcgggtgggctgggtatgagtgtctagcttggcccttcactgcaagactgtgcaaattgcttcacgtcttccagtttccg

SEQ ID NO: 132870 - DNA, 30 bp, Homo sapiens
  chr20:34287838-34287868
  hyper
agtcaggttggaagcgtcagtgcttaagaa

SEQ ID NO: 132871 - DNA, 138 bp, Homo sapiens
  chr20:34329368-34329506
  hyper
ccaggtttggcttacgtaagtaaatccaaaacgcctcttacacgaaacacacgaaaatgaagacttcaatatccaatatttaaaactctgctgtcaactccaaaaacagaaactgggagacccgaacgagagcgcctc

SEQ ID NO: 132872 - DNA, 257 bp, Homo sapiens
  chr20:34330349-34330606
  hyper
cccattcagtgaggcgcctttcactccccctccgcgtaagcacccaaatctcgcgagacagagcgggtctctagggcaaagacagttggtaggctgcctgtcaatctttcagagagctcttcgctgagtggagctcagcggtcacctccccctcgtggcgcctcctcacggccatctgaagattcctccggcacagccgatcgcccccgctccggcctcccacacagatggctgtcaaggtcgccataaggcaacct

SEQ ID NO: 132873 - DNA, 30 bp, Homo sapiens
  chr20:34359683-34359713
  hyper
atagcgtccattccccggcttcggtgatct

SEQ ID NO: 132874 - DNA, 470 bp, Homo sapiens
  chr20:34359741-34360211
  hyper
tgttcctgctagggcgcgggcctgtttcccgcgcgtcagggtagtgggcgtggcctgcgcaggccgttgccacagtgatcgggcagacggggcagggggcggggcagctgggaccttacgtcactcggtggtggcgatgatgcgtgtgtgtggggggcggggcatacgctgggcgcgtcccgggggtcacgtggtgcagagcacgcagagtccttctgtcggttggtcctggagcggcgcagccggagtggggccgtgaggtgagctcgcggccaggcgaagccggccggccgggccgggttgggccgggcccgcgctgcgcgcgcgccgtgcgggcggggacggcgacggacgccaccgctgcttcggtcccctgcccggccccgctccccgcctggccccgctcgcccagcctggagggaggccctgggactgctgctgagagcgtggcgggcgtgcgagcggtgccc

SEQ ID NO: 132875 - DNA, 551 bp, Homo sapiens
  chr20:34652339-34652890
  hyper
gagcagctggggctccggagggtctgggtctctgtcacttcttgctgcgtcgccttctgtgagtccttcccagccccctaatcatgcccgcctgagcaagaggatgagaaaatgccgaccccgtagcggggactctgctgctgtgcggggcgcggttcgccgaacccactggccgcttctagagagtcggccccagggccaggacctccacttggcaggcgctggggcgcccaggggcagggccagcgcgggaaaggccgcgagtccttcgaccccctggcagtctgggagccggccgcggctgccatggcaacgcccggaagctgccgggaggggaggcaggcccagccgggacgaggccctgcctccagccaacgctccgcccagaacgaagccccgccccggaacgaagccccgcctccagcaactctctgcccggagagaggcccgacagctgcgacccgactggttctgtccgagcccgacgggccgcgctgacccagcgactgtgcctgactgaccacaggtgccgccaccgcctgataatacga

SEQ ID NO: 132876 - DNA, 238 bp, Homo sapiens
  chr20:34680126-34680364
  hyper
tgggcgcggggccgcggggttaccccggggcaccgggcacagagccgagaagtctaagctagggaaaatcgaggtcggcgctggcgggaacccgggaggacgtgggggccccgggtggggtctgctcctcttcttcgcccggcctctgagcccgccgcagctcaggttgacgccgggcccacgtggggaagccggcggcgggtccccagcgccgggagggttcgcggggctcagcccc

SEQ ID NO: 132877 - DNA, 988 bp, Homo sapiens; identical to SEQ ID NO: 57168
  chr20:34680572-34681560
  hyper

SEQ ID NO: 132878 - DNA, 30 bp, Homo sapiens; identical to SEQ ID NO: 12947
  chr20:34742314-34742344
  hyper

SEQ ID NO: 132879 - DNA, 211 bp, Homo sapiens
  chr20:34824291-34824502
  hyper
ggaacctgcaggcacgggccattcttcccgcgacccagggctctgccggaccgcttcccccgtcgctccagtcagacgccaaagctggagaacttccggtgcgtttccgctgtaccggaacgtggggcgaggcggtgagtgtggcctcctggcctctttttcctttcctgattccttgtgtatgtgtggctgggccgcccctcttctcggc

SEQ ID NO: 132880 - DNA, 30 bp, Homo sapiens
  chr20:35089506-35089536
  hyper
ctggtgggaactcccgcctcggtccacctc

SEQ ID NO: 132881 - DNA, 282 bp, Homo sapiens; identical to SEQ ID NO: 12948
  chr20:35201302-35201584
  hyper

SEQ ID NO: 132882 - DNA, 125 bp, Homo sapiens; identical to SEQ ID NO: 12949
  chr20:35201647-35201772
  hyper

SEQ ID NO: 132883 - DNA, 30 bp, Homo sapiens; identical to SEQ ID NO: 57173
  chr20:35202291-35202321
  hyper

SEQ ID NO: 132884 - DNA, 30 bp, Homo sapiens; identical to SEQ ID NO: 57174
  chr20:35233927-35233957
  hyper

SEQ ID NO: 132885 - DNA, 35 bp, Homo sapiens
  chr20:35234211-35234246
  hyper
aggttgtgaggaaccgcagcgcgccgcaggaccgg

SEQ ID NO: 132886 - DNA, 30 bp, Homo sapiens; identical to SEQ ID NO: 57175
  chr20:35235102-35235132
  hyper

SEQ ID NO: 132887 - DNA, 102 bp, Homo sapiens
  chr20:35374566-35374668
  hyper
ggacgccagggcggcgcatgagtgctgtgcccgtccacctcgggaactaccgagaagatggtggctgagccaggagaggccggcggcgccatctttgatgta

SEQ ID NO: 132888 - DNA, 82 bp, Homo sapiens
  chr20:35402108-35402190
  hyper
tcctggacgccttgcgcacccgcagccgatactccctgatcagggtgaagcggtctccaccttctacgtcacggtcaccgcc

SEQ ID NO: 132889 - DNA, 30 bp, Homo sapiens
  chr20:35402434-35402464
  hyper
atcgtgtccttttgcgcccgacggccccag

SEQ ID NO: 132890 - DNA, 472 bp, Homo sapiens
  chr20:35491258-35491730
  hyper
cgcgggctgggccggctgccccgtacggacccccgccgggcccccggccgcggactcggcgtcgctgctcagcgccagctccaggcccagcaggcgcgcctcctccgacgcgcagtccgacacctccgagctgctatccgtgaggctggggggcggcggtggcggtcgcggccccgcacccgagcgcggacggcccttggcacggaccccggtgcggaccccggccacccgcacacccgcaccgcgcgccccgggagccactgcgcgccccttcttgtccggccgtgaggagaacgcggcgctgcaggcgactgctgagcccgggcctgggccgcggcggcccttagccagcgaccagccggccacgtctttgggccgggccggcgacggcgcgcggtggctctttttcctctccggggcaggcgcgggtgcaggcgcgggctggggaccgcagccccggaccgggggctcg

SEQ ID NO: 132891 - DNA, 184 bp, Homo sapiens
  chr20:35492268-35492452
  hyper
gggtcaggctggcgcgggcagccgcggcccgggctccctcctcctccgctccgccgcctcctcccctgcccgctcggggaaggcacccggcggaggcgcccctgcgcccggcgtccgggcagggcctgcgagagcggcgggagccgggactcccgggccgaggccgggcggacctcagttcgca

SEQ ID NO: 132892 - DNA, 30 bp, Homo sapiens; identical to SEQ ID NO: 57178
  chr20:35492706-35492736
  hyper

SEQ ID NO: 132893 - DNA, 139 bp, Homo sapiens
  chr20:35579323-35579462
  hyper
tgttcaaggagctgcggttagcgcggaggggtcccgcgagcctggatgacagcaagccgcccaccaaggtctggggaaaaatctccttctaactaaaaaaaagggacccgagtctcgcttgtcccgcgccggggtggca

SEQ ID NO: 132894 - DNA, 30 bp, Homo sapiens
  chr20:35580044-35580074
  hyper
atggctacacctggcgtccggcacagcagt

SEQ ID NO: 132895 - DNA, 252 bp, Homo sapiens
  chr20:35724154-35724406
  hyper
gccccacctgctgccgctcacctctaggctgtagttgcctcggatggcagtaaagtcgtccagggcttcggccgcgctcccctcgtccaggttcagctcctggcacagggcctgtagcgcctccccggctgcggcgaccaccgccgccccctcagcgtggggcttgtcctcgaacatcccttcaggccccgcgggctgcgcgccacggcccccgacttctttctccctcccaggcgcgctacccacaaccac

SEQ ID NO: 132896 - DNA, 30 bp, Homo sapiens
  chr20:35808061-35808091
  hyper
tcattcatttcactcgcgcgggcttctggg

SEQ ID NO: 132897 - DNA, 30 bp, Homo sapiens; identical to SEQ ID NO: 57180
  chr20:35917909-35917939
  hyper

SEQ ID NO: 132898 - DNA, 30 bp, Homo sapiens; identical to SEQ ID NO: 12952
  chr20:35974254-35974284
  hyper

SEQ ID NO: 132899 - DNA, 383 bp, Homo sapiens
  chr20:36012923-36013306
  hyper
gcccctgggtgacttgggtgtccggggggtgggggggcggccgtacacactgtgaagcgtccgcgccgccgccgctggctttggggtggagcaagcgcaaaagacacggggtgtggttaatgggttctaattggacgcttaagcccaagaagaagaagggcggcgcgggaccgggcctgttgctgccttggcgcccagtcctttttcgttgcctgggtccgcccagagatgagtcgggacgcgcggcccacgtgcggcggaggggcagctgggtcgctcggggaacggggcaccggatggccccggttgggcccgcgccaggatgcgcccctgcgccctctgctggcgctctgcggtcaccgcagccccggagagggccgttt

SEQ ID NO: 132900 - DNA, 30 bp, Homo sapiens; identical to SEQ ID NO: 12953
  chr20:36034971-36035001
  hyper

SEQ ID NO: 132901 - DNA, 30 bp, Homo sapiens; identical to SEQ ID NO: 57184
  chr20:36040888-36040918
  hyper

SEQ ID NO: 132902 - DNA, 452 bp, Homo sapiens
  chr20:36156390-36156842
  hyper
ctcgccccatttcccgtaaatatcagccacagaccacctttgaggactttgtatgcacttttacaaaactctgggagccccgagatcttcaagcccgaataatttttatcaggcgcagtgtggacagccccgaagcgcggccgggtcccctcatgcatatgcagcagattgtgatccttactccgtgagcgctgggcgggccgggttgtgttcatgttggtgaacccgcttcgttcttgcccgcgtggatggtccgtggactccgggaaaaccttctcgtggctcaaagtccaccccctccctagcgtttcatcatgcagccaaggctcaggagctgaaaggtccgggctcagaacttgggactgccttgggtcaggcctcggctcccccacttgccccgtaccttgggccagcgagcccctcgcccaccccgacccggcttctgttgaaat

SEQ ID NO: 132903 - DNA, 31 bp, Homo sapiens; identical to SEQ ID NO: 12954
  chr20:36235666-36235697
  hyper

SEQ ID NO: 132904 - DNA, 30 bp, Homo sapiens; identical to SEQ ID NO: 12955
  chr20:36322247-36322277
  hyper

SEQ ID NO: 132905 - DNA, 30 bp, Homo sapiens
  chr20:36322570-36322600
  hyper
gggccgagcgaccgcgttctcacctgggca

SEQ ID NO: 132906 - DNA, 148 bp, Homo sapiens
  chr20:36529850-36529998
  hyper
cttgggacctgtcctcggtactgaagggagcgcgggggctgtggacggtgctagaacacagtgcttgtaagtgcgggacatcgtggaggaggtgtccttagtttggaaggagctggattgttgctggctaccacgggccccatccggt

SEQ ID NO: 132907 - DNA, 159 bp, Homo sapiens
  chr20:36530200-36530359
  hyper
ctgagggtctgtccacggtgtgaaccctagcatcaaagggccagttgagacgctgtccacggtgcccaaaggatgggcccgggtggggcggggggcggggggcggggggggggctggcgctgtcctcctccgtggtgctgaaaccgggaggaccaggct

SEQ ID NO: 132908 - DNA, 245 bp, Homo sapiens
  chr20:36531040-36531285
  hyper
gcgagccgaggtcggcggcagagctatcaccaggtcccctgggtctcagcccaggctcccaccctacctcgccctcacccccagccccactggcccctgaccccggccccgccctgccggtaaagttaggagcctctgagtgcgctggcctggcggcgggtgccctggcttttctccctctccccgctggacggcatttctgtggctgaagcccgttgggtcgtgctttgcgggaaccgcgtccc

SEQ ID NO: 132909 - DNA, 491 bp, Homo sapiens
  chr20:36531524-36532015
  hyper
tcccgcagtcggaggcggccggctgggcgtgcgctcgctccccgaagccggggctgggccggagccgggcgagggctgggagctgggccgggtccggggacagcgggcgaggggcagctgccggagccgggcagccaggccgctcagggcaggggacagctggcgccggttctgcggtctccggggcccagatgtgaggcggcggcgcccccggcccgagagcgcacgatgggggccccgctcgccgtagcgctgggcgccctccactacctggcacttttcctgcaactcggcggcgccacgcggcccgccggccacgcgccctgggacaaccacgtctccggccacggtgagttcggtcgccgcccccgcggacttccccaccaaaccccaacccgggccgcgccactccaacttggccgccccggggctcgaaccggcgccagtcgtggcgggcatcccggggcgccccctgccggcgcggtggaccc

SEQ ID NO: 132910 - DNA, 30 bp, Homo sapiens
  chr20:36661625-36661655
  hyper
gacagccagagagccgaacacatatggagg

SEQ ID NO: 132911 - DNA, 30 bp, Homo sapiens
  chr20:36661988-36662018
  hyper
tactctccttgcctcgctctgtctccttcg

SEQ ID NO: 132912 - DNA, 30 bp, Homo sapiens; identical to SEQ ID NO: 12957
  chr20:36662295-36662325
  hyper

SEQ ID NO: 132913 - DNA, 408 bp, Homo sapiens
  chr20:36774949-36775357
  hyper
ctattggataaaggaccggagagggtggtcacaggctctaggccacatagcgcattgagagtgttggtggcagggggcaggaccagggcagggatgtcctgattcctactccagtgctcttcgtgccccctcccagggctcatgacccacatcccagcgtgcagctcacctgtgcaggccacggcggcgaagacccagcactggccatacttgacgcgctggcagccgtggttcttccagcgccgcaggatgtccacgctgccgatccaggacatggggctgacgccgtccccgtagttgttgtcccagcgtcccagcagcacaccctggtcatcgttgcagttgacctgcaaccagtggggcagcacggggactgagcctgggatggggtgtcggctgtgccgcctg

SEQ ID NO: 132914 - DNA, 308 bp, Homo sapiens; identical to SEQ ID NO: 57189
  chr20:36781071-36781379
  hyper

SEQ ID NO: 132915 - DNA, 36 bp, Homo sapiens; identical to SEQ ID NO: 57190
  chr20:36793593-36793629
  hyper

SEQ ID NO: 132916 - DNA, 45 bp, Homo sapiens
  chr20:36793836-36793881
  hyper
cggccggacgagggcgccccctgggggagcggacagggacacaca

SEQ ID NO: 132917 - DNA, 285 bp, Homo sapiens; identical to SEQ ID NO: 57192
  chr20:36888951-36889236
  hyper

SEQ ID NO: 132918 - DNA, 30 bp, Homo sapiens
  chr20:37063714-37063744
  hyper
tccggcaaagaggacgagacactgcaccaa

SEQ ID NO: 132919 - DNA, 118 bp, Homo sapiens
  chr20:37063991-37064109
  hyper
ctacgctcgtttcgcgccggcggaaatacagacgagagcgcgagctgcggcctagagcggtaggaaccgacgcgagcagtcctgcagcgtcccctggcggagcggaggctcaacgcca

SEQ ID NO: 132920 - DNA, 116 bp, Homo sapiens
  chr20:37075185-37075301
  hyper
gcttggataaagggcgttagtggagggacagaattgcagctccgtcctcccagggggcgctgcaggcacgtctgcttgggcaggggcccggcggaagcgccgctctaggctgcagc

SEQ ID NO: 132921 - DNA, 127 bp, Homo sapiens
  chr20:37101358-37101485
  hyper
ccggctctgtgtctcgggaattatttgacgccaccggttcagccccgtagaaagctctgattaggcgcaccgcgcacgcgcagtggcccacttggctggggagttatttgacgccgccgcccctggc

SEQ ID NO: 132922 - DNA, 653 bp, Homo sapiens
  chr20:37274624-37275277
  hyper
gagggctctgcctctcgcccccagaagtcctatccccctgccaaaacttgatcctttctggccaggtcgcctctttcctggtcgcccaggtgcgaaaactgaacgacagtagcagcaggcgcccccagctctgcgacgcaggcctcaagacttggctgcggaggatgcacgcagacagggacaaggcgggggacggcctcgaggcggtgagtgcccccgaccccagacaggtggagaagggccgaggcgacaggagggcacctggggcgcggtgcttcccttcctccaggtccccgctaccgggctgccagcaacggcccagtgaggccaccagggggcgttgcggcgccgtcacggggagcgaggaggcgtggctgcgaaacgagggcttagaagcgggttggggaggggaaatggagtgactcggagacttcccctagaaaccgtcaccgccgccccatttttcggcagcccctggccgagggttgggaaaatgggagtcgctctgcggggtgtgaggtgattggggctgggtgggggatagtagaagggaagagccttccaaaaatactgagtattcctaggaggggtcctgaacacggttccttattaaagtcccgattagagaaattgatgagcgttgaggctgcacc

SEQ ID NO: 132923 - DNA, 1034 bp, Homo sapiens
  chr20:37302481-37303515
  hyper
aggcagagggaatcaggaaagcgatgggcttgtctgaggaacagaaaggacaacgaacgtgtgagtcacactaaggggcgccgtggtgcggcatgaggctggagcctgatcactcggggtcttactggccacggtgaggagtcagggtttcatgcgcccctgcagtcagaaagcatggcccaaccccagtgccctaagtccggaaacattcaaagctggacccagggtagcgggatccggggcctctggggacccgagagggacgttaagttcagggcttcagggtgcagccctggggtcggtacccccagcctccaacccagagctggcagcgctcgcccccttctccgcgcgggccctcagctcagctccctcttcgctccccgtgtccccgcgagcgggagggaggggatgctaggacgccctgtcggcgtcgtcgccgctttccgccattgtttagtcgtgatgctctcattttctctgaatcaacaattttctgctcggctccgcgccgaccggcgaacgcggggcttttcctcgcccgcctgatgacagcagagcggcgcggagcagctggtccggaaggaagcgccaggcgcctgcccggtcccaggcgtccgctgccgcccacccacaccagaccccgcccccgcgcgtcaagccccgcccatccataccaagtcccgcccccacaccctcacccacacaccaggccgtccccaccccgcccccagagccccggggcgccccgcccgctagccgcgcacgcgcagtgagcacggcgacccccggtggtcgggtgtctccgcaggccgaacacgctgctcgcccagctgcggatcattaccgcccttttgttctccgtcgcgcgctcgccccacgctaggaatgcaaactgtaggcgccgccagcccccccttcctgtttccctgggtgggagtgggaagggagttttaaactgaattgtgctcagactcccagcccagtcttcccggagccatccgttccttcatccaatgcggacacccatatct

SEQ ID NO: 132924 - DNA, 961 bp, Homo sapiens
  chr20:37351554-37352515
  hyper
ctacttgtgcgctgacgtgagctaatctagaaatactgcagagaaagagtggctggggttcccagggagaaagggcctcgagagaggggagatggggagctgcttccttttttgtttccttcggtttttccgtccgcccccgcccccacttccagtcacagccgctacttctccattcaggctgggactgccaggtggagccctgcggtttactgctcaggaggagcccggccaggacatcagctggggacttacgcagggacccattcagagcagcggaccctcacggagactactacaaagggactaacacaggcacgaacgcaggcaaccccattcgggaacacatacgtaatccaacacactagctctggcacacacactggaatgcgcgcaaaaccacacagacacagaacacacgcggttaccaaacctcattctcagaggccacactgatccaacctcaagcagagtctgatacagcatcggtctttgtctctgggtctctcccttactcgcgctcacacacccgtaccccaatcaacacaaacagcccaagctttcacagcctggaggcggccgtcggagcagggccccagcgcaccgcgagcctctgcttcctccgccttgcagcgccgcgagcccttctttcctccgcgcctggccccgtctgcgcccctctcggcgtgggcattcgcagacccgctaggaggctgacgagaggtgtcctcatagagtcctgccttcttccagacccccaaacgaaaagaaagagaaaagccaacctttcgcctccattctgcacgcatttggagagcggctggtggcgagcgatccgcacaatcgcttccctcgcggcgtccctggacgggcggagagaacccgggtgactgagcctgaggctgagcttccttgggagcgatccatgccagccacttctaccttcaagggggactcgcgg

SEQ ID NO: 132925 - DNA, 1112 bp, Homo sapiens; identical to SEQ ID NO: 57199
  chr20:37352606-37353718
  hyper

SEQ ID NO: 132926 - DNA, 463 bp, Homo sapiens; identical to SEQ ID NO: 12966
  chr20:37353806-37354269
  hyper

SEQ ID NO: 132927 - DNA, 282 bp, Homo sapiens
  chr20:37354549-37354831
  hyper
acctgtgcacagactcgcccctctcgcccgaaatcccggctgcaccgcaaagaggcggccagctcctccccgtgtgaccctggcgaagccctctccagaggctaagaatggcccctgctctctaggccctctccccttattcctaaccccccactccccaccaggcggcgcaggactcctacatagggagcaggtttggagtcttggcaacgacctccgagctagcaggggctggcaggccgcagctttctgggccgaaggagacttcagctctaggcaacc

SEQ ID NO: 132928 - DNA, 107 bp, Homo sapiens
  chr20:37354993-37355100
  hyper
cgctttccgctccggggcccggcgagacggccttgctggatcacggacccggggctgctcccgccttcgctgtgccccgcgacttcccggggcgtctttcaaggctc

SEQ ID NO: 132929 - DNA, 162 bp, Homo sapiens
  chr20:37355880-37356042
  hyper
tctccatctctggctcgacacccgggctcactattagttcccctacatccaccccgcagcctgctcttaacctctcctccccggcggctcagacccaattctcagtgtccttagcgcccccttcgggccacagcgttaagccacgccccccgggcccctcat

SEQ ID NO: 132930 - DNA, 266 bp, Homo sapiens; identical to SEQ ID NO: 12969
  chr20:37356168-37356434
  hyper

SEQ ID NO: 132931 - DNA, 27 bp, Homo sapiens
  chr20:37356800-37356827
  hyper
ccaaggaggtcatcacggataacctgc

SEQ ID NO: 132932 - DNA, 1085 bp, Homo sapiens; identical to SEQ ID NO: 57205
  chr20:37357215-37358300
  hyper

SEQ ID NO: 132933 - DNA, 30 bp, Homo sapiens
  chr20:37359743-37359773
  hyper
cttgtcctagggggcgaatcctgagggtgg

SEQ ID NO: 132934 - DNA, 30 bp, Homo sapiens
  chr20:37376898-37376928
  hyper
gaaacgtagaatttcgcagccagaatgggt

SEQ ID NO: 132935 - DNA, 644 bp, Homo sapiens
  chr20:37433708-37434352
  hyper
gcacatctcaaagggcgtcagacgtcagcagaggtacgaccacttccttcctccagcgcttcacctcccttctttccagaaagaggaaatgatgcgagtccacaccgcaggccacagcccccatgtctcggccccagcagctgggggacctggccccacagatctgtccccagcgcaaggccagggccggcccctggacctcctgggaagccttcagactcaggccgcgcaggccttcaagctaggaaccctgagttcctggccctggcattcattctgtgtgaccttgagcaggttaccactcctctctgggcttcaggattcccgtctgtcaaatgggagcagggataccgtccttggcttccctctttccatggtcggggtgggggttaggaaaactattttggaggagggggcagcgttaggaaaactattccgaagcctggccacgtcccaaccggtttcaacttcctgcagctcagaagaggggtccccacccgagagcgccgggaccctgtcccgcgctgcctcccaagccggatggggttgagcgcgcccaccccagtcccaggagctcaggccccgccttgggggaggagccgagaggcggcgcggaggctcgcggccgagcagagccagctctg

SEQ ID NO: 132936 - DNA, 233 bp, Homo sapiens; identical to SEQ ID NO: 12972
  chr20:37434488-37434721
  hyper

SEQ ID NO: 132937 - DNA, 157 bp, Homo sapiens; identical to SEQ ID NO: 12973
  chr20:37434736-37434893
  hyper

SEQ ID NO: 132938 - DNA, 439 bp, Homo sapiens; identical to SEQ ID NO: 12974
  chr20:37434930-37435369
  hyper

SEQ ID NO: 132939 - DNA, 429 bp, Homo sapiens; identical to SEQ ID NO: 57210
  chr20:37435487-37435916
  hyper

SEQ ID NO: 132940 - DNA, 30 bp, Homo sapiens
  chr20:37555030-37555060
  hyper
aaagcgggactgcacgccggtttttgtccg

SEQ ID NO: 132941 - DNA, 30 bp, Homo sapiens
  chr20:37555363-37555393
  hyper
gcacgactgctcttcgggcacctacttccc

SEQ ID NO: 132942 - DNA, 30 bp, Homo sapiens
  chr20:37555630-37555660
  hyper
gcctgctgggagtacgggccggggccacta

SEQ ID NO: 132943 - DNA, 30 bp, Homo sapiens; identical to SEQ ID NO: 57211
  chr20:37590540-37590570
  hyper

SEQ ID NO: 132944 - DNA, 30 bp, Homo sapiens
  chr20:37590952-37590982
  hyper
ctgggggcctagcgcgcgacggtggggtgg

SEQ ID NO: 132945 - DNA, 30 bp, Homo sapiens; identical to SEQ ID NO: 57212
  chr20:37591283-37591313
  hyper

SEQ ID NO: 132946 - DNA, 811 bp, Homo sapiens; identical to SEQ ID NO: 12976
  chr20:39316041-39316852
  hyper

SEQ ID NO: 132947 - DNA, 2220 bp, Homo sapiens; identical to SEQ ID NO: 57214
  chr20:39316983-39319203
  hyper

SEQ ID NO: 132948 - DNA, 120 bp, Homo sapiens
  chr20:39319514-39319634
  hyper
cgcgtgagccacaccggtgcagacgcgcctagattatttttaaatgttagaaggtaaaatatttgcctccaattaatctgaaaactctctattctcttgcgccctcggagaggctggggt

SEQ ID NO: 132949 - DNA, 146 bp, Homo sapiens
  chr20:39657942-39658088
  hyper
tctgtggccacccccgggtccccgtcctccccgggggcgcagggtgagccagaccccggccgcgcgcgctcgccgccggaggggttaaagtggctgttgtttgatattctctccttttctttttccagatcgaagcggatttccga

SEQ ID NO: 132950 - DNA, 476 bp, Homo sapiens
  chr20:39765948-39766424
  hyper
gaccgggaacggcgcgcgctcccgccgccatcgcgcctccgtccccgcctgcggcctgtctgggggtcgcggggcgcaggcgcggcgggccgacgggcgggggtcctccccacgggtgcgcgggcgcctttgttcccggcgccgaagcggggtggggcctcagggcagccccgccccgccgcgctgaggccccgccccgtgtccgcctgcaggagccgccgccgggtcccgctcgtctgccgcctcagcctcagccccaacctcagccgccgccgttgcgcttgctcccgggcggtcctggcctgtgccgccgccgcccccagcgtcggagccatggcgggcgccgcgtccccttgcgccaacggctgcgggcccggcgcgccctcggacgccgaggtgctgcacctctgccgcagcctcgaggtgggcaccgtcatgactttgttctactccaagaagtcgcagcgacccgagcg

SEQ ID NO: 132951 - DNA, 201 bp, Homo sapiens
  chr20:39945801-39946002
  hyper
accacccccttttgcgccttctacgatggtggcacgcggggctaccctgacccctaggacccctggacgcccgctcctggagcccggggggtgatgacagatggcggagggcggggctccggggggaaggggcggagcctctcagcatgggggtgctggcggctgacagaaagaccaggggcagccggcgggagggggctg

SEQ ID NO: 132952 - DNA, 202 bp, Homo sapiens
  chr20:39968593-39968795
  hyper
caggggccatagggcgtcggaaaggtctttggtccaggaaagccgcgagccacagatccaagaggaaaaagccgttcccggcccgggccttgcccaaggcacgagagtaaatgcaccttccgcgtgcctcggcgcacctgggctcacctgtcccctcccgcagtgcctgcagacagggagggagcgcggctgggccagaagg

SEQ ID NO: 132953 - DNA, 36 bp, Homo sapiens; identical to SEQ ID NO: 57217
  chr20:39969364-39969400
  hyper

SEQ ID NO: 132954 - DNA, 76 bp, Homo sapiens; identical to SEQ ID NO: 57218
  chr20:39994654-39994730
  hyper

SEQ ID NO: 132955 - DNA, 1051 bp, Homo sapiens
  chr20:39994762-39995813
  hyper
cggaccgcctttcctcctctccctccacctggtccgctcgcccggagtctgcacacagcgcagctggaaaatgttacttcgctggaaaggtttccgctggcactgccaggatcccaagccgccgcgccaggccccctcggttcctttttcctcgccagccccgcaacctcccggagcgtagggcgctcgcctgggcaggggctcggccccgggcgccgccccctctgtgcagcggcctcggggtgcccggggcctcgacgccccccgcgggtgcgggcaggtgggagcggcgacgcgcgcgggcccatccctccctcttcccgcccgccgcccgcccgcgcttacttgtgcggccccgggcgcagccgcgggcgccatcccgtcgtgtagagactgtagcgggaggcaccgggcggcgcaggccgcgccaggagcggggtgcccctggcctgcgcccccgagagcagcgccgcgacggcgcacagccagacgagcaggcggcggcggcccatagcggcccccgcgcctctgcccggccccgcgcggtgccccccgccgggtgtccgcctgcagcgccgcgccgcccccgccgctggtcggcccgggtcccgccccgagggtcccggggtccccttcggcccccgagctcgctggcccggccgcctggcgcttcgcggcggctgcgtcccgcggagtggccggcgctgctagcggctggggccgcggaggggaggcgggaggcgggctctttgcggattagcataaacttggggccgcgccgctcgccgccgccagcccctcgccccagctccgagcggacggccgaggagccgcctgcgaacaggaggttccaaagggagcagccccaggtggcaggggcgcaggccgccgcgccctgggaggccccccgagcacaccagccactctgtcgcctgcgggcacggggcgagacgcagagaagcggacccctgaggccagcctgggcgtggactttccaggagtcgtccaccctcaggatacgcttgtcttcagagtccgtgtgaacccggga

SEQ ID NO: 132956 - DNA, 205 bp, Homo sapiens
  chr20:40247055-40247260
  hyper
accctaacccatctcgggcccgccttccctgtcgcgccattgggcttcgccggtccaaaacacagacccattggtcatcccggctgccgctcagacagaagcccatttcaagcttgcttgcaggggcgagtgatgggctcgctccattgtgctcgtatttgcatggatgtgatcgcggccttgattggccggcgctgagaccgcc

SEQ ID NO: 132957 - DNA, 310 bp, Homo sapiens
  chr20:40321458-40321768
  hyper
gctcaggcaaaggccacgtctcggaacagttggctgcacaggtcacgtgacgcgcccctagcccggctctatttggctgcaagagcgctctgtcgcctgcctcggactctgtttcccagaagtcttcctggaaactacatttcgcagggggctttgcggcgcctacttcctcctggctgattagatgggactggtgccgttggccggacgtttttgggagcttcacaggctgatggggaagggcgaaacctgctcgattaaaacaacccgcatttcgaggcgaggaagcgagtcacggctcggcccctcc

SEQ ID NO: 132958 - DNA, 30 bp, Homo sapiens
  chr20:41816682-41816712
  hyper
atcctgtttctgccgcgggaacgtgagtgg

SEQ ID NO: 132959 - DNA, 919 bp, Homo sapiens
  chr20:41816996-41817915
  hyper
cccttcacagaagtcgcctattccgcttccattttagtaccaagcaaggaaggctctaaagcatttccaacggaatgtccttccagcggcccttaacctcagacgcagcttgtgcaaagacgctgtacctccccacaggttcgttcttttgctctttctttcttcctttccttctttcggtgaaataataaatgggcacagctgttgcttagcgatccgaaaccagcctgttcctgcgtcccacgggctgatctcagcctgtccccgcaatcccagccacctcaggccggcgtggttacaccaaaagcaatcggtgctaagaaactttaaggtgattttgaacttggaagtacacctgcagcactcccttctcttccctccgccgctactcttgggggggggggggctcgggggtggaagctgcctgcggtggggcttggtgatgtgtaagaccctggactgtggtgccctccagcacccgccaacgtgcctttaggagcacggcaggcaccacccccccgcccccgctccccctactctggggaactacctctgctcaccgccttcccgtggccaaacccaaatatgagttccccgaacttttcaggagcggacgcgctcacgggtcaaatccactcccctccaagggccttaacacgggcgcccagctacctcggagaaaagccagcgggtagggcggaggtattgctctcggtcatcaacgcaaacatcccctcgggtgcctacagcggcctgcttaggggagcagcgtgttcagagcaaatggagagcttcctgtatctccgaggaaaaaagaaaagccgccgccccggcagcctcggcctgctggggacctgtcctccccactaaaagcgcgcgctgcccgaggagctgcccgggagagaacgctccaccccgg

SEQ ID NO: 132960 - DNA, 741 bp, Homo sapiens; identical to SEQ ID NO: 12983
  chr20:41818007-41818748
  hyper

SEQ ID NO: 132961 - DNA, 383 bp, Homo sapiens
  chr20:41818804-41819187
  hyper
cgcacccacacgccgggcagggtcctcgcctcttcgccccgcgccgcgccgcgcagccaagcatcgtctgccctgtgggggcgcaggtacgggggcggtgcggggaggaggaagctgcagcagccgtttgaactcggggtggggaacaggtgaatgggggttcggtggcgagaagagggagggagggagcagccctcgcaactcaagataaggggccaggtgaattgcgaaagcgggtgggggcgtctgcccaaagctggggcaggcggctgctggccagggtctcgggcacaccctgagatgagaatttcatctaagagcgcgcgcgcgcacacacacacaacccactcacactcttctgggcgcatcgctgaccgcgccac

SEQ ID NO: 132962 - DNA, 229 bp, Homo sapiens
  chr20:42086251-42086480
  hyper
ccccgaagagatcgcgcacagttttataaaaggtacaaattagaaagcagttctgcggctggattagagacattgtgttttcaaagacggtggggagggctagagaaaaatcctagaagctagcaagaccgcactacaccgaaacgtcgcgggcaacggactcgccagtcaccatctagcccagggacgacgcgggacggacgtgccgctgcgcgctgacatcacgctc

SEQ ID NO: 132963 - DNA, 30 bp, Homo sapiens; identical to SEQ ID NO: 57226
  chr20:42086772-42086802
  hyper

SEQ ID NO: 132964 - DNA, 30 bp, Homo sapiens
  chr20:42087219-42087249
  hyper
ccagcccgggcaggcgcgagggccgggggt

SEQ ID NO: 132965 - DNA, 89 bp, Homo sapiens
  chr20:42136655-42136744
  hyper
gagggtggaggctgcgtgtttggagatacgcaatcaattaagagtttttttattaatggaaaggtgtggagggcggggttttggttttc

SEQ ID NO: 132966 - DNA, 160 bp, Homo sapiens
  chr20:42219372-42219532
  hyper
tattagtctttactcgtaattgatactaaagaacaaaattaaatgggtttatttttggtgaaaagttaattctccttatgtttggatttgcccctcatgcaccaaatggtacagccccacatcagtcaggctgcctacccctgacgcctgcgacggagag

SEQ ID NO: 132967 - DNA, 30 bp, Homo sapiens; identical to SEQ ID NO: 57228
  chr20:42220137-42220167
  hyper

SEQ ID NO: 132968 - DNA, 30 bp, Homo sapiens; identical to SEQ ID NO: 57229
  chr20:42286274-42286304
  hyper

SEQ ID NO: 132969 - DNA, 30 bp, Homo sapiens; identical to SEQ ID NO: 12987
  chr20:42286509-42286539
  hyper

SEQ ID NO: 132970 - DNA, 30 bp, Homo sapiens; identical to SEQ ID NO: 57231
  chr20:42295528-42295558
  hyper

SEQ ID NO: 132971 - DNA, 164 bp, Homo sapiens
  chr20:42296099-42296263
  hyper
ctctgaggcaggggcgcgcgtaaagctggggggctcttgggcgtccctcgcggctccccaggcctgttgggcctcggagctgggacgggcgggtctcttgggacccgggccaagccgtgcatgatgtcattttgtctcccgcctaattgcgggatgggggtggg

SEQ ID NO: 132972 - DNA, 1443 bp, Homo sapiens
  chr20:42543090-42544533
  hyper
ttccccccgcacccacgccgcggggcggggactagcgccgcctcaaatatttagggcaagggagtgtcccacttctggggaggggtgccgttcgggcttctctcctcaccgtgggtggcgaaaggcgggacggaaaagcgccgtctggacaggcgcgcccccctcagggatgcagggccgggcgggggacccggcggcggcccagcccggaggaaggacctccacgccccggcccgggcccccgggcccccggccctaggcagcgcccgaggccggaacaatagcgcgcgcgggcggggcgggggcgggggcggggcgctcctctgggcaccgcccccggcccgccccccgcgctcgcagtcccgctcgcacactggctcccacccgccgcccgcccaggcactgcccgcgggagccgccgccgccgccgccgcgcccgccatggacgtccgcctgtacccctcggcgcccgcggtgggcgcgcggcccggggccgagccggccggcctggcgcacctggactattaccacggcggcaaggtaggcgggggcgggcgggggtccccggcgggcggggccggagtcacctggcagctcgggactcaggcgctcccggggtcacacggggccgcgcacatcagccccgccgacgggcacgggcggctcacatcgatcccctcgcggccacgctcacgccctgagttgttgggatcgcgggcagaagtcatcccgacagccacccgtgcgacgacacagtggcccctcactcgcgtccccctgacagcctcgcagtcattcacaagccgtcacagtgacccacagccacacgcaggcggccaggcactgcttacacggtcccgccgtcccacgcaagtcaccctgacagtcacttatacacaacgacacgcaaccactcacccgcaaacagcctcaccgccacagacgagtcacccacagacgctccgatgccccacacaccgtgacatgcccccacccgctgtcacacccaggcacaacgggggacagtcacacaaagaagtcgcccgacagtcacactctcgcagccacaacgcctcacccaggcgcacgctgtcacacacagccacccccctggacggtgagcctcagacacagatcgtcctgacggccacacagtcacacgcggtcacacccagggacggccacacctcggtcatccacactcgcgcgtcgaggtttaacttctcagcgccgcagcacactaattgggcagtttactaattggccgtcactgcctggcggggcctcggattccgagtaggctgcggccaatcgaggcctgtgtcctcccgggagcggtgagccggcgtccctccaggctggggctgtagtgccggacaccctccctcctccatgtttccaggatctatccccccaccccagccaggtcccagctgcgctgcg

SEQ ID NO: 132973 - DNA, 309 bp, Homo sapiens
  chr20:42544727-42545036
  hyper
cgtcggtcccgggccggctggagccaagcgcgggttttcgtcactcggagcccggattgaacagcgcgcgtgggtttcccgcagccctggcgcagacgcgtgggctccgtggcgatgcggggtgagtgcgcgtccagtggctggatcggcgccccccagggtctctccccaacctcgcaggcttttcgtcaggcccctggtagtggggatgaggcaggagagaggcgtcccggcgcggatcccggggcctcccgggctgggcctccctgagtgcgccctcaggccccaggggagcggcttctggcaaag

SEQ ID NO: 132974 - DNA, 30 bp, Homo sapiens
  chr20:42587961-42587991
  hyper
tcccagtccaaaggccgacgttgagacagc

SEQ ID NO: 132975 - DNA, 57 bp, Homo sapiens
  chr20:42588192-42588249
  hyper
aagatcgaacgctgtcgttgacatatttcccttccgacaacacgagccttttgtggc

SEQ ID NO: 132976 - DNA, 30 bp, Homo sapiens
  chr20:42838835-42838865
  hyper
ccaggggcactgcccgcccggggtctccag

SEQ ID NO: 132977 - DNA, 396 bp, Homo sapiens
  chr20:42839350-42839746
  hyper
acgctccggtgatgcggggcagtcagttcagagcgtctctcccaaatctcggcacccgactgacccggatccaaaccagccaagggggcggcccgcgcctcgggagtcgcgttgcgcctgcgcactccggcatgcacccctccccctgcttatgctcctcccaccccagtgactcggcagcgcggcagccgacgactgcgcagacgcagggcggcggccgcgcctctccaacgccccgcacccgcccccctcagaagcacgtgcgccttacgtaatttcctgttattcttcggtttgcctcctcccagtggcgtggatttgctcccgacccgcttttggggcgtgcctgcttcctcctctctgttaggtgagtgagtaggcgtcattcttcacagt

SEQ ID NO: 132978 - DNA, 675 bp, Homo sapiens
  chr20:42876029-42876704
  hyper
cgctggagagcgatgcggccaagccagcggaggcccccgacgctcccgaggcggccagccccgcccattggcccagggagagcctggttctgtaccactggacccagtccttcagctcgcagaaggtagagccgggccgggagccgcctgcgccggtggccaggaagcttggggaggggagccccagggcttgagggatctgagggcggcgaaagactggaggggggaacctggggtttgggggtcccggaggtcgggggacgcaagggttccttccaggactgctcacctgggaagcgacaggccctgtctgggccccaggagcacagttctcaattttaggagcatccattctgcctctttccctcccagaaacagccggtctgttggggtgcggggcgggttgggggggctgagaaaagagacaaaggcgaggggaagggaatgggcactgctgggaaggcggcttggtggggtgggaggtgctgctgctgcggggagggagaagaagcgctacttggggtccagcctcggtagccccctctcagtcgctccctgcacgctgccgtcccggacactgcaggcccccaggtcacagctcctctgcccctctgtctgcgggccgccttctggctagggcttggagggtctgtccccagtcgtcgcccacccccc

SEQ ID NO: 132979 - DNA, 30 bp, Homo sapiens
  chr20:42940027-42940057
  hyper
tccccgagcctccgcgtcttgctctggtct

SEQ ID NO: 132980 - DNA, 30 bp, Homo sapiens
  chr20:42955457-42955487
  hyper
ccagctgcgcgggccggcgacacagcaaat

SEQ ID NO: 132981 - DNA, 30 bp, Homo sapiens; identical to SEQ ID NO: 12992
  chr20:43016304-43016334
  hyper

SEQ ID NO: 132982 - DNA, 365 bp, Homo sapiens; identical to SEQ ID NO: 57239
  chr20:43017165-43017530
  hyper

SEQ ID NO: 132983 - DNA, 141 bp, Homo sapiens
  chr20:43104448-43104589
  hyper
acgccgcggggaggcgtcgcacatgcgcgctcctaggcggagccccgcctcccacgccctggatcgtcacttccggcgcgagaggccgggcaggccgggcagggagtgcgggtcggttctgcgtgcgctgccggacgaggc

SEQ ID NO: 132984 - DNA, 30 bp, Homo sapiens
  chr20:43150396-43150426
  hyper
gtatcgcggatttgcgtctggggccccgga

SEQ ID NO: 132985 - DNA, 30 bp, Homo sapiens
  chr20:43150626-43150656
  hyper
gctgctttctaacacggtggtaactgccag

SEQ ID NO: 132986 - DNA, 81 bp, Homo sapiens
  chr20:43150902-43150983
  hyper
agagaggcacagtacgctcagaatttattctctagttaataggagatctgacaacataaatgcaccgtgccccaatgtaat

SEQ ID NO: 132987 - DNA, 293 bp, Homo sapiens
  chr20:43271168-43271461
  hyper
gaatcaggaagcaggcggggagttggccagagtgcagagtgaggttagtggtgagaaatgaggccagggcaaagtggagagggggcagggagattgcagaggccgaagcaaagggttttccacccaagtgtgttaaatcggagagtcccctttaaaaaaacctttcccggctgctgtgtggaggacaggatggcaggaagccagaacagaagaccagctactgcgggagggaagatctgattgggatttgaataacatgcgggaagtactcaaggcagcgtcagagacagtgg

SEQ ID NO: 132988 - DNA, 30 bp, Homo sapiens
  chr20:43280120-43280150
  hyper
tcccagggtttggacgccccgggctgggcc

SEQ ID NO: 132989 - DNA, 49 bp, Homo sapiens
  chr20:43280692-43280741
  hyper
ggcgtgccttccaccggatagacggacgctcgtcgcagaaacacacacc

SEQ ID NO: 132990 - DNA, 73 bp, Homo sapiens
  chr20:43374343-43374416
  hyper
gaaccccgggcaggcgagtgggaggcggacaggggagcggttcttccggcccccacccgtggcgatcccagcc

SEQ ID NO: 132991 - DNA, 30 bp, Homo sapiens
  chr20:43374617-43374647
  hyper
gctgctgtcttcgacgcgctcgagtccgag

SEQ ID NO: 132992 - DNA, 884 bp, Homo sapiens
  chr20:43438334-43439218
  hyper
cgccgggcaggggtcttgggcagggatcctctggatgtggccaagacaaagatggagaggtaaggtctgcgcgccacctccaatggcggggggcgcgtcggagccccaggggtgggacggccaaagcccagggcttgaagagtgggcacattcaggagactcagggagggtggcaggtcggctccagggacgaggcaaggggcctccaataggcgcgggtgaggagggagatgggtcctggcgacccaaagggcccacctgcgggaaaggtgaatgcagacaatctcggggtccctgggggagaaggccagaaggtagcgcatcctggagaccctggggtcccgtgggtgcggaaggagaccctgggggcgccttcccaggggattgggggtggggaggagggcgcacgggtcggggagggggctaccggacctggatcccgggacaccccgggggtctggggggcgggccgcgcgcttacctgcgtcctcgtcgtcgaaggagttcatgcacgggaagtagatggcgagcgcctcgaaggaggcggacagactgaggcggctctgcgagcgctccatgcccgcgccggcgccgggcgcctcggccgcggcggcggcggcggcggcgggcggcttgggcagcttggccgccccattcttgacgcggagtacggcgcgcggcgtggtggcggcggcccggggccgggccgaggctccgctgcggggctggcgggcgcggcggggccggcgggcgggccaggagctggcggcgcgcggagcccgaggcgcgctgtgctgctggcggcggcggcggcggcggcggtggcggcggcggtggcggcgcagcgcgctctggtccgcggcgccccccgccggcagcgcgag

SEQ ID NO: 132993 - DNA, 312 bp, Homo sapiens
  chr20:43439247-43439559
  hyper
cgtgccgccgggggagggggcgccgctgcggggcgtgggagcccggagggcgcgggctgcggcctcttctagcagcccccgggcccggcaggtgcgcgcggggaggcaggcgccgggcgaggttgtctgggccctggtccgagggctgttcccgaccccgcctcggcccccaccctcagccggccgacttgcggagaggccggcgtccagtccctcacccagacaggcctctcccagagacactggcgcgctcggaggggatgcgctcaaagggtcccgcccaggcgggtcggcactcggcctcccacacag

SEQ ID NO: 132994 - DNA, 30 bp, Homo sapiens
  chr20:43513906-43513936
  hyper
ctgacatcggcctccgacccagtgaggatt

SEQ ID NO: 132995 - DNA, 47 bp, Homo sapiens
  chr20:43514295-43514342
  hyper
ggtttggggcggggcgcggccaggaccggagcggaagtggcgatcgg

SEQ ID NO: 132996 - DNA, 30 bp, Homo sapiens
  chr20:43514851-43514881
  hyper
gcgacccctccctgcgtcttggtcggcaag

SEQ ID NO: 132997 - DNA, 120 bp, Homo sapiens
  chr20:43538512-43538632
  hyper
ttgaaggctttttccgcctcccagggcggggtcagaggtgtccccacctgtagcttttagatccccaagtgctcgcaggtggggggtgggcccaggagggatcccgggggaggggcgtcc

SEQ ID NO: 132998 - DNA, 132 bp, Homo sapiens
  chr20:43589112-43589244
  hyper
ctggaggcccggagcgtcccgccctctgcgcgtgctcggtttggaacttaggctcccttgcacgcggggcggcagcatgctctgggctccctgagttgctagaacgccgtggatgacgcagggaaggaggct

SEQ ID NO: 132999 - DNA, 82 bp, Homo sapiens
  chr20:43594828-43594910
  hyper
tcttctaaaggaggcgcttcacgcatctcagtctgtgaaatgggacccaggacccaggtagaggtgcgttctcggcctgggg

SEQ ID NO: 133000 - DNA, 30 bp, Homo sapiens
  chr20:43726309-43726339
  hyper
gtggctcccagcgagcgcagcccggtggaa

SEQ ID NO: 133001 - DNA, 53 bp, Homo sapiens
  chr20:43726576-43726629
  hyper
cagaagtactcgaggcgtcgcagcaccgggtcgtcgcgcacgccttccgggct

SEQ ID NO: 133002 - DNA, 330 bp, Homo sapiens; identical to SEQ ID NO: 57248
  chr20:43726764-43727094
  hyper

SEQ ID NO: 133003 - DNA, 64 bp, Homo sapiens; identical to SEQ ID NO: 12997
  chr20:43729512-43729576
  hyper

SEQ ID NO: 133004 - DNA, 30 bp, Homo sapiens
  chr20:43767690-43767720
  hyper
tccaggaagagataacgtgaaaccatttgt

SEQ ID NO: 133005 - DNA, 519 bp, Homo sapiens
  chr20:43922021-43922540
  hyper
cgccacagcacgctccgtctggcttcccctcccccaggcggcgcagcaagacccaaaaacggaccccgtggaaatcagttttttttatttttttaagaacacaaacaagaaatccaacaaagaactgagcgcagcacgcggcgagggcgtgccggtctagcacgtgccccttccctcaccacccgctatccccctgacgccgcagtccgcctaatggtccgggcgaggccaactcagctcaatgccggaagcccgccagcgcctccgccccgacagcccaagccggacgggcccaggttctgcctggccccggcgcaccgatggcgcgcaaggggcaccgtccgtggtgccgcgccccagcccgggtctgggccgtccgtggccctcacttctggttggccagctggttctccagatcctccaggcgcgccgtcagctgggccagtgagcggttaaggaggccgttggggttcgccgaggtcccttcactttccctccagcccgcgccaccagccccaa

SEQ ID NO: 133006 - DNA, 227 bp, Homo sapiens; identical to SEQ ID NO: 57251
  chr20:43976985-43977212
  hyper

SEQ ID NO: 133007 - DNA, 197 bp, Homo sapiens
  chr20:43991506-43991703
  hyper
acagtttatcacctcgttaattcccaaacatcattaccgcgtcctaagccaccccacttgcctctcccctagccgccttcctttaaaaaaagaattcccctctagagggcgcgcaagctctgcggccttcgttcctctcttccgtttgccttcactcttccttctgcgcatgtgctcagttcgctatccggctgctt

SEQ ID NO: 133008 - DNA, 30 bp, Homo sapiens
  chr20:43991907-43991937
  hyper
gtgaggccgggccacgctcagacacttcga

SEQ ID NO: 133009 - DNA, 30 bp, Homo sapiens; identical to SEQ ID NO: 57253
  chr20:44002507-44002537
  hyper

SEQ ID NO: 133010 - DNA, 288 bp, Homo sapiens; identical to SEQ ID NO: 57254
  chr20:44034865-44035153
  hyper

SEQ ID NO: 133011 - DNA, 319 bp, Homo sapiens
  chr20:44044571-44044890
  hyper
tcaagctggttactcgccctgcctactccctctcgtgtcctcccagtacccccttagacccaccagctctgagggaatcttcgcgacctgcgcaggcggtcgctctgataaccgcatcccggtttccgggacgacagcggaagtcacttctcacacgcctttcttattggataccggcttttcatggggccgagcgccgctgggtaggcggaagtagccgcaggcatggcggcggctatgccgcttgctctgctcgtcctgttgctcctggggcccggcggctggtgccttgcagaacccccacgcgacagcctgcggg

SEQ ID NO: 133012 - DNA, 1375 bp, Homo sapiens
  chr20:44098344-44099719
  hyper
gccccctcccgcgcgcgcggttaaatccccgcacctgagcatcggctcacacctgcaccccgcccgggcatagcaccatgcctgcttgtcgcctaggcccgctagccgccgccctcctcctcagcctgctgctgttcggcttcaccctagtctcaggtgagtggggcggggagaggcccggcgcctagaggggccgagccacgagcgccaggatggagccaggcggaggcgtagcctctggaggctggggaagtgggaattccgggggcggaagtggcggggacccttggagcctagggtgtggggtccaatgtgctggaggtggagagaccactgatggctgcaatttgggaggattctgtgctgaacgcggacactccgtggctgcagtgggctgggggtgggggctgctctgcctcgacctcggaagctccgagacgctcagctgtgcggcgtcccctagggctgagatctgagggccccgacgccaagggttagggagctctcgtactcccaggggtcagggactcctggtctggaagaaggagtctctgggggctgtaaggggactcctagggccagagactgagaattccttggggttaaggtttggagcaggaggtgggcatcctctggggctggcgctacgccccaccctcgactgtcccgggcctcccctcccaggcacaggagcagagaagactggcgtgtgccccgagctccaggctgaccagaactgcacgcaagagtgcgtctcggacagcgaatgcgccgacaacctcaagtgctgcagcgcgggctgtgccaccttctgctctctgcccaatggtaaccccacggcggccgagcgggaacggggcggggccgcgctgggctgggaggaggtgggagggcccgggttccgggaacaggggcgcccccggacccggggacccccgggaaagtcaaggcggttgaaaccagatccgtcagtcctctccctcgcacggcccaggggtagacaaaggcgtcgttgaaacgcagccaagggggggtccccacccctagctgggattcgagtctctggtgcatgacgggcttccgggcacgcacagccgggacattgttccccgcggcctggggacccggggccgcagtttccttctcgaaccggccgaagcctgccctgcgggaaagcccggagcctggggcgctcacctctcctcttggagtccctccctgggggcctcccccagccctggggaaagactgggagagcctggcctggcaagattttccccaattcctctgtccaggcggaaaggaactttacagatttaggaaaatgccccgctcatcttaaagatgtgtaagggagcatcggtgagaaaaaaat

SEQ ID NO: 133013 - DNA, 30 bp, Homo sapiens; identical to SEQ ID NO: 57256
  chr20:44258369-44258399
  hyper

SEQ ID NO: 133014 - DNA, 30 bp, Homo sapiens
  chr20:44420442-44420472
  hyper
agaggaagccccaacgacctccacctacaa

SEQ ID NO: 133015 - DNA, 30 bp, Homo sapiens
  chr20:44420714-44420744
  hyper
ggatgcgggcgcagcggggcagctggttct

SEQ ID NO: 133016 - DNA, 88 bp, Homo sapiens
  chr20:44441533-44441621
  hyper
gagcgggagatctgcgggtgcaggagaacacaccaggagctcggggcctggcattcccctgggcatgggtgtcgagggcggagacttc

SEQ ID NO: 133017 - DNA, 472 bp, Homo sapiens; identical to SEQ ID NO: 57257
  chr20:44452665-44453137
  hyper

SEQ ID NO: 133018 - DNA, 160 bp, Homo sapiens
  chr20:44462157-44462317
  hyper
ccttcgttttctctcgggagacatggcctccctactattgcataattactttgtgaagttaaagagcgttgggtggaaatgagtgggacagattggagatgacgtgggtggggtgggaggattcaaggagggtacgcgcctggccggactgggatgactc

SEQ ID NO: 133019 - DNA, 74 bp, Homo sapiens; identical to SEQ ID NO: 57259
  chr20:44462766-44462840
  hyper

SEQ ID NO: 133020 - DNA, 30 bp, Homo sapiens; identical to SEQ ID NO: 57260
  chr20:44485934-44485964
  hyper

SEQ ID NO: 133021 - DNA, 30 bp, Homo sapiens; identical to SEQ ID NO: 57261
  chr20:44486182-44486212
  hyper

SEQ ID NO: 133022 - DNA, 309 bp, Homo sapiens
  chr20:44509707-44510016
  hyper
taaccctggcaacacggcccgcccgcgaatcgtcacgctacgattggtccgtggtgctaaagcctgaaagcgaattcctcagacattggtccgagtcactgcgatgctgacgctgtggttggtgagtttggatgtcagtcagagtcggaggcagggtcaaatagggagaaatggcgacggagcctggctgtgggtgagtgcttcctgaaggggtgaaagtgtgagacagcggatcaccgcagttagccgtcacacagctcccaaagggatgggagggaggttttcttctcatccggctccagctggact

SEQ ID NO: 133023 - DNA, 399 bp, Homo sapiens
  chr20:44518896-44519295
  hyper
tcgagctggacaaggcgcacgctctttgtggaagcaaacacgtccaccaccgcgtagaggggctgcgcagctggcagtccccgggcgctcgggcccatgtcctcgccgttgatgatgatgtgcatgtcggccgtgccatcggggcgcgggcaaaagaggacacccaggcggctacggcgcgcggtcggaggcagcacgttcagctcatagagctggtccaagagatggctgtagagccctggccggctgcggcccaccaggcggtcccggggaatgcgaaactgctcaatgcgcagatatggttccacgaggagggttggaggtcggctgggggccgctgcctccgcctccgggcggccctcccggggcacgcggttgtggtggcgcgtgatggcgaag

SEQ ID NO: 133024 - DNA, 30 bp, Homo sapiens
  chr20:44519936-44519966
  hyper
ggcgccggagttcacgtgactcgtacacat

SEQ ID NO: 133025 - DNA, 172 bp, Homo sapiens; identical to SEQ ID NO: 57263
  chr20:44540033-44540205
  hyper

SEQ ID NO: 133026 - DNA, 398 bp, Homo sapiens; identical to SEQ ID NO: 57264
  chr20:44540444-44540842
  hyper

SEQ ID NO: 133027 - DNA, 30 bp, Homo sapiens
  chr20:44562827-44562857
  hyper
acatttggacaccacgcagcacaaaggccc

SEQ ID NO: 133028 - DNA, 30 bp, Homo sapiens
  chr20:44563204-44563234
  hyper
gaaggggagggggccgaaagcaagctgggt

SEQ ID NO: 133029 - DNA, 31 bp, Homo sapiens; identical to SEQ ID NO: 57265
  chr20:44591913-44591944
  hyper

SEQ ID NO: 133030 - DNA, 30 bp, Homo sapiens; identical to SEQ ID NO: 13005
  chr20:44600336-44600366
  hyper

SEQ ID NO: 133031 - DNA, 150 bp, Homo sapiens; identical to SEQ ID NO: 57267
  chr20:44600902-44601052
  hyper

SEQ ID NO: 133032 - DNA, 145 bp, Homo sapiens; identical to SEQ ID NO: 13006
  chr20:44639092-44639237
  hyper

SEQ ID NO: 133033 - DNA, 478 bp, Homo sapiens
  chr20:44639267-44639745
  hyper
cgggtgagaacgtgaggagggaaaatccaagagacctgggcggggtcagggaagggaggaccacggagagcgtggaggcagcagtggccccggcttcctcttgcctgcccgcgctgccctggcttatacggcccctcctgccagacagtgcacagggccagggcgccaggctgggagagcttcgcgcaggcgggatttcagcccgcacttatttcggagcccttgccttgggcagcgcacaatctgcgcagcagtactcggctaaccctcttcctctcgacctgtttcttcagagcacggagacgggtatcccttcgacgggaaggacgggctcctggcacacgcctttcctcctggccccggcattcagggagacgcccatttcgacgatgacgagttgtggtccctgggcaagggcgtcggtgagattctgagtcctcctggcccctgattcccttcattctctcccactcatcac

SEQ ID NO: 133034 - DNA, 15 bp, Homo sapiens
  chr20:44639846-44639861
  hyper
cgctcctactctgcc

SEQ ID NO: 133035 - DNA, 30 bp, Homo sapiens
  chr20:44640315-44640345
  hyper
cggctaccgctggtgcgccaccaccgccaa

SEQ ID NO: 133036 - DNA, 170 bp, Homo sapiens; identical to SEQ ID NO: 57270
  chr20:44642198-44642368
  hyper

SEQ ID NO: 133037 - DNA, 707 bp, Homo sapiens
  chr20:44642404-44643111
  hyper
cggctctccaagaagcttttcttcttctctggttagttacctactttccctcccccgcccggtcaatccccatcagtcaaggaggctcaagagaccatcgataacccacgaaacgtcttgtgcgttttagaaaaatacgccccctggcggacgcagtttagcaaacgtaggggcggctgagtttctgccccctcctctccacgccctcgcgtcgctctacccagcgcctctgcccctgggttgcagggactgcgggcacgcgggctaggaaaggcctcgccggaatctccctcctcgcgttctaggagtacgtgctccctctgcgcccccaaaccgacgtgaccctcctcccctgcagggcgccaggtgtgggtgtacacaggcgcgtcggtgctgggcccgaggcgtctggacaagctgggcctgggagccgacgtggcccaggtgaccggggccctccggagtggcagggggaagatgctgctgttcagcgggcggcgcctctggaggtgagcgccgccgcggccgccggcagggggagcccgggcgccgtcggtccgtccgctagccggctcagcacctgtctcctccgcgcctgcccgcaggttcgacgtgaaggcgcagatggtggatccccggagcgccagcgaggtggaccggatgttccccggggtgcctttggacacgcacgacgtcttccagtaccg

SEQ ID NO: 133038 - DNA, 233 bp, Homo sapiens; identical to SEQ ID NO: 57272
  chr20:44650231-44650464
  hyper

SEQ ID NO: 133039 - DNA, 190 bp, Homo sapiens
  chr20:44650687-44650877
  hyper
gccggggccgcggaacgcaaagtgtggagggggaggggccaaacgcgaggtgggcgtggccacgagggaaaggggtggggccagggaaggggtttggacggaggcgaagggggcgggtctggtgatggaaaggccggggtcaaggtggagagtaggccgtagggcactaaaggggcggggacatctcgag

SEQ ID NO: 133040 - DNA, 170 bp, Homo sapiens
  chr20:44651083-44651253
  hyper
ctgagtcagggttgccgaggcaggtgccaggtcagcgggtcctcggtgcctggcggatcctccaatcctctagctccctggaggcttagcggacagcgactggggatcccgggaaggagacgggaggcagggaagttagtatggatcctgggcagcgagattcagggagg

SEQ ID NO: 133041 - DNA, 30 bp, Homo sapiens
  chr20:44651543-44651573
  hyper
aggaacaaggcgaatcggcttgtagtggcc

SEQ ID NO: 133042 - DNA, 146 bp, Homo sapiens; identical to SEQ ID NO: 57273
  chr20:44657693-44657839
  hyper

SEQ ID NO: 133043 - DNA, 357 bp, Homo sapiens; identical to SEQ ID NO: 57274
  chr20:44657944-44658301
  hyper

SEQ ID NO: 133044 - DNA, 12 bp, Homo sapiens
  chr20:44658361-44658373
  hyper
cgggaggagggc

SEQ ID NO: 133045 - DNA, 245 bp, Homo sapiens
  chr20:44658972-44659217
  hyper
gtgggtgcggagactcgcaaggagccgaggggcttgggacaagtcctttcgctgctcccgctctcccccgccctcctccgcggcttccttgctccgaggtcttggggccagccaccccctcaggctcccaggccccccgccgcccccgagcggtctcagccatccatcacggctgtcagccacccccaccccccactctccagcggcgctgcgtcccctgcgcactagcgcgcctcccgcgcctg

SEQ ID NO: 133046 - DNA, 607 bp, Homo sapiens; identical to SEQ ID NO: 57276
  chr20:44660334-44660941
  hyper

SEQ ID NO: 133047 - DNA, 192 bp, Homo sapiens; identical to SEQ ID NO: 13011
  chr20:44669699-44669891
  hyper

SEQ ID NO: 133048 - DNA, 30 bp, Homo sapiens
  chr20:44670169-44670199
  hyper
ctcatcaaaggtctgcggagggacaagggc

SEQ ID NO: 133049 - DNA, 20 bp, Homo sapiens
  chr20:44686016-44686036
  hyper
gagctgagctgttcctgcct

SEQ ID NO: 133050 - DNA, 192 bp, Homo sapiens; identical to SEQ ID NO: 57279
  chr20:44686422-44686614
  hyper

SEQ ID NO: 133051 - DNA, 238 bp, Homo sapiens
  chr20:44686627-44686865
  hyper
cgctctgcgctcctccggcgctgctccctggctcccggcggcccggaggcccgcggggtgggaaggccgcgcttgccgtctccgccgccccttctcgccgagccgtggggcgcgggcggccgagcctatacatagtgtacaggagacatcgcgtgtatttttaacgtccccatatttatgtgactagaagcgcaacagacttctcgccatagtcgagctctcccgctgggggcactgc

SEQ ID NO: 133052 - DNA, 320 bp, Homo sapiens
  chr20:44718495-44718815
  hyper
aggcccgccgctgccgcctccgcgtcggcccacctgcccgccgtaggacaaaggcgccaccaaccgaccggcgcgggcacgaggcaatggcggccgggcggagagtggagatgggggcagagggcgcgcacgtagcggcaggcgcggcactgtcgcaagaccgcgcgtgtttacggcagggctgagttggggcgtcgatctccttggcaatgagggcccgggaagtggctctcgggcgggagttgagaacgcagggagttgcctagcaacagcgtcctaggctgaggatgggccccacggtggtcgcctcagcccccgcc

SEQ ID NO: 133053 - DNA, 92 bp, Homo sapiens; identical to SEQ ID NO: 57282
  chr20:44746473-44746565
  hyper

SEQ ID NO: 133054 - DNA, 150 bp, Homo sapiens
  chr20:44802975-44803125
  hyper
aggaggaggaatggaagagtccgctcctagcaagtcccccctccgtccagccgccaagggagggttgggggagggcaggaaagggggtccgcgggggaaacgcgttgtcctggggccccggcgtgtgctgggcgggtgagcagccgcgcc

SEQ ID NO: 133055 - DNA, 460 bp, Homo sapiens
  chr20:44803172-44803632
  hyper
cggtggccggcgtagagcgcggccaggggccggaagcgcggaccccagctgctgagataggcgaagtcctgctcggagcccgacgagccgctgtgcagggagctgagcgaggcggccggcgagtccgcgccctcgaaggcgtaggtctggaaggcgtcgtagggcggcaccgacaggtccccgtccgccagtgccaccttgcggctgatgaagtccctgaacactgagaagtctggctcggggctcggcggcccctgcggcagcgagtggcgctcggagggcaggtgggcctgcggggggctgcccgcgcccccgcccgagcccccgcccgctcccccgcccgcgctgccgcccccgtcgccgcccttgagctcgccgaagtcgtagaggctccgcagcgccgacatgtcgtaggcttcggtgtcctgctcgccgccgccttcgtcgttgtatttgatga

SEQ ID NO: 133056 - DNA, 112 bp, Homo sapiens; identical to SEQ ID NO: 13014
  chr20:44879678-44879790
  hyper

SEQ ID NO: 133057 - DNA, 126 bp, Homo sapiens; identical to SEQ ID NO: 13015
  chr20:44880040-44880166
  hyper

SEQ ID NO: 133058 - DNA, 33 bp, Homo sapiens; identical to SEQ ID NO: 57286
  chr20:44880275-44880308
  hyper

SEQ ID NO: 133059 - DNA, 225 bp, Homo sapiens; identical to SEQ ID NO: 13016
  chr20:44935839-44936064
  hyper

SEQ ID NO: 133060 - DNA, 156 bp, Homo sapiens; identical to SEQ ID NO: 57288
  chr20:44936314-44936470
  hyper

SEQ ID NO: 133061 - DNA, 803 bp, Homo sapiens; identical to SEQ ID NO: 57289
  chr20:44936608-44937411
  hyper

SEQ ID NO: 133062 - DNA, 299 bp, Homo sapiens
  chr20:44937425-44937724
  hyper
cgcccccaggagggggaccatctacctcctcgcctggcagctccccaggtggccgcagtttgagaccagagcctatttccccacctgattttactgcgaatagggcttcccatttccgccccctgactactgcgggaggccgccttcagaggagcaggggcgcaggccagggtaggagcaggcttctcgaacagtggccgccccggcttgctgcccagaaaggcaccttgcacagaccagatctgccagttcagaaacagtcactgtgcattgaggtggacaccgaccaggtgcccagg

SEQ ID NO: 133063 - DNA, 30 bp, Homo sapiens
  chr20:44941252-44941282
  hyper
aagaaatgtcagcgcggggacggggccgcc

SEQ ID NO: 133064 - DNA, 30 bp, Homo sapiens; identical to SEQ ID NO: 57291
  chr20:44941527-44941557
  hyper

SEQ ID NO: 133065 - DNA, 30 bp, Homo sapiens
  chr20:45034728-45034758
  hyper
cggactggtggacgcgggcagccgggtcca

SEQ ID NO: 133066 - DNA, 72 bp, Homo sapiens
  chr20:45035360-45035432
  hyper
cactcaagaaggggcgggcacagctgccggtagaggggaaaaacgccggccgtccccgcccccctagtggag

SEQ ID NO: 133067 - DNA, 30 bp, Homo sapiens
  chr20:45035852-45035882
  hyper
tgggaggtggcattcgtcactgcacctgcg

SEQ ID NO: 133068 - DNA, 97 bp, Homo sapiens
  chr20:45141941-45142038
  hyper
ctgccctggctgcctcgcctcccgaccacaggaaaccctccctccaaagacagggagagcgcgcgtccaccctccgcagacccgaggcccgctccgc

SEQ ID NO: 133069 - DNA, 200 bp, Homo sapiens; identical to SEQ ID NO: 57294
  chr20:45142151-45142351
  hyper

SEQ ID NO: 133070 - DNA, 62 bp, Homo sapiens
  chr20:45279919-45279981
  hyper
ccgggggcgcacaggcggaggaggcgttaccttgggcgggagggcgaagaccaccggcagca

SEQ ID NO: 133071 - DNA, 185 bp, Homo sapiens
  chr20:45280039-45280224
  hyper
cgctgctgccagcgccgccatcagcgcgatcgcctggcggtacgggccggcccgggactgccccgcctggccccggcgccggcttaaagcctgggggagggtcggggaggggactgcgctggggaacccgccctctccctgctcctcctggaggaaaagggtggtgcctgcgcccctgggaccgg

SEQ ID NO: 133072 - DNA, 30 bp, Homo sapiens
  chr20:45317629-45317659
  hyper
catttccgaaaggccggacaccgcagaagg

SEQ ID NO: 133073 - DNA, 30 bp, Homo sapiens; identical to SEQ ID NO: 57295
  chr20:45317904-45317934
  hyper

SEQ ID NO: 133074 - DNA, 30 bp, Homo sapiens; identical to SEQ ID NO: 13021
  chr20:45338381-45338411
  hyper

SEQ ID NO: 133075 - DNA, 30 bp, Homo sapiens
  chr20:45338637-45338667
  hyper
ggcactctcccgggcgccctgatccgacag

SEQ ID NO: 133076 - DNA, 143 bp, Homo sapiens; identical to SEQ ID NO: 57297
  chr20:45440168-45440311
  hyper

SEQ ID NO: 133077 - DNA, 1616 bp, Homo sapiens
  chr20:45523119-45524735
  hyper
ggtcctctccgagccgtcgttcctttcacaggggtcatgcctgggttgcagggaggatgtgctgccccggggagggaggaggtgcggggtgtcggtgggtggggaggaggctgggccctggcctccaggaccggcgagagtgagcgcgctctgctcggctgcaggctcaggaagcggcgcggcggcacgtgctgggccagagccccgcgccctgcgtccagccgccgggtgtgtgcgcccgcgtagcccagcgtcgcgcctcggcgcccccacgcgcccacgcagcggcgcggggacccgggcgggggcagagggagggcccggcccagggaggagaaggggccggtcctcccggcgcaggcagcagccgcggcagcccaggaggcggaggcagcggcaacggcagagacagcaacgtgcccgccgcagtcagcccggcctcgtcggacccgcaccggcccgcccgcccgcccgcaccgcgtcggggcgccctctccactgcgcgcggtgagtaccgccagcggcgcccaccccaggccgcccgccgggattcgccgggcggggggagttgttcaccgggaccccctcgccctgcgcctctttctggcactcgccaagcggggcctccgcagctgtcgggacgttctggggcgcacgggcctcccagggccaggaaggcacaagggcagaggggacagcagcagagcccccctctggaaaggctctcccaggctcggggccccagtttccccatgcgctttggggcaacgaccctgaagtttgctctcccgcgcgcgggacaagtgcatggcgcgcaggcggtgtagacgcggctgggtccttggcgttttgttcgattatggtcccggcggttcgcgataaggggcgctcccccagtccgcaaactcaagccctcaggtagtgtttatgggataaccaagaagcagagccaaccgctggaatcccggcttggggctggaacggcccgctgagactttgccttctagctattgatatatttcttttcaaaagtccgtttgcgctcggcccgctctggttcaggtctggggctttgaaccggggcagggaatcctggcgcctgctgcgggtagagttgaaacttagaaaagtttacatccgaagggtgtttagaaggcggcaaggatttcgttgtaatgggagaaagtgggaaatggaattgttttttagtcatgaagtctggaggttaaacggccgtgctggcccaggctccttcaatatattcctgcctgcctcccccccagcaataaatagtttataagctcaaggaatactaggaaagcgtgactggtgaacgtactcctatcgcaaaagactcagtgcgcttttctcagctgttgaactggaagcgccttttgcagtgcgaggttcctgcttccccgaagccgaggctgagagttgacagcgtgcaccctgccgcggtctgaattctttttaaaaagcaagaccgatgctgcgtttttatggatacccttttcttttctttccccttccccgaaatgctatgtaatcttcaattactttttaaaatataacgtggaggtataaatcaccccggtaagaggtaccttttaatt

SEQ ID NO: 133078 - DNA, 187 bp, Homo sapiens
  chr20:45825082-45825269
  hyper
aattcgcgttaaaaacgatggaccatttttccctaatattttgagccccatgatgcaagctcagcgcccgagaagctgtgctcatctgcaaccaccagggggcagtgcggccccacagctgacccagccgcccgcaggtgccacttgaagtgggacccggaaagagcaataacgcaagccttccgag

SEQ ID NO: 133079 - DNA, 150 bp, Homo sapiens; identical to SEQ ID NO: 57299
  chr20:45985480-45985630
  hyper

SEQ ID NO: 133080 - DNA, 474 bp, Homo sapiens
  chr20:46130569-46131043
  hyper
ccggtagtgctgggcgtggcctcgggactacatatcccagtggcccccgtgcggcgactttagctgctgctgtctcagccgctccacagcgacggcagcggctgcggcttagtcggtggcggccggcggcggctgcgggctgagcggcgagtttccgatttaaagctgagctgcgaggaaaatggcggcgggaggtgagtggagataaaggaggaggcggtggcgggcgagggggtggagtgcgaggcggagggaagaggggcgagttccccaggctgcgagagccagcggcttcagatctgccaaggcactgaggggcgcgccggccgggggacgcgctgaggtagtttcggggtgtcggggccgcgccgcttcccctcagcccggggggcggcccgcggcggtaggagctgagacgaagctgggtggcagtccgcttggggatccgagggggtccccgcgcggaggggtcac

SEQ ID NO: 133081 - DNA, 922 bp, Homo sapiens
  chr20:46413278-46414200
  hyper
tcttccaccccgagacggcatctctctaccctgctgccctcccagtgaaccggcagcttctggcgcgcaggagccagatcctgttcagccgcgtttccctggaacagaacgcggtgcccggcacgagggggtgctccagaaatgcttgtagaacgaatgaacgaactactataaggaatgtttggaaaagtgcactcctagaattcaccgctagacttttgaaaccccgaggagccggggaggggagcatccctccgccaggcgatggaaactcgttctgccctggcctgggaggaagtctgccttttcgatcctgtttgtcctttcggtgtctgcgagtttccaaccactctgaagatccggcccactgcttccccgagtcctgcccggacaagccccacgtgggctggcatctaccggtcccttgggtctaaaccctaagggtcaacaaggccatgcccctgcggatggccggcccaggcgcgctcccctacccggggccgcctgtgctcggtgtgccgtgtccgcgggtcaggggcgcggcgggaagtcctcgcccgcccgccagccagcggggtcaaacaggtcatccctctgcggacggccggcgccggagcctccctcccgcccgcccggacccacctccgcaagcagcgctggggctggagccgggcggtccggaccagccccggctcacctgggcggcgctcgcggccgggctcacgccggggaaggctccggccgccgcgagcccccgcccgagccccgcgtcccccagccacccacctgccccccacgccccactcaccagcgcgcacggccccggcaacctcacccggagcggggcgccgccgccgcctctgccgcagcccggccgggccgctgggcgcaggggactccgcgccgccgctgccgctgccgc

SEQ ID NO: 133082 - DNA, 1190 bp, Homo sapiens
  chr20:46414404-46415594
  hyper
ttggcacggcgctaccgccccccgctcgcctgcccgccggcctccacgcaggggaggcgggcgcgctccggggcggggagcgtcgggccgggagccgcggacggctggggcccggggcgcggggggcccagccgcggtgccctcctcgagccctccgcgcgctagcgcttttacctccggcctgggggacgcgcggcccgcgacccggccctgcctgtccccggcgcacggccccggccccggccccgaagtccagctccggacggggcagtgaacgcagagctggggtcccggcggctctcgacctcccgatgcctccggactcggctggccgcgctcccggcgccgagcgcgcaccctcgccgggacacacagacgcacactcactcgacacactctcgctcctgctcgccctcggcggagagttgaaacagatgtgggattcgcccaggagctggaaacgagggagggaagcgagccagagccttgtgtgcacgtgtgtgtgcgtaacacacaaaccagggggcatcgctaataaatcaaatatcgtgataaattcaggagggccatcgatcaggtccacttggctggaaacgacgtgaatctgcctcttttccgctttcttcttctcctctctcggagctggagggagccaaatgttccgcggggagtgcgacagccccggccgggcgctcccctcgtaatgacacgttaataaatgttttcttttatctgctttcacaggactcgccccggtctgcaaacactcgactgcctttgccgaaagcctcgcgctcgcctccagccacacacatttgccattggagaggccggcgccggccgcgacccgcagctcaatcgcagggcaaaccgagctgcctgtgcgcgcccgagaactccccgagaaattaacttcggctcaagtgaaaatagcagctgttgtccagaaatggcccgggagtagcatagaaaggagaaaccggcttcctccgaaaggggaggaattggactcaagggggtgctgtctaccgtggtttccgctgtccctcgcgccacagaagaggccggagggggaccggcctgacgcgggtgggcaaagagcgggcagagaactcaccagcagctgcagaaaacacagccgagttgctagctaaggggaaacagacgccgctgtgggaaagcacttgtaa

SEQ ID NO: 133083 - DNA, 30 bp, Homo sapiens; identical to SEQ ID NO: 57302
  chr20:47340101-47340131
  hyper

SEQ ID NO: 133084 - DNA, 264 bp, Homo sapiens; identical to SEQ ID NO: 13025
  chr20:47443672-47443936
  hyper

SEQ ID NO: 133085 - DNA, 483 bp, Homo sapiens; identical to SEQ ID NO: 13026
  chr20:47443944-47444427
  hyper

SEQ ID NO: 133086 - DNA, 128 bp, Homo sapiens; identical to SEQ ID NO: 13027
  chr20:47444452-47444580
  hyper

SEQ ID NO: 133087 - DNA, 183 bp, Homo sapiens; identical to SEQ ID NO: 13028
  chr20:47444609-47444792
  hyper

SEQ ID NO: 133088 - DNA, 241 bp, Homo sapiens; identical to SEQ ID NO: 13029
  chr20:47444920-47445161
  hyper

SEQ ID NO: 133089 - DNA, 166 bp, Homo sapiens
  chr20:47662582-47662748
  hyper
ttgaacacctcctacgtgccaagccctgacatcaaaatgggtcagaagccagcagccgctcgctgaatctgtgttcctctttggaaaacgagaaccgtgaagcctgctggcatggtcagagccaaagagcattgtcacttgtgagatcagcgcagaaacagagcgg

SEQ ID NO: 133090 - DNA, 31 bp, Homo sapiens; identical to SEQ ID NO: 13030
  chr20:47663142-47663173
  hyper

SEQ ID NO: 133091 - DNA, 30 bp, Homo sapiens
  chr20:47663221-47663251
  hyper
gaggcgcggcctaacgcgagcctgcggatt

SEQ ID NO: 133092 - DNA, 30 bp, Homo sapiens
  chr20:47804537-47804567
  hyper
aaggcggaggggtgcgcgggcccgccgagg

SEQ ID NO: 133093 - DNA, 32 bp, Homo sapiens
  chr20:47805121-47805153
  hyper
tctggtgggagtttcgcgctgcctgctggact

SEQ ID NO: 133094 - DNA, 354 bp, Homo sapiens
  chr20:47835789-47836143
  hyper
ttgatggcgtcacacgaaaccaaccacgccccatattgccgcatgcgcactcttaagaggtcgaacggggagggcggcaggggctctggaacggaagtgacgcatggtacttgcgcaaagacgacgaggaggctgcgaaaagttaagggccggaccgcaggctgtgctcgcttccggaagtggcttctgcgacaacatgcttgcggacctcggcttaatcggaaccataggcgaggatgacgaggtgccggtggagcccgagtctgactccggggacgaggaagaggaggtatgagcacggttctggtctttgggtttccttgactgcttcccttcctcgcgattcctcaggtc

SEQ ID NO: 133095 - DNA, 425 bp, Homo sapiens
  chr20:47895000-47895425
  hyper
ggggcggggctagacgcggcctggacaactactagagcgcctcgggctgtgctgctcgagactacatttcccagagcgacgcgcgcggagcgggcgggaaagagagcgtttcgggtccagtgcgcaggtgcgaaagccatctttggttatataagggaggttcaggaagccattcgttctttcgcgtctgcggtgcccggagtgtggtacttctcctagttgcagtcaggcttcatacgctattgtcctgcccgtaagttcccgttttgtgtgtggtgagtggaaactccatgttcttcgttggagacctctggtcctcccttcccttctttgtgccgtcgtctctgcggccagccctaatctccttctcgtggcttctccgtctctgaccccaaataggccttaagggcgtgggagaaatgagt

SEQ ID NO: 133096 - DNA, 1198 bp, Homo sapiens
  chr20:47934764-47935962
  hyper
gaggtgggtccgaggaggggtcgggtctgggagcctccgcccccaactcaaggcaggctacacaagatctgtctccgttggcgtcccggtacctagcttgagcccgaccatgggcatgcgtggcgtggcgcgaatcctgtccctgtcgctcgtcctggccgcggtggccacgggggcctgggagcgggggccgctgggcgtgctcttgccctggcagggctccgccgcgctgggccgctgctgtcctggccgtgacccgatgtttgtcgcccgcgggcccccgcgctgcttctgcgaccaagcgtgcggcgcggcgcggcgcgggactgctgcgcagactatacgcgggtctgcccaggtgcacccggggaaaggcaaggcactagcggaacgctcggagcggaggggagctggggcgggggatgagcggaggaagggagcccagcacctagggggctctgggcttggaggggtcacacgagccgagggcggggcgcggcgcttggggactggaagggtgcgccgcggggcagacgggacgtgcagggggtcgcgcgggcaaggagggacgcagacactcaggacctaaaggggaagcactggctgtggagctgcgagccgagaaagacgcgcaggttatgaacctgggtgcgttcatctcgggggacctgaaggagagggactcgtggagagttgaggggtgtttcggaggaggggcgcaaggactgctcacaggacttgaagggcggcaggaaggtggaggattcggcccaggtgcgggacgcaggcggtggaagggaaatgagcacaagaggcgcaggcaggaaggagagcgcctggtgcgagagaggaaggagcgcacccagtaagcggtgtcgggggggtcgtgaagcttggagggcctcgaggggagggaggcgcttgggttgaggtagggcgccagatttcgcaaatcaaaatacagcacacccagttaaactcgaatttcagataaacaaatctttctagagaaaaatatgtcctaaatatcgcatgggatatacttatactaaaaaattatttgttgtttttctgaaattgaaatctaactcggagtcctgtattttatctgagagccccagctggggacgggcgcggggccaagagagctgcgagggaggaggggttgcaagcttctttcgggcggaggggtcacaag

SEQ ID NO: 133097 - DNA, 415 bp, Homo sapiens
  chr20:48098878-48099293
  hyper
gccagagtacctcgtgcgccagccccccgacgttgaggcggacccgccgagagcacgccttgctgcgcacgatctccatgggctcgggcggcagcgagctggtggagcgggagccatgcttcgtcatgcccgccggcatcgctgatccggccgcccccgccccccctgcccccccaggccgctgtcactcgacggcaaggcccgctgctgcgggggaggggggcagggagcgctgtgggctgctgggggtgcagggggccccgcgggcgcgcgtcacggccgtcttctcacctccatcccgacggctgcgaggcagaaagcgaaagcggacgcgggtcagcaaacggggagctgggcatgctgtccccccgccccccacctctccaccaggctcccagccggccttgaccttccc

SEQ ID NO: 133098 - DNA, 583 bp, Homo sapiens; identical to SEQ ID NO: 57313
  chr20:48099322-48099905
  hyper

SEQ ID NO: 133099 - DNA, 748 bp, Homo sapiens
  chr20:48100302-48101050
  hyper
ccagaatggggattgcgcgtcccctcaggcctcagcccttgcctgcctcccaccccgctcccctccagcctggagctgcggagcccgagcagaccaacaggccgagctgcggcaggcaaaccccctgtccgtgtccccatgcacccccacggaaggccgtacgccccaacactcacccccagggcggccgcctcctggggccagggaccgcgcatcgtcccggccgcccgggcgcccccgcccgtgggcagcggcggtcccggggccgggctgagccgggcctaccccggccgggcaggcaactcgcccgggctgcaggcgccgcggggccggggcgcgctctccgaggcggggggcgccggcgggcgccgggggcgcgggggcaggaccgcggccgcgcggcacctcctccacctcctcctcctcctgctcccgcggcggcggcggcggcggctgcctgggcgagatcaacaagtcggggctgagcttcggctccgcgctcgctgctattctgtcccgcacttcggagcgcccggagccgggcaccaaggcaggacggcgccacctgcgggtcggaagcgagcgcggcttaactcctgcctgcccggcccagcctgccggggaggccgggggcgggctccgggatcgggccaaggagacgcgcgtggccgtgcatccctctccacccaggccacctgcacagctggcctcgcgatcccgccttccttcgtcccgtcaacaacgtgtg

SEQ ID NO: 133100 - DNA, 326 bp, Homo sapiens
  chr20:48184328-48184654
  hyper
cgattcgccccgggggacctaccggaccccgcaccttcccaccttgcaccttcttggcagggggagcacggcctggccccctcacccacgtgcggggccccgggactcccacctccgagggtctcgccttgcccgggatactggagcgggactcgggccgggccggccgcgggctccgagacccttgggctgcagcccgggcgggagccgccccctttgtctggcggggccgagcggagcaggacactcaccgcgtgcggcggcggctcagtagcagcagcagcaacagtgcggccaggaggccgaggagcgcggcccaagccatc

SEQ ID NO: 133101 - DNA, 98 bp, Homo sapiens; identical to SEQ ID NO: 57316
  chr20:48194979-48195077
  hyper

SEQ ID NO: 133102 - DNA, 165 bp, Homo sapiens; identical to SEQ ID NO: 57317
  chr20:48330531-48330696
  hyper

SEQ ID NO: 133103 - DNA, 30 bp, Homo sapiens
  chr20:48429084-48429114
  hyper
tagcacagcgaagtcgagggcactgggtgg

SEQ ID NO: 133104 - DNA, 30 bp, Homo sapiens
  chr20:48532401-48532431
  hyper
cggcctccacttcccggacctgccacttat

SEQ ID NO: 133105 - DNA, 30 bp, Homo sapiens
  chr20:48552727-48552757
  hyper
aacagcggcccacgcgcagagcccgtccca

SEQ ID NO: 133106 - DNA, 30 bp, Homo sapiens; identical to SEQ ID NO: 57318
  chr20:48595794-48595824
  hyper

SEQ ID NO: 133107 - DNA, 1008 bp, Homo sapiens
  chr20:48598695-48599703
  hyper
tgacccgcctcttaacggtcgccgcgtcccgtctctcccccaccaaagcacacttccctttgcattgtaattatctgtttacttcgtctgtctccctcactggaccagaagctacccttcgggagaggctctgagtgttctgtccggggctgtgccctggccccaggtacagtgccccacacgtgctgggcgctccgtaaacactggataagggaaggaacgggtgctcttggctagctgggccaggctgctttgcaaaaaggccgtggcatttcaagccgccgagagccacgtgcggtgtccctttcctcgcttcctccccagtgatgtgcgtttccctcgtcaatgccacgctctccaggcgccagccgggcggaggaaatttccgccccctcccaagcccgaggcgggggcgggcgtcggaaggtcaggtgtcccggccggcgcgcagcgccagggggcgtcagaagcgctcagaccaccgggcgctgagccggtgggcgcgcggcgtcctgccggggtcccacctcgcagaggcctcgcttcgctcgacgtcccgccccggacagccccagcaccggggacgacccgcgctgcgccagcgaaccccgcctcggaggagtccccgcccgggctctcaccgccacgcggcgcgagcccggccagcagccggcgcacctgctcggggagtggccttcggcggagacgagcctccgattggcgcggaggtgacaaaggggcgtggcagataaggccccgcccctcccaccccccaccacccccccggagtacttaagggagttggcggcgctgctgcattcattgcgccgcggcacggcctagcgagtggttcttctgcgctactgctgcgcgaatcggcgaccccagtgcctcgaccactatgccgcgctctttcctcgtcaggaagccctccgaccccaatcggaagcctaactacagcgagctgcaggactctaatccaggtgcgttggaggggttctgggctcc

SEQ ID NO: 133108 - DNA, 132 bp, Homo sapiens
  chr20:48729832-48729964
  hyper
aaaggaaatatctgcgtgctcgagggcccagcaacctgcaagtccccacacatcgggtgcgagggaggttgtgatgtgcttagtgagaagggcaggggtgactaggcttgggaaggcgcgattgtgaaagaa

SEQ ID NO: 133109 - DNA, 30 bp, Homo sapiens; identical to SEQ ID NO: 57321
  chr20:48769981-48770011
  hyper

SEQ ID NO: 133110 - DNA, 30 bp, Homo sapiens
  chr20:48770627-48770657
  hyper
acgcgagggcagggcgccgggctggggccg

SEQ ID NO: 133111 - DNA, 204 bp, Homo sapiens; identical to SEQ ID NO: 57322
  chr20:48771156-48771360
  hyper

SEQ ID NO: 133112 - DNA, 434 bp, Homo sapiens
  chr20:48788886-48789320
  hyper
ggagggtctgtcgggcgggggcgggggctctttgccttccgatccaagctccgccctctgcagctctgctctgtgtatcccagagctgaccctgcggcgcctttcccaggctcgcgtccggtgagttcctattggccaacgggaggccccggtcggggagcgccccgggacaggcccctgtgcctcccgctttgcggagtgacgcaggccctgggctacagcaaccttaccagcccctccagcttagaggtggcagtggctctctgcggctgcgatttctttctcggagcgtcctccccatcccgttcggcctctgcctccaccgtcgtctctgtaacccgttccctgtgggagagtctctgttgcggtgttcaggggtttcggttttctggctgaacagtgattaacgcgagggaaggcgctgacggcaaggt

SEQ ID NO: 133113 - DNA, 30 bp, Homo sapiens; identical to SEQ ID NO: 57324
  chr20:48807312-48807342
  hyper

SEQ ID NO: 133114 - DNA, 30 bp, Homo sapiens
  chr20:48808891-48808921
  hyper
tgcccctctccaggcgccggcgggcgggcc

SEQ ID NO: 133115 - DNA, 30 bp, Homo sapiens; identical to SEQ ID NO: 57325
  chr20:48909072-48909102
  hyper

SEQ ID NO: 133116 - DNA, 30 bp, Homo sapiens
  chr20:49003243-49003273
  hyper
agaaagggaaaaaaacgaccaaaaagaagc

SEQ ID NO: 133117 - DNA, 30 bp, Homo sapiens
  chr20:49003892-49003922
  hyper
cctctgctgagaggtcgtccccaagctctt

SEQ ID NO: 133118 - DNA, 31 bp, Homo sapiens; identical to SEQ ID NO: 57326
  chr20:49131961-49131992
  hyper

SEQ ID NO: 133119 - DNA, 31 bp, Homo sapiens; identical to SEQ ID NO: 57327
  chr20:49141977-49142008
  hyper

SEQ ID NO: 133120 - DNA, 589 bp, Homo sapiens; identical to SEQ ID NO: 57328
  chr20:49224899-49225488
  hyper

SEQ ID NO: 133121 - DNA, 324 bp, Homo sapiens
  chr20:49225975-49226299
  hyper
gccacaggcagagagacgcctccttggggcccagaacacctcctccagcccccactggcccagctctcgatgtccccactgcccggcccagctcttgctgcccctgctgcccagcccagcttggcccggcccacctcggcgcactcgtgcaggctgcggcccagctcctgcaggctctctcgggctgcgcggctcggggggcaccgggcgaaggcccgctgcatgctggaggcgccgtcgcgcaggcggcactggatgcagtagtcctcgtacagctcatccacctgtggtgggcacacgggctggtggcgctgcccacgcgga

SEQ ID NO: 133122 - DNA, 30 bp, Homo sapiens
  chr20:49347356-49347386
  hyper
gagttgcagcgggacgcctaagcaacgata

SEQ ID NO: 133123 - DNA, 30 bp, Homo sapiens
  chr20:49347876-49347906
  hyper
ctattgggtgtgggcggaacgcgagggatt

SEQ ID NO: 133124 - DNA, 30 bp, Homo sapiens
  chr20:49348576-49348606
  hyper
gtccgcccctggcccgggcaggaagaagac

SEQ ID NO: 133125 - DNA, 30 bp, Homo sapiens
  chr20:49407428-49407458
  hyper
ccaggcctcaggctcgcggctgtccggggc

SEQ ID NO: 133126 - DNA, 177 bp, Homo sapiens
  chr20:49410873-49411050
  hyper
gaggaagacgaggaccgtcacactcggccttccctaaattccaggaccctccgcccgatgcaaactagatgctttagtaggatgggaacgggtggggggcgggcggctttgggcttcctctaagctagcgcctctctaacccggacgcccgttagaatcacccggggagttttagaa

SEQ ID NO: 133127 - DNA, 30 bp, Homo sapiens; identical to SEQ ID NO: 57331
  chr20:49411397-49411427
  hyper

SEQ ID NO: 133128 - DNA, 30 bp, Homo sapiens
  chr20:49412169-49412199
  hyper
aagcagatctaaaacgagaccctctacctt

SEQ ID NO: 133129 - DNA, 131 bp, Homo sapiens
  chr20:49435015-49435146
  hyper
aagtgcttcctgaggcggccatcttgatctcgtccttccctcgagatggtttttattccgcagaggagccaggagtggaccacaaggtggcactctcgggcaccgatgcagggagccgttcagcggggacg

SEQ ID NO: 133130 - DNA, 30 bp, Homo sapiens
  chr20:49547228-49547258
  hyper
cggctggagggcggcgatgcgaacaacaat

SEQ ID NO: 133131 - DNA, 30 bp, Homo sapiens
  chr20:49547971-49548001
  hyper
aagagcggaagtgacgtaagtgcctcatta

SEQ ID NO: 133132 - DNA, 31 bp, Homo sapiens; identical to SEQ ID NO: 13044
  chr20:49574742-49574773
  hyper

SEQ ID NO: 133133 - DNA, 140 bp, Homo sapiens
  chr20:49575066-49575206
  hyper
actgagccagatgccggaagcggaattacgtaatgtggcgcggaaaaggacgggtcggaccgtaccaaattcggaagcgggggatgacctgtgtgattgatcgctagttcttctagggccattgcgtggttcaattagaa

SEQ ID NO: 133134 - DNA, 321 bp, Homo sapiens
  chr20:49575789-49576110
  hyper
ggccttttcggccgccgcctcgctgcgccgcctcaattcggcagtggaatgcgtgccgtacactcaggcccttacgccagccactgccctagacctggtccgccgatatgatgtggtggctgactgctcggacaacgtgcccactcgctacctggttaatgacgcatgtgtgctggcgggtcggcccctcgtgtctgccagtgccttgcgcttcgagggccaaatcacagtctaccattatgacggtggcccttgctatcgctgcatattcccccaaccacccccagcggagacagtgaccaactgcgcggacggcggggt

SEQ ID NO: 133135 - DNA, 134 bp, Homo sapiens; identical to SEQ ID NO: 13045
  chr20:49639050-49639184
  hyper

SEQ ID NO: 133136 - DNA, 639 bp, Homo sapiens; identical to SEQ ID NO: 13046
  chr20:49639217-49639856
  hyper

SEQ ID NO: 133137 - DNA, 114 bp, Homo sapiens; identical to SEQ ID NO: 13047
  chr20:49639882-49639996
  hyper

SEQ ID NO: 133138 - DNA, 131 bp, Homo sapiens; identical to SEQ ID NO: 57337
  chr20:49640094-49640225
  hyper

SEQ ID NO: 133139 - DNA, 110 bp, Homo sapiens; identical to SEQ ID NO: 57338
  chr20:49708568-49708678
  hyper

SEQ ID NO: 133140 - DNA, 60 bp, Homo sapiens
  chr20:49836918-49836978
  hyper
ccgtcctgcaggtggcgcgcctgagcccgtgcacggcagcctctccggaaggtgaagcac

SEQ ID NO: 133141 - DNA, 747 bp, Homo sapiens
  chr20:50157672-50158419
  hyper
ggacaccgatggaagcgaaaacttcattatctgcctaacacagtgtttgtgggaaacatcaggccaccaagcctccttgacaggcttcctccacgagccagtcagcacaagcccttcctacacactagatggaggcaagcccagagtgcgtctggaagctactaacaggcctgccactgagccttcaacaagcattggctgggctgggctgggctgtcaaaatcaggaagcctggttgggttttttgttttttccaagacaacctgctaaccagaaatacacagtgaggttgggcgtgtggccgcttccccctcctcctcctcctccctctaacgaatgctcctgttaaacacgtgaagtgacagataagcattgggcccagcccggggaagtccccagcccccagcaactgagggcagttggaggcacagagtgacaaagttcaggcagaaagagcctgtgtccttctgaatccatgctgcagctgcccctcaccctaccccatcccaccacatccattaggactaagcgtagaagatcacttaatatagctcagaccaatcctcttgtgagtggtaagtgatgggttcagcagcagaacccagggaggaaatgggccggccttataataccaaaggttttaaccctctccagcatcagacagacaacctcttcctcagtttcaacacaaagtccccgtcaaccactgctcacaggaggtgatgggagctgcgtggcctcacttca

SEQ ID NO: 133142 - DNA, 977 bp, Homo sapiens; identical to SEQ ID NO: 57342
  chr20:50158712-50159689
  hyper

SEQ ID NO: 133143 - DNA, 383 bp, Homo sapiens
  chr20:50179175-50179558
  hyper
gcacggggacttggcgcgtgtttggaaagggggatctgtttgtatcgaccagcagccgaggggacgccgtcttctctaccgcgtgcccgcggggctgccctggccgaggagcctcggagcgacccgggagctgcgcgcctcccggctcccggctcggcggagtcggcgcggctccgcgatccggcttactccagaggcaacgcgacttccttccccgcgctccgtgtttataggctttcaatgcagtaaaataacgggattccctcactgtttcctcctgtttatccagcgccatggaaaccactggatcccgtccatctccaaaactaagggctttcctgcaaacttcacactcaggaatccatgacgtcgcctcctccgcg

SEQ ID NO: 133144 - DNA, 1664 bp, Homo sapiens; identical to SEQ ID NO: 57344
  chr20:50383654-50385318
  hyper

SEQ ID NO: 133145 - DNA, 30 bp, Homo sapiens; identical to SEQ ID NO: 57345
  chr20:50416950-50416980
  hyper

SEQ ID NO: 133146 - DNA, 1159 bp, Homo sapiens
  chr20:50417182-50418341
  hyper
tccggaggaagcaggcgggctgagggttaacccttttgttccaggtgggccaggccacgaagccttcacgctcccctcaacccccaccccaccccgcccccaaccaaggcacaaagagagtccctccaggcgcctgggacctcgggtgcgcgctgcgctgaccacccggcgccccgaaaacgcccagccatcccctccgtcaagccgatccttttaatttgccctggaaaaatgttaaacggggaattctattgacgtattataaacttgggaaatgtattacattcagtctccgacaaaaaggcggggatacggaagccaaaaagtggcgaccgtcttctcgggaaaccccgggtatcagagatggtctctgagagtcctccggggttgccgcgcacacccgtctgctgcagggaaattagaaagcaggcggggagcggagcgacgaacaaggccggagaggaggctacaaatcccccctccccccacgcgcacgctaaaaacttatcaggcgacaatttggcgggccgggatggagacgagatagtggaaaaccgcctcgctcctaaaacctccgcggtgaagtgatgaagtgggaacagagttggccccgccgttcctggcgcggctggggtcccgaactcccctcgatctgggaaacgctggccgcggaagcgtgggccaggtcagccgcgggagttcgctctggccccccacctctcccctttcacacccaagcgcaaatgtggaaagccgagcgctccagaaaagccacgcaaaacgggaggccggtgcaccccagtggggctgccgcgcgcccgccaccccggccactgggggctcgcaccctcgggcttgccgcggttatttttaggaagtcggaaatcaaagatggctggaggtcaggccccgaaaggttagggcgaagatcggcaggcggcgcagcccgggcagaaaaggcgaaatccagaaaagaaaaaaattttaaagggaaacattgagccctcctcccccacctctctgggccctccaatcccctgcgcagcgcgggtggcccgcaccccagctcctgagggtggggagaggtcgcgccccctccccccacttggcccgggaggggcgcgtgcaacagatcgtcctcctccggggggtcttccag

SEQ ID NO: 133147 - DNA, 769 bp, Homo sapiens; identical to SEQ ID NO: 57347
  chr20:50720431-50721200
  hyper

SEQ ID NO: 133148 - DNA, 436 bp, Homo sapiens; identical to SEQ ID NO: 13056
  chr20:50721234-50721670
  hyper

SEQ ID NO: 133149 - DNA, 42 bp, Homo sapiens; identical to SEQ ID NO: 13057
  chr20:50721988-50722030
  hyper

SEQ ID NO: 133150 - DNA, 121 bp, Homo sapiens; identical to SEQ ID NO: 13058
  chr20:50722089-50722210
  hyper

SEQ ID NO: 133151 - DNA, 518 bp, Homo sapiens
  chr20:50722269-50722787
  hyper
gagctcctgtatttctaacgagctcccaggtggcgctgtggctgctgcgctgcacaggctgcgcttttagattcggacttaattggtctgggctgggacctgggcactgggatgtttttttaaaaaagccgtctccctccctcaccacccccatcacacacacaggtcattctgatgtgcatccaagctgagaagcacgacctccactcctggttctcaaccctgctgcatacccaaatttaaattttaaatgaggagtgtctccaactgcagggagaaatgcagattccgaaagttctggattcaggtggccgaggccagaaatgtgtgtttttatatagcacgcgcccgctcccgccccgtgactcgggcgcaccggctcttggaccacacaggagtgcttttggggccaacccggcgccggccccgcccagcaggtgacggaggcgtggtcctcggggggttgagctaattagcgttcatgctcagactggctgggacctcgatgagacccgagg

SEQ ID NO: 133152 - DNA, 120 bp, Homo sapiens
  chr20:50808100-50808220
  hyper
gcgcgcactgctcccggaaaagcacttactttgcaccgagcccgcgaagctctcgccctcgctgctcgcgttcatggccgcagactgggaggtccccggccggccgggatgccaaagtgg

SEQ ID NO: 133153 - DNA, 99 bp, Homo sapiens
  chr20:50808682-50808781
  hyper
gcggggtgggtgcgcggggcgcggcgagctccggagaaacccaggttgggcgtgagcgctgggcaaatcagcaaagcgctgggcgggtcccttgccccg

SEQ ID NO: 133154 - DNA, 267 bp, Homo sapiens
  chr20:51588706-51588973
  hyper
ccccggcggagagggcgcacagaggggcctgggccggcgcgccggggcccccgcccccagcccctctcccctgcgggacgctgtccctttaataggctcccgctgcctggcgctctgcggctggggagtaaatttctccctgtcatcaggtcgcggggagaggaggaggaggaggagtttgttaatgttcagtttgttcagcgggatcgatgtttgctggcatcgcctcgccctgtcttgtgtgtgtgtgcgagggtgtgtgtgtgt

SEQ ID NO: 133155 - DNA, 987 bp, Homo sapiens
  chr20:51589092-51590079
  hyper
gagtgaattccagattttctgtctttccaaaacccgctcctgtcctctcgcatatcactcacagacggggatctgacagcagccacaaacctacagtgagtgatcgctctccccccggcacgaatccgccatagagatcggcgaggaggaggaggaggaggaggaagaaaagaaggaggaggtggaggaggaggtggaggaggaggaggaggagggaaagaggagaaggaagaagaagaaaaagaagaaacccactaccttcccaggattgccttttttttttccttatctttacgcgcgagtgtgcctgtggcgcgtgtgcgcccctcgtcccttccatccgaacccgggcttggatgtttaataaagaaatcaagtgtctcaacagtcaccaaaaaaaaaaaaaaccgcaaaaacaaaaccaaaaaaattccaaaagcaaaaacaaaaaagagagaggaaaaaaaattcaaaataaacaaacaaacaaacaaggcagaaccaacctctacttcaaagcagccggcacaagccacccgtgtctgccacccagagaggggggtctctggcccgtggtggaggagttgcaggggggatcgtcagggggacagaggccgagtgacgtcctaggagccaccgggcaagaggcggaggagacccagagaggccagagagacagcgggccccagcgcgcggctcggggctggggcgccagaagtgggactggagcgaagtagaggatgccgaggagaaaacagcaggcacccaagcgggcggcaggtaagagaaacggctccgcttcggggctgccctgtgcgccgagctcctcgcccgccctccttgcccctgggtgcccgggggcaccacccacttaagctttcgggggagtttgcgccgggtgcccttctaataaccccgtcctctctcgccttctctggtctcccaaatcctccccttccaagctccggttgggttggggtgagctat

SEQ ID NO: 133156 - DNA, 30 bp, Homo sapiens; identical to SEQ ID NO: 13062
  chr20:51963662-51963692
  hyper

SEQ ID NO: 133157 - DNA, 167 bp, Homo sapiens; identical to SEQ ID NO: 13063
  chr20:52209196-52209363
  hyper

SEQ ID NO: 133158 - DNA, 408 bp, Homo sapiens; identical to SEQ ID NO: 57357
  chr20:52259562-52259970
  hyper

SEQ ID NO: 133159 - DNA, 24 bp, Homo sapiens
  chr20:52308720-52308744
  hyper
aaactgacctggaggccgggcgcg

SEQ ID NO: 133160 - DNA, 19 bp, Homo sapiens
  chr20:52311457-52311476
  hyper
ctaatttaaagtagaagct

SEQ ID NO: 133161 - DNA, 739 bp, Homo sapiens; identical to SEQ ID NO: 57360
  chr20:52789209-52789948
  hyper

SEQ ID NO: 133162 - DNA, 546 bp, Homo sapiens
  chr20:52790081-52790627
  hyper
cggcaagcgagcggctcttgctgatgggggagctcatggcagcgggggacaccggagcgcgggaaggcaggaggatggggtggggcgaggttggtacgaggtgctagtgggagtcggggcttaacgattctgggaaaaggaagcaaagagggccagctggtgtgatggagcggggtgaggcgggacaggcagcagaaaggacctcggcgaggatgctcgacgctgcaccacgcgacagcctcagagcattggtgcctccttgcactggccgcaggggctggaagagggtggccggtgtctggggacctcttgaaaagggaaagctgggagtcctcctgttggtccgcaaggctgacctctagggtctggctggagccacggggaggtgtcaaggagggtagatgagatgctgctggcgctgcgtttcctcctgtccctctccatgttcctatgcccagggaccatgcatttatggagacagagcatgccctgggtggccaatgagcacgcagaggagggcggagtggcccccggctggccagactc

SEQ ID NO: 133163 - DNA, 30 bp, Homo sapiens
  chr20:52790963-52790993
  hyper
ccggggagcccgggcgcctcccggggagcc

SEQ ID NO: 133164 - DNA, 30 bp, Homo sapiens
  chr20:52824459-52824489
  hyper
acatttcctccctacgtcccagccgtttgg

SEQ ID NO: 133165 - DNA, 30 bp, Homo sapiens
  chr20:52825072-52825102
  hyper
gctgctgctgggagcgtggttacgggtgag

SEQ ID NO: 133166 - DNA, 780 bp, Homo sapiens; identical to SEQ ID NO: 57363
  chr20:53091752-53092532
  hyper

SEQ ID NO: 133167 - DNA, 181 bp, Homo sapiens; identical to SEQ ID NO: 13070
  chr20:53092686-53092867
  hyper

SEQ ID NO: 133168 - DNA, 255 bp, Homo sapiens; identical to SEQ ID NO: 13071
  chr20:53092912-53093167
  hyper

SEQ ID NO: 133169 - DNA, 30 bp, Homo sapiens; identical to SEQ ID NO: 57366
  chr20:54578079-54578109
  hyper

SEQ ID NO: 133170 - DNA, 655 bp, Homo sapiens
  chr20:54578318-54578973
  hyper
gcttgctgcctactccgaggcagcggcagtgccagcggtgcctggcacacgaacagtggaacctgcaggcgagatctgacccccggctctgcccccgccctccgcggccacctgcccgatctctgaagagtgtggaagcccggggctctcttgggagagaagcttctctacctgggagaaacaaatcaaacatttatcctgttccgcaaaggtacccagggagcagcctcagcggcacccgcagaggagtctgagcaagggcaccaagatctggccaagagataacgacgtccagggaccaggtgcccttcggctcccgccgacctgttgctcgaaacttgccctgagctctcgctgccgggctctgggctcccaagcctctcccccgccgccgcagcagcctcttttaggggcccggaagaaatgggagccggggctggtgagaggggtaggaagagggacggtagaagtttcagacccaggcatatttgggaaggcgagtgctttacatgattccccatttcccaatcggaccagcttagcctgggcaggcagcctcgtgctgaggtgcctggagaccgcccaccccctaggtgctcgcttccccccgggtctgacctgatcgaagtaaatgatgcgcgtcttgttgctcatc

SEQ ID NO: 133171 - DNA, 151 bp, Homo sapiens; identical to SEQ ID NO: 57368
  chr20:54579139-54579290
  hyper

SEQ ID NO: 133172 - DNA, 204 bp, Homo sapiens
  chr20:54579754-54579958
  hyper
ccaggctgagaagaacgcgaggctgtgttcatggccaggacgccagcgactcccactttcgcctggtcaaaaaaatcccccaaacctggtgtcacccagaggtagggagggaggcagcggctagccaggtccctcgcaccgaaagcgcggattcgcaggatcaggtccagggcgccgggcgcagcgttcagggcggctggtccg

SEQ ID NO: 133173 - DNA, 452 bp, Homo sapiens
  chr20:54580069-54580521
  hyper
cgcagcgtccggctgggttggcttatcgcgcaacccgcgggctccgagaaaagggggagaaggcgtctggtgaccccatctgagcagctctctcctgacgtttaacgcaccccaaagcaagcggggcgcacagcactggtgattggcaaggttcgaggcccctcagcccctgaaagcccgtggcgtaaaggatgcgtgcccagagaggagcccacggccctgcgctggccccagctccgcgcccactctctcctgctcgatctgagtccgcagaggaggcggctggtcccctcacccctcccagcgcggaactctgccgccgagtgccctccaagcggagcgcggcgctgccaggccgggtcgcgaaaaaggataagccgccgcggacccgcgctgcgcgctgccccgaacctggggaccggcgggcgtcccgaccgcgcctggccgggagc

SEQ ID NO: 133174 - DNA, 179 bp, Homo sapiens
  chr20:54919046-54919225
  hyper
cgaagtcttgggctgcgcctccccttgcgcggtcggagccttggcagagcctgcggcgccacctcgtgggcgaggccgcctggtgcaaggtcatccggtgccgggacccgctcctcgccccgccaggacccccgctcacctccaagctggacgcccgcggagccctgatcccctaacgc

SEQ ID NO: 133175 - DNA, 147 bp, Homo sapiens; identical to SEQ ID NO: 57372
  chr20:54919287-54919434
  hyper

SEQ ID NO: 133176 - DNA, 30 bp, Homo sapiens; identical to SEQ ID NO: 57373
  chr20:54933782-54933812
  hyper

SEQ ID NO: 133177 - DNA, 394 bp, Homo sapiens; identical to SEQ ID NO: 57374
  chr20:54934125-54934519
  hyper

SEQ ID NO: 133178 - DNA, 872 bp, Homo sapiens
  chr20:54966814-54967686
  hyper
ccaccccagctgcaagttctccgtacgcttaccgtctgtctccccacccactagaacgtgaactccaacacagcagagaccttctgtgcttttcttacccaggtgatctcggaggacaaaatccaatctgaagcccacccacccctcccgcgcatgtcaacaccactcaacaaaccccttgtacctctagctgtaataagtaacaagcagtatcctacagggcgcctcggtgcccaggagcggatgcaaaggcgctgggcgggcacaaggcagcgccaaggacactcagggacggaggaaccgacaggggacttgacgctccgccactccgaccagccgccccttgtccccgccgtcctcgtccgccactgagatatcccccacggtctacccacccgtcggctcccacctgcgacccaaggacccaagtcttccaagagctcagccgttagaattcaaaggttcttctttttaaataggagttaaaccctctagctagaaagccgattggcctgcgctcgagcgaggctgccttgtgattggttgacaacaaacccgacgccttgagtcgcgtttaagggcgcacaccgcgcgcaggcgcacttgctccctaagaacccggaagtggtggagccaacggccagccagacctgtggcagtcccagccccagggtgctctccgcggtcggccatttatcggtgaagcaacagccccttgacgtcaagcttgacgcattggagataaagtccaaggaggtgaactaacctttgaacgtgccagtaagtaagatggcgagaaaagcaagagagagtgggaccgatcgatagcgcagcggtcggcttggcgccctttcagcgtgcgcagtgaacgt

SEQ ID NO: 133179 - DNA, 30 bp, Homo sapiens
  chr20:55043495-55043525
  hyper
aacccagggtctcacgggaacgaggaaacc

SEQ ID NO: 133180 - DNA, 411 bp, Homo sapiens; identical to SEQ ID NO: 13075
  chr20:55199899-55200310
  hyper

SEQ ID NO: 133181 - DNA, 741 bp, Homo sapiens; identical to SEQ ID NO: 13076
  chr20:55200615-55201356
  hyper

SEQ ID NO: 133182 - DNA, 1 bp, Homo sapiens
  chr20:55201450-55201451
  hyper
g

SEQ ID NO: 133183 - DNA, 488 bp, Homo sapiens; identical to SEQ ID NO: 13078
  chr20:55201580-55202068
  hyper

SEQ ID NO: 133184 - DNA, 1079 bp, Homo sapiens; identical to SEQ ID NO: 13079
  chr20:55202358-55203437
  hyper

SEQ ID NO: 133185 - DNA, 163 bp, Homo sapiens; identical to SEQ ID NO: 13080
  chr20:55203505-55203668
  hyper

SEQ ID NO: 133186 - DNA, 1973 bp, Homo sapiens; identical to SEQ ID NO: 57382
  chr20:55203806-55205779
  hyper

SEQ ID NO: 133187 - DNA, 136 bp, Homo sapiens; identical to SEQ ID NO: 13083
  chr20:55206293-55206429
  hyper

SEQ ID NO: 133188 - DNA, 134 bp, Homo sapiens; identical to SEQ ID NO: 13084
  chr20:55206463-55206597
  hyper

SEQ ID NO: 133189 - DNA, 147 bp, Homo sapiens
  chr20:55206736-55206883
  hyper
cgaggtgcaggtgagcggcgctgcggctcctgaccggacctgttcaccctacggccttctgcccccaccccgcactcctctaggctcccccgaacttaagggaattttgtcctctctcccccagaatgtcgacgaccagcacctgtt

SEQ ID NO: 133190 - DNA, 31 bp, Homo sapiens
  chr20:55405265-55405296
  hyper
cttccggtttccaccccgggctcatttgtct

SEQ ID NO: 133191 - DNA, 330 bp, Homo sapiens
  chr20:55499421-55499751
  hyper
taaggagagtatcacgtttatactttaaaaagcccaactgctctgtttaaagtggatctttcataaacttgcagtcaggagcaacaatgacgtccttcagggagtcaaacactttggaaagaaacgcgaactgaaaatgctattggaggacgcaagaaaaccgaaaacgctcggtcgagtttttctgtcaagccacgtttgaaattaaggaattcgtgtaaattgccatctttcgcatccgaagcaagaaacgtacacagtttccctgctatacggagttgttgtgacataagaaaacagaatctttttaaacctcgagtttaattaatt

SEQ ID NO: 133192 - DNA, 311 bp, Homo sapiens
  chr20:55499990-55500301
  hyper
ggtgattagcggatccgtgcacctagataatgaagcctggtcgcggttattggcagaagggcccgggcgcgctgtgagaacgctgcaggctcactttgtagtgcggggcctacgcctattagattccaatcagtttcgcctaaaaaggggaggagggcggagtgggaggggggcccagagttaaacacaggaaacaagcgttgagtgtgtgccaataaaaatggtcacaaatcagggctgctgatgtcataaccctgggggtcgggggtcagggggagtgaatgcgcctgaaagggaccgcctgtctgcgg

SEQ ID NO: 133193 - DNA, 280 bp, Homo sapiens; identical to SEQ ID NO: 13088
  chr20:55500440-55500720
  hyper

SEQ ID NO: 133194 - DNA, 70 bp, Homo sapiens; identical to SEQ ID NO: 57389
  chr20:55501052-55501122
  hyper

SEQ ID NO: 133195 - DNA, 125 bp, Homo sapiens
  chr20:55503341-55503466
  hyper
ctttgcctggcgtcaccctgccgccgacagtcactttaccccaagggccaagggtcccctggggacccagcagcagggacaccacctggctgctttgagaggtcaaaccccggacaggacctgtc

SEQ ID NO: 133196 - DNA, 70 bp, Homo sapiens
  chr20:55532709-55532779
  hyper
gagtaggggcaggggcgggtgtttactgggtcatttaaccgggtttctattttttaaagtttccttttct

SEQ ID NO: 133197 - DNA, 66 bp, Homo sapiens
  chr20:55532850-55532916
  hyper
cggtggggccgggtggctccctctaattgcctgtgttcctgccttttccctcgagtctccagggca

SEQ ID NO: 133198 - DNA, 151 bp, Homo sapiens; identical to SEQ ID NO: 57390
  chr20:55588946-55589097
  hyper

SEQ ID NO: 133199 - DNA, 347 bp, Homo sapiens
  chr20:55839320-55839667
  hyper
gccccaggtgcccagcgtggggcttcagtatcattatttccatgttgacacagcgcccgtgggcgtgagtttgctgtcttgacttggttcgggttttcgcagcaagttacacaagtagaatgaaagcggctcaggaaacagcgctatcggggtgtgttatctcggaaaccaaatatttgatcatcagtcccgcagcgcgctggcgctgccggggggttagtttgagcaagtctggagaatgtgcgcgcacatatggagggggagctccccggccctcgctgcagccccaggctcgcgtcgccggggtcgtcgcggctccagtcggaaaccgggacccccagccgccc

SEQ ID NO: 133200 - DNA, 124 bp, Homo sapiens
  chr20:55839692-55839816
  hyper
cgcaacccaatcgccaaaacctgtggtttgcgcgccacacgtggtaaatgctgaaaatagattctgccggcccgggacctaccactaaatacttaaaatagaagactagcggcagggcacagtg

SEQ ID NO: 133201 - DNA, 7 bp, Homo sapiens
  chr20:55840238-55840245
  hyper
aaggcgc

SEQ ID NO: 133202 - DNA, 824 bp, Homo sapiens
  chr20:55840279-55841103
  hyper
cgaggggacaggtagggcttgacagggagggtaagggggtgcgacggccgcgatgccagagccaggcagggctgagaggggcccaggaagggcggcaaggcagcctcgccgggaagggccctttacatccaggtagcgcgagccgcgccggcccgggacagctcacatgaccgagccccgcgctttgaacggcccttgcctccagccccagagatgcggccggcggcgtaacatggaggggacttcggaggatccctccttcccagtaacccctacaggctcaccgaacccagcgcgcccgacctgggggcgcacacagcttgggagtcatagggctgtgggtgggagaccctcgggcaggcactgcgatttcagccaggagcggaaagctgggcgggctgcatagaagaagcggctccctccctcccagtctcaaagtgcccccgaaaggagacgcgtaccctcgcctgcccttactcaccgaggttgacgaagctcatgaccatgtcggcgtcggtgaggaaatggctatcttgcaggctggccagaggggggccctgggtactgaagacggccttgtaggggtaggagaagccctggccgccgggcccgccgccctcctccaccgccatggcgttgtacaggtccagcatgaacatgggtgccgagttgtgcttgccctggaggtgcgggcgcgggcggtggggcaagcccaaaatggagaggatctcgcgctgcatctcccgccgctcctggctgcggaggcgccggtggatgaagctcgagtgcacctcgttgtccaggctgaagtcggccagggcgga

SEQ ID NO: 133203 - DNA, 2 bp, Homo sapiens
  chr20:55841148-55841150
  hyper
cg

SEQ ID NO: 133204 - DNA, 398 bp, Homo sapiens
  chr20:55841254-55841652
  hyper
cgtccgcgccgctcggtcacttgctgcagacgggccccgctgcgcccgcgccagacatggcccctccccggccggccgcgctctgcccggacccccgccccctgctcggtgctggccccgggcccctcgccccgcactcgcccgggcgcaccgcagggcttggaaagcagccccggcgaacgaaaaggcgagtgaggaggcgggcgcgggtgggaggagcagccagcaagcctaggagtccagagagccaacgccggggaggcagcgaggaggcaggcgggcgggcgagcgctccttcttcccgctcctctggcgctctcgccctcgggcggcggcaacccaccctcttccaacctccggcgcggatagcaggggccccggggcgctctcccagcctt

SEQ ID NO: 133205 - DNA, 117 bp, Homo sapiens; identical to SEQ ID NO: 13092
  chr20:55841872-55841989
  hyper

SEQ ID NO: 133206 - DNA, 134 bp, Homo sapiens; identical to SEQ ID NO: 13093
  chr20:55842055-55842189
  hyper

SEQ ID NO: 133207 - DNA, 458 bp, Homo sapiens
  chr20:55926141-55926599
  hyper
aaaagcagtcgcttagtaacttgcagcggctacatcaactttggaccaattcgcaaactgctggtgtaaagcgtttttgcgcatgtgctgtcgccttgcgggaaaaggagcctttttcttcgacgatttccgggcgacgcaggaagtggctccagggcgcacgcgcgttgtttccgcggtagtcagggcagtttctaccgcaggcttaaggaggcttcgggctcctgggatttctgtccgcgctcctggccctcgtccttcgcgccagagcaggttcgcaaactcctcagacccttctgctcccggccgccgctttccgccggggcgagacccccaggtaggccccgtgccgcgcgcgtcccgtcgttaaccgccgccatggctcccgcagaggccgagttgcctcccgggagcgcgcttctgcgggatgctggggcgcgagcgggactgttgactaa

SEQ ID NO: 133208 - DNA, 537 bp, Homo sapiens; identical to SEQ ID NO: 57400
  chr20:55964188-55964725
  hyper

SEQ ID NO: 133209 - DNA, 149 bp, Homo sapiens
  chr20:55964997-55965146
  hyper
cgaagggggaagggaggaaaggacgcccaggcttccggaagactcgggggtcccatccccactgtgcagagggctagagcgggagctgggggagggagaggtcagaggtcaaggctgccgcgtggagcgtgggccgtggagtgggggag

SEQ ID NO: 133210 - DNA, 30 bp, Homo sapiens
  chr20:55966198-55966228
  hyper
caaccggccgggcccgcgggggcagccagg

SEQ ID NO: 133211 - DNA, 146 bp, Homo sapiens; identical to SEQ ID NO: 57402
  chr20:55966823-55966969
  hyper

SEQ ID NO: 133212 - DNA, 432 bp, Homo sapiens; identical to SEQ ID NO: 57403
  chr20:56073580-56074012
  hyper

SEQ ID NO: 133213 - DNA, 878 bp, Homo sapiens; identical to SEQ ID NO: 57404
  chr20:56284007-56284885
  hyper

SEQ ID NO: 133214 - DNA, 546 bp, Homo sapiens; identical to SEQ ID NO: 57405
  chr20:56285252-56285798
  hyper

SEQ ID NO: 133215 - DNA, 23 bp, Homo sapiens
  chr20:56577649-56577672
  hyper
acagaaagccaaacaccgcatgt

SEQ ID NO: 133216 - DNA, 17 bp, Homo sapiens
  chr20:56725857-56725874
  hyper
cggacccaagcgacgcg

SEQ ID NO: 133217 - DNA, 144 bp, Homo sapiens
  chr20:56725919-56726063
  hyper
cgcctccgagtcctgcgttgcctggcaaccggtctcccaggagacgcgagacgctgagcccagggccagagcttgcggggcgcacagagcccccaggcctcatggcgcagaaacctctcagcaccgcggcggctgaacgcatga

SEQ ID NO: 133218 - DNA, 449 bp, Homo sapiens
  chr20:56784796-56785245
  hyper
tgaaaataatatccacgtggttacatatttttcaaaacagtgtctactatccaaagatcaacagagcacaaaagtaccaagagtggaaaatctctggtgtataacggcctaacgggaaaggagaaaattggggaatgcaacaggatctgcaattcgggtgggggcggatggacgcggatggacggcccgcctggatccgcgcgaggcgccactcggggagttgatctgcggtctcgcagtgacacctacaggccgccgtggccgcgcacctgcggcaactgcgttcgacagcgccacctggcgggagccgacgccggcaggcccggagaggattttcttcgtgaatccaagacagaggggtggaaagtgctcaggacctctggggtgtgtcctgtgggccgctggggctggggtgcagcccacgaggaagtgtccgtggggtgtgcgta

SEQ ID NO: 133219 - DNA, 30 bp, Homo sapiens
  chr20:56785265-56785295
  hyper
tctgcactgcctggccgtgctcagcccaat

SEQ ID NO: 133220 - DNA, 747 bp, Homo sapiens
  chr20:56803385-56804132
  hyper
tcggaacatctcccccgtctcctccagccgcacccgcaggacgaagacgtcaggggccaagtcgggcaaggcactcgcggccttcgggtcacagacgagccgctggctccggccgcgggcacaggccaggggctgcgcggggagggcccgcgagtccgccgagcccaccctgggcccgccgcacccctgagccccggcccgcgcaccgctcctgcgtcccgcattggggtgcaggcgagaggcgcccccagttggccccgccgcccgcgctccgcccgcccccgccgccgcccgccgcatcccccaggcgcggccgcgcgtcatccgcggctcgagtgcggtggccacgcgtcatcgccgcccccgccctgacgccccaaggcgggcccatgcgccccccgccccactgtgacgcccaggccccgccaggaccgccccctccagacgcaaggcgaggcccctccctgcctgccgcccgagcctccagggagaccgatgggcgggcggccccccaaggtcccgcagtcctttcccgctccgcgatgaacaaagccgcagtttcacgcggccgcgggagacggttcttaaataatggaacaggacataagtgcttcccagagcaaccgggagatttattgataaatacagagacatcgccgggcagccacgctccgacaacccgcactgggcccccgtcccgagctcaggccacgtccccacctcctcgaagcctccaagctgctgtta

SEQ ID NO: 133221 - DNA, 225 bp, Homo sapiens; identical to SEQ ID NO: 57409
  chr20:56811735-56811960
  hyper

SEQ ID NO: 133222 - DNA, 13 bp, Homo sapiens
  chr20:56964018-56964031
  hyper
cccttaatagttt

SEQ ID NO: 133223 - DNA, 30 bp, Homo sapiens
  chr20:56964438-56964468
  hyper
gggcgcagcattaacgcttcccgccccggt

SEQ ID NO: 133224 - DNA, 58 bp, Homo sapiens; identical to SEQ ID NO: 57410
  chr20:56964788-56964846
  hyper

SEQ ID NO: 133225 - DNA, 116 bp, Homo sapiens
  chr20:57056685-57056801
  hyper
aggcacaccactcaccgagctgttcttgggagcttccacaagggggccctcttgagctttggttggggcgattgggagccagtggcgaaccctcaccccgccggctccagcttcgg

SEQ ID NO: 133226 - DNA, 7 bp, Homo sapiens
  chr20:57089452-57089459
  hyper
ccaggcc

SEQ ID NO: 133227 - DNA, 258 bp, Homo sapiens
  chr20:57090103-57090361
  hyper
cgccttccccaaagtcttcgcagtgggcaaggaggcctcccccaagctctggtcccggccaaggcagagcgatgcgctccttgcgtcaaagcgcacccctagccaggccgttccctggaagggcaagcggggcggggagttcctctaagccccgccagtcctgggacccctgaagtttctattcaggtcttccagctactcctggaaaagtcgcgtcaacttggatcccagcaaacccagaagcgcagtgaaagtggc

SEQ ID NO: 133228 - DNA, 9 bp, Homo sapiens
  chr20:57224587-57224596
  hyper
aaatatttc

SEQ ID NO: 133229 - DNA, 281 bp, Homo sapiens; identical to SEQ ID NO: 13101
  chr20:57224798-57225079
  hyper

SEQ ID NO: 133230 - DNA, 375 bp, Homo sapiens; identical to SEQ ID NO: 57413
  chr20:57225218-57225593
  hyper

SEQ ID NO: 133231 - DNA, 103 bp, Homo sapiens
  chr20:57226046-57226149
  hyper
cagcctgggggccacgctccccaggctcaggcctgctcgttggcctgctcctagtgcctggacccagttgggggaggcgaaacagggcgcccgaggagcaccc

SEQ ID NO: 133232 - DNA, 325 bp, Homo sapiens
  chr20:57227597-57227922
  hyper
gctgggtcgccggatcgtagacccaaatccttgcaaaatgaacgactccctcccctcaaagaggagggagttgtgttgttgttttgttttgttttgtttttccgcccgttttcttttaacggccccgcagccctctgtgtggccttgttccctgtgaataattgcctcactgttcttcctgggggcttgcgtttgtgagactcaaggtgctagcctcttcactttccatttcccagacaggaaattaagctttcctctccattcgaactttttaaaaaaagcctgaggaggtatatgtgaaaattaaccccgtaaaatagcactt

SEQ ID NO: 133233 - DNA, 209 bp, Homo sapiens
  chr20:57414592-57414801
  hyper
acccgccaggccccccgcccatcgcttcgcccaaatcctttcaaacaaggttccctcctgccacctgccggcccactagggtctgcgccacaggctcggcgccaccacgcagctcgcggggaggtggcccccacctccttactgcacatgcccggcagaagtccgggcgcgcaacttcgcagaacctcactgcccgtccctcctcgcct

SEQ ID NO: 133234 - DNA, 159 bp, Homo sapiens
  chr20:57415179-57415338
  hyper
gctcagcagtggcgccgagctcgccataattacaacgacctgtgcccgcccataggccgccgggcagccaccgcgctcctctggctctcctgctccatcgcgctcctccgcgcccttgccacctccaacgcccgtgcccagcagcgcgcggctgcccaa

SEQ ID NO: 133235 - DNA, 303 bp, Homo sapiens; identical to SEQ ID NO: 13104
  chr20:57415538-57415841
  hyper

SEQ ID NO: 133236 - DNA, 2077 bp, Homo sapiens; identical to SEQ ID NO: 13105
  chr20:57428310-57430387
  hyper

SEQ ID NO: 133237 - DNA, 87 bp, Homo sapiens; identical to SEQ ID NO: 57417
  chr20:57465843-57465930
  hyper

SEQ ID NO: 133238 - DNA, 101 bp, Homo sapiens; identical to SEQ ID NO: 13106
  chr20:57466876-57466977
  hyper

SEQ ID NO: 133239 - DNA, 30 bp, Homo sapiens
  chr20:57467253-57467283
  hyper
caggggtttgggtgcgtgttggggaggggg

SEQ ID NO: 133240 - DNA, 30 bp, Homo sapiens
  chr20:57467824-57467854
  hyper
tgaagccaaatgacacgtcattttacagtg

SEQ ID NO: 133241 - DNA, 34 bp, Homo sapiens; identical to SEQ ID NO: 13107
  chr20:57470652-57470686
  hyper

SEQ ID NO: 133242 - DNA, 252 bp, Homo sapiens; identical to SEQ ID NO: 13108
  chr20:57478607-57478859
  hyper

SEQ ID NO: 133243 - DNA, 30 bp, Homo sapiens; identical to SEQ ID NO: 13109
  chr20:57480439-57480469
  hyper

SEQ ID NO: 133244 - DNA, 438 bp, Homo sapiens; identical to SEQ ID NO: 13110
  chr20:57484404-57484842
  hyper

SEQ ID NO: 133245 - DNA, 30 bp, Homo sapiens; identical to SEQ ID NO: 13111
  chr20:57485068-57485098
  hyper

SEQ ID NO: 133246 - DNA, 205 bp, Homo sapiens; identical to SEQ ID NO: 57424
  chr20:57485750-57485955
  hyper

SEQ ID NO: 133247 - DNA, 64 bp, Homo sapiens; identical to SEQ ID NO: 57425
  chr20:57556037-57556101
  hyper

SEQ ID NO: 133248 - DNA, 30 bp, Homo sapiens; identical to SEQ ID NO: 57426
  chr20:57556673-57556703
  hyper

SEQ ID NO: 133249 - DNA, 229 bp, Homo sapiens
  chr20:57579613-57579842
  hyper
ggggcggggtggggccgggggctttgtgttccttttttccaggtgggagagcttccctgagtgggaagggacgggctcagtgaggggacaagacagttgatcctgggggagaggagggaagacaaatggaggacctgctgccttggctggcaaatggccagggccccgtggaagtccccttctggtggcttctattcctcagtgaaagaggaagcgagtgcctgggcct

SEQ ID NO: 133250 - DNA, 30 bp, Homo sapiens
  chr20:57580262-57580292
  hyper
agcccccgggggagacgccacggatgccac

SEQ ID NO: 133251 - DNA, 675 bp, Homo sapiens
  chr20:57581888-57582563
  hyper
tggaagagaaggagcgacccccaaaacgaagcggctggatctgaccttccaaggcctgttggcgacgcagggcccccaggaggcagagcgcgcgcctggcccgggcgatgggcctcccgtccccccagggctgcctccccgccggtgcccacctgcgccccagcggagccagcccgtccccccgcagaggccggtagcaggtctgtccccggcggaagtagaggccgccctgcgccgcgcccgccagcagcacgagcagcagaagcggccgccaccctggcccgcgcctcgccatggccccgcgccggctcctgggtcccgctccggatcccgctccgagtcccagatcccgcgccggctcccgctctggatcccgccccggcctcggcctcggcccagcacccggccgaccccgcactttgggcccctgccccgcccggcccttaaggctgcggcggccaggccgggacactcccccggggcggggctgtcccatcgctgctcctgccccgcccggtgacccctgccctccccgcccggctccgcgccccgctccctccctggctccggggcacctgaactcgcgggccaggcgcgaggtcgccgggcagaccccagcctgaccccgccgccggccgccgccctgagcgcgggactgtccggctggactcattt

SEQ ID NO: 133252 - DNA, 30 bp, Homo sapiens
  chr20:57607046-57607076
  hyper
gcaccgtcgggaagcgaggcaggacacaga

SEQ ID NO: 133253 - DNA, 30 bp, Homo sapiens; identical to SEQ ID NO: 57428
  chr20:57607747-57607777
  hyper

SEQ ID NO: 133254 - DNA, 58 bp, Homo sapiens; identical to SEQ ID NO: 57429
  chr20:57797334-57797392
  hyper

SEQ ID NO: 133255 - DNA, 348 bp, Homo sapiens
  chr20:57797934-57798282
  hyper
ggagcaggctgaagccgaaggaagggagagcagggttttgatcctagttccttggcttctgcaaatcggctgggaccccccgctgagcaagcgactgtcgtcacggcccccgcaccagacgaccccagcctgtggatgatgtttcactgccctcacataaacgccacccagaaatgcaagagtaagaatgttcacgaagaggggaggcaggagccccagctgataacaggaggaggcaggaagggggccttggaggaggtcagaggggggacattatttcagtttcccaggaccagggtgagagatgggggtgaaagaagaaaaaggacaaaacgaggtgccgaaggc

SEQ ID NO: 133256 - DNA, 30 bp, Homo sapiens
  chr20:57798574-57798604
  hyper
tacgggaacgggcctcggaggaaagcactc

SEQ ID NO: 133257 - DNA, 762 bp, Homo sapiens
  chr20:57875350-57876112
  hyper
gtgagtgtgagcgcgcgtgtgcgtgtgtgcgcgcgctctcgtggccttccggcagctggcagctgtcccggcccccaccccaccctaccccaccccacccagccgcgccacgccacgccgcccccgcccctcgctgtcctgggtgcgcctcgggccgctgcgctcctggccagctccccccagcgcctgggaggcgacccccagtgcgcccgggttcaaaggcccggcgaggcagttccagcccctctggggggcggggaggcgacgggggtggtgcagaagccagaaaagcccgagccacagccggccagctccgcgcagggatgggcagcgcgctctgaaagtttatgaccgccgcagccaactcctggccggagctggagacgcagcgagcgatcggccggcctcgaacccccacagctggagggcgaggccagctgtacccggccccagtgccctttcgcggccacaagcggccgtcctcctggtccggtgctccggcgcctgatctaggttcatggagccggggctgtggctccttttcgggctcacagtgacctccgccgcaggtaagcgcacggggcggcgcgcctctcctggcgcgagcgcacacaaaaggacccagggcgggggacccgaggcgcggagaagatgtgcgtcgcggggagcaaactcttgcctgggctctgcactcgtgaagacgcctgggggagggctggggagcagaagcggcgcgcaacgactacccgcacgggctccggg

SEQ ID NO: 133258 - DNA, 315 bp, Homo sapiens; identical to SEQ ID NO: 13116
  chr20:57978780-57979095
  hyper

SEQ ID NO: 133259 - DNA, 136 bp, Homo sapiens; identical to SEQ ID NO: 13117
  chr20:58090759-58090895
  hyper

SEQ ID NO: 133260 - DNA, 96 bp, Homo sapiens
  chr20:58152275-58152371
  hyper
tacagcgcggggaaccggcggctacacctcccgcccggctgtccctttaacgtttctagggcatccctggaaggcccgggcacggcgctgaggtct

SEQ ID NO: 133261 - DNA, 170 bp, Homo sapiens
  chr20:58152388-58152558
  hyper
cgcccgggcgaggctgcggctccgggcgggtcaaggtcgcagcggagcccctcggagcccccgcccggcggagaggccggcctcgcgtggcggcgccgcccccggccctggtcccggtcccgccccgccggcgcctccccgcggccccggctccgctccgcggccctccg

SEQ ID NO: 133262 - DNA, 142 bp, Homo sapiens; identical to SEQ ID NO: 57434
  chr20:58179411-58179553
  hyper

SEQ ID NO: 133263 - DNA, 163 bp, Homo sapiens
  chr20:58179831-58179994
  hyper
gcgcacgccgggatgcgcctggctgcagccggcgaggctattgtctccccgccctgaagccagccccggcgtctttctccagctcgtttcctttcccggccttttttttttttttttttttttaattttcttttttaaaaagacgccccctccagccccctcg

SEQ ID NO: 133264 - DNA, 189 bp, Homo sapiens; identical to SEQ ID NO: 57436
  chr20:58180213-58180402
  hyper

SEQ ID NO: 133265 - DNA, 105 bp, Homo sapiens; identical to SEQ ID NO: 57437
  chr20:58180470-58180575
  hyper

SEQ ID NO: 133266 - DNA, 113 bp, Homo sapiens
  chr20:58180687-58180800
  hyper
cgctagcccccggacaggtgtgctgggcagagccgccggcagggagacgaagggcgtgcgccaggacagagcccggtttcgtgacagcgtgtggactccgtccactcttccac

SEQ ID NO: 133267 - DNA, 31 bp, Homo sapiens; identical to SEQ ID NO: 13120
  chr20:58323973-58324004
  hyper

SEQ ID NO: 133268 - DNA, 105 bp, Homo sapiens
  chr20:58509169-58509274
  hyper
accgggggaccagggcgccgggccgacgactcctgggtgaggcctggctcctgccggcagggggcgcagggccgcctgggctcctgggtgcgggtgccggagggc

SEQ ID NO: 133269 - DNA, 509 bp, Homo sapiens; identical to SEQ ID NO: 57439
  chr20:58514020-58514529
  hyper

SEQ ID NO: 133270 - DNA, 330 bp, Homo sapiens; identical to SEQ ID NO: 57440
  chr20:58514800-58515130
  hyper

SEQ ID NO: 133271 - DNA, 112 bp, Homo sapiens
  chr20:58515464-58515576
  hyper
ggagctgcgcgcctccgcctccagctcccctgccgcagcgcgccgcagccgggcgtccccgcgcgggcgccggagaggaaggaaggctggcagcctcgtcacgtgtccgctg

SEQ ID NO: 133272 - DNA, 159 bp, Homo sapiens
  chr20:59804277-59804436
  hyper
tggggaaggacgggacgcatcactgctgatgccccttctgaaaccccctgcaggcgcggctgcacctcaagcccggcggggcgaggacgctgagctgcagacagcgccacctagcgtccgagagccacggcgcaccggctgtgcgcatctctgggcgag

SEQ ID NO: 133273 - DNA, 21 bp, Homo sapiens
  chr20:59826956-59826977
  hyper
aatggaagtgcacactcccac

SEQ ID NO: 133274 - DNA, 67 bp, Homo sapiens; identical to SEQ ID NO: 13123
  chr20:59828340-59828407
  hyper

SEQ ID NO: 133275 - DNA, 249 bp, Homo sapiens
  chr20:59828962-59829211
  hyper
ggggagccaagcaccgctgtgctcctgctccttcagcggggctggcttcccgcttgcacacactgcctctccctccaccacctcctcctgcctgtcacgccccctcccagaagcttggtcggagggccctgtcgtccaccccatccttccctggccctgtgccatgggctctagacttccccactgagcaggaaaggcgagcgagctccggaggacaggaggagaccccctttccggtcagttagggga

SEQ ID NO: 133276 - DNA, 578 bp, Homo sapiens
  chr20:60551923-60552501
  hyper
ccctggctgcacagacgccgcctccgtcagcccctacaggtgaccaggtgtctcccgagctgcctcagatgtgttcctgcttggagaagcatagctgctgcgtgccagctcctgtggagagctctggcggtttcagctgatgacacctgcatgacaccgcccagcagggcacgcgccacacacacgacaccgcccagcggggcacacgccacacacacgacaccgcccagcggggcacgcgccacacacacgacaccgcccagcggggcacgcgccacacacacgacaccgcccagcggggcacgagccacacacacgacaccgcccagcggggcgcgcgccacacacacacaacaccgcccagcggggcgcgcaccacacacacacgacaccgcccagcggggcacgtgccacacaactcccaacagctgtcatttcccccagctggcatgaaaactaagttctgctccgatggtgaaagctgctcacatatatttaagtacaaagattacgatggcatctttacagcacattctcaaccaaagttaagatgctggaaggagcggattctgctgtgt

SEQ ID NO: 133277 - DNA, 37 bp, Homo sapiens; identical to SEQ ID NO: 57447
  chr20:60639842-60639879
  hyper

SEQ ID NO: 133278 - DNA, 30 bp, Homo sapiens; identical to SEQ ID NO: 13127
  chr20:60697023-60697053
  hyper

SEQ ID NO: 133279 - DNA, 53 bp, Homo sapiens
  chr20:60697690-60697743
  hyper
ccaccgcggcccgacgcaccccggccgccgccatgagcggctcctcaggcacc

SEQ ID NO: 133280 - DNA, 30 bp, Homo sapiens; identical to SEQ ID NO: 57449
  chr20:60717714-60717744
  hyper

SEQ ID NO: 133281 - DNA, 30 bp, Homo sapiens
  chr20:60719623-60719653
  hyper
cagcgtgacaccctcgccagccgcctcgcc

SEQ ID NO: 133282 - DNA, 181 bp, Homo sapiens; identical to SEQ ID NO: 57450
  chr20:60757904-60758085
  hyper

SEQ ID NO: 133283 - DNA, 30 bp, Homo sapiens
  chr20:60758362-60758392
  hyper
tctccgcagaaccgcgttttggggtcagaa

SEQ ID NO: 133284 - DNA, 316 bp, Homo sapiens; identical to SEQ ID NO: 57451
  chr20:60794654-60794970
  hyper

SEQ ID NO: 133285 - DNA, 94 bp, Homo sapiens
  chr20:60813106-60813200
  hyper
agtggaagcagctacgccccagctatcgcacggtccccagcatttgtaggaaaaagcccccagggctttgggtagcctcgcaggcccgcactgc

SEQ ID NO: 133286 - DNA, 30 bp, Homo sapiens; identical to SEQ ID NO: 57453
  chr20:60813441-60813471
  hyper

SEQ ID NO: 133287 - DNA, 25 bp, Homo sapiens
  chr20:60877638-60877663
  hyper
cgcactcctcggcctccgcctaacc

SEQ ID NO: 133288 - DNA, 30 bp, Homo sapiens; identical to SEQ ID NO: 57454
  chr20:60921028-60921058
  hyper

SEQ ID NO: 133289 - DNA, 244 bp, Homo sapiens; identical to SEQ ID NO: 13129
  chr20:60941670-60941914
  hyper

SEQ ID NO: 133290 - DNA, 725 bp, Homo sapiens
  chr20:60942651-60943376
  hyper
agcgctccccacgacgccctggcccccagagcgcccaccagctcctcccagcccaggggcccactctttgttcccctaacttgggtgcaccactcggctgcccccgctcctcccccaacagcgtccgtcctgctggctgcgggaaggtgccctctgcacccgcgaatgaccatctgcagaggaacggggcagcctaggtgggaaccccctgcttcctggggcagccaggtcaggttcaactcggcctggctcccgcctgccccagcagggcttaaaaatactctcagatagggaaataggggcaggagggactggcctgcagctgcagccccctttagaggacgggggcggtgctcatggccccacagccgccaaattggctcttaaggaggtcgggggctctggtcacagctgctgagcacctgctgggtgcctggaagcacctgtgctccggggcccggtggactccaccagctctctcggcctggcctccaacccgctgcacagccgcgcacgcgttcctgccacgatcggcggctcgaggacgcctggcaaacagcacaggacctagaggccgagatcaggtcttcgtctgcctttgggtggctgcggccctgggtctcctacttcccttgggctccggggccaaatctgcctccagggaagccccgagggggtggcggcggggtggggctgcagctgccgagctggcagcaaacccccat

SEQ ID NO: 133291 - DNA, 30 bp, Homo sapiens; identical to SEQ ID NO: 57458
  chr20:60956901-60956931
  hyper

SEQ ID NO: 133292 - DNA, 123 bp, Homo sapiens
  chr20:60961538-60961661
  hyper
gatggcagagtggtcgggtgtttcagattccacggtgggccggggtcttttcctaccctcgggagccgtctgaatttctcctctgccgagttcctgcgggtgtccttcgcccaccggcccggg

SEQ ID NO: 133293 - DNA, 30 bp, Homo sapiens; identical to SEQ ID NO: 57459
  chr20:60969435-60969465
  hyper

SEQ ID NO: 133294 - DNA, 13 bp, Homo sapiens
  chr20:60981894-60981907
  hyper
gtcctgggctgat

SEQ ID NO: 133295 - DNA, 117 bp, Homo sapiens
  chr20:60981936-60982053
  hyper
cgtcctgggctgacctggccgggcccccactcacctctggcgctgcccatccaggccgaggccggtgggcacctgcgtggggctgagcaggccctggggcgcgggggtcctggcggg

SEQ ID NO: 133296 - DNA, 30 bp, Homo sapiens
  chr20:60982705-60982735
  hyper
gtgtgtctgggcggcgcttcagcgggcgca

SEQ ID NO: 133297 - DNA, 30 bp, Homo sapiens
  chr20:61273297-61273327
  hyper
ttcccaggctagggcgccggtctcactgtg

SEQ ID NO: 133298 - DNA, 62 bp, Homo sapiens
  chr20:61274239-61274301
  hyper
actgtcggagtggccggggcaggtgacctgggcaggtggcccggagcgcgcgcaggcgcagg

SEQ ID NO: 133299 - DNA, 54 bp, Homo sapiens; identical to SEQ ID NO: 57461
  chr20:61274662-61274716
  hyper

SEQ ID NO: 133300 - DNA, 912 bp, Homo sapiens
  chr20:61339789-61340701
  hyper
gttcccttcctagccggtgcgagaaattgcggagaacagggaagagggtggcaggaagggtctggtgcacgatacccgccgcgcccgctcggaatcctggttccctggagcgctcaccccagcccgccctgccccggggagcgcgagggggcgacccgccaggctgcacccgggcggggcggggatggcggcgggggctgcctccctcctccgccgccaccccccactgctgggcgcgccgcgcggccgccggctccgtggagacgcgcagagccgggagggcgcgggcgcggcgggaggtgtgcggggctggggtgcgcggagagcgcgagggaggagattctgagcgagggaggggagcgcgcccgggcagcagtgcgtgcgctcctcccggcgccacaagctcgccccgcgcagcccgagccgggctgggcgctgtcctcgggggcctggggaaccgcgcggtttggagatcggaggcacctggaacccgtggcaagcgccgagccgggagacagcccgaggaaccacgggttctggagctaggagccggaagctgggagtccggaggagagcggagcccggagcccggagcccggggcggcgcgtctgggtctggcgcttcccgactggacggcgcgcccgctggtcttcgccacgcgccctcccctgggctcccgttcatcggtccccgcctgagacgcgcccactcctgcccggacttccagccccggaggcgccggacagagccgcggactccagcgcccaccatgcgcctcaacagctccgcgccgggaaccccgggcacgccggccgccgaccccttccagcgggcgcaggccggactggaggaggcgctgctggccccgggcttcggcaacgcttcgggcaacgcgtcggagcgcgtcctgg

SEQ ID NO: 133301 - DNA, 30 bp, Homo sapiens; identical to SEQ ID NO: 57464
  chr20:61427910-61427940
  hyper

SEQ ID NO: 133302 - DNA, 30 bp, Homo sapiens; identical to SEQ ID NO: 13132
  chr20:61435814-61435844
  hyper

SEQ ID NO: 133303 - DNA, 30 bp, Homo sapiens
  chr20:61436794-61436824
  hyper
ggcctgggaggcttcgcgtctgcacctgcg

SEQ ID NO: 133304 - DNA, 531 bp, Homo sapiens; identical to SEQ ID NO: 57466
  chr20:61447608-61448139
  hyper

SEQ ID NO: 133305 - DNA, 30 bp, Homo sapiens; identical to SEQ ID NO: 57467
  chr20:61448519-61448549
  hyper

SEQ ID NO: 133306 - DNA, 639 bp, Homo sapiens; identical to SEQ ID NO: 57468
  chr20:61492376-61493015
  hyper

SEQ ID NO: 133307 - DNA, 64 bp, Homo sapiens; identical to SEQ ID NO: 13135
  chr20:61511890-61511954
  hyper

SEQ ID NO: 133308 - DNA, 149 bp, Homo sapiens
  chr20:61557989-61558138
  hyper
acctgcactccggacgcgcccttcgggtctgcactgacaatgacttgcttgcatcctttgtggacaccttatttccccgactccaagagtgaaagctggggcagtgcccttgcggggatccctcggaacagcccgggcagggcgcaggc

SEQ ID NO: 133309 - DNA, 289 bp, Homo sapiens; identical to SEQ ID NO: 57470
  chr20:61560171-61560460
  hyper

SEQ ID NO: 133310 - DNA, 439 bp, Homo sapiens; identical to SEQ ID NO: 57471
  chr20:61560528-61560967
  hyper

SEQ ID NO: 133311 - DNA, 159 bp, Homo sapiens
  chr20:61569191-61569350
  hyper
tttccgcgctccaacgcctccgcagcagccatcttgccagagggccgacgccttttgactctggcgccaacccgtagtgcgtggtcgccgcgaggggagttctgcgcaagtacggaagctgaggttccgcgcttccgggaggccgtccgccccgccccc

SEQ ID NO: 133312 - DNA, 30 bp, Homo sapiens; identical to SEQ ID NO: 57472
  chr20:61569739-61569769
  hyper

SEQ ID NO: 133313 - DNA, 450 bp, Homo sapiens; identical to SEQ ID NO: 57473
  chr20:61583881-61584331
  hyper

SEQ ID NO: 133314 - DNA, 465 bp, Homo sapiens; identical to SEQ ID NO: 57474
  chr20:61585208-61585673
  hyper

SEQ ID NO: 133315 - DNA, 14 bp, Homo sapiens
  chr20:61636764-61636778
  hyper
cccggggtcttcct

SEQ ID NO: 133316 - DNA, 215 bp, Homo sapiens
  chr20:61636875-61637090
  hyper
cgtcctcaggaacagagcactgccctgcagtttagcacgaagggccggctggagcgggagcgcgaggcccactgcaagaggatcaggagccagtaagtccggcttttcttcgtctccacctttcgtgcgcccggggccaggaccgcctgtccggaatctgaccagtgcccgtcctcgccgtggccctgggaccccgcggtggtcttcttttgggg

SEQ ID NO: 133317 - DNA, 367 bp, Homo sapiens
  chr20:61637281-61637648
  hyper
cgaagtcgggccccctcctcctggtctgcagggtccctccaggcctttcctgtccgggcagagagacagtcacaggggcgatcggaggacgcgtgcgggagggccgggggcccgcgcggtcacggcttctcgtgacagtgtttgcaaagcgcggagggcgtcccggagaaggcggcgcacttgtcagggcagggccccagggcggcgcctgcggagaaggggcacacagtggcctggccgaagggcgtcaagggcgcggcgtttacgggcgcggccaggccctggccctggttgaggaaggccaccaggcgccgcatctcgtccagggcctgcgcctgcatgaggatatagttcttggcgagcagca

SEQ ID NO: 133318 - DNA, 221 bp, Homo sapiens; identical to SEQ ID NO: 13139
  chr20:61637735-61637956
  hyper

SEQ ID NO: 133319 - DNA, 249 bp, Homo sapiens; identical to SEQ ID NO: 13140
  chr20:61638220-61638469
  hyper

SEQ ID NO: 133320 - DNA, 263 bp, Homo sapiens; identical to SEQ ID NO: 13141
  chr20:61638534-61638797
  hyper

SEQ ID NO: 133321 - DNA, 17 bp, Homo sapiens
  chr20:61639020-61639037
  hyper
cgcgtgaggcttggtgg

SEQ ID NO: 133322 - DNA, 30 bp, Homo sapiens; identical to SEQ ID NO: 57479
  chr20:61640342-61640372
  hyper

SEQ ID NO: 133323 - DNA, 31 bp, Homo sapiens; identical to SEQ ID NO: 13142
  chr20:61640692-61640723
  hyper

SEQ ID NO: 133324 - DNA, 146 bp, Homo sapiens; identical to SEQ ID NO: 57481
  chr20:61664529-61664675
  hyper

SEQ ID NO: 133325 - DNA, 14 bp, Homo sapiens
  chr20:61703451-61703465
  hyper
ctccgctccgggct

SEQ ID NO: 133326 - DNA, 921 bp, Homo sapiens
  chr20:61733166-61734087
  hyper
agtatgaatgtgtgtggtaggcgacagctgtgtgtgtacgtccgggtgcgtgtgtgcgtgtgtacatgtgagcgtgtgtgcacgtgagttagagcctgagtgtcccctgcgtgggttagtgtgtgcgcccgcccggtgccctccgtcttgggagtctgggctgctgctccgcgggctctggagccggcgctccccacgagcccggactctccgccgcgcccgggagctgcgcaatcggctgctaagacgccggcgccaccggctgggccctgttctcccctctcttttctacagtcttacccgcagctgacagggttcgaaagagcatgaaacggaggagacgttacagcaacgtgtcagctgaaatgatgggcgtagacgcacgtcagcggcggaaatggtttctatcaaaatgaaagtgtttagagattttcctcaagtttcaaatgaggcgaatcccgttttccgcgatgctgcagcgcgcgggttttaaccgcagggtcacgcggaacgccgcgccgcgcgactgtgcctcggtctctgcgcccggctctccctccggtccgcaagaggaggaaggcccgcggcgtgccgaggtcagcggcgcggagccaccaggcgagacggtcacggacgcctgaaccgaggtcaccgaggccacggggccgggaggccctcagcagagcccgggggctccgcacctcaaggccggccaggaagaaacagcagcaggagcccagggcgccccggggagcccccgacacgcgggccgagcgcccagagcggcccaggccctcgcgaggagaccggcctccccagggcggggcttccgactcgggcgcccgtgagccccggaggcggcgcgaaggggcagagtccgcgtttctaaccagcccccgggtgggcggtggcccgcgcggc

SEQ ID NO: 133327 - DNA, 507 bp, Homo sapiens
  chr20:61734101-61734608
  hyper
cgccgtgggctggggccggcctgggctttcagggcgagggctttccgcgccggccccagcccacccggccccgctgcgcgcccctcacgctgcagcctgggaacctgggccgggagctgcgggccgctccggggaagcgggcctgacctcccctccccaccgccgcccctgcggtgagatcctgcctgccggggcgcaggggcccgcggttgggctccgggagacggaagaggccccacagctcgggccccacgcagtggacgctgccacttaattttggcgtaattgatgtcaaggcgggtgcccgggcccccagtgaaatgcctcatgaactcgctgcgaggaacggcgctccacgcggtgcacggtggccaatcagagctgccgcttctgatggaggctgagccggctggggaggcgtcttggccaagaaccagccccagcctcgctcagggccccaacccgcagaccatgtaattaagctgcgttctgcagccagggcaaggt

SEQ ID NO: 133328 - DNA, 250 bp, Homo sapiens
  chr20:61759827-61760077
  hyper
gtgtcgcgttcccggcgtggccacgccgccacgtattgatctgcccgctgcagacacctggcctattttccaggactctgcaggcaggggcacccttcgccagagtgtgtgcagggcctttctgtagtgccctcccccagaagcacatgggcccgtcggcccccgcgtcctcggacacgcaatgctgtcggtcgttctaaccgggctgtcctgacgggcgcgcagcggcatcccacggcagtgttcacga

SEQ ID NO: 133329 - DNA, 30 bp, Homo sapiens
  chr20:61760516-61760546
  hyper
ccctcggtgcccaggcggtgtcctacctcg

SEQ ID NO: 133330 - DNA, 758 bp, Homo sapiens
  chr20:61806195-61806953
  hyper
cagctgttcccagatgtgggccgcggcctttcctctttctggaggaatgacaggcctcccgcagaggaggagcgggtggtgacgagggagaaggagcggaaagggaggggttctccacgggttctgttgatttgtttaatcccacgctattcggaggctttcacggatggcggacaagagggagggggagggggtgggggtctcggcccgtgtttcctcccctcctcccgctcccgcccccgccggagccacctgacccgtagcgaagttgccggccccgctgcgcgccggcctttgtgcgcaccgaggcggccgccgggaaccgggagcccgagctggcccggcagcgccgccgcccccaccttcgcgccccttttcactcccccactgtccccggagctggcaaataaacaaatccacaaacaaattatccgtgtgctccggagaggcggcggcgtgggcggcggcggagagaaggcgccgggcaaggcgagactaggcccccgcggagcgggggaagcacagaccccagcccgggcccggcagcagtaagttgacttttatgaaacctacgaagctcgcggggccaccgaaaaggtccccaccggagcggactctgcggggcgggcggggcagaggctgcaggcgggctccccttcccgcgcggctcctaccggccggctccgcccccaagccctggacggcccttcccccagcccgcctggctgggggccgctgcacaccgggggtggaagtgg

SEQ ID NO: 133331 - DNA, 30 bp, Homo sapiens
  chr20:61807851-61807881
  hyper
atggttgaggaccggcggagtcggtgcggg

SEQ ID NO: 133332 - DNA, 269 bp, Homo sapiens; identical to SEQ ID NO: 57485
  chr20:61808111-61808380
  hyper

SEQ ID NO: 133333 - DNA, 339 bp, Homo sapiens; identical to SEQ ID NO: 13145
  chr20:61808666-61809005
  hyper

SEQ ID NO: 133334 - DNA, 413 bp, Homo sapiens; identical to SEQ ID NO: 13146
  chr20:61809218-61809631
  hyper

SEQ ID NO: 133335 - DNA, 294 bp, Homo sapiens; identical to SEQ ID NO: 13147
  chr20:61809840-61810134
  hyper

SEQ ID NO: 133336 - DNA, 397 bp, Homo sapiens; identical to SEQ ID NO: 13148
  chr20:61810159-61810556
  hyper

SEQ ID NO: 133337 - DNA, 285 bp, Homo sapiens
  chr20:61810632-61810917
  hyper
cgccggaccgcatcccgcccccaaagccggctctgggctgtgcaggaccaggcacgtgagactccgcagcccagggagaaaatgacaaatccctcccccgccgccatctgcagccgcagtgacacccactcgggtttgctgcaggggttttttttctgtccccggaagccagcgccacctgctgacgcccggcaccgcctctgcgccgcctcccccgcgcccatcccaggccccggctgggctgtgatgccccggtaacagtcagaggacgaccccctccccaaa

SEQ ID NO: 133338 - DNA, 30 bp, Homo sapiens; identical to SEQ ID NO: 57492
  chr20:61846751-61846781
  hyper

SEQ ID NO: 133339 - DNA, 179 bp, Homo sapiens; identical to SEQ ID NO: 57493
  chr20:61847112-61847291
  hyper

SEQ ID NO: 133340 - DNA, 93 bp, Homo sapiens
  chr20:61847572-61847665
  hyper
acttcgcgcctgcgcgctcccgtcttacgggatggatttcgctctcaggtcccagtctcgtgcggcggggcggggaccgcagccggctgggcg

SEQ ID NO: 133341 - DNA, 181 bp, Homo sapiens; identical to SEQ ID NO: 13152
  chr20:61862297-61862478
  hyper

SEQ ID NO: 133342 - DNA, 479 bp, Homo sapiens
  chr20:61884623-61885102
  hyper
tgcaggacctcaggttatctccgcggccccagcgagcctcccaggaaagcgccggaagctccttccttcctgcaggaaggacacgatgcctccgccgtccctaggtccgcccgcaagcctgtgcccctaagccgagcacaggacacccaagctgcacagccacggactccgagggtttcgctgctcaaaactctgaaacagccccttctggcccttctagcttcaagaggaggaggggggcgcgcggtccagctgcgctccgcagcccacaaagcatcgtttcctttttaagacgggagacccagggccaattagcatcgaagcaaagcagcttccccagcctggacaggcgaggcctttgtttagccccctcccccgagggcaccgggctccgggaaagaatccgccccccaggcgtcccagggagcttcggactccggggcagaatggaaacttggccgagggagccccgaccaatc

SEQ ID NO: 133343 - DNA, 355 bp, Homo sapiens; identical to SEQ ID NO: 57497
  chr20:61885195-61885550
  hyper

SEQ ID NO: 133344 - DNA, 426 bp, Homo sapiens; identical to SEQ ID NO: 13154
  chr20:61885777-61886203
  hyper

SEQ ID NO: 133345 - DNA, 107 bp, Homo sapiens
  chr20:61886256-61886363
  hyper
cgaggcgttttctctgagagtctcagagattccttggcttggagaagtcctggacccgggtccagagctcagaggtcccctccacgggcgggcgggccgaggactca

SEQ ID NO: 133346 - DNA, 295 bp, Homo sapiens
  chr20:61903934-61904229
  hyper
tcagcttggttccgcggatgaacggacgcttctcccgcccggcccccaaaagctgccgtcctccgcggccactacgaccagctgcggtccggggcccggggtgggagttggactgcgtggctgcgcgtccccatggcgaccgggcgggtgcgcgcgtcaggggctggggcctgaggcggaagtcccgcccttgccggctcccgtgagaccttgcaaagcgcaacgtagccggaagctggtggcggctggtgggcgaccgggcgcatcctcattgcagtgcggcggccctacctcg

SEQ ID NO: 133347 - DNA, 30 bp, Homo sapiens; identical to SEQ ID NO: 57501
  chr20:61904685-61904715
  hyper

SEQ ID NO: 133348 - DNA, 223 bp, Homo sapiens
  chr20:62102699-62102922
  hyper
cgccccccgccagccctgccccaggaggcagccgttccctgagcctcgcccgggaagaggggacagccccttccaggcccagggctgggggtcccaggtctgccgcagcccctcccccgggcctcgctctgccaaggaggggtcctgagcccgggatgtgcacgggggcggccggcggctgcagagatgggacagcgcaggagctgagcgcaggagctgaggg

SEQ ID NO: 133349 - DNA, 484 bp, Homo sapiens
  chr20:62103141-62103625
  hyper
ggtccccgagagtcccggagagtccagacccagcgctgccgccgtccctccccggccggccctttgttcggcgcagaggccgcggggaggggcctcccaggctgaggagggggctggggcggccgcacgtctctgtcctgcgggcctggagcccccaccccgacctgagcggccccgaccccggaatccttcctgcccgcgcgctgtacaatcgctctccggtctcggcccagcactcccgccggggagcgccggccccggacccagacccaggggcagggagccaaacccgccgcagccagcctggccggggtcgccgatggggtcgccgatgggggtcgccatgggggtcgccacgggggccccgccggccactcacacgtaggcgtggtagatgaacgcccagccgcgcggccgctccagcacgttgtagaggaaattctgcagcttgcggtagaaggcgttgcgcttggggggcttcccg

SEQ ID NO: 133350 - DNA, 312 bp, Homo sapiens
  chr20:62103667-62103979
  hyper
cgcttgggggcctcggagccggcgatcagcagcgccccgtcccgggtggagtcgggcgcgccggggtccagccccacgaagcccaccttcagcttcttctccccgctcgggccggggtatacgccgccgttgcgcgacttctgcaccatggtgcctggcgggaggcgccccgggtcgggctcaggctcagcgggggcggagcgcggggggcggcgcgggccccagcccaggccccccggccgggagccgcatggccgaggcggcggttccgcactcctgccgggcttgggccgcgcgcggagacgctgcggc

SEQ ID NO: 133351 - DNA, 318 bp, Homo sapiens; identical to SEQ ID NO: 57504
  chr20:62119300-62119618
  hyper

SEQ ID NO: 133352 - DNA, 184 bp, Homo sapiens; identical to SEQ ID NO: 13157
  chr20:62119922-62120106
  hyper

SEQ ID NO: 133353 - DNA, 253 bp, Homo sapiens; identical to SEQ ID NO: 57506
  chr20:62127502-62127755
  hyper

SEQ ID NO: 133354 - DNA, 30 bp, Homo sapiens
  chr20:62130485-62130515
  hyper
attgacggtggcggcgcagtgcaccgcgcc

SEQ ID NO: 133355 - DNA, 43 bp, Homo sapiens; identical to SEQ ID NO: 57507
  chr20:62152086-62152129
  hyper

SEQ ID NO: 133356 - DNA, 30 bp, Homo sapiens
  chr20:62152617-62152647
  hyper
cctccacccccatgcgcagatcccaccagc

SEQ ID NO: 133357 - DNA, 415 bp, Homo sapiens; identical to SEQ ID NO: 57508
  chr20:62185030-62185445
  hyper

SEQ ID NO: 133358 - DNA, 394 bp, Homo sapiens; identical to SEQ ID NO: 57509
  chr20:62273399-62273793
  hyper

SEQ ID NO: 133359 - DNA, 1166 bp, Homo sapiens
  chr20:62283518-62284684
  hyper
tggggcctgaggggcggggtcaggtcgggcacgcgtgggtgggcggagttctgcgccccgggccaaggcgcccgagttgaaccagtcagctcgggagagggaccgcggcgacctgtcccgggggcgtaagaaaaggtgggagggagtgcggctcgtgaacgggggcggcgatgggaaggaggtgcggcccttcgtcctgtcctcccaaacgtcgagtgaaaaacgaagcgggttctgcggcctcgcggcggagcagagcgtttcgggaagggcgggcccagcgtcctcgcgcccgaggtcgcccggcagctcccctgcgtccagaatccgccccccgcccgggcctgcgcccgcccctccgcctgagctccgcgcgggacgggccgggaggccggggtgggcgctaccttcgaaggcggtgggtccgccccgcgggaggtggaggggcgggaggggcggagccctctggtctccggagggtttggggatcgcagtcgcccctcccccatccagaccccgcggcgcaaagggcagtggcttttctggccagagcaggtggcgcgggcgtcgcaaagggtggtccccgaggccgcagcggtgtggggggagggcgcggtccccctcactccgggctccgccgtgtctggcccgcccccctccttcagcgccccctccagcccctgtgctgcactggcgcggggagcgccgggttcccggctggggctttggcagagggtcccaccctctccccgcctccccacgaaggctctggcggacccagatctcgggtcgccggacgccccagggaccccgcccgcacatcgcgagcgcgcccacccggtcgcgagcccacgcccgggtctgggagccaccctgcggcagtcgcgccctgcgtggcacgctgctcccccaggggcgaggcgcccccgcccgacgtcccggtcccgagcgctccccggcgcggcgcctcgcagcccagcgccccaccagccccgccggcgccgcagaccccagcctcgggcgggtcgggcccaggcttgcaacgcgcagggtaggagaagggaaattggcgtccgctgccggccgctgccccaggcgaggccagacgaggcctctgctcagatcccgccgccccacaaagcccgtggccccggagcctaccggaa

SEQ ID NO: 133360 - DNA, 30 bp, Homo sapiens; identical to SEQ ID NO: 57511
  chr20:62289531-62289561
  hyper

SEQ ID NO: 133361 - DNA, 210 bp, Homo sapiens
  chr20:62289787-62289997
  hyper
tctggaaggttcgccgcggagacaagtgagcagtgagtcgcagtgaccctacaagtggttcttttacccgagcggctcgtaggcgcgttgcggtttttcgaaactacagctcccggcaggccccaagccgccctcggggccgcgggtcggcggattggccgcgctgcattttgggacctgtagtttcctgcgctcgtggcgctggcgccg

SEQ ID NO: 133362 - DNA, 30 bp, Homo sapiens
  chr20:62290380-62290410
  hyper
tttccagagaaggacggagttgtggggcgg

SEQ ID NO: 133363 - DNA, 501 bp, Homo sapiens
  chr20:62368771-62369272
  hyper
agctggaacgggagacgcaggagccccgcagccgcgggaggtgcagatttggggctgccaggtggcgccaggtccccttggccagcccccagcgcccctttcttctgtccccagggcctcggcttcacaggatggggctgccagtgtcctgggcccctcctgccctctgggttctagggtgctgcgccctgctcctctcgctgtgggcgctgtgcacagcctgccgcaggtaggtccctcagccgcgttctgtctggggcctcgctgcggctgccattcacagcccagcgcgggaaggggctggaggcaggtccgcgcacccagctcggcacgcgcgcctgcaccgggccttggacccgaggctgacgaccccgccccccgccccccacctctacccccaaggcccgaggacgctgtagcccccaggaagagggcgcggaggcagcgggcgaggctgcagggcagtgcgacggcggcggaagcggtgagtgccaggctgtc

SEQ ID NO: 133364 - DNA, 41 bp, Homo sapiens
  chr20:62370781-62370822
  hyper
gctgccgggaagcccgccaagcaatcgcggccccttccccg

SEQ ID NO: 133365 - DNA, 155 bp, Homo sapiens; identical to SEQ ID NO: 57514
  chr20:62371935-62372090
  hyper

SEQ ID NO: 133366 - DNA, 1079 bp, Homo sapiens
  chr20:62383136-62384215
  hyper
catgaagccccgcccccggtgggtctccccatgaagccccgccccccggtgggtctcccatgaagccccgccccccggtgggtctcccggtggagctcggctcctgcaggtccgctccggaacctgctgactctcctgcgattcctaaactggcagcgatgctccagagcctcttccgccccgacagcagccccacctctgcccggagcccggggcgcctccactgcctctcctcacacagctgcccgccgcgagctccccctgcaccctgcgcctcggggtgggcgttccaggactccccgaacccttggggccgccccgctctgggctgcctgtgccccacccgcctcactggttgatctcacccacttgagatgccctcgccaggccttttttggcaaatctgcctccctgttcccaggctgcctttttctattatttcctccccaagcaaatccatccactccacacctgctacctgacaacgacctgccagtgctgagctccagggtgggcgcggtgggtgcagacaggtcggcaggcacaaggacagggttctccctcccgaggcagggcgggggcgggggggcgcagaggtggctgagggttgggggctccaagcagagcgagctgagtttgccgaggcctggctgccttggcggccagcaggtgagcagggtgggccgaagcctctgcaggggccatgtggcccagccacacccaggaggccggggcagagcagacaggggcccggggcggatctccctgccctgctgtcgtcccccctgtgcagagtggacccggtgtggggtccggggcggtctgcgccctcatcaggacccgcctgcccggacatcgtggccacgcgcagcgcgcggcacgcggaccctccccgcactcaccagcgtgtggcgcttcatgtgctcgcgccgcgtgaacttcttcccgcagatctcgcaggggtagggccgctctcccgtgtgcgagcgcatgtgtcgcttgaggatgcactggtgcatggccgagaagctgcagtacggacacttgaacttcttcctgatcaccgtgaactcattcac

SEQ ID NO: 133367 - DNA, 381 bp, Homo sapiens; identical to SEQ ID NO: 57516
  chr20:62384602-62384983
  hyper

SEQ ID NO: 133368 - DNA, 677 bp, Homo sapiens; identical to SEQ ID NO: 57517
  chr20:62461227-62461904
  hyper

SEQ ID NO: 133369 - DNA, 34 bp, Homo sapiens; identical to SEQ ID NO: 13165
  chr20:62463024-62463058
  hyper

SEQ ID NO: 133370 - DNA, 13 bp, Homo sapiens
  chr20:62463386-62463399
  hyper
ctgactaggggca

SEQ ID NO: 133371 - DNA, 177 bp, Homo sapiens
  chr20:62463622-62463799
  hyper
gcattcctggccggcctgcgcaggggtaaaggccacctcgcttcctctccccgggcgcggcgggaagggaggtgagcctgtggccggcagccgcgcgagggagtcgagcccggcccggccaaccaatggggaggcgcccgggccgtccagcctgcctccctgcgggcccagcgcagc

SEQ ID NO: 133372 - DNA, 31 bp, Homo sapiens; identical to SEQ ID NO: 13168
  chr20:62467675-62467706
  hyper

SEQ ID NO: 133373 - DNA, 30 bp, Homo sapiens; identical to SEQ ID NO: 13169
  chr20:62477875-62477905
  hyper

SEQ ID NO: 133374 - DNA, 592 bp, Homo sapiens
  chr20:62495238-62495830
  hyper
agagcaggctaaggccgtggtggtaagggactcgggcctgtgcaagagtaccaggaagacacctgtgggaggaggtggccgggtgaaggaaggggcagtgggaggagcttccatgcctagggaccagtaccaccccaggctggaagcccagagtggagtcctaggacatcagatcctaaagggcttgaataccgtttaaggcttttcttccgggagcaagtaggagccaaagaagggaagttgcgggacttgttttcgtggggccagttgcctggtggttacgcgcctctcctctgaagtcaggcatcctgttccagagtatcctggttgcgcttcaacttgcggagtgacctggggcaagtgactttaacctcagcttcctcatctgtggagtggggagggcgcagcgctggtcgccctgaacaggaagtgagacaacctcggggtgcacacgcgcaggcccgagccgcagggtccacgcccgaggcgaggcggcagcggcgcctgcagggcgaggggacgaatcgcgatctttttcagagtaacccgcgtacaataaaaagtccccatgaaaaggacaaactagccaggc

SEQ ID NO: 133375 - DNA, 420 bp, Homo sapiens
  chr20:62496241-62496661
  hyper
gccgccgaggcgcgcgagccccagcactcctaggcagctgcatccgccccggaagatcccctggggccctgcgctggctttccacagcgccatgttggacggtcctcccacttcccaccttcccagtcctcccgctactctgaccgttctacctgtgattctcgctggtggagtcaacctggaatggattcccgccgaaccacgcctccctttcctggttcgcccgcagtttcggcctatcaggttgagtcgggtaaaccaggacgggccaagcggcactctcattggatatcactggtgggggcgggaagaaggcggagcacgtgcccgggcggaagtagccgtcgcatcgcggattacgaaacgccgcggagctgaggcagttccgctggctagtgtgtacgcggcgagcttctcccg

SEQ ID NO: 133376 - DNA, 362 bp, Homo sapiens
  chr20:62525783-62526145
  hyper
cccaggcagcctacgcggggcaggccgtcagtgagtggcggagcgcctgcagttacagggacagggaagggtggccgacgggatgggcaagggcagagggaggtggagtggacgttcgtggtcctgcctctccacgctgctgtttggagatgattccgggagggtgggagggcgctggcgacggcatttcagtggttggacaggaaggaaggaaggacgtcccatctcggcgctccagggttgagcaaatgtcagtcccaggacggtggctccgggtgggggcgggggcgacggtccgcagccgtctcccaccagctccctgttcagttctttgatgagaacgattacgttttctcagtctt

SEQ ID NO: 133377 - DNA, 30 bp, Homo sapiens
  chr20:62588110-62588140
  hyper
atggcccgtccccacgccactcgggaccag

SEQ ID NO: 133378 - DNA, 1009 bp, Homo sapiens; identical to SEQ ID NO: 57524
  chr20:62600639-62601648
  hyper

SEQ ID NO: 133379 - DNA, 239 bp, Homo sapiens
  chr20:62605237-62605476
  hyper
cgtggtcctctgtcacggcagccgcgggaccctcacgcgctgtctgggccgtcccttccagcgtgtcgggcgttgtgtccagcactggggaccgcccacaggcgtgacttgagccctgtttccagcctctgcgcggggttgcccagacgcccctccagggcgtgacgccactgccccctggtggccgcggctgcccagacgccctctcctcgcagacccagcaccgccagcacttggga

SEQ ID NO: 133380 - DNA, 30 bp, Homo sapiens
  chr20:62605874-62605904
  hyper
ggaggcggctagggccgccctcactgtcct

SEQ ID NO: 133381 - DNA, 30 bp, Homo sapiens
  chr20:62610515-62610545
  hyper
ccccaagccaagggcgcgctgacccccaag

SEQ ID NO: 133382 - DNA, 30 bp, Homo sapiens; identical to SEQ ID NO: 57526
  chr20:62611284-62611314
  hyper

SEQ ID NO: 133383 - DNA, 30 bp, Homo sapiens
  chr20:62612690-62612720
  hyper
gaggggcggggacccggctacaggagcgca

SEQ ID NO: 133384 - DNA, 197 bp, Homo sapiens
  chr20:62661707-62661904
  hyper
cccctccacctgccccgccatgggtcatgcagagacaacagccttcctagtgctggcttttgattctctccatcccttctccccagcactgggtggcagtggtgcttggtctccagaggtctgggtgccgcccccacaggcttgcctgtaggggcacctcctctcccctgcccgcaggcccccgacagatgagagag

SEQ ID NO: 133385 - DNA, 80 bp, Homo sapiens
  chr20:62669742-62669822
  hyper
ggaccgtggctgtgcgcaccgaggcggtgatgcggcgccactgcaggacgctgcgccaggtgtgcgtccctgagtgcacc

SEQ ID NO: 133386 - DNA, 30 bp, Homo sapiens
  chr20:62673034-62673064
  hyper
agaacatctggaactcgggcaactggctga

SEQ ID NO: 133387 - DNA, 15 bp, Homo sapiens
  chr20:62673410-62673425
  hyper
cgcccagacctggga

SEQ ID NO: 133388 - DNA, 474 bp, Homo sapiens
  chr20:62673631-62674105
  hyper
ctccccaggaaaagacgcagctccgtaaacacagaaacaaccatcgctccctccccgctcttcccctccccattaaaatccggaagagccagcgggaggtcgcacctgctgggggaagtgagtccttgttttgggggaaatgaggaggtcaggcctctgggcgcagggcagagccgcgtgcgctggggaggtgggcagccctggggctggacgcgggttcccgggtcgccttccggcctcgctcccgtcgggaggtcccgacacgggcttcctcgcagcctccccgcctggcccggcccgattttggccgctgcggtcaggggaagaggcggccggggctccccaccaggtgagcaggtcctgcccggcttgaggccaggggtccgggctgcggcccgagataagcgtcgcgcccgccgccgcttcctgcgcttccagcgccgccacttcctgttttctcgcgctggcgggcgg

SEQ ID NO: 133389 - DNA, 337 bp, Homo sapiens
  chr20:62679893-62680230
  hyper
accgccggggtcccgcgacaactcggtgggcgcgtagggcgcgcggaagggccgcagcgcgcagtcctcgggcgccgcgggcggtgggaagaaggcagcctcgccgggctccaggccgtccagaggcgagcgctcgggcgtgggcagccccaggccgtcgaactcggcgcccagcgggggcagctcgcggaaggcgcgagccgagccagacgccgcggggaaaggctcgggcggtggctgcgggggcgctaatcccgggagcaggaggccgggctccagccgccgggccttgcgcgcctgcttcttgcggcgcggccggtacttgtagttggggtgg

SEQ ID NO: 133390 - DNA, 757 bp, Homo sapiens
  chr20:62680421-62681178
  hyper
cgcggcccgggacccctgccccccccgccccaccccggcccgagccccccccgccctctcccccttctctgccgccctcccgccgctcacccagcatcttgctgagcaccgcgttgtgcaggtccgggttctgctgagccagccgcttgcgctcgtcctttgcccacaccatgaaggcgttcatgggccgccggatgcgcgactcgtctgccgcctggcgttccccgcggccggccgggctgaggccatagcgccccggctcggggctgcgcgggggactgcgctgcgggctgggcggcgaggcgggcgcggcgggcgcggcgagggcggcggggccggcggcgaggccgcgcgtgtcagcggcggccccgtgtcccggggcccatgcacagtcgcggcgggcgggcgggtcgtcctgtgcgccgtagccgggcggcgatctctgcattccagctgggcgcggcctgggcggaacggagcgcgggagcgcggcgggcgggcggcgggcactggggagccgggcgcaagggcaggccaggccgggagggcggatggcggtggggacggcggtggcctcgggccgggcgggcgcccagatatagcggctcagggccaatcggcggcggggcgggcgggcgggggcgggtcggggccgcctcctccccgggggctccctttcttctcaggccgggcgggattccgctgaggcctcccccgcgcacagcccccccacctcccccgcgacctctcagaagga

SEQ ID NO: 133391 - DNA, 196 bp, Homo sapiens
  chr20:62694229-62694425
  hyper
cgggacagcaaggcccgaagcaggaggagagaagggagcagattcctgggcctcctggggcccggtcgctccgggatgtctgagctctgggaggggcgtgcccggggcgcctccctcgcggggtattgtgggatcacgagtcactggcgacggtgggtcaggactacacttcccaggaggctgtgcgcgccgcgtg

SEQ ID NO: 133392 - DNA, 770 bp, Homo sapiens
  chr20:62694477-62695247
  hyper
cgcgtggactacgcatcctaggatgccgcgcgcggccgcggggccgagggtttgaaccgggggtctgtcgtccgcggcggggctgcgtcggctgcggcgggtgtgggaggtggcgacggccggggccggggtcctgcccggctgcggaggcgggcgcgacgggcgcgggggtcgctgctcctgaggcgatgatgggcaaggaagaggagattgcgcggatcgcccggaggctggacaagatggtgaccaagaagagcgcggtgaggggcgcgggccgccaggaccccgggaaccccgccccgccgagaccccgtcgagcccgccgacccccgttagggccggaagacgacctgaggggcaggacgagacccctccccggcagagactaaccgggacgcaggggagacccccacccgtggccgagacccctgccccgggccagccctgccgttcactcccgcaaccccggcagaggccgcgatcaggcctggaccttgtcccgggagagccacccgctctggactcagacccctccctcgcccgcagtcacaggctccgcacccttccctgtcccttaactccagacccccagcctggcccgtcgactccttccttggccctgtcccgcctctcggagcccccggggtgttcgggcctcctctgcgggccgcgccagccccttgccttcctccatcccggcctgggcatcctcacaggccgagccccgccccccaactcagccctctcccacgctccgtctcttacagcgt

SEQ ID NO: 133393 - DNA, 30 bp, Homo sapiens
  chr20:62710758-62710788
  hyper
agggactcctgcggcgctctggagggaggc

SEQ ID NO: 133394 - DNA, 1131 bp, Homo sapiens; identical to SEQ ID NO: 57531
  chr20:62714665-62715796
  hyper

SEQ ID NO: 133395 - DNA, 748 bp, Homo sapiens
  chr20:62733381-62734129
  hyper
ggcttttctgagcctcggtttccttccgtgtgcaaaggggaccgcagaaccctctttgtggggttgtgggggaaggctggggcgcccgggagggtcccgggtcgcgtccgacctcaggaaggcggggcttcagcagcggcctcggaccctccctccagggggcgctgtgggctcacgcgggcccagccttgggccccggggcgctgcggcgggaaccgcggtgactagcggggtcttaaagcgggtggcggggccgggctctcctgggaccaggagcccagagcgtggagacgtggcgggctgagccgctcagtgcggcccctgccccgcgcccaccccgccccgtgtcaggaggtccgcggagcgggaggacccgcctcccggggagagctcgcccgcccctccctcccggctggccgcggggcggtctgcagaccctttggccgtgccggatctgcctggtccccggggagaagacgctgaggatcccattgctggtctgtggatggggacaggagacgcccgaggtaagaaggggtccgggttctttggaggaatcctggttggcgccttctctgcagcagagacgcccggctggggccggagggcaaactgggggcagggtgggagacctcggccctgagggctgtaggggctcttgcctgggcgctccttaagctcccccgccccctccgccccccaccccgcggtgctcactctcagtcctgccttgcgcacattcccacgc

SEQ ID NO: 133396 - DNA, 101 bp, Homo sapiens; identical to SEQ ID NO: 57533
  chr20:62734172-62734273
  hyper

SEQ ID NO: 133397 - DNA, 30 bp, Homo sapiens; identical to SEQ ID NO: 57534
  chr20:62948119-62948149
  hyper

SEQ ID NO: 133398 - DNA, 31 bp, Homo sapiens; identical to SEQ ID NO: 13176
  chr21:15270038-15270069
  hyper

SEQ ID NO: 133399 - DNA, 710 bp, Homo sapiens; identical to SEQ ID NO: 13177
  chr21:15588288-15588998
  hyper

SEQ ID NO: 133400 - DNA, 116 bp, Homo sapiens
  chr21:15755437-15755553
  hyper
catcacagtcccgccgaacaggcttgtgatgactgtaccagacgtgaggcaccgcccccactcctcccggcagtcccgcagccccctgggaaatgtagtccgcttgctctgaggca

SEQ ID NO: 133401 - DNA, 221 bp, Homo sapiens; identical to SEQ ID NO: 57538
  chr21:15755916-15756137
  hyper

SEQ ID NO: 133402 - DNA, 209 bp, Homo sapiens
  chr21:16130746-16130955
  hyper
ttctagtttttggaaatctagtctactgttgcttgagcttcttggcaggtcatcagtaccaactagaagcgggtaatagattactagggatgccagcggcatttaagcaggacagttttttactggccctaactgctaatcgccagcagtgctccacagatcctaaaacatcccttttagcctgtttcctaatgcgtctgtaggggagc

SEQ ID NO: 133403 - DNA, 255 bp, Homo sapiens
  chr21:16436423-16436678
  hyper
tcccggacttccaccgggctcaccctaaatgggggccggcccctggctcctggtaaaatgatggctgaggcctcgggtccgtgagcctcgccatcgggaggggaccgcgagtgcgggcagagcggcccggggtcgggtgggggccgggcgagctgtcccttttcctattcactttcccagccgggtatccagcgagcaaggagcagggaggcacccaggcgaaaggcgccgcccaggatccggctggacagcagg

SEQ ID NO: 133404 - DNA, 30 bp, Homo sapiens
  chr21:16437324-16437354
  hyper
aggctgactttgagcgcctcgctcaccgcc

SEQ ID NO: 133405 - DNA, 58 bp, Homo sapiens
  chr21:16437725-16437783
  hyper
gggaccggggaaagcgctcttgggacccaggccgaatgctcccgtttgggcacagcct

SEQ ID NO: 133406 - DNA, 448 bp, Homo sapiens; identical to SEQ ID NO: 57541
  chr21:16438266-16438714
  hyper

SEQ ID NO: 133407 - DNA, 30 bp, Homo sapiens; identical to SEQ ID NO: 13180
  chr21:16488404-16488434
  hyper

SEQ ID NO: 133408 - DNA, 30 bp, Homo sapiens; identical to SEQ ID NO: 57543
  chr21:16520816-16520846
  hyper

SEQ ID NO: 133409 - DNA, 118 bp, Homo sapiens; identical to SEQ ID NO: 57544
  chr21:17101956-17102074
  hyper

SEQ ID NO: 133410 - DNA, 84 bp, Homo sapiens; identical to SEQ ID NO: 57545
  chr21:17102747-17102831
  hyper

SEQ ID NO: 133411 - DNA, 30 bp, Homo sapiens
  chr21:17104748-17104778
  hyper
tgacagatttaaatccgtcaagctagtaac

SEQ ID NO: 133412 - DNA, 1362 bp, Homo sapiens; identical to SEQ ID NO: 57546
  chr21:18885046-18886408
  hyper

SEQ ID NO: 133413 - DNA, 320 bp, Homo sapiens
  chr21:18983991-18984311
  hyper
cccattttaaatatcgcacggtgacgtcatcctgggacctcgtcaccgcggcggctgctcctcaagttctactttgttccacaaggctcctctgctcacggctgcgtggataaaacccaaagggaatccagaatcaagctcggcctcgcaggagtttataacttttgtacttttccctcccttgtaacgaaaagctaatcgcaaacgtttctaggaacacatttttctcctgatagacgttcccaaggtggagggcgcgagaagactggcccgtggggtgaggagccccggcccgacctcagcggcgccacaaagccatg

SEQ ID NO: 133414 - DNA, 31 bp, Homo sapiens; identical to SEQ ID NO: 13184
  chr21:18985139-18985170
  hyper

SEQ ID NO: 133415 - DNA, 283 bp, Homo sapiens
  chr21:18985372-18985655
  hyper
cgggcctagccgcacgggaggcgacacaccctcgccctaccctgagcctggcgcagaccctcgaccgcgacggcgcggtccgcagaaccgcgggcttccctccccggcaaaaagcggcgctgaaggcctgtgggacccccgcccggccgccctacgtgcgtcagcgccttcgggggtcgcgcgggcttggtcctttcggctgtctcggcctttttgtttccccctcaggtctctccacgctgcacttgacaccctcagggcggaatggcgagttctagaccca

SEQ ID NO: 133416 - DNA, 331 bp, Homo sapiens
  chr21:22369893-22370224
  hyper
tccagtgtctctcccgtaaggtgccgctcccaacagcaatgggtcgagatgtagaggaaacactctgtacgttatttttccgcccaccctttagcgcctgaggagacagacagtgtagactttagggtacaattgcttcccctctgtcgcggcggggtggggagcgtgggaaggggacagccgcgcaaggggccagcctgctccaggtttgagcgagagagggagaaggaggtccacggagagacaagaatctccctcctcccacgcccaaaaggaataagctgcggggcacaccgcccgcctccagatcccccattcacgttgagccggg

SEQ ID NO: 133417 - DNA, 239 bp, Homo sapiens
  chr21:22370236-22370475
  hyper
cggtcgcctgcagtatcagtatcagcatcagcatcagcatcagcatctgcatgagcatcagctcagctcagctcagctcagcatcagctcagctgtcctgaggcagccggcggctgtgaaggagctccaggctgcccccatccccacgcccttctcggctcagggcgtgcatgaacctgcggatggccggcgggcgagtggcgccttcgcgatcgcggccgcccctctaggcggaggca

SEQ ID NO: 133418 - DNA, 479 bp, Homo sapiens
  chr21:22370552-22371031
  hyper
cgtgcagcgcggagggatacgcctcggccgcacctcccctcgccgcgcccccgcccccgccgccctccccgcccggctctgctgccgccgcggcggccgctgctgctgctgcttctgccgccgctgccgccgccgctgcctggatatagtgcggcaagagcggagcttgcagtcactttgcgaggaggagcgcgcgggctgcgggcggctggggcaccgcgggagcggcggcggcggctctagcagaggcggccggggcagcgaaaggttctctctccagggctggacttaataactttgaaactgtccaccggtgtcacgtcctgaacatgagcctcctcctctccttctacctgctggggttgcttgtcagtagcgggcaaggtaggagtgtggcgctttattgcatttactttccctcccccttccacccggccaagagaggcaaagagggaggcgcaggaagaatgaaatgaaag

SEQ ID NO: 133419 - DNA, 630 bp, Homo sapiens; identical to SEQ ID NO: 57552
  chr21:26934225-26934855
  hyper

SEQ ID NO: 133420 - DNA, 30 bp, Homo sapiens; identical to SEQ ID NO: 57553
  chr21:26979835-26979865
  hyper

SEQ ID NO: 133421 - DNA, 30 bp, Homo sapiens
  chr21:26980169-26980199
  hyper
tatggttttcttggcgggggcgggggtggg

SEQ ID NO: 133422 - DNA, 706 bp, Homo sapiens; identical to SEQ ID NO: 57554
  chr21:27011414-27012120
  hyper

SEQ ID NO: 133423 - DNA, 744 bp, Homo sapiens
  chr21:27012148-27012892
  hyper
cgccaccgcctcctcctgctgctgctgcgctacctggtggtcgccctgggctgtaagttgctcgggttcctctacccttcctgcctggaccagcctgcccccaccctccagccccccacggggcgctggctgacagtgtctgggcggctctgggccgaggtcgccgcggggcgtctgaccttgcgcccaggcgagcgggaaacccagggtgcccgcgagcggacgctgggagcaagggagcgcgaggtcgtgggtttcttgtgaattgcgtctgattttgtcagttctagatacagaaaattaagggttcccactagcaggttctcatctgtttgcaaagttggggtaagttttcagacagagggacgtgattcgaatgcaaaactcactacccactggtaagatgctaagaccccaagaaagatggcatcactgggaggcgggcgccggccacactttgagtccccggggagggggcagcgtccgcgtggtctgggctctgtagcgtcccagctgagccggcgatatgcagcgcacttgtggggcggaggtggagggaattcgtggctgctgagccagaattacttttatcctctccacctgcacatctacattcacttagagaagtctggtctggggactctagccagctgctctgtcctcaggggacatccaacgggacgattgttagaaagattcagaagccacatgatccagtagctggggagacgtcccaaagccaat

SEQ ID NO: 133424 - DNA, 30 bp, Homo sapiens; identical to SEQ ID NO: 57556
  chr21:27107963-27107993
  hyper

SEQ ID NO: 133425 - DNA, 30 bp, Homo sapiens
  chr21:27108195-27108225
  hyper
cctcctcgcccgtccgcactcctcagcagt

SEQ ID NO: 133426 - DNA, 30 bp, Homo sapiens
  chr21:27108673-27108703
  hyper
aattgtagaacgaggcggtgataacattct

SEQ ID NO: 133427 - DNA, 30 bp, Homo sapiens; identical to SEQ ID NO: 13190
  chr21:27403678-27403708
  hyper

SEQ ID NO: 133428 - DNA, 2071 bp, Homo sapiens
  chr21:27541597-27543668
  hyper
gaggcgccatcttctccgtcttaatcttcactcaattcgatccttttatctgcaccctaaaaaaaagacccttcggaccctccccagcatcctgtgcccccaggggaactaaaccagagtccccagagctgccagggaagaggccgcgccttaatcagacaaacgcctccttggatgcacaggacagagcccgtgcctccccaccatccgccactgccctttccagacgcacatcccactctccgccttatttcctccccgccaaggactttacagcccagcacagaattaagcctcggaggtgatccgagggtgggaagcagaggggccccgaggctccgccagaagccccggcagcgtctctgccccctcccaggcggacgcgcagccccgggaagggagccgggcgggagcctcggtggcgcactgagactaacgcggctcggcccacggcgagggcggggtgtcgcggcttttgttcccgcggaccttctgcctctcagacagagcttagggtgcgagcgaactcccgggacgtccagacttggggaaggcgcggggtggctatgggtctccgacccctcccatttctcgcaagttacacaaaagggagacgcggacatgcacaaagtttgcctgtggaaggcggtgcgcgaccccgacgccggctcgggctagggtcgcacccaggctgccgccgccagcagccgcgaaaagaggttggagcaaggaagggggatgggggtgagagaggaaggtgaaacgaggcggagaacgcagggaaaagcgaggggctcctagcttcctgggctgtcccgactcctcctcctcctccccagggcccaagagaaaggaaagggcaacgattcaagagcgaaggactggctttagggacgctgcgttttcggttttccccacgtgctccttcccccttcccccctgtctgaatgtctctcgcctcccccgacccccgcttccaaggcagggactaagtcggggtctgggctcagggtcgccccctacccttctcgccccgggctggcgcggaaccagggagaccagcgcctcgcccgctccctctcagcgggccggagcgcgactccctggggcagggctgggccgaaagcggggatgcgctggacgtccgcaagcgggggcggagaggagaggggtcccattgacggacccccggcttctctgcattaaagacttgggttaaggtcttggggggtatcgcgtccccaccgtgcagcctccccccgccttccgaggcgcggcacccacctccagcgcccgagccgtccaggcggccagcaggagcagtgccaaaccgggcagcatcgcgaccctgcgcggggcaccgagtgcgctgctgtgcgagtgggatccgccgcgtccttgctctgcccgcgccgccaccgccgccgtctcccggggcccccgcgcacgctcctccgcgtgctctcgcctaccgctgccgaggaaactgacggagcccgagcgcggcggcggggctcagagccaggcgagtcagctgatccggcccaccccgctcggcacccgagagagacccctagcggcgccgccggggaactgcgcccgctcgcgccgggaggggccctcgcgccccgcgcccacaggtgcacgcgcccttggcgccgcctgcaccccacgcgccccctccgctccccggccgacggcccacctgggcttcgtgaacagtgggagggagagtctggggccaggagagggacggtgcaggatcagggaaaggtgagtcctaggacgctgaggctctagaaaagtcgagagcgctcctgctcgtccccgtgagcttgaatcatccgaccccgcaggcctcccgggggtgtcgtataaaggactgctgctagggtgcgtttttatccgcatttcgttttttctctcggtttggagaggtggggcaggcgtttctggaagagaatgagaacgagtgaagcttaaaggaaataggattttctttgcttgttgagacagcaaaacctcattttttaacccccaacgtcaaaagcaggcacgagcaacctggaat

SEQ ID NO: 133429 - DNA, 121 bp, Homo sapiens
  chr21:27945026-27945147
  hyper
tgcgcgggtttctgccgtcgcctcgcggaaaaggcagaagcgtctgcaaaggtccttctgcaaaggtcccggtccgtccagctcaacccacgttagcccggaccgtgacccaagggcagcc

SEQ ID NO: 133430 - DNA, 119 bp, Homo sapiens
  chr21:27945604-27945723
  hyper
cgggcagggggcgggggtggccccgactcctccccaagcccgggttcttccttctaaagagtgactaggggaccaagaaacttttcctaaccccttgctttggcgattgctatggagtt

SEQ ID NO: 133431 - DNA, 745 bp, Homo sapiens
  chr21:28215837-28216582
  hyper
cgtagcaggaaggaccggcagtgactttcaacagtgcttgagagcagaattatggccgcgagagggagtgcaaactgggaggcggggcaaacccgggaaagacctcccaagcaggttctgcgaaggggccccaccgccttcagcccgcctgggtcagccttataagggggaaaggggacagaagtctgcagaacagagatcctagcgtagccgctcagggtaccttcccaggtcaccattgctcctctgccctctccacatccgccctcccgtgagcgcaggatgcacgcacaggcagcggttacaaaactcagcgcaacgttgcaacccgcacaaaaggcgcacacaaaatcattaaaaagaaatacacagagtggaaagaactcgcacaagctccaactcgctaaaggtggaaggagtcaggttacaaactctccctccccggcctaaatgctttgctttagtttgcagaaaatcgtttgtcagtttttttcttggttattcattattcgggcaaatgcaagtatgttttctagctgagttcaccaatccaaacctcaaaccacattcctccactccaggcctccgttctgtccgcggacttatgatcctgcctgccagcaggagtctaccctgaagtcgcgtgggatagataaagtgaggagaggaggatgaatggacagacaaacgagagcaattcttctacctgtgggctgtcctacgccttgcagtgccgggtcctgcg

SEQ ID NO: 133432 - DNA, 1031 bp, Homo sapiens; identical to SEQ ID NO: 13195
  chr21:28216633-28217664
  hyper

SEQ ID NO: 133433 - DNA, 377 bp, Homo sapiens
  chr21:28217711-28218088
  hyper
cgctttccagcgagtgcaagaaccgggcagccgagcggtccttttatagtggaccagtgaaacccccacccccaccccactcctcccctttggcccttttccatcccaaagacgccgcccccggctccgttggtgctaaaccgcgctccgcgctgcgggctcgggagggggagggggcagcctccgcgctggctccacgccactgctcgtcaatctaggggcggaaggggcgctgtgaccagcactttgtactgctggggccgctccagggagaagactctcccttccaccgcttttctccctcgccggtttcctggaccacccttcctccccaccgcccggttgcggtaactcagttaccgcgctgggctgcggtt

SEQ ID NO: 133434 - DNA, 786 bp, Homo sapiens
  chr21:28218368-28219154
  hyper
aggtgacacttcctacgatctggattttaaaatatgtttgcttatgccttcaccctccaccaacccccaccccgcacgccacctcttcaccagagacgactttgtgagggcccggtttcacatttctggaatgggtgatctgggacgcggctcaattccctagagcataaggagggaattgcgctttttcttcttcattcgagaaatgatcggctcccgccagtctgcgtgctttcactcaacagcagctgcaagccctaggccagcgtcgcagaaacggccaggaaccccactttcctacccgggggccagcagcgatcgctggggctagcaagcgtgcagagggggaaagaaggaaatcggcttccttcccggacccctccttcctcttcctaccaggaagggaaaaggctatatccgcgttacgaaagcgaggagaggtccaccaacaggtccttaggaaaaaaaactgagtggctcttctctccaaaaagtgggaggggctcaaggacccagaggaaggacgtgtttcacaggcggaaagccgcggggacaatggcgagagcgaccgccctagccccgggcggacccgcaaccctcacactcgcgcgcccccgcgttagtgctcgaactggtctccgcctttccgccccactcccgtccggtctcttggttggctccaagtagatctgggtcctttcctcgctcctccccagatcttccccacttcagttggccccagccagaagcgtcccttctagttctcccacacgtccctcttacaag

SEQ ID NO: 133435 - DNA, 1513 bp, Homo sapiens
  chr21:28338535-28340048
  hyper
cgggaggctcggctcgctcctgcacctcctccccctgccgccggcggggctgggcggctgctgcagcagtcggaggctgcccggctttatcctgggcaggtgtcgcggcggggccgaccgcggccaggggcaggcggaacgcgcacagcagcagggacgcccacccgagcagcatagtgcgctgcccgcggggaggggctgcgcgactgggactttatgggtatttgttatttgctatgaagttaacggggcgggggatggggacacacacacacttgcttgcaggattgagtcaagtgtcggagggaggggggcccggcagcagcgccagcctgtccgggctgcggtgccagcgtgcgaacttttctttgttgcttgggaaaatgtttggattcgtgctccagaaagaggtggggtggggggggggggaaagaaaagattaaaaaaaaaaagtcggatagtggagattcagcaaatacgggaaaaggaaaaaaacaaaaaccaaaaaaccaccaaatgcaggcacgatcgctgtttcaagaaaagtaaggaaaggtaccgcgcaccgggctggcaactggtgcgcgcagcctcccgcccccgcgctgcgctggacaagccggctgtggaggttccaagctccggggcccacttcctttcttattttgtgggtttccttggctctgctgggaccaggaggaagggaagaaagagaggggaaaaagccgtaaaaattaaaacaaaaatgcaggggggcagcctgaggcgagctggtgaagcggcgtgtctgtgtcccttcggctgcggtctcctcctgcccgccgtcatccccagtcggcagctgcgagcgccgagagcagcgcgagcgctgtgaagatgcgaggaggtggaacaatgaatttatagcggcatgccatcctgcaatggcaatttcaacagttcgtcactgcacgctgcctcttaaagggagagcttcccccaccactcccacccttcccagtccgcgcctaatcagatgggggagggcaaaagaggagggtgatcgaggaaagggagacgaagtaggaggaagggactgggacccggcgaggtggtaggaggggagaggggaaaataaaaagtaatggggcaagaaaaacagatttccttggccacttttaaagccacagcggctccgggtctgtctgatatttcacaaccaattggggttggctaaccttggcttacctcatctcctgaacgggtgttttggttaaagttattgagacgtttcaagtctctccctgcctccttcttgcctgcttttctcgccctcggtgggaagttcctgccgcaagtttttcccctttgcacacccgtgcgctctggcctcgcagaccgtgcaactccatccaccagccagagcttttcagcttcccgtgcgtcccctaaccaccgcgttcccttcgcttcctcccctccgtcccggcacccggtttcctccctccccattctccagcctcttgatgctttg

SEQ ID NO: 133436 - DNA, 121 bp, Homo sapiens
  chr21:28340062-28340183
  hyper
cgggctccgggtgactaacttctcccggccaccagcagagcggctggacagccagagagcccagggcgcttcctggcgcgctgcggtaccccggggcgagaacgcccgccgcttgggaact

SEQ ID NO: 133437 - DNA, 39 bp, Homo sapiens
  chr21:30257746-30257785
  hyper
aggagtggggctggcgtcccgggcgaccagtgtgttgtt

SEQ ID NO: 133438 - DNA, 116 bp, Homo sapiens
  chr21:30365297-30365413
  hyper
tgtccctgaccatccgccaccggagacgtcacagctaaagccacgcctgtctgagtgatgtcattcctggccaataggaagccaagcattggacccgtggcgccaaatcctgtcct

SEQ ID NO: 133439 - DNA, 478 bp, Homo sapiens
  chr21:30374921-30375399
  hyper
taaaaagtccaactccgccccaaagcagcatctggctggcctgcgagatgcccactggggaggcgagtccgcagcttaggactcaagcccggggtcggaagctattgccgaaatccgaaacgcagcgctcgcagctgcagtgacgcgacctgctcataagtccccgtgctcacagcatcccggcaacttacgagctagtgcttccgggtcaccccggcccaggaaggcgcacgcgcgaagcatagcgagcttcactccgcactcttaggctgcgtgtgaggcctgcgagtgctcgggagctgccgcggtcacaagagaaagcctagctgtcaatgacagccccagagcatctgggcgccttgcgatacccgggtgtctgtaggcagccaggagacacttccaagctgatctggaatctttcctcgcccagctctgtccctcgcagggatggcaaaggacattacgacctacatccctt

SEQ ID NO: 133440 - DNA, 189 bp, Homo sapiens
  chr21:30396783-30396972
  hyper
catttatataacttcgtggttatgtcagagacgagaaaacccattgacaaccaaacccctaaacccgaacatccggcgcaagccgcacgcaggcgcagatttactagcgtcagagccgatggtcccgggaggtgggggtggggtggtggtggcctagccacttcccataatgccgcgttccggaagtta

SEQ ID NO: 133441 - DNA, 30 bp, Homo sapiens
  chr21:30397225-30397255
  hyper
actttccggtactgcgatctcattggctgc

SEQ ID NO: 133442 - DNA, 30 bp, Homo sapiens; identical to SEQ ID NO: 57572
  chr21:30446223-30446253
  hyper

SEQ ID NO: 133443 - DNA, 237 bp, Homo sapiens
  chr21:30670773-30671010
  hyper
cacccgggcacgcggcgactcggctgaattagggcgtcctgcagctcccgaggcgaggaggcgcttggcctttccgttccgccctcagaagggagaggagaggtggtcctcgagtgggagtcagttcaggatgcgggctgtgccacgcgcggaggtccggggaccccaccgccgcctcctcgaggcccgccccgccccttacgacccgtccctgcaaccccccgcgtgggcttccgg

SEQ ID NO: 133444 - DNA, 30 bp, Homo sapiens
  chr21:30671680-30671710
  hyper
cgcggctggggccccgtattgtcctccgcc

SEQ ID NO: 133445 - DNA, 30 bp, Homo sapiens; identical to SEQ ID NO: 57573
  chr21:30717721-30717751
  hyper

SEQ ID NO: 133446 - DNA, 247 bp, Homo sapiens; identical to SEQ ID NO: 13205
  chr21:31311386-31311633
  hyper

SEQ ID NO: 133447 - DNA, 219 bp, Homo sapiens; identical to SEQ ID NO: 13206
  chr21:31311700-31311919
  hyper

SEQ ID NO: 133448 - DNA, 358 bp, Homo sapiens; identical to SEQ ID NO: 57576
  chr21:31312079-31312437
  hyper

SEQ ID NO: 133449 - DNA, 161 bp, Homo sapiens
  chr21:31312496-31312657
  hyper
tttctctccctcaactttgcgctctgctgctgggaagtcgatcgagtgttgcattctcaagacagatcaaatctaaactattggtccgagcagagaaagcctctgctgtccgctgtgagtggcaaggaagccttcttggtaatgtccgtgtgcacctgtta

SEQ ID NO: 133450 - DNA, 452 bp, Homo sapiens
  chr21:32716047-32716499
  hyper
gcagcgggacagccccgggcaggacgcatcctgggtgggtgacgtgatcccgcagtctcctccccgaccccatatcccatacaatgatcctcgcttacagaagtcaagggggaaagatgacgctttcaaagcccgaatctctttaccctggagccagaaccagcgtcgccgccgtcccctgcagctcagccggcaacgcgcgccgagcctcggggcgcagcttggagacgcgcttgctcgttctgggaaggggcacgggacgcacggttccccggccccagctgcacagctcagctcggggctctcacctatcctcgttcagagccacattcggctgcctcccctgaccacccgacacaaagagattcgccggtggaaagaatcgatttcaaaattcaagctcaccgctgctcaacaaggcgcgcacgtttctccccgtctggcttcacatg

SEQ ID NO: 133451 - DNA, 89 bp, Homo sapiens; identical to SEQ ID NO: 13211
  chr21:32931770-32931859
  hyper

SEQ ID NO: 133452 - DNA, 179 bp, Homo sapiens; identical to SEQ ID NO: 57580
  chr21:32932325-32932504
  hyper

SEQ ID NO: 133453 - DNA, 112 bp, Homo sapiens
  chr21:33031743-33031855
  hyper
caaccggcgggccacgcccccgtgaaaagaaggttgttttctccacatttcggggttctggacgtttcccggctgcggggcggggggagtctccggcgcacgcggccccttg

SEQ ID NO: 133454 - DNA, 46 bp, Homo sapiens; identical to SEQ ID NO: 13213
  chr21:33058220-33058266
  hyper

SEQ ID NO: 133455 - DNA, 30 bp, Homo sapiens
  chr21:33103706-33103736
  hyper
gggctatgggaggccgcaagggggcgaggg

SEQ ID NO: 133456 - DNA, 30 bp, Homo sapiens
  chr21:33104853-33104883
  hyper
tgcaggccctcgtgcgctctgctggggaaa

SEQ ID NO: 133457 - DNA, 1815 bp, Homo sapiens
  chr21:33244726-33246541
  hyper
gcagaacaaaagcatcgaagagaggcgagcgccggtccacctcctgcaatcacaggcatcatttcaatggaaggcaaagaaggtgtaagctacaagcagaggcagcaaacgccctggttcctacattgctgctgctactattactgctgtggctgcgcctcctccaacacagccaaccaggctgcgtgcgagcccgggcagacgcctggccgcctccccaccctttcttccagccatccatctatccttccacccccggtccagggggccctactgtgtggcggactcagggccgggcacgcaacccgactcacagtccacggagttcgagagccttcccccttccccccgccccgggtgggtgcggccagtgggggatttcaccgccgaaaggtccagaaaacccaagcccagaatccgggcaagaggcgcagccggaggcggcccgacctgggcggcccgggagcgcgcgcctccgaggccgcgcaggttctccctgtctggcgctcaggtggcttctccgtccactccgccgctcccctccccgggccctcccctctccagcgagggtcgagtttgactgtggcgcgcggggaaggaggggctactagggatttgaaagtgcacgggctgcggagtggagctcgcatctgttcccgccgcccgcgagcggattaaatttctgcaaattcaaactgaatggggctttcttctgctgccttccagagggcgccggcagcccgccgcgcgcttctctccggcgggagcggccgcccagcgcacggctaggagcgatcgcgggagcccgacccaagcccgtgcgggccagacggcggcggcgaggcggaggctgcggaggcacccgggctcccggacccaggcacccggaccccgggacccaggcgccgccggaccgcgccccaccccgcgcgcccgagcagggcgactgtcattagcttcctggacgggacccggggcgggatcctggtgtcctgaaaggggcccgggcgaccctaagaggaagaacttttgggggcggggtccccggtcccgcgtcccctgggcagccgctattgtctacgcgcctcgctgggcggcgcggggggcgtgatcgcggcggccccgggctctgggtgcggagacccaggcggggctgggcccagggcggcggcgggagaagccggggaagccgaagagcctggggaggaggagctgcgagcgcgggagacgagcaggagccgcgcgggccgcggcgagcgcgatgccggcggcggcgggggacgggctcctgggggagccggcggcgcctgggggcggcggcggcgcggaggacgcggccaggcccgcggcggcctgcgagggaagtttcctgcctgcctgggtgagcggcgtgccccgcgagcggctccgcgacttccagcaccacaagcgcgtgggcaactacctcatcggcagcaggaagctgggcgagggctcctttgccaaggtgcgcgaggggctgcacgtgctgaccggggagaaggtgagtctcccgggcgccgtggggctggggcacaggggcgggagtcggcggccaggaccccgcggggagcactgcactgggagtcccagtgtgcagtcccgggccaagcgccttccccctccgcccggctttcctgttgggttaaaacgcgcgctcagcatctcgcagcctttcccgaaggcggcctgcggtccgctgcccgggggttgggggcttgggaggggacggccttgccccgggaagcgtcccgcgcggccgttctgctcgtggaagggcgccgcctggcgacacta

SEQ ID NO: 133458 - DNA, 50 bp, Homo sapiens
  chr21:33651477-33651527
  hyper
cggccttggccaagcgtgatagtcactgcgcctgcgtcaggttttccagc

SEQ ID NO: 133459 - DNA, 1434 bp, Homo sapiens
  chr21:33783940-33785374
  hyper
cagtgcgtccggccccgccctgggcctcattatctacgtttccgcgtcacgcccgccgcgaacttggcaggccctcccgccgggttcgggaacactgtgtgcctagcgcccgccctcctcccttccgccggccccgcgcgatccatagggtttgggtcgctgggcgccaggtacccgcacccggcaagcagccacggagcccctcgcgcacttgtcctcgatacccttgagttggggctacgcaggccactcctaggccactggctgggcgtccgaacgtgggtcaccccgcgcacagtctagaggttcagaaagatgctgtggcccactttaaaacaaagcccaattattagcgctcggcggctgtttgcgccggtgcagtgtcagatcccccagcgctgcggacaaccagcacccaaaggaagccgagctggagctaaagatcccggctccggagccatctgaccggttttgagacctccagctcgtcgccgtcctggctgcgagagcttgggcacggcgccggggctcagtctcctcttctgtggaatggcgataactgtatgtgccgggtgactgcacgtggcgcgcggcgggtggcggggatggcagcggtgcgatcccacgcctccaggaccccaccttcctgcggcccccgatcggccccgccccgggggcgccccagctgcacgcgcggcgctggctccaaagtgcgtcacgggcaccggccgcgctccttctgccgccagggcgaggctggcacccggccagcgcgggcagggccacgggtgcccggctgtttcccgggtgtggaaggcgctcaaggtgcgcggcccggggcgcgctactgggggcgccctccgcggtgggcagcgcgccagggatcggcctgggcagccgcggggcgcgcgaaggctgcgctttccctacggcccccctcgcttcctccggcacggcggcaacggagatttcctctcggggaaactacgcggatccttttcggggatcctcgccccgccccagttctccgccccctcccctttgctggggcgcctgggctggcccgcgcaggggaggaggctctggcagcctgggcagggaggcggcggggggccgcggagccgctggccatcgattctccccgccatgtgacgccgtccttagccctgcgacccccagcgcgtcccgggcctgcgcctccgccccgccgcgcagcgcacgatgcttctgccgggacgcgcacgccaaccgccgacgccccagcccgtgcagcatcccggcctccgccggcaggtagagccgccggggcagctcctgcgcctcttctactgcactgtcctggtctgctccaaagagatctcagcgctcaccgacttctctggtaagagcgccctccctggctgtgtgcccccggcaccgcggagcgcccaggtg

SEQ ID NO: 133460 - DNA, 140 bp, Homo sapiens
  chr21:33942017-33942157
  hyper
ggtccagggactgccgcgctagggacggcacagctgaactgtgcaggcagcgaaggggcctcacggggaccgctcagctccctgagggcgcagccccccctggtcgggggggaataaacttccgcggttttcagtgaccc

SEQ ID NO: 133461 - DNA, 111 bp, Homo sapiens
  chr21:33984699-33984810
  hyper
gtgagcgggggaaacggcactcgctcccggaagtggatgttgccaagagcaacagtgaagcagagttaaagagccgccagctcaagctcagaacccgagtgggggaggctg

SEQ ID NO: 133462 - DNA, 52 bp, Homo sapiens; identical to SEQ ID NO: 13216
  chr21:34100891-34100943
  hyper

SEQ ID NO: 133463 - DNA, 30 bp, Homo sapiens; identical to SEQ ID NO: 13217
  chr21:34304880-34304910
  hyper

SEQ ID NO: 133464 - DNA, 14 bp, Homo sapiens
  chr21:34392153-34392167
  hyper
actcaaaaccgagt

SEQ ID NO: 133465 - DNA, 198 bp, Homo sapiens; identical to SEQ ID NO: 57589
  chr21:34392205-34392403
  hyper

SEQ ID NO: 133466 - DNA, 638 bp, Homo sapiens; identical to SEQ ID NO: 57590
  chr21:34392436-34393074
  hyper

SEQ ID NO: 133467 - DNA, 1396 bp, Homo sapiens
  chr21:34395049-34396445
  hyper
agcacatgtttggtagccaaacgctgtcattcacgaccaggagcgatggctgcaatgcctttttctttgctttgctttccggtgccgggagccttgcctcccgccgccacccctggtcagctctgcgcaagaacgtcgttctgtttggcagccaggccgagacgcagcctgaatgtgagcaggaactcggagaagggaagggagagaatcagaaagaaggcccgggagggacccgggaagcagtgggaggtctgcgccctggagccccgcgagagcccgccggtttggcacgggctcctcccgggccgcccggcggtccaacaaaggccggccccgacacgcacccggtcttttgtgggagagaaacacaaagaagagggaaaaacacggaggaggccaacagcaccaggacgcgggggccaaccaggaactcccggagccggggcccattagcctctgcaaatgagcactccattccccaggaaggggccccagctgcgcgcgctggtgggaaccgcagtgcctgggacccgcccaggtcgcccaccccgggcgccgggcgcaggacccggacaagtcctggggacgcctccaggacgcaccagggcaagcttgggcaccgggatctaatttctagttattcctgggacggggtggggaggcataggagacacaccgagaggtactcagcatccgattggcaccagggccaagggagcccaggggcgacacagacctccccgacctcccaagctactccggcgacgggaggatgttgagggaagcctgccaggtgaagaaggggccagcagcagcacagagcttccgactttgccttccaggctctagactcgcgccatgccaagacgggcccctcgactttcacccctgactcccaactccagccactggaccgagcgcgcaaagaacctgagaccgcttgctctcaccgccgcaagtcggtcgcaggacagacaccagtgggcagcaacaaaaaaagaaaccgggttccgggacacgtgccggcggctggactaacctcagcggctgcaaccaaggagcgcgcacgttgcgcctgctggtgtttattagctacactggcaggcgcacaactccgcgccccgactggtggccccacagcgcgcaccacacatggcctcgctgctgttggcggggtaggcccgaaggaggcatctacaaatgcccgagccctttctgatccccacccccccgctccctgcgtcgtccgagtgacagattctactaattgaacggttatgggtcatccttgtaaccgttggacgacataacaccacgcttcagttcttcatgttttaaatacatatttaacggatggctgcagagccagctgggaaacacgcggattgaaaaataa

SEQ ID NO: 133468 - DNA, 40 bp, Homo sapiens
  chr21:34396693-34396733
  hyper
ctaggagactgtgtgcgtgtgtgcccgcgcgtgcgctcac

SEQ ID NO: 133469 - DNA, 232 bp, Homo sapiens
  chr21:34397566-34397798
  hyper
gccatctcctagacgcgcgagtagagcaccaagatagtggggactttgtgcctgggcatcgtttacatttggggcgccaaatgcccacgtgttgatgaaaccagtgagatgggaacaggcggcgggaaaccagacagaggaagagctagggaggagaccccagccccggatcctgggtcgccagggttttccgcgcgcatcccaaaaggtgcggctgcgtggggcatcaggt

SEQ ID NO: 133470 - DNA, 1226 bp, Homo sapiens
  chr21:34398015-34399241
  hyper
cgcccattggttgtgcgcagggaggaggcgtgtgcccggcctggcgagtttcattgagcggaattagcccggatgacatcagcttcccagccccccggcgggcccagctcattggcgaggcagcccctccaggacacgcacattgttccccgcccccgcccccgccaccgctgccgccgtcgccgctgccaccgggctataaaaaccggccgagcccctaaaggtgcggatgcttattatagatcgacgcgacaccagcgcccggtgccaggttctcccctgaggcttttcggagcgagctcctcaaatcgcatccagagtaagtgtccccgccccacagcagccgcagcctagatcccagggacagactctcctcaactcggctgtgacccagaatgctccgatacagggggtctggatccctactctgcgggccatttctccagagcgactttgctcttctgtcctccccacactcaccgctgcatctccctcaccaaaagcgagaagtcggagcgacaacagctctttctgcccaagccccagtcagctggtgagctccccgtggtctccagatgcagcacatggactctgggccccgcgccggctctgggtgcatgtgcgtgtgcgtgtgtttgctgcgtggtgtcgatggagataaggtggatccgtttgaggaaccaaatcattagttctctatctagatctccattctccccaaagaaaggccctcacttcccactcgtttattccagcccgggggctcagttttcccacacctaactgaaagcccgaagcctctagaatgccacccgcaccccgagggtcaccaacgctccctgaaataacctgttgcatgagagcagaggggagatagagagagcttaattataggtacccgcgtgcagctaaaaggagggccagagatagtagcgagggggacgaggagccacgggccacctgtgccgggaccccgcgctgtggtactgcggtgcaggcgggagcagcttttctgtctctcactgactcactctctctctctctccctctctctctctctcattctctctcttttctcctcctctcctggaagttttcgggtccgagggaaggaggaccctgcgaaagctgcgacgactatcttcccctggggccatggactcggacgccagcctggtgtccagccgcccgtcgtcgccagagcccgatgacctttttctgccggc

SEQ ID NO: 133471 - DNA, 663 bp, Homo sapiens
  chr21:34399441-34400104
  hyper
cgtcgtccaccaagaaggacaagaagcaaatgacagagccggagctgcagcagctgcgtctcaagatcaacagccgcgagcgcaagcgcatgcacgacctcaacatcgccatggatggcctccgcgaggtcatgccgtacgcacacggcccttcggtgcgcaagctttccaagatcgccacgctgctgctggcgcgcaactacatcctcatgctcaccaactcgctggaggagatgaagcgactggtgagcgagatctacgggggccaccacgctggcttccacccgtcggcctgcggcggcctggcgcactccgcgcccctgcccgccgccaccgcgcacccggcagcagcagcgcacgccgcacatcaccccgcggtgcaccaccccatcctgccgcccgccgccgcagcggctgctgccgccgctgcagccgcggctgtgtccagcgcctctctgcccggatccgggctgccgtcggtcggctccatccgtccaccgcacggcctactcaagtctccgtctgctgccgcggccgccccgctggggggcgggggcggcggcagtggggcgagcgggggcttccagcactggggcggcatgccctgcccctgcagcatgtgccaggtgccgccgccgcaccaccacgtgtcggctatgggcg

SEQ ID NO: 133472 - DNA, 500 bp, Homo sapiens
  chr21:34400231-34400731
  hyper
cgcgaggaggggcgcaggaccatggactgggggtggggcatggtggggattccagcatctgcgaacccaagcaatgggggcgcccacagagcagtggggagtgaggggatgttctctccgggacctgatcgagcgctgtctggctttaacctgagctggtccagtagacatcgttttatgaaaaggtaccgctgtgtgcattcctcactagaactcatccgacccccgacccccacctccgggaaaagattctaaaaacttctttccctgagagcgtggcctgacttgcagactcggcttgggcagcacttcggggggggagggggtgttatgggagggggacacattggggccttgctcctcttcctcctttcttggcgggtgggagactccgggtagccgcactgcagaagcaacagcccgaccgcgccctccagggtcgtccctggcccaaggccaggggccacaagttagttggaagccggcgttcggtatcagaa

SEQ ID NO: 133473 - DNA, 384 bp, Homo sapiens
  chr21:34401197-34401581
  hyper
catcggagtctaagccggctttcctctattttggtttatttttgccacgtttaacacaaatggtaaactcctccacgtgcttcctgcgttccgtgcaagccgcctcggcgctgcctgcgttgcaaactgggctttgtagcgtctgccgtgtaacacccttcctctgatcgcaccgcccctcgcagagagtgtatcatctgttttatttttgtaaaaacaaagtgctaaataatatttattacttgtttggttgcaaaaacggaataaatgactgagtgttgagattttaaataaaatttaaagtaaagtcgggggatttccatccgtgtgccaccccgaaaaggggttcaggacgcgataccttgggaccggatttggggatcg

SEQ ID NO: 133474 - DNA, 30 bp, Homo sapiens
  chr21:34401782-34401812
  hyper
gcagggtgagggctgcgcctttggctgggg

SEQ ID NO: 133475 - DNA, 65 bp, Homo sapiens; identical to SEQ ID NO: 13222
  chr21:34442191-34442256
  hyper

SEQ ID NO: 133476 - DNA, 1768 bp, Homo sapiens; identical to SEQ ID NO: 13223
  chr21:34442594-34444362
  hyper

SEQ ID NO: 133477 - DNA, 58 bp, Homo sapiens
  chr21:34444444-34444502
  hyper
cgggccgggcccttgaccagcgcggcccgcaggtcttccttctcgccgtcttgcagtt

SEQ ID NO: 133478 - DNA, 314 bp, Homo sapiens
  chr21:34481908-34482222
  hyper
aattctttccttcctcggagggcgtttctgataggacaagctgggcccgggcggattctcaccccaccaccccaactccaggcttgggtccatctgccgccagtggtgacttgggtggcgccctccgcagcagacagccgtgcgccctcggcgacccggtccctgcgctccggcgcccgcaggtcctcgctcccggcttctgcacctcccgctccgggacatctggctgagccgcgcctccctctccccgcagcctccgccggccccgcctcccctcaccacccttcccttgtttggggcggtaaggtcagaag

SEQ ID NO: 133479 - DNA, 298 bp, Homo sapiens; identical to SEQ ID NO: 13226
  chr21:34602439-34602737
  hyper

SEQ ID NO: 133480 - DNA, 627 bp, Homo sapiens; identical to SEQ ID NO: 57604
  chr21:34602763-34603390
  hyper

SEQ ID NO: 133481 - DNA, 30 bp, Homo sapiens; identical to SEQ ID NO: 13228
  chr21:34638520-34638550
  hyper

SEQ ID NO: 133482 - DNA, 30 bp, Homo sapiens
  chr21:34638853-34638883
  hyper
accgggaggccccgcgagatgccgcccctg

SEQ ID NO: 133483 - DNA, 30 bp, Homo sapiens
  chr21:34696673-34696703
  hyper
aacgagcgctcgaccgcctctgccccgctc

SEQ ID NO: 133484 - DNA, 30 bp, Homo sapiens
  chr21:34697513-34697543
  hyper
ttgggggcgacagacgcccagtctgggaaa

SEQ ID NO: 133485 - DNA, 687 bp, Homo sapiens
  chr21:34776085-34776772
  hyper
caggtgggaacctgcgggtgccccaggtgggggtcttgcggggtgcccagggctagaggggcccgctgggagcccgcagcggggctgggatgggcggccaggagttccagacaggagctgggcagcagcaggaagacggggggcacccctcctggcgtcctggccgccgggacacccctctccgggagaggacactcggtgcccctccgtgaagccggtaacctcggctgcgccacctcccccacccgcgcgcccgcgccgggaaagccagcgtggccccagtctccgaatttctcggaatgaacaacagcaaattgaatccagggctccggcgggggccgcctttgctggccactggttctgcagcctggcgagactgcgcttagtccccgcctggagtgcctcccgaaggcctggctggaagctagactcagtccctttgtagtagcagcggtggagcagggaccagcgtcttggacgggtgacccagactcaattccgactttggccgagggcatgtttgacactgggtgtgaaatctagacagttcccgcggtcatagagatggggcagcagcattcaggcagggctcagaactgtccgggtcccatcagtgttggggcggaagaggaagagtgtcaactgagccaggcatttatttattttattgttgtttgagacagggtg

SEQ ID NO: 133486 - DNA, 42 bp, Homo sapiens
  chr21:34776996-34777038
  hyper
agcgctgggattacaggcttgaggcaccgtgcccagctgagc

SEQ ID NO: 133487 - DNA, 30 bp, Homo sapiens; identical to SEQ ID NO: 57608
  chr21:34914231-34914261
  hyper

SEQ ID NO: 133488 - DNA, 30 bp, Homo sapiens; identical to SEQ ID NO: 57609
  chr21:34914533-34914563
  hyper

SEQ ID NO: 133489 - DNA, 318 bp, Homo sapiens
  chr21:34915083-34915401
  hyper
actgacaacttatgcggacacggtcgcctcaagagagacggctcctgtaatggcgcctgcgtcagacactaacatggcggacatagtcgtgcgcggcgcaaacgtcagcacctctaccccagccgctcagaaacagcagaggagagcagggccgtgctcactgattggtccctcggtggagcgggccggaccgggcattccctttggagccaatcaggaaggcgagagaccgaattggcccgtgcgcctcctcccgaggcatgctgggagcctggaggactagcgaggaggagttgagagaacggagcggacgccatg

SEQ ID NO: 133490 - DNA, 30 bp, Homo sapiens; identical to SEQ ID NO: 13231
  chr21:34915742-34915772
  hyper

SEQ ID NO: 133491 - DNA, 319 bp, Homo sapiens
  chr21:34960937-34961256
  hyper
aaagggccatgacgcgcggcggctgagggtagccggccgccctacagagacttcccgcgcgcgccgggcccgcccctgacgtggcgcctcgccgagctcccgcccccgacgcggccccgcctccgcccccgccggttccgagcggagcatgcgcagtgggcagcccgcgagacgcagcccgcagcggcgatcccgggtggccgtcaacgcccactgtcccagcggtgaccctgccctggcgcttctgccaggtcctcggccagagtccagtcgccaggttcagcgacgcttctggaaagtatgcgatccagggcgctga

SEQ ID NO: 133492 - DNA, 58 bp, Homo sapiens; identical to SEQ ID NO: 13232
  chr21:35013431-35013489
  hyper

SEQ ID NO: 133493 - DNA, 30 bp, Homo sapiens
  chr21:35013812-35013842
  hyper
tacccacccctcagcggcctcagctaagct

SEQ ID NO: 133494 - DNA, 413 bp, Homo sapiens
  chr21:35014226-35014639
  hyper
ggcgaagttggaatcgcccggatgggttccgttttatgcaaattttagccgaagaccacacccttcctcattccaaccataggcccggccaacccctttgggttgtgcttcgcctttttcctttccacattattctctccttgaaaacctccaataattaagtcaattaagtgcatcctatctagtgtctctcacggcaacgagcagatgcaccgaaatcgtgcaacaaaatctccataaaccacgataggcaacctcagaccataaatctcctgttacgcctacatggggaggagggggagagtgctaatcctgcccccacacagcccctgctgattggctcattcggcttgtcactctgttgtcttacatttctttggctcaccctctttgggttcgcacggtgggcgggg

SEQ ID NO: 133495 - DNA, 30 bp, Homo sapiens; identical to SEQ ID NO: 57615
  chr21:35287858-35287888
  hyper

SEQ ID NO: 133496 - DNA, 30 bp, Homo sapiens; identical to SEQ ID NO: 57616
  chr21:35288171-35288201
  hyper

SEQ ID NO: 133497 - DNA, 30 bp, Homo sapiens
  chr21:35445574-35445604
  hyper
ggcatggcaggaggcggggtaggggcaggc

SEQ ID NO: 133498 - DNA, 51 bp, Homo sapiens
  chr21:35747795-35747846
  hyper
tttccccggcaggacggtagaagtcgtggtttgtgcgcggccaggcgctgg

SEQ ID NO: 133499 - DNA, 248 bp, Homo sapiens; identical to SEQ ID NO: 57618
  chr21:35986731-35986979
  hyper

SEQ ID NO: 133500 - DNA, 118 bp, Homo sapiens
  chr21:35987694-35987812
  hyper
ccgaagcctcagggcggccatgttggttaggggcaaagtcctcgtccccagttccgcttttctgacagctggtgccagctgaaggacgccgggcagagtcctcggctcttgggccctt

SEQ ID NO: 133501 - DNA, 95 bp, Homo sapiens; identical to SEQ ID NO: 57620
  chr21:36041933-36042028
  hyper

SEQ ID NO: 133502 - DNA, 1219 bp, Homo sapiens
  chr21:36042091-36043310
  hyper
cgagaggcaggaggaggcggagcagaggcctgaggtcccggaaggtagcgcgtccggggaggcgggggacagcgtagacgcggagggcccgctgggggacaacatagaagcggagggcccggcgggcgacagcgtagaggcggagggccgggtgggggacagcgtagacgcggaaggtccggcgggggacagcgtagacgcggagggcccgctgggggacaacatacaagccgagggcccggcgggggacagcgtagacgcggagggccgggtgggggacagcgtagacgcggaaggtccggcgggggacagcgtagacgcggagggccgggtgggggacagcgtagaggcgggggacccggcgggggacggcgtagaagcgggggtcccggcgggggacagcgtagaagccgaaggcccggcgggggacagcatggacgccgagggtccggcaggaagggcgcgccgggtctcgggtgagccgcagcaatcgggggacggcagcctctcgccccaggccgaggcaattgaggtcgcagccggggagagtgcggggcgcagccccggtgagctcgcctgggacgcagcggaggaggcggaggtcccgggggtaaaggggtccgaagaagcggcccccggggacgcaagggcagacgctggcgaggacagggtaggggatgggccacagcaggagccgggggaggacgaagagagacgagagcggagcccggaggggccaagggaggaggaagcagcggggggcgaagaggaatcccccgacagcagcccacatggggaggcctccaggggcgccgcggagcctgaggcccagctcagcaaccacctggccgaggagggccccgccgagggtagcggcgaggccgcgcgcgtgaacggccgccgggaggacggagaggcgtccgagccccgggccctggggcaggagcacgacatcaccctcttcgtcaaggtaaagctcgcttccctcaattcttaggacgacccccttccattcgaggtcttggtcatctcagatcccagagggacgcgcagggaggaacccttggtggtatcctgattgtcatcaggcgcttccatgcgcgggcggtaggcgggacagccgggatttcccggagaagagtttccagggcatttgcgggaggactcaatggtttggaagcaaagactttgggggtgggggcgacggggagtgcgatgg

SEQ ID NO: 133503 - DNA, 1782 bp, Homo sapiens; identical to SEQ ID NO: 13236
  chr21:36160096-36161878
  hyper

SEQ ID NO: 133504 - DNA, 3167 bp, Homo sapiens; identical to SEQ ID NO: 57624
  chr21:36161931-36165098
  hyper

SEQ ID NO: 133505 - DNA, 163 bp, Homo sapiens; identical to SEQ ID NO: 13238
  chr21:36171596-36171759
  hyper

SEQ ID NO: 133506 - DNA, 204 bp, Homo sapiens; identical to SEQ ID NO: 13239
  chr21:36206694-36206898
  hyper

SEQ ID NO: 133507 - DNA, 106 bp, Homo sapiens; identical to SEQ ID NO: 13240
  chr21:36231769-36231875
  hyper

SEQ ID NO: 133508 - DNA, 180 bp, Homo sapiens; identical to SEQ ID NO: 13241
  chr21:36252844-36253024
  hyper

SEQ ID NO: 133509 - DNA, 267 bp, Homo sapiens; identical to SEQ ID NO: 13242
  chr21:36259126-36259393
  hyper

SEQ ID NO: 133510 - DNA, 170 bp, Homo sapiens; identical to SEQ ID NO: 13243
  chr21:36260354-36260524
  hyper

SEQ ID NO: 133511 - DNA, 30 bp, Homo sapiens
  chr21:36261018-36261048
  hyper
actgtaagcccggccggaggaattccattc

SEQ ID NO: 133512 - DNA, 396 bp, Homo sapiens; identical to SEQ ID NO: 57631
  chr21:36261484-36261880
  hyper

SEQ ID NO: 133513 - DNA, 30 bp, Homo sapiens
  chr21:36262224-36262254
  hyper
gccccgttccaccgcgggctgctttgtggt

SEQ ID NO: 133514 - DNA, 40 bp, Homo sapiens; identical to SEQ ID NO: 13244
  chr21:36265220-36265260
  hyper

SEQ ID NO: 133515 - DNA, 30 bp, Homo sapiens; identical to SEQ ID NO: 57633
  chr21:36357845-36357875
  hyper

SEQ ID NO: 133516 - DNA, 118 bp, Homo sapiens; identical to SEQ ID NO: 13245
  chr21:36421137-36421255
  hyper

SEQ ID NO: 133517 - DNA, 132 bp, Homo sapiens; identical to SEQ ID NO: 13246
  chr21:36421463-36421595
  hyper

SEQ ID NO: 133518 - DNA, 30 bp, Homo sapiens
  chr21:36772747-36772777
  hyper
aaatattttacacaacgttcagcaataaca

SEQ ID NO: 133519 - DNA, 187 bp, Homo sapiens; identical to SEQ ID NO: 57636
  chr21:37432610-37432797
  hyper

SEQ ID NO: 133520 - DNA, 30 bp, Homo sapiens
  chr21:37508243-37508273
  hyper
acaggattagcgcgcgcttgcccttggtgg

SEQ ID NO: 133521 - DNA, 374 bp, Homo sapiens; identical to SEQ ID NO: 57637
  chr21:37528251-37528625
  hyper

SEQ ID NO: 133522 - DNA, 140 bp, Homo sapiens; identical to SEQ ID NO: 57638
  chr21:37692216-37692356
  hyper

SEQ ID NO: 133523 - DNA, 242 bp, Homo sapiens; identical to SEQ ID NO: 57639
  chr21:37757665-37757907
  hyper

SEQ ID NO: 133524 - DNA, 30 bp, Homo sapiens; identical to SEQ ID NO: 57640
  chr21:38063857-38063887
  hyper

SEQ ID NO: 133525 - DNA, 1233 bp, Homo sapiens; identical to SEQ ID NO: 57641
  chr21:38064289-38065522
  hyper

SEQ ID NO: 133526 - DNA, 399 bp, Homo sapiens
  chr21:38065799-38066198
  hyper
cggggagagttggcgacccgggcccatcaccgccccagtgccaccgccccagtgcctgaccagatggggtgcggtccctacgcccggcgtggccccgccgccgctcagatctgaagtccggctttcgctcgccctgcgcggcggaacctctgacccggagcagctctaggccgtgggcttcgtctcctcctcctggaaggaatgaatgggctccccgacacacacctctcagaaaactcacctttcacgctgaccttcaaaagaaaagaaagaaagaaaaagaaaaatccgctcgaagcgggaaaatgtccacgcccggatttggggtggacacgcgccccggcctggctggaggggccaacccagcggggcccgcctgcccgccggcctttctgtaac

SEQ ID NO: 133527 - DNA, 335 bp, Homo sapiens
  chr21:38066515-38066850
  hyper
agggctgtttcgcgacgtcattaatgaactaatcggttttcagatttcaagacggtgtgtaattgatgtaaccactgaggaatttcagtgcacaccagactaagactcttccagcgcaggggattccagatgcttcttgggccctctggaagccatggggatgtttccagaccgaaaggagggctttgctggggagcagatgtgctgcctctccccgacccaggattttgaggccatgtttccgttaatctggaccgagagccctctgggagagggaggcaggtcgtagggggcgggggtgagggggagcgagatgaggtcgtcgctggacgctg

SEQ ID NO: 133528 - DNA, 30 bp, Homo sapiens
  chr21:38067060-38067090
  hyper
aaagggctcacccctcgaccccaggtaaaa

SEQ ID NO: 133529 - DNA, 30 bp, Homo sapiens; identical to SEQ ID NO: 57643
  chr21:38067726-38067756
  hyper

SEQ ID NO: 133530 - DNA, 920 bp, Homo sapiens
  chr21:38068885-38069805
  hyper
ccttttccgagggcccgaggctccccctccagcagggagagctccgggacggcccccaccaagggttgggtttcttccttcacaattccacagaggcatccctgtccttcctacctgggaaacctcgaggtgcggtgcccgtgtacttctggtactttgcgtggtgccatcagggaccccagagccacagctgcgtgtgtgtgtggatgtgtgtgtgtgtgtgcgcgcgcgcgcgtgtacggcgaaaggatgtgcttgggggagccgagtacacaacgtctgcttgggcagctgctgggcaggcgttgggcctggaggtatctcacacccacgtatcttccagtcttcaaacacggcattgctctgcctcccgtagcgcgcttcgaacctgcctcgcggacacgtgaacagaggctgtccctgggaagataagtgcgctttcccgtaaaatccgggaaatttgccttgaggaaagtttccgttcttgttacttgtcgggtttctcccacttccacttagccatgtttctgcgatctgggtaatccctttcaagcccaggaggaattctcccgggtccataattgagggtcggaagccgtgggggtgagaaacgcattaaatcctcccgaagcccaggaggtgccagagcgggctcagggggccgcctgcggaagctgcggcaggggctgggtccgtagcctctaaccccttggagctccttctcccagaggcccggagccggcagctgtcagcgcagccaggagcgggatcctgggcgcggaggtgggtccgactcgccaggcttgggcattggagacccgcgccgctagcccatggccctctgctcaagccgctgcaacaggaaagcgctcctggatccgaaaccccaaaggaaagcgctgttactctgtgcgtccggc

SEQ ID NO: 133531 - DNA, 325 bp, Homo sapiens
  chr21:38069853-38070178
  hyper
cgatgtggactccgcaaggggctagggacaggcagggggagagcccgggtttgcgcacaccttccagcccctggagggagcctgctcggcttcgaacgccttcgaacttttgaccttcaaaggagtccctggaaaaggtcaggagcgcctgctgcaggcacggttgccgaaggccaggccttcctggcgcaggggagggccaggggagggaagcggatactcagtcgctgtccgacggcgagttttcggagcagcaggctcatgatcccgggccagtggcgagagcagtgacaccgagaacccaaatctccgcgcccccatccgc

SEQ ID NO: 133532 - DNA, 2017 bp, Homo sapiens; identical to SEQ ID NO: 57646
  chr21:38070509-38072526
  hyper

SEQ ID NO: 133533 - DNA, 270 bp, Homo sapiens; identical to SEQ ID NO: 13254
  chr21:38072899-38073169
  hyper

SEQ ID NO: 133534 - DNA, 286 bp, Homo sapiens; identical to SEQ ID NO: 13255
  chr21:38073239-38073525
  hyper

SEQ ID NO: 133535 - DNA, 510 bp, Homo sapiens
  chr21:38073615-38074125
  hyper
cggaaagctcgaccttttgcgttcgcctctgccaagcctgttatttgtgctggccgctgggtctggagctgcgcttctcggcccctccccggtggagcgcagagggctggtctgcaagcgcggcctccagccccgcggctccccggcccaggagccaggcgcgggctgacccgggagcacccggcagcggagggggctggaagcggaccctaggcctctcctgtgccacccggccctaccgcgcggccgcggggcgctctcctctcgggcgcagcggtccttcagcccagggcaggttcctccctttcctactcggaacgtggcaaagataccccagtcccagcccctccagctgagagctgttgcccaaggtcgtcgctacttgtccgctcaatggtgaccccttggcagagaactagggatgattccactccggttgatgttttaggggaaattaaaagaacattcggttttctgagtctccttccggggaggcgtggtggtaactgg

SEQ ID NO: 133536 - DNA, 40 bp, Homo sapiens
  chr21:38076668-38076708
  hyper
tgtttagcagaacaacgtagattttttacaacgctttccc

SEQ ID NO: 133537 - DNA, 37 bp, Homo sapiens
  chr21:38077206-38077243
  hyper
ggggagaacacgagggctccgacgcgggagaaggatt

SEQ ID NO: 133538 - DNA, 71 bp, Homo sapiens; identical to SEQ ID NO: 13257
  chr21:38077617-38077688
  hyper

SEQ ID NO: 133539 - DNA, 71 bp, Homo sapiens
  chr21:38078416-38078487
  hyper
cccaggaccagcttcggaagaggagggatcgcttggaggccgtgcagtgtgaggaacggcaggcagggtgt

SEQ ID NO: 133540 - DNA, 43 bp, Homo sapiens
  chr21:38078752-38078795
  hyper
tgagtgctgggagccgctaaccccgaggcgcctagcacagact

SEQ ID NO: 133541 - DNA, 30 bp, Homo sapiens
  chr21:38079014-38079044
  hyper
gcagcgccacggccccgggtggggtggcct

SEQ ID NO: 133542 - DNA, 30 bp, Homo sapiens
  chr21:38079677-38079707
  hyper
gatgcggggtgagcgcgatttcccgggatt

SEQ ID NO: 133543 - DNA, 54 bp, Homo sapiens; identical to SEQ ID NO: 57655
  chr21:38080008-38080062
  hyper

SEQ ID NO: 133544 - DNA, 212 bp, Homo sapiens; identical to SEQ ID NO: 57656
  chr21:38080174-38080386
  hyper

SEQ ID NO: 133545 - DNA, 642 bp, Homo sapiens; identical to SEQ ID NO: 57657
  chr21:38080550-38081192
  hyper

SEQ ID NO: 133546 - DNA, 170 bp, Homo sapiens
  chr21:38081665-38081835
  hyper
gggggctggggatggggtggtccccactgcggagggatggacgcttagcatgtcggatgcggcctgcggccaaccctaccctaaccctacgtctgcccccacaccccgccgaaggccccaggactccccaggccacctgagacctacgccaggggcgcctcccgagcgtg

SEQ ID NO: 133547 - DNA, 48 bp, Homo sapiens
  chr21:38082591-38082639
  hyper
aggtgcttagcgccccgagcccggggccattcaccctgcaggagctgc

SEQ ID NO: 133548 - DNA, 447 bp, Homo sapiens
  chr21:38082684-38083131
  hyper
cgggtcggccgggtagccctgagcacagctcgccacttccaggtgggctgttggcgctggctggggacacatcccgatctttcaaatgccctttacagagcctcatcaacgacccgattcattcccccctcctgtcatttgtctctgccatcgaaaaatgcctaccgagagctgctctgcatttccgccctctattttgtgttttactttaaaataataataaaaaaaatgttggctgcaggacgccatgacttaggtcagcgagtcagccgctagctctgcatttccaaaaagcagatcttttcacaactctcttgccccaagtgccctggtgtggtttattttttaaaatgcatgcctgcggaagagaagacccggggaatattcgaaaccccgagcttttacaacataaagcgcatggtgtggccgcggcgagtaatggcgctc

SEQ ID NO: 133549 - DNA, 828 bp, Homo sapiens; identical to SEQ ID NO: 57660
  chr21:38119709-38120537
  hyper

SEQ ID NO: 133550 - DNA, 84 bp, Homo sapiens; identical to SEQ ID NO: 13261
  chr21:38120553-38120637
  hyper

SEQ ID NO: 133551 - DNA, 30 bp, Homo sapiens; identical to SEQ ID NO: 13262
  chr21:38338877-38338907
  hyper

SEQ ID NO: 133552 - DNA, 199 bp, Homo sapiens; identical to SEQ ID NO: 57663
  chr21:38362191-38362390
  hyper

SEQ ID NO: 133553 - DNA, 22 bp, Homo sapiens
  chr21:38362412-38362434
  hyper
cggcgaacgcccacccctgtcc

SEQ ID NO: 133554 - DNA, 1005 bp, Homo sapiens; identical to SEQ ID NO: 57665
  chr21:38378576-38379581
  hyper

SEQ ID NO: 133555 - DNA, 322 bp, Homo sapiens
  chr21:38382167-38382489
  hyper
gggggctgtagagcccgccaatcctcacccctagcccggagcccgctctttgcagagcccagctggttgcgcagagcgaccagcgccagtctgtgctctggtactgtgcaccgccctgggttccctgcagtccaccgacgagagctgcccagcgcagggaaggaacgcttcttgctcaacagcgccctcgcccgacaaagcaggacaattccccagctcccaagccctcttctgtatttctcaaaaatgccattggctggagtggcggtgaagaggactaacgcctggtgacctgtaccagggctcccggcaagcaaagcaa

SEQ ID NO: 133556 - DNA, 245 bp, Homo sapiens
  chr21:38445154-38445399
  hyper
cgggcctactaggtcgcggcgcccaggccccgggccctgcccattcgtggagacttctatttctcattcgaggcggggtatgggggggccctcgacctcgggtccttcatacgcccacccaggcccctcccgacacctcggccacctcagcgctgagttctccgcgcaagcgccgactggggagccgcagtggggaagaggaaaacctgagggaaaggcctaggcgcgacggcaacccccaccct

SEQ ID NO: 133557 - DNA, 30 bp, Homo sapiens; identical to SEQ ID NO: 57668
  chr21:38445776-38445806
  hyper

SEQ ID NO: 133558 - DNA, 416 bp, Homo sapiens
  chr21:38446374-38446790
  hyper
gtgtgtgcgtgtcacgactctgttgccacctgttttcgtgtgaactggcagtccagtccagggcctgtccccacggaacggacccaggaggggggtaacctcgccgctcccctcgcccccgcgcctctttctgagcattctctcccacagacgctaatgggaaggggggtggacaggatcgagtctggccagctgctccgcagtgttgacgctgccagtgtggcctcttcagccagcctgttcaggagacagaatagggggatcaaagataaaaaatgaagccgagacgtaggtgaatttgggctggtaccagtgcgccgtgccttttccagtggcgccctggacgccaaaaccccctcagttgcagagacctttcaaaatatatgcactctcctactgggcgatgcggtccttag

SEQ ID NO: 133559 - DNA, 30 bp, Homo sapiens
  chr21:38592588-38592618
  hyper
tcgcgcgtctcaacacgtggtgacgcagct

SEQ ID NO: 133560 - DNA, 945 bp, Homo sapiens; identical to SEQ ID NO: 57669
  chr21:38592843-38593788
  hyper

SEQ ID NO: 133561 - DNA, 208 bp, Homo sapiens; identical to SEQ ID NO: 13265
  chr21:38608355-38608563
  hyper

SEQ ID NO: 133562 - DNA, 29 bp, Homo sapiens
  chr21:38639529-38639558
  hyper
cccacttaccccggcgtgataaactttat

SEQ ID NO: 133563 - DNA, 428 bp, Homo sapiens
  chr21:38639615-38640043
  hyper
cgccacttccggctgcgcgtgaccccagggaaacaaggggcgcctccccgcttcgttctgggccccgcccctttccctctctgccggcagtggctcacgtgacctcgcagcggcgtcgcacacactccctagctccgaggggcgaatgcccacgccttcctccttccggcacaagagccggccttagtgcgggccgaagcgctgtcacggttcaccccgccccctctgggcgtgaaagacggggccaagctagccccaccccttccgtagggacagtcttacgccggaaatgctcctttgctgtccgggttagcggagggagggaggaacggctctccccgcgtgccccgcggctggaggcggagccgagcctgtctgtcggttgcagcctgcgcaggaaggatgacgctcccgtcaggctgtgcggc

SEQ ID NO: 133564 - DNA, 254 bp, Homo sapiens
  chr21:38737937-38738191
  hyper
gagaataaaaatcagcgaaagccaggatattaataaagagttttgatggttaaggacaagcaggcgaattaagactctggaaaccgagaaggtgtatagaaaagaaaaccagagagctggacgacaaggacacagtaacagcacaaggggattcatctaaagggcattccgatggagcaggcaggctgcgccccgaaaggtggggagaggttggaagcagatgggcaggcacaggcgagcgtgcactgcctgaa

SEQ ID NO: 133565 - DNA, 30 bp, Homo sapiens
  chr21:38740652-38740682
  hyper
acccactctcgcttcggagccaccaaagct

SEQ ID NO: 133566 - DNA, 373 bp, Homo sapiens; identical to SEQ ID NO: 57672
  chr21:38936051-38936424
  hyper

SEQ ID NO: 133567 - DNA, 240 bp, Homo sapiens; identical to SEQ ID NO: 57673
  chr21:39047605-39047845
  hyper

SEQ ID NO: 133568 - DNA, 30 bp, Homo sapiens; identical to SEQ ID NO: 57674
  chr21:39286762-39286792
  hyper

SEQ ID NO: 133569 - DNA, 611 bp, Homo sapiens
  chr21:39288092-39288703
  hyper
ctggggaaggggacgcggggacccgagagcacggaacgcctcgcccaggtggacgccagctcctcgcctgcgagcagctcagcgcaccgcttacctggctgcggacggggtggcttcactcaatcatgatctcctctcttgaaacggagcaagactgaacaattcactacacgacggatggcgagggaaggaaatgcaaaaaagaaaaggaaaagaaaaaaactggaatcagatggtcaaatttcacatcagcaccgagaggctgttaggagactccattctgctcgcggctgctccggctccaggtccggcttcccggcgtccgcgggtctccacccctccgcccgcccagcctctccagccaggtgcggccgtctccggactggctccctctggccgagcgcggagagcagggctgggcgctggggccaagggaggggcggaggggcgcgcgtttgggcagggacgggggagggagactgggtggaatgaagtggggaaagataagagtggcagaagaaaaaaaaaatccccggttaggagaaaagtggtggaccacgcagagagacgtcatgaaatccgcagattcaatgaatgctactcaattccag

SEQ ID NO: 133570 - DNA, 491 bp, Homo sapiens
  chr21:39288790-39289281
  hyper
cgcacagcgccggcgcggtccgggaggaaggggcgggggcgagcaggacagagccacagacccagagacgcccaccccgccgcccatgccagctagcgtgtcagcgcgtcgaggaccgggcttggtgggggcgggctgggcacaaaccaacgtgcatcccccgccactggaaacgtgggtgctccatgctgggggaatcttttgggtttcggtccccgaccccccagtcccaacctttctcccagtgccactaagtaagttattcccggagaaacgcctggaaagcaggaaagagccgaagctcggggagcagttttgtctgctggttgtaggggttcggcttttagggttttgtgagataaggaaaaagaggctctgggcactgcctcccaccgggctgaaatccgtgagaggcagccccggcgcgggagccggagcctgcaccgcccagagggggcgcagcgagcggccgggacggaggggaggggccc

SEQ ID NO: 133571 - DNA, 35 bp, Homo sapiens; identical to SEQ ID NO: 57677
  chr21:40032285-40032320
  hyper

SEQ ID NO: 133572 - DNA, 157 bp, Homo sapiens; identical to SEQ ID NO: 13270
  chr21:40032367-40032524
  hyper

SEQ ID NO: 133573 - DNA, 235 bp, Homo sapiens; identical to SEQ ID NO: 13271
  chr21:40032679-40032914
  hyper

SEQ ID NO: 133574 - DNA, 459 bp, Homo sapiens; identical to SEQ ID NO: 13272
  chr21:40032973-40033432
  hyper

SEQ ID NO: 133575 - DNA, 152 bp, Homo sapiens
  chr21:40033449-40033601
  hyper
cggcgtctgcaaccagcagcctccaaagggtgcagccaggaggctcagcttgtccgcctccggggctcggggctaagccccttccagaagttttcgtttctacgcgaattccgaccgcaaaatccagcttacctgagcgccgctcctcttct

SEQ ID NO: 133576 - DNA, 142 bp, Homo sapiens; identical to SEQ ID NO: 13274
  chr21:40105801-40105943
  hyper

SEQ ID NO: 133577 - DNA, 378 bp, Homo sapiens; identical to SEQ ID NO: 13275
  chr21:40105997-40106375
  hyper

SEQ ID NO: 133578 - DNA, 30 bp, Homo sapiens; identical to SEQ ID NO: 57684
  chr21:40139127-40139157
  hyper

SEQ ID NO: 133579 - DNA, 1244 bp, Homo sapiens
  chr21:40177484-40178728
  hyper
cctcagggccagccggcgagggacccagccgagtgacagcaggaggcggagggaaggttgggccggaaggtgtcagccccgccccgcgctccctcgccgcctccgccctcctcttctctcccctcgtgcgttccctctcctctccctccgctcccccaaccctcctgctgcccccttccctctcctcccgcttctccccatcctgcctacctcccttcccctcctcttctctctcctccccttccctcccctctctcttctctcctccctcgtttcctcccctcccctccactcggccgtccctccttcctcctccctcctccctcctcctcccgctcctgaagagcgcgccgcgtgggggacggcccggttacttcctccagagactgacgagtgcggtgtcgctccagctcagagctcccggagccgcccggccagcgtccggcctccctgatcgtctctggccggcgccctcgccctcgcccggcgcgcaccgagcagccgcgggcgccgagcagccaccgtcccgaccaagcgccggccctgcccgcagcggcagggtaagagctgggcccgcagagagcgcccggcgcgcggctccagtcccatggagggtcacccggggcctgggcgggggtcgcggggggcactgacacgcagatctcggggcgctgccgggggtgcaggtgggggtggcggctgctgcgaggactctaggggcgcgcgtctgagttccgcgccggctcgttttccggttatggagtggcctccggggctggcggggtcggccggggggttcctgcgtgctagggccgctgtcttcggggtcgcctagcggcgggcgcggccagggcgcgctggcttgtttcgctcgcttttgtttttaaaaggaaacgcaggcctggtagggggtcctgcccagtggatgtcccggcgaacatgatttcgcgaacgggagtgggggcacaggagagcgtgtccgaggtggcctggcgccccggctttgagggtgacttcctggagcggcgccgggcccggaggatctggggcgcccaagacacctgaaggctgcggcaccgcgggaacctgcggggcgcggggtgccatggtcacctgctcgccgcgtccagggcccgggctggggacccctcggtcgtgcgaggagagcgtggggaacctgtcggaaatgagatctggttgcgctgggctgcctttattttctcgttcctacagcatttgaatga

SEQ ID NO: 133580 - DNA, 31 bp, Homo sapiens; identical to SEQ ID NO: 57686
  chr21:40275729-40275760
  hyper

SEQ ID NO: 133581 - DNA, 30 bp, Homo sapiens
  chr21:40556415-40556445
  hyper
tagatttagttgtaccgaaatacatgacat

SEQ ID NO: 133582 - DNA, 30 bp, Homo sapiens; identical to SEQ ID NO: 13278
  chr21:40685664-40685694
  hyper

SEQ ID NO: 133583 - DNA, 30 bp, Homo sapiens
  chr21:40686170-40686200
  hyper
tggcgttgccggagcgtctgcggcgctgaa

SEQ ID NO: 133584 - DNA, 30 bp, Homo sapiens; identical to SEQ ID NO: 13279
  chr21:40686606-40686636
  hyper

SEQ ID NO: 133585 - DNA, 30 bp, Homo sapiens; identical to SEQ ID NO: 57689
  chr21:40721341-40721371
  hyper

SEQ ID NO: 133586 - DNA, 102 bp, Homo sapiens; identical to SEQ ID NO: 57690
  chr21:40751584-40751686
  hyper

SEQ ID NO: 133587 - DNA, 100 bp, Homo sapiens
  chr21:40752031-40752131
  hyper
aaaagaaacacggacgtcagaaaactggttcagtagggatgggtgctagaaggctacggaaccgccgaaggcccaggagaaacccggaacgtgttaaccg

SEQ ID NO: 133588 - DNA, 30 bp, Homo sapiens
  chr21:40752649-40752679
  hyper
ctggctgtgggtggcggcggcgaacctcac

SEQ ID NO: 133589 - DNA, 30 bp, Homo sapiens
  chr21:40760781-40760811
  hyper
ggaacaggggcctgcgggggctgcgcaggc

SEQ ID NO: 133590 - DNA, 30 bp, Homo sapiens; identical to SEQ ID NO: 57692
  chr21:40817288-40817318
  hyper

SEQ ID NO: 133591 - DNA, 30 bp, Homo sapiens; identical to SEQ ID NO: 13281
  chr21:40817881-40817911
  hyper

SEQ ID NO: 133592 - DNA, 71 bp, Homo sapiens; identical to SEQ ID NO: 13282
  chr21:40941232-40941303
  hyper

SEQ ID NO: 133593 - DNA, 246 bp, Homo sapiens
  chr21:40984528-40984774
  hyper
aagttaactttgggacggttctcccggagggccagacagaaactcaaagaaccggcctcaggggatctgagcaaattccaccgtcgtcaattcctggtgctccgtgaaagatgctctttccctcggggcttcggagccggagcatttgtagacagttcctgcctcttcactcggctgccggcctgggggtcccgtcgcctcccggagccgcccgccgcgtcccccagcccgcgccgccctgcgcgg

SEQ ID NO: 133594 - DNA, 30 bp, Homo sapiens
  chr21:40988274-40988304
  hyper
tttttaatctcgttccgtctccttgtcatt

SEQ ID NO: 133595 - DNA, 38 bp, Homo sapiens
  chr21:42218892-42218930
  hyper
agccgcagacgcgggcgtgagctcatcccgggcactcg

SEQ ID NO: 133596 - DNA, 165 bp, Homo sapiens
  chr21:42218980-42219145
  hyper
cgcatccaggcagcaggcgggcgggcaggctcatctttgccgtgctccggcctcagtcacatggatccctctgccaaccttccctgcctgcgagccgggcgagtgaagccgagcgcggaggcgagcagggacccctcccctgcctctggccgctggggcgctctg

SEQ ID NO: 133597 - DNA, 123 bp, Homo sapiens
  chr21:42539419-42539542
  hyper
gcagcggacgggaaacgcctcgaaagcagccagacccggcgactgaaatgaggcggaggagcttggcgaggggaggcgcaggctcggaaaggcgcgcgaggctccaggctccttcccgatcca

SEQ ID NO: 133598 - DNA, 1593 bp, Homo sapiens
  chr21:42539583-42541176
  hyper
cgccactgccgggcgaatagacccccgcggacccccaagcgcgcggggccggggccctagttcaggccctcgctgcccctttaagggttctcgaaactttccccccggtatcagatgagcctcgtcacatccgttggccgtggccgctggggcgctttccgaggaaattcgggactcgagtttcccggggaagaggcgcggcctgagcccggcgagggtggggagggcaggcgcaggtggaccccggcgccccccgagccccgctgtgaccttggccgcgggggaggggctgggccgctgcggggcagtcgcggccgccagagggggcagcggagaagaacttgcccaacttggcggcgcgggctggggcggctctgcgcctccgcgcccgcctccccggcctccgccttctcccctcccgcgagcctcctcccctcccgcgagcctcctcccctgggccctcctcccgtcctccccgccgccgccggtcccggtgcgcgcccatccctgcccgcagccccgcgcgccggccgagtcgctgagccgcggctgccggacgggacgggaccggctaggctgggcgcgccccccgggccccgccgtgggcatgggcgcactggcccgggcgctgctgctgcctctgctggcccagtggctcctgcgcgccgccccggagctggcccccgcgcccttcacgctgcccctccgggtggccgcggccacgaaccgcgtagttgcgcccaccccgggacccgggacccctgccgagcgccacgccgacggcttggcgctcgccctggagcctgccctggcgtcccccgcgggcgccgccaacttcttggccatggtagacaacctgcagggggactctggccgcggctactacctggagatgctgatcgggacccccccgcagaaggtagggacccccggctgctgccgcgggcttttcgggctcgttggagggagggggctgtccagagacgcctccacgcggcttagcgtcgcccccaaagcagcagctgtccccgcacagaagagcggggaacgcagaggggctcgggtgggccggggagcgggggcgctcgctcttgagtcgcggaggacggcagcccccgcccggggcgcactgaggggtgtgcgcgagtgtttcagaacttgtgagctccccctccgcggggctgggcgggagaggagacctggaacttgccgcctccaataacgtgatttccttcttgcgggcgacacctacttccagcgggagacggagcggtgggccttgggcgacgggctattatggggaaaatcacctcgtgttcataccctccctcccccccgccccccccccaccccaccaccatgctgtctcattgctaaagaggctcgtggccggcttccaaaggcgcagtaccctttaaaaaggatttatgcatgagctcagctaaaagcaacccggttaagaagtggctcgcttgctgctctgaggaaggagcagcgtctcccctgcgcccgctttcctttctcggagttggtttgtcagctgtgtcctcgctcatccggcggccctgcccctctgcacggagcgatgcatct

SEQ ID NO: 133599 - DNA, 638 bp, Homo sapiens
  chr21:42688550-42689188
  hyper
tccaccctccgccagcgacctcagagctcccgggcacagcccggggcacagccccgcgcacctgccccgcccacgcccgccccgcgcacctgccgggtccgcacctgccatttgcccgactggccgcgcacccagctggcccgcccctgcccgacacgaccgctgcccgccccttgccttcctgacccaggggctccgctggctgcggtcgcctgggagctgccgccagggccaggaggggagcggcacctggaagatgcgcccattggctggtggtgagtgcgcccccgcctcggggcgagggtaggggcggggaaggaggaccccaggggaagcgtcgctccccaaccctgcctgggacccgccacgcttagcaaaagcgggagggctggttcttggcgccgaggctggtcttagacctgggatcaggaatgcgggaagcgattccagagggggcgaacagcgggggtttccagcagggttccccgaccctgtttccccgcgctcgccaggcctgttcccgccgccccagccggggtgcatgggattagggaggaacctggaatgtaacactgtaacattttacttggaaagtagattggtggggagcgcaggcacagccccgcacccccaccccc

SEQ ID NO: 133600 - DNA, 30 bp, Homo sapiens
  chr21:42792594-42792624
  hyper
cagggccggccttccgattccccattcatt

SEQ ID NO: 133601 - DNA, 30 bp, Homo sapiens; identical to SEQ ID NO: 13286
  chr21:42797938-42797968
  hyper

SEQ ID NO: 133602 - DNA, 30 bp, Homo sapiens; identical to SEQ ID NO: 57701
  chr21:42798579-42798609
  hyper

SEQ ID NO: 133603 - DNA, 1520 bp, Homo sapiens; identical to SEQ ID NO: 57702
  chr21:42878704-42880224
  hyper

SEQ ID NO: 133604 - DNA, 224 bp, Homo sapiens; identical to SEQ ID NO: 57703
  chr21:42880260-42880484
  hyper

SEQ ID NO: 133605 - DNA, 88 bp, Homo sapiens; identical to SEQ ID NO: 57704
  chr21:43067057-43067145
  hyper

SEQ ID NO: 133606 - DNA, 837 bp, Homo sapiens
  chr21:43181626-43182463
  hyper
cgcccctcccctaccagtgtggcctccctcctccggacactctgccccggggcgctggcgaaagtccttccgtaggactcagacccacatccactgtgcaaccgtgtgaggcacaccctcctcgccggagggttttgaggaaatgacaattcgggtgtttagaggccagccattcgcaagggtcatttttccacattaagtagacattctgagagtgaactctctaagccaaagctgactgataataaacacgtattctgagaacaatgtcaatcaaaggaaggctgagtagcttattaagtggaagctctgagccactccacaaatagtgttttcttttatttgcccaaagggcttaatacataaaaccccggtgacttctgattgcagagtgagctcattggcgactctaacagctacgggctggcagcagtgcacacccctccccagcgcaccgagttcagcaagtactttactctccctgccccgggctctttctgcagaacggagaccccatttaccttactttaaaagaaacaacaaacaaacaaaaaagggccactgctgctagttggctcctgaaagcggatcccggctagaatttcctaacggagtccaccccagctttgcgcaactgcctgaagggagcccggcacgacttcccccttccatgggccacacatttgagggcactttctcgaggaaaatcagctgtcctggaaaaaaaaagtcattgtttccgtggacaaaagtgttgtgacagcatgatccaaactggcttggggtagacaggattccagctgaggaagggggtcccgggaccgccctgtgggagat

SEQ ID NO: 133607 - DNA, 109 bp, Homo sapiens
  chr21:43186324-43186433
  hyper
cgaggaagcgctgggcggacggatcaacaccccgggccccgtgccggaccccactgccaggcccgagccccggagctccaccgcgcaagcgccgggcgcccgggaagcc

SEQ ID NO: 133608 - DNA, 804 bp, Homo sapiens; identical to SEQ ID NO: 13291
  chr21:43186592-43187396
  hyper

SEQ ID NO: 133609 - DNA, 30 bp, Homo sapiens
  chr21:43187719-43187749
  hyper
tggcgattttacagccgcaccccggagccc

SEQ ID NO: 133610 - DNA, 336 bp, Homo sapiens
  chr21:43188160-43188496
  hyper
attcctgagacgcaacggtgagtgaaggcttatttttggccacaggagattaataatgaagacaggagggcggagctaaaggagagggtattttaacgacattaactgtgtttttgtgttagtaactcggaaagagagaggctgccccaagtcagcgcattgaaagccgcagacctagtgtctccaggctcccccttccaaacgggcgcggaccttctttcatagcctgtagcggggagccgcgtctccccactgcctccccactcccatccggccgctctttggagggaactcacacatcccaacatgacgatgcttgctcggggggcctcctgg

SEQ ID NO: 133611 - DNA, 613 bp, Homo sapiens; identical to SEQ ID NO: 57710
  chr21:43188775-43189388
  hyper

SEQ ID NO: 133612 - DNA, 31 bp, Homo sapiens; identical to SEQ ID NO: 13292
  chr21:43221770-43221801
  hyper

SEQ ID NO: 133613 - DNA, 30 bp, Homo sapiens
  chr21:43299825-43299855
  hyper
acgagctctgtgcccgcgaggggagtctgg

SEQ ID NO: 133614 - DNA, 980 bp, Homo sapiens
  chr21:43373385-43374365
  hyper
caggggctgcagcgacgcctccaggaaagacctcggcccggaccgcccgccccggcatctgccgccccccggcccgcagtcccggaaactcacccctttcctctcggcctcctcgttcagggcggtcacccaggccgcctgccactggctcctccagctgcccagcgtcaggatccaggagagcagcgcgtcggaccccgggcgcggcccctctccaggctccaccgcccgccgctggggctggggtcgcgccctggccagcgcccactgcgccaggtacaggcctaccgtggccagggccgcgacgaagagcgacaccagcgcgagccactgcgcctccccgagccacgagcccagccgggccatggccatggcgcatccccggcccgcctcgccccaacttccccggcagccccgggccggaacggcggactcaggacacgcgctggctgcggccacagcgcgctgggggcgtggagggggcgcggcggggtcggagcccggcgaggagcgtggccgggggcctctgggcgggcaagcggggaggaaacgcgcggcggccgcggcccgggctgggcgcaagccccgcacacctgcggaacaggggcgcgagcggaccccgcggcccgcgctcccgactcggcgtctgggaagttcctgggccgctgcgggccgcgcttcctcctgcgcgcgccgccccgggcgtcccgcccgcggcccagcggtggccggaggaggctctggccgcggggcggggcggggcgggggcggtgcccgagggagggggcgcggccgggcctgcgggggccgcagtcctcccccctgctcccaacgcggcgtgcccccgcccccctaaaggcccggccttcccggccccgccacgtgcgcgcgtcgcccgcccctccggcgcctgcccgcgggccgcgaggtgacccgggcctccggattcatcagcccaaccccggcggctgctgtgcggc

SEQ ID NO: 133615 - DNA, 129 bp, Homo sapiens
  chr21:43429157-43429286
  hyper
catcgtgtgaacaatcgctggactattttgtaacacacgcgtgccctcggaggctcggtgccagggctgtgagcgcttgcacgaaaggaaaaaccccaggccgtgtgaagtctaactttccccgtcctc

SEQ ID NO: 133616 - DNA, 66 bp, Homo sapiens
  chr21:43429338-43429404
  hyper
cgcgcgctcttgcggaattctcccgaaccgcagagccctcgtggctgggaccgcatagcaaccggg

SEQ ID NO: 133617 - DNA, 113 bp, Homo sapiens
  chr21:43430368-43430481
  hyper
agtctcgaggcagacgccgggcccctttccgctcacactcggctcgcgcgcgccgcagccgccgctgccgctgtgattccatccatcttgaatttgacgtcatcccacaccag

SEQ ID NO: 133618 - DNA, 30 bp, Homo sapiens
  chr21:43431350-43431380
  hyper
gagaaaactcacttcgctttcagtcaaaac

SEQ ID NO: 133619 - DNA, 30 bp, Homo sapiens
  chr21:43639076-43639106
  hyper
gctcgggccgctcccggaacctgcacttca

SEQ ID NO: 133620 - DNA, 47 bp, Homo sapiens; identical to SEQ ID NO: 57715
  chr21:43639847-43639894
  hyper

SEQ ID NO: 133621 - DNA, 30 bp, Homo sapiens; identical to SEQ ID NO: 57716
  chr21:43778879-43778909
  hyper

SEQ ID NO: 133622 - DNA, 13 bp, Homo sapiens
  chr21:43916144-43916157
  hyper
acctctggtttct

SEQ ID NO: 133623 - DNA, 30 bp, Homo sapiens
  chr21:43916429-43916459
  hyper
ggggacaggcgacgcggacgaagcgggagg

SEQ ID NO: 133624 - DNA, 30 bp, Homo sapiens; identical to SEQ ID NO: 57717
  chr21:43933648-43933678
  hyper

SEQ ID NO: 133625 - DNA, 30 bp, Homo sapiens
  chr21:43934311-43934341
  hyper
agagtggccctcggcgacaatgccgggcgt

SEQ ID NO: 133626 - DNA, 31 bp, Homo sapiens; identical to SEQ ID NO: 13295
  chr21:44013673-44013704
  hyper

SEQ ID NO: 133627 - DNA, 30 bp, Homo sapiens
  chr21:44036549-44036579
  hyper
atattggccaccctacgtcctgtgtgcaga

SEQ ID NO: 133628 - DNA, 30 bp, Homo sapiens; identical to SEQ ID NO: 57719
  chr21:44095150-44095180
  hyper

SEQ ID NO: 133629 - DNA, 30 bp, Homo sapiens; identical to SEQ ID NO: 13296
  chr21:44299585-44299615
  hyper

SEQ ID NO: 133630 - DNA, 30 bp, Homo sapiens
  chr21:44313374-44313404
  hyper
ggcggctgttcaggcgcgggtgcgcgcgca

SEQ ID NO: 133631 - DNA, 162 bp, Homo sapiens
  chr21:44494615-44494777
  hyper
gtaagaagccgccgccgtgagcggagcagcaccttcctccgcgggtcgcgggagtcacctacgggaagggactctccgtctggcacaggccctgtctggcctggggcgcgcatgctccgccgccgaatcttccagaaagccgtggacccgaggccccggcag

SEQ ID NO: 133632 - DNA, 1085 bp, Homo sapiens; identical to SEQ ID NO: 13298
  chr21:44494940-44496025
  hyper

SEQ ID NO: 133633 - DNA, 615 bp, Homo sapiens
  chr21:44496296-44496911
  hyper
agccacccccacccgcggaccccggtggtgtcttctacctggtgttccgatgctgttttacttggttaacttcttgcccttcgggaatttaaggaacctttactgatgagcttgaaacgtgcgtcctggtgggtggggggccctgcgcgtcctcgaggaccgaccccgagggcgtgtgtcgcgggcccgggagggggcgccgcgccggggcgggactcgatggccgcgctctgtggccgccggacgccgtgcgcagcgccccgcgtgaccgcgcccagagccgggtccgaaccccgagccgaggcgcagaacagtcgccttgcgcggctccggtgcggcccacggccaggggctgccgggcgctctcggggacggggccgactccgcgcagggtggtagcaggggcgccccgcggggctccttcgccaggtcccggaggccgcgggcggggccgtttcccaaacatcgtgctctggactttcagaggctgaacctgatccccccgccctatggctaaatgggggatcccaggcccccgagtctccccccggacctgcagcgaaagacacggacggtgcccatcagctctgggcagaggaacgtgctgcgcctccg

SEQ ID NO: 133634 - DNA, 111 bp, Homo sapiens; identical to SEQ ID NO: 13299
  chr21:44513218-44513329
  hyper

SEQ ID NO: 133635 - DNA, 209 bp, Homo sapiens; identical to SEQ ID NO: 13300
  chr21:44514585-44514794
  hyper

SEQ ID NO: 133636 - DNA, 30 bp, Homo sapiens; identical to SEQ ID NO: 13301
  chr21:44515794-44515824
  hyper

SEQ ID NO: 133637 - DNA, 30 bp, Homo sapiens; identical to SEQ ID NO: 13302
  chr21:44524440-44524470
  hyper

SEQ ID NO: 133638 - DNA, 30 bp, Homo sapiens
  chr21:44527165-44527195
  hyper
aaagttggaacaaacgtgtccacgtccaaa

SEQ ID NO: 133639 - DNA, 24 bp, Homo sapiens
  chr21:44527503-44527527
  hyper
cctcaaccaccctgcgccccgatc

SEQ ID NO: 133640 - DNA, 252 bp, Homo sapiens
  chr21:44527797-44528049
  hyper
aggctccgccttttcggtcctgggaacccgcgccccctgccggtgccctccccgcccggccctagctctctcgccttctcgcccgcccggcgctggccctgctggatcctgcgcgccggggactgggggctggcagtgcagaccgaacccggggccgaggggcttctccacagagccgcctggggctcggtggggggcgctcagctcgaccccagctaagggagcactaggaagtgcgggcgtccccttccc

SEQ ID NO: 133641 - DNA, 76 bp, Homo sapiens
  chr21:44845910-44845986
  hyper
tggtgactcgatgccgcgccagcttcaccaccgcgaagttgcctttgcccagggtccgctcgatgtcgtaaaaacc

SEQ ID NO: 133642 - DNA, 451 bp, Homo sapiens
  chr21:44847472-44847923
  hyper
cctccacgcggcctgcgttcgtccagactcagagcctcgggacgtgcgggggcccgggggcctcgcgggctcgcgcgtggggctggcggcgcggatgccctggggcgctgcagaccccgagaggccgcttgcccgcggggacgtcagccgcttttgctgttaaaatctgaaatgttcagcaagttagaaacttgaaacctaaggaagcgtgaccggccgctctggaagcccccgccgcgcggccggtcccggccccggccctcagcggcgctggcgtctgcgcgtcccggggctgcccccgcagcatgtggggctgggaccctcttcccgcgcgggccccgggcggacgctgcgggcggtgacggagccaggccggccgcctgggtaggggacgggggcgcgggaccacttgcttgcccgtggccgatgcctcatccgaacggaaaacgtt

SEQ ID NO: 133643 - DNA, 30 bp, Homo sapiens; identical to SEQ ID NO: 57731
  chr21:44877374-44877404
  hyper

SEQ ID NO: 133644 - DNA, 30 bp, Homo sapiens; identical to SEQ ID NO: 57732
  chr21:45139364-45139394
  hyper

SEQ ID NO: 133645 - DNA, 711 bp, Homo sapiens; identical to SEQ ID NO: 57733
  chr21:45148315-45149026
  hyper

SEQ ID NO: 133646 - DNA, 13 bp, Homo sapiens
  chr21:45149198-45149211
  hyper
cgtgctgtcgcgg

SEQ ID NO: 133647 - DNA, 180 bp, Homo sapiens
  chr21:45182011-45182191
  hyper
ggcctctgcaaggttcgggggtggcttcgtttgcctggagtggccggccctgcttgtgccatgtggatgtttgtgagcctcggtcctacagcactgtgtaggctgcatctgtttcgtgctggtcctgttgacttgtatgatatccacaaataaatattttcatggcggtcgtgttgaggc

SEQ ID NO: 133648 - DNA, 157 bp, Homo sapiens
  chr21:45182668-45182825
  hyper
agaacaaggagaaggcggaaccaggggctgcagaaccagcccctccccaatgaggaccccctctggacgcccctccccatggagaacaccaggagccacagaccccagaccacagagcacacaggggagggcacggggcggccggggcagggtgtct

SEQ ID NO: 133649 - DNA, 30 bp, Homo sapiens; identical to SEQ ID NO: 57734
  chr21:45196569-45196599
  hyper

SEQ ID NO: 133650 - DNA, 30 bp, Homo sapiens
  chr21:45284410-45284440
  hyper
aataagtccaagggcgcggcacgtgggccg

SEQ ID NO: 133651 - DNA, 160 bp, Homo sapiens; identical to SEQ ID NO: 57735
  chr21:45286200-45286360
  hyper

SEQ ID NO: 133652 - DNA, 430 bp, Homo sapiens
  chr21:45381211-45381641
  hyper
ttgtctcgtgggaaacggtaagcgcgtagacactttgtctcacgtgagaaatggtgaacccacatacactttgtctcatatgggaaacggtgagcgcatagacactttgtctcatgtgggaaagggtgagcacgtagacactttgtctcatatggaaaacagtgaacgcgtagacactttgtctcgtgggaaacggtgagcgcgtatacactttgtctcatatggaaaacagtgagcgcgtagacactttgtctcgtgggaaatggtgaacccacatacactttgtctcatatgggaaacggtgagcgcgtatacgctttgtctcatgtgggaaatggtgagcgcatagatactttgtctcatgtgggaaatggtgaacccacatacactttgtctcatatggaaaacggtgagcgcgtatacactttgt

SEQ ID NO: 133653 - DNA, 30 bp, Homo sapiens
  chr21:45432874-45432904
  hyper
cgcagagttgcaggcgttggcgaagtagga

SEQ ID NO: 133654 - DNA, 72 bp, Homo sapiens; identical to SEQ ID NO: 57738
  chr21:45526942-45527014
  hyper

SEQ ID NO: 133655 - DNA, 30 bp, Homo sapiens; identical to SEQ ID NO: 57739
  chr21:45527335-45527365
  hyper

SEQ ID NO: 133656 - DNA, 64 bp, Homo sapiens; identical to SEQ ID NO: 13307
  chr21:45553435-45553499
  hyper

SEQ ID NO: 133657 - DNA, 93 bp, Homo sapiens
  chr21:45557937-45558030
  hyper
aggaagaagggaggccgccttggcgtggctgttttggtagctggaccgtgaatcatggaggcctggctggctcccacacggtggcgtccttga

SEQ ID NO: 133658 - DNA, 165 bp, Homo sapiens; identical to SEQ ID NO: 13308
  chr21:45660234-45660399
  hyper

SEQ ID NO: 133659 - DNA, 91 bp, Homo sapiens
  chr21:45661246-45661337
  hyper
caaggctgggagagcgccaggcccctggccggctgcgctccgatgatctccaggacttaaggcgagtgagctcagcgactgctgaggaatg

SEQ ID NO: 133660 - DNA, 229 bp, Homo sapiens
  chr21:45662075-45662304
  hyper
gggcggcggcgaaggcgcaggaagccctgaagccgggcggcttccccctcccaggccacgctgagagacgggggttggggggatttaaaatcgcgcgcctggcaggggcggggcgggggccacctgccctccggcgggaagagctgggcagggcccgcggagtgcagggcggaggcactggcggtccgcacccgggtgaggtgaggcgcgtaaccgcatctgagccgga

SEQ ID NO: 133661 - DNA, 541 bp, Homo sapiens
  chr21:45662514-45663055
  hyper
agggcgcaggtgagccgggcgggctgcgggcagcgccacctcctcccggaggccctccctgattgaccggccgggaaccgcgcgcctctgggcctgcggctgaggtccggggctgcgccgcgccgatgagctgacgccgggccgagcgctccacccccagggccgggcgcacctgaatcccctccacccgcgggactgcggagagggggacggcccccggataccgcgtgggggctttgggaggatggggaatgggtcctgggggagcagagcctcccaaattaaggcctcccaagagcgcggccggtcatccgcggcggcgaagggaaggtgccctgtcggtgcgtccggaccccgcagccccccagtgccgcccgggggcggtgggagaggggccgacaccgcagggcccgccgtgctgtggccgagggggcaggtccaggctctgcttcccgggcagacgccggagaccccagcaagccaagtgctgcgggcagccccccccccgcccccccgagagaggggacgccgcgtggaggcc

SEQ ID NO: 133662 - DNA, 278 bp, Homo sapiens
  chr21:45713495-45713773
  hyper
gatgggactggtcccgctgtcctgcagcctgcgtggcaccgtgaggctcctcacttgcgcctagacccgccgtccagccctgggtggtcccaggggagagcgcacagggctcgggttcgggttcagctacatttcccccggccccccgcgtcaccccgcgctgttgcctcccacagaacctggctcctggtgcgcgttgcggggtgtgcggagatggtacggacgtgctgcggtgtactcactgcgccgctgccttccactggcgctgccacttccca

SEQ ID NO: 133663 - DNA, 140 bp, Homo sapiens
  chr21:45719672-45719812
  hyper
ggggcgcgtgcggccgcactggggccagccccgccctggtccccggccacatcctcgagaccaccggggtggaggggggggtctcactgctcagggcccgcgtgacattgcacaggtttagaaacgcacagcgggaaggt

SEQ ID NO: 133664 - DNA, 30 bp, Homo sapiens
  chr21:45759487-45759517
  hyper
gtggatggcatgggcgctacacagctccaa

SEQ ID NO: 133665 - DNA, 30 bp, Homo sapiens
  chr21:45759718-45759748
  hyper
tacattaagacaggcgttctgacgttctga

SEQ ID NO: 133666 - DNA, 351 bp, Homo sapiens; identical to SEQ ID NO: 57745
  chr21:45875681-45876032
  hyper

SEQ ID NO: 133667 - DNA, 73 bp, Homo sapiens; identical to SEQ ID NO: 57746
  chr21:46126354-46126427
  hyper

SEQ ID NO: 133668 - DNA, 50 bp, Homo sapiens; identical to SEQ ID NO: 57747
  chr21:46126566-46126616
  hyper

SEQ ID NO: 133669 - DNA, 181 bp, Homo sapiens
  chr21:46126913-46127094
  hyper
acgtccgcccctgcccggctttcctagcggaattggcgccggcatcagttgggggttgtgggatcagtgaggaatcccgtggggtcgcctccatttatcagttgtgtggggttgggcgagcacccctagccccagcccaggcgatcagggcgcgaagcccactggacgcggatttgggatt

SEQ ID NO: 133670 - DNA, 88 bp, Homo sapiens
  chr21:46127351-46127439
  hyper
acccgtcggggccctcgtgtgcggctcgttatcctggaaccagagaggctggagacccttggcttgtctggagcggaaccgtagtgtc

SEQ ID NO: 133671 - DNA, 30 bp, Homo sapiens
  chr21:46127899-46127929
  hyper
cccccctccccgccccgcgcgtgcacacac

SEQ ID NO: 133672 - DNA, 92 bp, Homo sapiens; identical to SEQ ID NO: 57748
  chr21:46128893-46128985
  hyper

SEQ ID NO: 133673 - DNA, 496 bp, Homo sapiens
  chr21:46129206-46129702
  hyper
gctccttacaagaatcggaagggtccctgcaatcgcccttcgcactgaggcttcctactgtgtggtgtaaaaacacaggcttgtcctcccttgctgcccacggggctggagccgcctgaaaatcccagcccacaacttccccaaagcctggcagtcacttgaatagccaaatgagtcctagaaagcgagagacgagaggggaatgagcgccgaaaatcaaagcaggttcccctcctgacaactccagagaaggcgcatgggccccgtggcagacccgaacccccagcctcgcgaccgcctgtgacctgcgggtcaaccacccgccgcggctccacgccgtgggcacagactcagggagcaggatgagaaagctgagacggcgcagccacggcccggtgccttcacgcgcacagcgacacagccccagccagcggggcccacgctaaggcggaatcccacagaagcctacagagcgagcgcgcgcctgtgcttccca

SEQ ID NO: 133674 - DNA, 30 bp, Homo sapiens
  chr21:46130531-46130561
  hyper
gcctcccctgatagccgtgctgcggagcct

SEQ ID NO: 133675 - DNA, 924 bp, Homo sapiens
  chr21:46130969-46131893
  hyper
tgcacagtagcctcccgggctgctgcgacttcattcttcattcccaaagcaggtgtcagcctttcccgggaggcccagcaggtaagcacttgtggaggccccggtggctgctggttagctcttgaagctcgtccccaccctgcgtgcgttctaaagagccgcgtttctattgcaactgcctgccctgcgctttcatcttccccacctgtgctcctcccgcctctgcccatctccacagggtgctacctgccagtcctgccaaagcgtcctcgggcaccgcggcttgaatcagtgttagaaagtggcatttgtgactcgacacccctcccagctccccggcaagatacccccgcccgagttcccatgcccctgccttacctgtgcagggctcccaaccctgcgtgccgtggccgggggccgccaggggcagcacaaaacacagactcagcagggcagacatgaggggcttgggtgccaagctccatccagggctccgctcagcctgcagggaagtggctgctcctcagacgtctgcgtcagcctttccaggggcggccgcggggcccccgggggtcactgcgacggccacatgccagcggcctaaggcggggacagaggtggccctggcggtcgcagtggggaagcttctggttgctgcctgcgggaggcaggtggcccctggcaggttgggctgcagccgctggtttatctcttcatttccctgatgggcttgggccctgcgtgcaggtgacaggtgataacaatctcggcccggcctgggattagtcgctggcaaagcacactttccaaaaggaaagacagaaatagatcgtgctgcggagagctgagaacaagccagagaaacttaggagacccgtttccctcaggcgcaggctccctgggctcaccgccttttaggaccag

SEQ ID NO: 133676 - DNA, 503 bp, Homo sapiens
  chr21:46143106-46143609
  hyper
ttagggaaaggaagccgacgttcagttggcgaggctttctggtctaaaggcacaggcaagggagtgttggccatttgtctcctagacgaccaggcggcctcagccacggtggaggccaccggcgcgccttcccctcgggttcaccaagcctgtcattttcagcctgcccgaggcaaagcccaccctacccagccaagcatgttcttaaaattctttacagattaacccacgtgaatctaaacccggtagaggcaaacgctttcccttccactgtgagctgcgttgtaatttaccccaacgacctgttgaaaagaccaagggagcttagcaaccagccgtccccagggccccggggggaagctgcaattaccgggtgcgaggccggcggggccgcagcccccacttcaaaggcgcgggaggagccgagggaggcggagctgtaattagtgcgggccccgccgggcgaccacgggcctgctcacgcctcgcggcctccgaggagc

SEQ ID NO: 133677 - DNA, 30 bp, Homo sapiens
  chr21:46221584-46221614
  hyper
cgggacgctgctgacggcccgggtccccag

SEQ ID NO: 133678 - DNA, 30 bp, Homo sapiens
  chr21:46221940-46221970
  hyper
ttcctgaacggtggcgcctgttccagtgtg

SEQ ID NO: 133679 - DNA, 30 bp, Homo sapiens
  chr21:46222375-46222405
  hyper
cgggagagagggcgcggctcaggtccctgc

SEQ ID NO: 133680 - DNA, 30 bp, Homo sapiens; identical to SEQ ID NO: 57753
  chr21:46266015-46266045
  hyper

SEQ ID NO: 133681 - DNA, 276 bp, Homo sapiens
  chr21:46293548-46293824
  hyper
atcagtcagtggagcgttacaactccgactccagcacaagcggtctccgcccggaacagccgcggcgccggaagtggacctgcgaggtggggccatgcgagtgcgcagcctcaaaaagcagctcgccccgctccctcgccatctgccccgcccctcgccaacgggctcgcctcccggcgcggctgaggttcagtgcgcctgcgcgatagaggaaaggagcctggtagcgaggagagcggctgaggctcagtgcgcctgcgcggcgcggatgggcga

SEQ ID NO: 133682 - DNA, 209 bp, Homo sapiens
  chr21:46294043-46294252
  hyper
ggcgtcccggacggcggtcccaagcgctgctcacgctgctcttaagtgagccctggacgaggcgcggtgggccctcatagtccgcgccggcgccctcgctccacaccgcggcgtccggccctgggctcccgccgatgtccgcgtgggacttttaggggatttgtttatttttgtacgttaaccacactagaaacggccccagaatgggc

SEQ ID NO: 133683 - DNA, 31 bp, Homo sapiens
  chr21:46294932-46294963
  hyper
ccacttctctggcactcggagcgctggcacc

SEQ ID NO: 133684 - DNA, 1579 bp, Homo sapiens
  chr21:46351314-46352893
  hyper
agcatcctggggcacggacaggcggaaccgggccatcagccgtccctgcgcacagaggcgcacagattggatccggcctcgcagtcccaggagccaagaggggaggcacgcgtgccggttctcggaaattcattatgggaatgtgcgcgttgtggagatgctcagaccgcgaacagtactgcgggaacccaaacgatcatttttaaccccagacgtccctgaaccaaagccaaagtctacaggtcactggggcagaggccgcccgaaaccagctgtcccctcccggcctaggcgcgccaggtccccgcccagccggggcgatcctttggtcggacagtgaggttgggagcccaccgcacccaagtgccgccgcatccacccggcgcaggcgacccccgacgggcagccgctcaccttctcctggccccgggcttcaggaaaactgcctggaggtggccggggtctccctagcggaggctgggcggcgggcttcgcgcctgcctcagtctcccaatccgtggcccgggggatggagcccgctgcgcgcagaggctgcggcaggtcccagccaggtgccctggaacgtggctcctccttccctgaggcgctcccctgggcacgaggatgggtctcgaagcaggaggaagccgccttccctcacccgctgtccggagctgctcagccggtgcgcggagcctcccccgccgcggacaccacgatccgacccccaccctgaccccgacccagacccccaccgcccgaccccggccgtattccgttgcgtttgctccctgccagctccggggccaccactgagcacgcgctgtgagtaggcgcttcctggagcttttcctgggggtcctcagaaaaacccctgccgtccccattatagagatggggaaactgaggctcaggaaggccagagcttgcccaaaacctgcggtccgcggcgggcagggattccacgctccgagcctggccgcctccctggggcgcgtgaagggagctttccttccccgggaaaggccggggccagagacccgcactcggaccaggcgggggctgcggggccagagtgggctggggagggctgggagggcgtctggggccggctcctccaggctgggggccgccagctccgggaaggcagtcctggcctgcggatggggccgcgcgtggggcccggcggggcggcctcgggaggcgtccaggctgcgggagcgggaggagcggccgtgcgggcgccagcgccgtgggtggaggtcgccgtccctcctgaggggcagccggtgcatttgggacccgggagcagagcccgcgcctccccagcggcctccccgggggtctcaccgggtctcccgagagcggaggccccggctccgcagaaacccggggcggccgcggggaagcagcgccctcaggcgtcggaggagcccccagaaggacctcgcgcctccccgccgggctccgaccgcctgggttcggtgcgggacggcccaggccgccaggacccccaagcgcagctcagtctgcggggcacgacccagaggccagcagcagaggacggggccggggccgg

SEQ ID NO: 133685 - DNA, 80 bp, Homo sapiens
  chr21:46359651-46359731
  hyper
tgccgcgggggtcgcgtcctctccatccccgaccttggacgcaaccccgggcttgggtcccccacgatctagacagaaac

SEQ ID NO: 133686 - DNA, 7 bp, Homo sapiens
  chr21:46360134-46360141
  hyper
cgtgggt

SEQ ID NO: 133687 - DNA, 220 bp, Homo sapiens
  chr21:46360167-46360387
  hyper
cgcctccgggagggttccgcgaccccggccttccctcgggctctgcgggcatttgctgcgctacagacgcgaccttcttgcttcgcgaagcgtcgtaaactccgaggctccgctctgcgctgccgtcctgggcacacggactcgcgccgctcccggggaggggagagagccaggaacctcccgctgcggtccagggttgccacgcggaccccagaggttc

SEQ ID NO: 133688 - DNA, 123 bp, Homo sapiens
  chr21:46438728-46438851
  hyper
ctctgtgatgcccacgctgggtgcaaatgttgctttggtaaaaataacaacaacgaaaggaaaagccaagccggaccagccccacccgcagggccccggccccggccccggccccgcccttgg

SEQ ID NO: 133689 - DNA, 118 bp, Homo sapiens
  chr21:46686338-46686456
  hyper
ttcagtgagctgggccgagcgcttcgcgcagctgagggcaggaggctgagagctcagtgcgaagcctccccacagcaggcttcctgggctgcggagacagcaccgccaaggtcgcagt

SEQ ID NO: 133690 - DNA, 11 bp, Homo sapiens
  chr21:46707016-46707027
  hyper
cgcagtgacgc

SEQ ID NO: 133691 - DNA, 30 bp, Homo sapiens
  chr21:46707766-46707796
  hyper
acgaagctgagtgtcgccatggccccgggc

SEQ ID NO: 133692 - DNA, 693 bp, Homo sapiens
  chr21:46800405-46801098
  hyper
tccgtccgtgcacacacgctcacctcgcacccagcgtccgtccgtgcacacgctcacctcgcacccagcgtccgtccgtgcacacgctcacctcgtacccagcgtccgtctgtgcacacatgctcccctcgcaccgagcgtctgtccgtgcacacgcttacctcacacccagcatccatctgtgcacacacgctcccctcgcacccagcatccgtgcacacgctcacctcgcacccagcatctgtccatgcacacactcccctcgcacctagcgtccgtccatgcacatactcaccttgcacccagcatccatctgtgcacacaccctcacctcgcacccagcatctgtccgtgcacacacgctcacctcacacacactcccctcgcacccagcgtccgtcggtgcacacacgctcacctcccgcacctcccgtggaggcggcatccaggcagggaagcaaggacactctgcgtccattcctctctctaaacaccaaggcccccgcaatccgaggaatatatttgacagaaacaagaaaaaaggatgaaagtggccaagacaagccgatcccttctatctgttttcaggaacatgattttgtggccccaaactccttgaagcccgatgcttccacctccctcccactccactctcccccgacacatccgtccagctcccgttcctcttgggca

SEQ ID NO: 133693 - DNA, 243 bp, Homo sapiens
  chr21:46801323-46801566
  hyper
aggagagaggggtgccgctcaccactgccccctcccaagcccagcgtctaggtctggttcaccctcgcgaggtcgcctggcccatgtctggctacctgagctggccactgctgaggcaaagcccacccggctgctgttctggaagtggctctggaaagcccagctcctgtgggtacaggatcgctgagcgccaggcatgggggccacagccaaggcaggatcgctgagcgccaggcatggagg

SEQ ID NO: 133694 - DNA, 61 bp, Homo sapiens; identical to SEQ ID NO: 57763
  chr21:46824686-46824747
  hyper

SEQ ID NO: 133695 - DNA, 833 bp, Homo sapiens; identical to SEQ ID NO: 57764
  chr21:46825134-46825967
  hyper

SEQ ID NO: 133696 - DNA, 105 bp, Homo sapiens; identical to SEQ ID NO: 57765
  chr21:46950777-46950882
  hyper

SEQ ID NO: 133697 - DNA, 30 bp, Homo sapiens; identical to SEQ ID NO: 57766
  chr21:46961654-46961684
  hyper

SEQ ID NO: 133698 - DNA, 30 bp, Homo sapiens
  chr21:46974868-46974898
  hyper
tccattccctgggtcgatgtttccagaacc

SEQ ID NO: 133699 - DNA, 152 bp, Homo sapiens
  chr21:47010000-47010152
  hyper
tgtcggtcacggtgtcgcgtattctccgcgggacggacgtgtcttcaggtccaacccgcccggtgggaagcgcagacactgattttccagaaaaagtcctccttccgtttcccgcactggtaggaaagctggggagagagaaggagtctcac

SEQ ID NO: 133700 - DNA, 68 bp, Homo sapiens; identical to SEQ ID NO: 57768
  chr21:47010408-47010476
  hyper

SEQ ID NO: 133701 - DNA, 174 bp, Homo sapiens
  chr21:47050916-47051090
  hyper
cagtcagatggcggccgaggctggaatcatccgaaagcttcttcactgggacgcggtcagatggcggccgaggctggaatcgtccgaaagcttcttcactgggatgcggtcagatggcggccgaggctggaatcgtccgaaagcttcttcactgggacgcggtcagatggtggc

SEQ ID NO: 133702 - DNA, 200 bp, Homo sapiens; identical to SEQ ID NO: 57769
  chr21:47062752-47062952
  hyper

SEQ ID NO: 133703 - DNA, 1139 bp, Homo sapiens
  chr21:47063292-47064431
  hyper
cccactactagtgaccggcccgcccgttcgaggccccgcctcctccccgcccaatgctcggccccgccccgcgcgtcattgggccaggtccccgccccgcccccagccccacccccgcccctttgactggagttggctttttccagagaactttccgggctcggattggccgcgccggttgatgttccgccctttcattggcccgcggcgcccgctttcgcgagcctgcccttgggcgggggcggggccggcggcggcgcgcggcgctagattggttagcggcgcagaggggcgggcccgcgccgcgcgcagcgctcgggctggagcgcctgaagccgcgaccgccgcctcagccgcctcagccgcggtcgccgccgcttcggctgacttaggctccgccgccgcctcctcacccgcctcgccccgaccccgcccgggcctcccggcctctccccgccggcccgcgggctcgccgtccggcgcagggcaggtgagtgagcggtggcgggcggggtcggggtcgggcgcccttgcgggttacggggacccagtccccgacggaggccgagtgacggggcgaccccgggccgcggcaaacttcgcccgagccggggcgggcgggggtcccgggctgggtcgcgccgtccccgaccgccgccggcgcctgcggcggcccggggcagcgaggggactcgcgctccctcaaggtgcggtcgccaggcctggcccgcccgcctccgccccctccccaaattcggaagttgcggcgggaagccgagaacgtctcggatgtgggtcagaaaacgtctggactacttgaggcttcagtttcaaaacggcacaaatttcatctcttgattgagaagagatctggggaacaccccggagcggccgcggcggctggagggcggcggggcggggcgcggggcctcctccccctggacggccgccgggagagcgcggcctcacccctcggtgaccctgcggagagccgcgcgcgggcggtggggcgcgcgcaggtctctcttgttgctcgctgtgttttattttaattttgggggtggttagaacgtgtttcttattgtccccacacgtgttctaattggaagtcttgtttcgtgaaagagtttttttctttt

SEQ ID NO: 133704 - DNA, 30 bp, Homo sapiens
  chr21:47065918-47065948
  hyper
aaggcgtcatgggcccgctgtccatggtgc

SEQ ID NO: 133705 - DNA, 30 bp, Homo sapiens
  chr21:47188169-47188199
  hyper
agtgagccaccctcacgtttctcagcgaaa

SEQ ID NO: 133706 - DNA, 30 bp, Homo sapiens; identical to SEQ ID NO: 13318
  chr21:47392901-47392931
  hyper

SEQ ID NO: 133707 - DNA, 30 bp, Homo sapiens; identical to SEQ ID NO: 57772
  chr21:47393307-47393337
  hyper

SEQ ID NO: 133708 - DNA, 30 bp, Homo sapiens
  chr21:47393673-47393703
  hyper
atcaggccaatgcacgcggccccgggaagc

SEQ ID NO: 133709 - DNA, 30 bp, Homo sapiens; identical to SEQ ID NO: 57773
  chr21:47394065-47394095
  hyper

SEQ ID NO: 133710 - DNA, 107 bp, Homo sapiens; identical to SEQ ID NO: 13319
  chr21:47394339-47394446
  hyper

SEQ ID NO: 133711 - DNA, 281 bp, Homo sapiens
  chr21:47401139-47401420
  hyper
cgtgaaaaaagaacgcggagatctgataaagcaacaattcagctcacggcgaggtcctctgcaggaggcggttggtgggaagaggcgagtgagcctgcccgtgcgtcccgcatggagacgtctggattggaaactaccgaaagatgtttcaaggaactctccctgggtgacacgctggttttcagacgtttgattcagctgctgcagtttcctcctccctgacacgggaactgaactgcaggccgcggcgagccagccagggaaaccgccttctccctggg

SEQ ID NO: 133712 - DNA, 199 bp, Homo sapiens
  chr21:47401761-47401960
  hyper
gacatgagggcggcccgtgctctgctgcccctgctgctgcaggcctgctggacagccgcgcaggatgagccggagaccccgagggccgtggccttccagggtgagtggtggcttggggtgcaggctccagaccccccgctctttgctgccggccagggccagatgcgcggggtcccctcccacgcgtggaactgcagac

SEQ ID NO: 133713 - DNA, 269 bp, Homo sapiens
  chr21:47518043-47518312
  hyper
gcccgcgcctcgggccgtcgggagcggagcctcctcgggaccaggtgagcgcctcccggaccccgcaccctggaagccgctcggcccgcggggggtgaccccgagtcctgggaaggcggcggcggcggctccgtccctcgggtccccgggaagggggactccagccccagggacggcggggggctcggcgggttcggggctcctcctcgcggggctggggccgcgcctgcccctgtggctccgcgtctctgggtccgaccctcgggcgc

SEQ ID NO: 133714 - DNA, 516 bp, Homo sapiens
  chr21:47518349-47518865
  hyper
cggagccggcctgggcggggtgggggggtccctgtctgcgcccgagctcggtgctgggacccccgctcccgagacgaccccggcaccgcacgccccgccaggccccgcgtctgcgagcggttcgggtccggctccggcccgcggggaagacgccccggctggctgggacctccgggggcgcagggcctctccccgggccggacggaaggggcggcggggcggggggaggaggggctttcggtgcccgagggcgggactgggcggggaggggacgcgggtggccccgacgccccatcgctgcgcccctcccggcctggagcccaccagggccccgccaggcccaggagaagctgcagacggaggcggctccccagggcggcgggacccgggctgacagcgacccgcagcccctgccgggccgcccacacccgccctgggactccgccggggcgctggtggaaccgctgggcctgggtctccactgctggcaaccgaacggatcggccctctgtggag

SEQ ID NO: 133715 - DNA, 44 bp, Homo sapiens
  chr21:47518887-47518931
  hyper
cgcccatccgggctgtgccagcagaaccccggtgcccgcgccta

SEQ ID NO: 133716 - DNA, 282 bp, Homo sapiens
  chr21:47649461-47649743
  hyper
gccgcgtagcttcgccggggggagtggggtaggcgcggtgaggccgtgggcccccacacctggcggaccacaggggccagaagccctggagccccgccagggaagggctgcgtcgctggccaggaccgagcgcggtagagcctcagctgctcacggggtcgctggagttgggggtggccccaggagaaattaaaggtgaaaagccttagcagcagagggaagaggaagatggaggcagagcgagtgaccgaacttggaagggacagccgggcgcaacagggc

SEQ ID NO: 133717 - DNA, 30 bp, Homo sapiens
  chr21:47706377-47706407
  hyper
cccgcgtgggtctgcgggcgccccagaccc

SEQ ID NO: 133718 - DNA, 108 bp, Homo sapiens; identical to SEQ ID NO: 57778
  chr21:47717278-47717386
  hyper

SEQ ID NO: 133719 - DNA, 239 bp, Homo sapiens; identical to SEQ ID NO: 13322
  chr21:47717433-47717672
  hyper

SEQ ID NO: 133720 - DNA, 162 bp, Homo sapiens; identical to SEQ ID NO: 57780
  chr21:47717748-47717910
  hyper

SEQ ID NO: 133721 - DNA, 30 bp, Homo sapiens; identical to SEQ ID NO: 57781
  chr21:47743821-47743851
  hyper

SEQ ID NO: 133722 - DNA, 166 bp, Homo sapiens; identical to SEQ ID NO: 57782
  chr21:47744097-47744263
  hyper

SEQ ID NO: 133723 - DNA, 30 bp, Homo sapiens; identical to SEQ ID NO: 57783
  chr21:47745042-47745072
  hyper

SEQ ID NO: 133724 - DNA, 141 bp, Homo sapiens
  chr21:47799136-47799277
  hyper
tgtcatccggggctgcgtgtcgtgagctgcgcccgtcttcctgggctgcgtgtcgtgagccgcgcccgtcttcccgggccgcgtgtcgtgagccgcacccatcttcctggggctacgtgtcttgagcggcacccatatacc

SEQ ID NO: 133725 - DNA, 30 bp, Homo sapiens
  chr21:47879560-47879590
  hyper
ccgggacacccgcgcggcccctcaaaccag

SEQ ID NO: 133726 - DNA, 30 bp, Homo sapiens; identical to SEQ ID NO: 57785
  chr21:48055197-48055227
  hyper

SEQ ID NO: 133727 - DNA, 30 bp, Homo sapiens
  chr21:48055700-48055730
  hyper
atggctggactgcacgtaaggaaggacagg

SEQ ID NO: 133728 - DNA, 1115 bp, Homo sapiens; identical to SEQ ID NO: 57786
  chr21:48087088-48088203
  hyper

SEQ ID NO: 133729 - DNA, 55 bp, Homo sapiens; identical to SEQ ID NO: 57787
  chr22:17081880-17081935
  hyper

SEQ ID NO: 133730 - DNA, 455 bp, Homo sapiens
  chr22:17082068-17082523
  hyper
cggctccctcccgccctcgcccgcagtcccccgatcccgatcccggatctctgggtccacagcttggctccctcccgagccggagccggagccggagccgaagtcgcggctgggcccggccgccccgtcacagggggagggaacccatggggagggggaggggcggtgaggtcagcggcggcggcgcgtccgcgggcggcgggagcttcgcatgcgcggagcgaggcccgtgagtggcagcggcggcgcgcggggggcgggcgaggggccgagagtgggggagcgggcgggggccgtcgaggaggcgttgtgtgggcgcgacggctgcgagttggggaggtctgtggtgcgggtcgccccgggggatccccggcgcgggcctcgcgcgacggccacggtcgcgcggcgtgtgtggggggtccacgcacacccgcaaaacttcctcctcccctgct

SEQ ID NO: 133731 - DNA, 107 bp, Homo sapiens
  chr22:17082786-17082893
  hyper
cgctccatgttgccgcctctcccggtacctgctgctgctcccggggcttcgggaaatgcgagagtctgagccggggaggaggaacccgagcagcggcggcggcggcc

SEQ ID NO: 133732 - DNA, 73 bp, Homo sapiens
  chr22:17082988-17083061
  hyper
cgcagccaccaccccccgaggagcctggagccccggccccgagccccccagccgcagacaaaagacctcgggg

SEQ ID NO: 133733 - DNA, 104 bp, Homo sapiens
  chr22:17083207-17083311
  hyper
ggcgggatgggggcggggcgggcccgcgggcggcggcagctcccggccccggccccacgcccctcggtagccgcccgcgcccggcctcccccgctccgcgccgc

SEQ ID NO: 133734 - DNA, 41 bp, Homo sapiens
  chr22:17565649-17565690
  hyper
agcagcgggaggagcgcacctggggcgcgcgggcggaggag

SEQ ID NO: 133735 - DNA, 30 bp, Homo sapiens; identical to SEQ ID NO: 57789
  chr22:17566282-17566312
  hyper

SEQ ID NO: 133736 - DNA, 189 bp, Homo sapiens
  chr22:17600944-17601133
  hyper
agcgccatggtgagacggaagcccgtggtgccgaagggcgcgcgtagctcgatgaggtctaggatggacgtgcccaggatcagcaccaccttgggagtgaaggcgatggagtagataagccaggccaggtaggcgaaggcgaactcgcccgctgccgcggccgcccccaggccgccccccgcgccgccg

SEQ ID NO: 133737 - DNA, 532 bp, Homo sapiens
  chr22:17601259-17601791
  hyper
cgacggccccggctgttcttggcgaagaagatggcccagcccaccaccaccaccaggtcagtggcgatccaggagcaccagtacaggtcggtgacggcgatgaggtacaggtccagcaggccgccctgcgccagcagcagcaccacggacagcgcctggtagccccagcggcacctgggactgggggcgcagccgcggcgccgacctctgcggccggggcggtctgggcagccgcagcagcagcaacacgggcagcaggaggcgccgctgccggtcccggtgccgcccgcgccccccgccgagcggctcccggggcccccgacggccccggccgcggcgcccccgccgaagtccgcggctgtcatgctgcaggaggaggtgggcgtggaggtggaggaggaggtggccgctgaggaggagaaggcgacaggcgcggggccggcgggggcgcccacctgagccggcggccccaggagcgcggcgttgggcaccagcggcttgctgacgctgaggctctcgtcgtcgtcctcgc

SEQ ID NO: 133738 - DNA, 176 bp, Homo sapiens
  chr22:17601990-17602166
  hyper
gcgagggtggccgagcgccgggcgcattgtcctccgaggggctctggggccgcccagctgttccctccccgccaaccccgggcgggcgaggcgggctaggcggccgaggggagccggggcccgccgcctccccagcagtggggactcgcacctgggccgggcggcggcgagatccg

SEQ ID NO: 133739 - DNA, 161 bp, Homo sapiens
  chr22:17602424-17602585
  hyper
gcgtcacagtcgggtcgggagccctgtggcctggaggaagcgggaggaggcgcgggcagccgccagggcgaggcgacccggtgcggggggactcccatggagcgcggactcctaaggaagtcgctgggaatcccaccggctgtaccgcagggcgttagtac

SEQ ID NO: 133740 - DNA, 1530 bp, Homo sapiens
  chr22:17849501-17851031
  hyper
cggggcgtgggggtctcctcccctccgagcacagtccccggcttcccgatttcctctgccccatccccccgccttccaagcacattgtgctcactcttccaggcagctctttcagcggccgggcagtagcagggttccgagcccgtcttctccggggcggtcacacgtgtccattccctggggttggggatcgctcttcccgcttggctgctgattggtgcctccccctaccccacccttcccgccgctctccagcctccatcctacttcgttccagctcaatcagccccaccgccttcttccctcggagaaaaaagccacttcagagctccttgggcgccgttctcggctggaataaaagcgttaagaaacaggtggaaagcacttcacttctctaggcttcatatttctagggtggacagcccgctcctgctccggctctgccctcggcatcaataataactgaactcccacacgtgcacgtttctgtctctagcccgaccgaaaggaccaccccgcgggccctttaaaaggacgcgaccactcaggccaagtgggggtgggagagctcctggccgtcctcccttgggaaagtgcttcaactccccagtcccaaagtcctggagggcggagggcgcctcgtgagagttctcgggggtgcggcccgcgccccctgggtcctgcggatctgggcccgggggcgcgcgccccgcccctccccctccctggcggtgcagctgtccgggcgggggtggggcgggggccggggcccgcgtgggattaactaggaccggggcgggagtcgaccgcggccggcggggagggctagccccgctctggcgggcgggcgcgtggcaggggctcccggaggccccgagctcccgggaggcgctccggccaacttcgggccggtggggaccgggcctgggcgcggggctctgaaggtgtggaaggaaagtttgggactccgttattcttccacagcgtccttcctcccgtaatatccagcctctttatcgcggggctcgggagcccttggagttgatctcgccaccattatccccccgggcgagcgcggaggacgggctggccattctggccaggccggaggtgttttccagcccggggctttgtgataactgggccgaaacccgagggtcctggagcgcggcgggtggcgggagcttgcggagcgcggcgcactcggcggccaggcatcggccagcccagcggcagccccctttctcctatttttatttttatttttggaaggagctgagaattagtcgattggttggcaggttgaattgccttctcttctatggcaatatgtgtcgtgacttttcaccttttgcctttggacaaaggtgaatggcaactgcgttggtcagtttttgttttctgttctgcggatgggttcgccgacgcagtaatcaaaattagagccactcttttggaagagcaaatcgttgttgttgcctccccagccccacggatcttactttgtgccattttcgggttgattttaac

SEQ ID NO: 133741 - DNA, 30 bp, Homo sapiens
  chr22:18121334-18121364
  hyper
gaacttccgaacgtcgcaatcagatttggg

SEQ ID NO: 133742 - DNA, 51 bp, Homo sapiens
  chr22:18257397-18257448
  hyper
acccttaccccttacgcgactgtttcagacagtgtcgtccaactttaagtt

SEQ ID NO: 133743 - DNA, 195 bp, Homo sapiens; identical to SEQ ID NO: 13329
  chr22:18441047-18441242
  hyper

SEQ ID NO: 133744 - DNA, 30 bp, Homo sapiens
  chr22:18483406-18483436
  hyper
tttcccatgtgccccggagacctccaaaag

SEQ ID NO: 133745 - DNA, 30 bp, Homo sapiens; identical to SEQ ID NO: 57795
  chr22:18484406-18484436
  hyper

SEQ ID NO: 133746 - DNA, 187 bp, Homo sapiens; identical to SEQ ID NO: 57796
  chr22:18506999-18507186
  hyper

SEQ ID NO: 133747 - DNA, 30 bp, Homo sapiens
  chr22:18560379-18560409
  hyper
tttgatcagctctgcgtcagccttgacatt

SEQ ID NO: 133748 - DNA, 199 bp, Homo sapiens
  chr22:18560626-18560825
  hyper
ggcggcttccggggcgcggcgtgctgggggttgtagtccgcgctctgcctcctacttccattacagaaggcgatgggccgagagctgaggaactacaactcctagagtactccgcgccgccgggacgccgcgcggctgcggggctgggcgagcgcaaagatgtccgcgcccgctgccgggaggcgaggtgagtctttga

SEQ ID NO: 133749 - DNA, 32 bp, Homo sapiens; identical to SEQ ID NO: 57798
  chr22:18593347-18593379
  hyper

SEQ ID NO: 133750 - DNA, 30 bp, Homo sapiens
  chr22:18593594-18593624
  hyper
ccagctgagaggtgcgcgggcgaggacagc

SEQ ID NO: 133751 - DNA, 30 bp, Homo sapiens
  chr22:18893702-18893732
  hyper
caaggggcggggcgcgtggtggggcgggga

SEQ ID NO: 133752 - DNA, 216 bp, Homo sapiens
  chr22:18923386-18923602
  hyper
agggactgcaggaaacgcctcccttcctggcttcccttgctccaggagatgcttgggaggcacccgtttcaggccaggaagctccgtaaaggctcccgggaccggcagaagcccccgcgcccccgcctgcaccccgcgcacctgctcgtggcgcgccagcagcgcgggccaggcgcacaagcgcagcaccagcaggctccgcgccagctcccaggt

SEQ ID NO: 133753 - DNA, 274 bp, Homo sapiens
  chr22:18923626-18923900
  hyper
cgcgttgccgaagtccacggcgggcaccggcggccgcactgccgtggccgacccacctcctggcacggccgctgggcccgctgcgggctgctcgcgggaggccggcgccgtggacagcgggacgaagcggggaatgcaggggcgcagcgcgggcagggcgcgcctcagagccatggcgggacggcggtacccgcccgggccgcttaagtgtgcgctgttggtcccgccccgccccgccccgccccgccccgccccgctcggtcccagaggcctc

SEQ ID NO: 133754 - DNA, 30 bp, Homo sapiens; identical to SEQ ID NO: 57800
  chr22:18958120-18958150
  hyper

SEQ ID NO: 133755 - DNA, 30 bp, Homo sapiens
  chr22:19110178-19110208
  hyper
cggggcctgagcggcggggccaccgaaggg

SEQ ID NO: 133756 - DNA, 131 bp, Homo sapiens
  chr22:19132115-19132246
  hyper
agcaacaaggacgacgctgatgcgcccggcgtctccatcgctatcccaggaaaaagctcgggcccagcaggcgcgtcacagggtggagggggcgggactgcaccatttgcgcaggcgcctccaatagttgg

SEQ ID NO: 133757 - DNA, 30 bp, Homo sapiens; identical to SEQ ID NO: 57801
  chr22:19418939-19418969
  hyper

SEQ ID NO: 133758 - DNA, 30 bp, Homo sapiens
  chr22:19419466-19419496
  hyper
tggcgtggaccgcccgtcaccagctctgcc

SEQ ID NO: 133759 - DNA, 427 bp, Homo sapiens
  chr22:19419824-19420251
  hyper
gcccgctgcagaggcgcgctcccagcacagggcggggacggaagggaggaccccgagccgcgtgaaacgcaaggccctcgtgtgtgcgcagctgacaccctaggcggggctgcgtcgggggcggggacaggcgcgtcccagcccacgcagccggaacgcctgagcgctgggcgcctggtctgccggacctcagcagggggcaccgcgggccggactgtggaggggcgcacgcccggaagcggcgagggtagccatgacggcctccgtgctgcgaagtatctcgctagccctgcgcccgactagcgggtgagtgcggacgctggccggatagcggagtgcccagggcgcgtgcggggtcttcgcgactgtccgccaggactcgcctgtgctccctgctcgcctcccagtccacgaatatctcagggat

SEQ ID NO: 133760 - DNA, 30 bp, Homo sapiens; identical to SEQ ID NO: 57803
  chr22:19435130-19435160
  hyper

SEQ ID NO: 133761 - DNA, 30 bp, Homo sapiens
  chr22:19435540-19435570
  hyper
cctctcaaatcacacggctctggccagttc

SEQ ID NO: 133762 - DNA, 473 bp, Homo sapiens
  chr22:19466617-19467090
  hyper
cacctggcagactccgctcctctcaggcaatgcaacgaagaaaccccgccgaccgctctcccagccgccgctgccgctgccgccgcgccaagccggtacgccccagaggctcaccggaagtgccggacccgagacccggagggggggtgcccgggacaaagcgtcggctgcaaaagagaaaaggccaggcgaagacgctaggctctaaaacaccctcagtagaagcattaaaatgccctttcgtgatttatttccccttttataggtatttttaaacgttattttaaattacgtgttgacagtattcccctccagacgaatttagtagggcccattgtccttacgactacactacccacaatgcactacccagactgcctctgcttcagccatcgaggactcgggcggaactaagctacaaatccttcttcaaaccacaccaaaaacctattgcaaacgtaaatgctgcccca

SEQ ID NO: 133763 - DNA, 30 bp, Homo sapiens; identical to SEQ ID NO: 57805
  chr22:19467795-19467825
  hyper

SEQ ID NO: 133764 - DNA, 153 bp, Homo sapiens; identical to SEQ ID NO: 13332
  chr22:19510793-19510946
  hyper

SEQ ID NO: 133765 - DNA, 314 bp, Homo sapiens; identical to SEQ ID NO: 13333
  chr22:19511141-19511455
  hyper

SEQ ID NO: 133766 - DNA, 334 bp, Homo sapiens
  chr22:19511541-19511875
  hyper
cgcctgcacctcggtgctcagagccagcaccgagtcgtacactttgcactgcatgtgcccggtgctctgcaccacgcacgacatccacagccccttccaggtggtctgcgccgtcacgatgttgtggtccaggaaggcggtcacctgccacatgggcagcccgcacgccaggatcagacccccccagcccaccaggcacagcaccaggcccaggatctccaacgctgcggaccccatggctagaggcgagacgcgcacccgaaggcccgcagaacccccaaggccgtgctgcgcggcgccctgggcgggccctggtgcctttgcgcccgcgctc

SEQ ID NO: 133767 - DNA, 55 bp, Homo sapiens
  chr22:19512252-19512307
  hyper
cgacccccagtctgcaccacccagtccactcccacatccccgactgagccgggtg

SEQ ID NO: 133768 - DNA, 733 bp, Homo sapiens
  chr22:19701675-19702408
  hyper
accggacggatggtccgaggaccggcatggacccgggtcccagcgagggcggggggagcgtaaggctgggcctgggctgcggcaccggggaggtggcggggaggaggccggcaggaacagccgtgcagggcgggggcggcgcgggtctggtcgggtgaccccgggcgcggccagggctgtaggaggcgagggcgtcgccccgaggccgtggtctcgggtccatggtgggggacctgggtccccgcccccccgggccgccctgggtcgcgcgtgggcgcggcgggcgccgattggctgccgggcgcgcgggcggagcgggcggcggcggcggcggcgcggaggggccgctcaccccgcagcccggcctcggcctccgccgcttgtcgtcgcgccccgcccgcgagcccgccccgcacgtcccccgccggcggccaccatgagcacaggcctgcggtacaagagcaagctggcgaccccaggtgagcccagcgcctgcccgcgtgcccgcgcgcgcctttgtccccgccgcccgcgcgcctctcaccgtgtctctccgtctctcccccgcccgccggcccggacccgctcggaaccggacccggactcgaccccgaccccgaccccgcagaggacaagcaggtacgtgcgcagcgccgctcccccgccgggagacccggccggctgtcacccattgtgacactagcgccttgggcgcccaggcgcgaccccgccc

SEQ ID NO: 133769 - DNA, 665 bp, Homo sapiens; identical to SEQ ID NO: 57809
  chr22:19706042-19706707
  hyper

SEQ ID NO: 133770 - DNA, 58 bp, Homo sapiens; identical to SEQ ID NO: 57810
  chr22:19711681-19711739
  hyper

SEQ ID NO: 133771 - DNA, 30 bp, Homo sapiens; identical to SEQ ID NO: 57811
  chr22:19718665-19718695
  hyper

SEQ ID NO: 133772 - DNA, 206 bp, Homo sapiens; identical to SEQ ID NO: 57812
  chr22:19718926-19719132
  hyper

SEQ ID NO: 133773 - DNA, 26 bp, Homo sapiens
  chr22:19742731-19742757
  hyper
atcccagctcgctcccgtgccggctc

SEQ ID NO: 133774 - DNA, 546 bp, Homo sapiens
  chr22:19742788-19743334
  hyper
cgcggttcttctctcggcttggcggctggggtccgacgaaggggcagaggccacaactcagcggccccgcgggcagccccggcacgcggccccacccgcccgcctcccaggctcggggtctcggctcgtccacggccacgagggtcgcccggaatgtcgcgttcgccggtgctgtgggccaagcactttcgtgggatggagggacgattggggagcgcccgaggctgctgtgttggcgcccgcccccgagggctgggagtcaagaggtgggagtggagaggggaggagagggcagagctcctgggcgcgcggtcctgtccgggttcaggcgaggtttgggcccccagccgcccgcccttctctggggcccggggctgagctgctgatggcgggagggaggacggtgagggcagctcctggcggcgggccttccccgagaccccgaggccgcgtccaaatagggcgctgtaagcaactccaggcggtccatcctaaaacgaattagcagggtcaagtaaagcccggctcctcagtgcttccctttgc

SEQ ID NO: 133775 - DNA, 81 bp, Homo sapiens
  chr22:19743352-19743433
  hyper
cgattctgctctctccatactctgaggcctagaggaggagtcccccgtgcacctcgaacctccggccggtcccttctgtgt

SEQ ID NO: 133776 - DNA, 30 bp, Homo sapiens
  chr22:19743634-19743664
  hyper
gtcctgctgggtgggcgtgagggtgcctgt

SEQ ID NO: 133777 - DNA, 80 bp, Homo sapiens
  chr22:19743886-19743966
  hyper
gccgccgcgggtcctcggtcgcatccctcccttcagcctcctgcactcagccaagcctctgctccccaccccttacctac

SEQ ID NO: 133778 - DNA, 59 bp, Homo sapiens
  chr22:19744034-19744093
  hyper
cgctgggagaaatgggcgtcttgtcttcgctgcgcattgcatgcggaggagcagatgtc

SEQ ID NO: 133779 - DNA, 30 bp, Homo sapiens
  chr22:19748003-19748033
  hyper
gagaggagaaacgcacgcgggcgggcggca

SEQ ID NO: 133780 - DNA, 608 bp, Homo sapiens
  chr22:19748300-19748908
  hyper
actcggcccgcggcgcggggcagcgctcagcttggtggcgggggcggcggcggcggcccgcgggtcatgatctccgccgtgtccagcccgtggctcacgcagctctcgcatttctgcgacgttgcagccttcacggccagcagcctgagcagcctgggggccgcggggggcttcccgggcgccgcgtcgcccggcgccgacccgtacggcccgcgcgagcccccgccgccgccgccgcgctacgacccgtgcgccgccgccgcccccggcgccccgggcccgccgccgccgccgcacgcctacccgtttgcgccggccgccggggccgccaccagcgccgccgccgagcccgagggccccggggccagctgcgcggccgcagccaaggcgccggtgaagaagaacgcgaaggtggccggtgtgagcgtgcagctagagatgaaggcgctgtgggacgagttcaaccagctgggcaccgagatgatcgtcaccaaggccggcaggtcagggcgcccctccccacgccgcgaccctccccacgtgctgccgccagggctgcgggcctccgcctgatccgcgcgagcggggccgaaagccgggtcgggggc

SEQ ID NO: 133781 - DNA, 108 bp, Homo sapiens
  chr22:19748960-19749068
  hyper
cgccgtcccggctccggcgacagccgcccggcgctcccctcctaacacctatcctccgccggggcgggaggagacggcgcgggccgcacgggaacggcgaggagcccc

SEQ ID NO: 133782 - DNA, 40 bp, Homo sapiens
  chr22:19749084-19749124
  hyper
cgccccgcagccccaggacgccgcgcggcccagaaaccgg

SEQ ID NO: 133783 - DNA, 80 bp, Homo sapiens
  chr22:19753297-19753377
  hyper
tgccagcaatcccttcgcgaaaggcttccgggactgtgaccctgaggactggtgagtgtcctcccccgagagagtgagcg

SEQ ID NO: 133784 - DNA, 170 bp, Homo sapiens
  chr22:19753516-19753686
  hyper
cggagaaaggtagggccggggtcgtgggatccgggttccggccctgtgcgcgctctaccccgggccggcggcctcgcccgacctcgcctgcgcccccggggcgctccaggctttcgcgccggttgcacaacggccgcggcggcgggcaagcgcgcactcgcccgcccggc

SEQ ID NO: 133785 - DNA, 105 bp, Homo sapiens
  chr22:19753869-19753974
  hyper
cggccccggccggccgcgctcactcctcggccctctccgcagacgcggctgaggcccggcgagaattccagcgcgacgcgggcgggccagcagtgctcggggacc

SEQ ID NO: 133786 - DNA, 17 bp, Homo sapiens
  chr22:19754033-19754050
  hyper
ggcgccggcggcttagt

SEQ ID NO: 133787 - DNA, 39 bp, Homo sapiens
  chr22:19754287-19754326
  hyper
cgccgcggccgccgccgccgctgccgcagctgccgcggc

SEQ ID NO: 133788 - DNA, 143 bp, Homo sapiens
  chr22:19754593-19754736
  hyper
tccctggagccaccgcgggtccttccccggccccgagggccaagggggtccccgcccgccagtgccaaagcgcccggtcggaggcggaaggaagtgatatttattgttctccccgagaccgcgtcgcccgcggcccggccggc

SEQ ID NO: 133789 - DNA, 30 bp, Homo sapiens
  chr22:19754965-19754995
  hyper
ctgccgactgtaggtcggtcccggtcccac

SEQ ID NO: 133790 - DNA, 30 bp, Homo sapiens
  chr22:19841912-19841942
  hyper
ccatgcaggaaatacgagctcacaaggccc

SEQ ID NO: 133791 - DNA, 43 bp, Homo sapiens
  chr22:20004349-20004392
  hyper
gcggaccgggccggcgacgcgaatctccgccccgccccatctg

SEQ ID NO: 133792 - DNA, 30 bp, Homo sapiens; identical to SEQ ID NO: 57818
  chr22:20004866-20004896
  hyper

SEQ ID NO: 133793 - DNA, 30 bp, Homo sapiens; identical to SEQ ID NO: 57819
  chr22:20008352-20008382
  hyper

SEQ ID NO: 133794 - DNA, 30 bp, Homo sapiens; identical to SEQ ID NO: 57820
  chr22:20009260-20009290
  hyper

SEQ ID NO: 133795 - DNA, 30 bp, Homo sapiens; identical to SEQ ID NO: 57821
  chr22:20067458-20067488
  hyper

SEQ ID NO: 133796 - DNA, 252 bp, Homo sapiens
  chr22:20104759-20105011
  hyper
tctggcaacgtcatcgtcacgcgccggatccaacccccaaccactttagccagctctagaggcgcgcgtggccgggacggaagtgcgcgcgggtgtcgccgggagtgcgcgctcctctggctgacgggcgggccgggcatgcgccgcgggcgttttggcgggaagcgcggggcgggccggacaatgagagtgtccgcctcctgagccaataaagctgtactggttttgaatcgcggcgcgtttcccgccgct

SEQ ID NO: 133797 - DNA, 30 bp, Homo sapiens
  chr22:20105409-20105439
  hyper
ctgcagggcccccgcgtgaccttggggtgg

SEQ ID NO: 133798 - DNA, 433 bp, Homo sapiens; identical to SEQ ID NO: 57823
  chr22:20255236-20255669
  hyper

SEQ ID NO: 133799 - DNA, 30 bp, Homo sapiens
  chr22:20255977-20256007
  hyper
ggcggaggggatggcggcccgggccggagc

SEQ ID NO: 133800 - DNA, 354 bp, Homo sapiens; identical to SEQ ID NO: 57824
  chr22:20286610-20286964
  hyper

SEQ ID NO: 133801 - DNA, 30 bp, Homo sapiens
  chr22:20307568-20307598
  hyper
tcccgagcgcggcgcgtcccgcccctttta

SEQ ID NO: 133802 - DNA, 30 bp, Homo sapiens
  chr22:20307979-20308009
  hyper
cggccgagcagtggcgctggggtctgtctg

SEQ ID NO: 133803 - DNA, 1488 bp, Homo sapiens
  chr22:20790617-20792105
  hyper
ggagtgagtagacagagaccacggcgatcgcgccctccccctctccaggcaccgccccgcccgccgccgccgctgcattcctggggccggggaggcccgggagtccgcggcggcggcatcgatgcgaagcagatggcgggccaggccggcccccgccccggaggcggggctcgcagcggggaggggtctgcgcgcctccggaccagagttcggaaaccccgcgctgccccctcgcagccccttgtctctggcgccgagcccctggactcggcttgccccgggtccgtggctcaggcgccccgacgcgacccagctcggagcccggcggccgcctctgcggctgccagcccgtgcggcgtctccaatccgcgccaaggcgcccccacacgcccgctcctcacccctgcgtggagatgcccttgaccttgtggcctttggccagcccaccggctcccccgaccccagctcctaactcctggcgtccggggctcacctctctgccctccgtgcaaactcccggactcgcccccccaccggccgggcctgtcgcctgcctgtcccacactggcttccccagccggcgccccacatttgcgcggccccttcttgcacccagaatccccacctggttgtcgccagggttcccacatcctccggtcccctgtgcctgtcatagtccttccgcctcccgcttctggtccacttcgagcgccggctcctcgacgctcgcctgggtcaccaccctcccacccgcgcccgctctaagacgcgaatctgtctttccaagtctggcttgctccaggacctccccggctagcaccgctcctcctcccctgaccttcctcctcactcccactcccggctccagtcggactagtgcggggctttagcacatgcagttcctttggcttgaatgcccttccccagcttttccccgtggacttcacaactcggtcaagggtccctttttccaggtctttcctgatatcccggacaacgcgtgtcatcccctgggtgcccacggcactccatcctcccctcaggtgacttctcgtccagggttccctgggatgcactgtcgtggcccatggccgaggctgggcctggaacggagccgcgctggctagggagccgaaggggcccacacttggcgtaggaaggttccggtagccccctcccaatgcccggcgccgccacaccactgcccagagcgtccctctcgccccctcccccagccaggccggctcctacccgggagcacggcacacgttgcggccgcgagggttcagttcctgaggcgccacggtgtccggcagcatccagagcagcagcagcagcagcagcgacggcagcagcggtgacggcggccccccggctccccggcgccgcgccggcccggccccccggggccctgcgccctccatgaggcgcggggcaggcgcggggcgggcacgggcgcgggtgcggccgcagcgagagcggccggaa

SEQ ID NO: 133804 - DNA, 61 bp, Homo sapiens; identical to SEQ ID NO: 57827
  chr22:20792308-20792369
  hyper

SEQ ID NO: 133805 - DNA, 116 bp, Homo sapiens
  chr22:20792481-20792597
  hyper
cgcaagcccacccccgctcccagcgcctcggaaccggccaagggagtggggcccgcagacagcccaggtcgaggccgaaagccaactccacagcaccccaccgcgaagtccttgta

SEQ ID NO: 133806 - DNA, 30 bp, Homo sapiens
  chr22:20810139-20810169
  hyper
agtaacacctcttcccgcccatttatgaat

SEQ ID NO: 133807 - DNA, 30 bp, Homo sapiens
  chr22:20810672-20810702
  hyper
gaacaccggcagccacgatgcagctggttg

SEQ ID NO: 133808 - DNA, 30 bp, Homo sapiens
  chr22:20851041-20851071
  hyper
tggtcccagaggtccgtgcgcgggtcttgg

SEQ ID NO: 133809 - DNA, 30 bp, Homo sapiens
  chr22:20861686-20861716
  hyper
gcgcaggtctgctgcgggagcacctgccgt

SEQ ID NO: 133810 - DNA, 30 bp, Homo sapiens
  chr22:20861925-20861955
  hyper
ggccaagcgggatacgggcggcgggagctg

SEQ ID NO: 133811 - DNA, 30 bp, Homo sapiens
  chr22:21057095-21057125
  hyper
ggtgaggccggcaccgccccaggaccctgt

SEQ ID NO: 133812 - DNA, 30 bp, Homo sapiens; identical to SEQ ID NO: 13342
  chr22:21271377-21271407
  hyper

SEQ ID NO: 133813 - DNA, 30 bp, Homo sapiens
  chr22:21271646-21271676
  hyper
taacgggagggccccggcggccgccgggag

SEQ ID NO: 133814 - DNA, 714 bp, Homo sapiens
  chr22:21319194-21319908
  hyper
atccctgggaggtcgcgaggatccccggagacccagactcgggcccggggcgcccccggccagagcggcccctggctgcctccctacgccccgcgactccggtccggacgccgagggcctcggcctgcccctgtcccccggccgccccccacctgctccggcccggcggggcggtgctgggcccgcgggctccccggccgcagtgcaaacgcagcgccagacacgccccgcccgcgcctccccgcccccccgcgcccgcggccccaagcggttcccgagcccaggcccgcgccgagcccaggtgagcgcccgccccggggaccctggtccccggaaccccggtccccgcccgccgccccgcctcttcgccccggcgccgggggccagcgcttgcgctcccaagtctcggaccccggcccggcacgttaggggctgggggttggcaagcggggccagaggcactggccggggtccgaagctcacctcgtccttctctcgtcccacaacggccccttcccggctcgccgcggggccccactgtgtgccagtcccccttctcgggctgcaaggtctggcgggggcaacgggacggagccggcgaggctgctggcatcggcttcccagagagagggaactgcacgtgcagaggcggggagagtggacagaggcttgccctgagctccgtgggggaggggagagcgcggagcccccaca

SEQ ID NO: 133815 - DNA, 117 bp, Homo sapiens
  chr22:21336322-21336439
  hyper
gtgggcctgggaggcgccgggaagagcagtcgcgacggggctagggacgacacactgcattcactggaagggacaacgcagcgccagtacatagcctgaaacgctccccagaaggtc

SEQ ID NO: 133816 - DNA, 157 bp, Homo sapiens
  chr22:21356376-21356533
  hyper
tctggccattgctgcgccgccgaagtctcgcgaggggtagcgcgcgccggaagttggtaccatagagactggagagccggaggtgcccccgccaccggggcggggcggggcgaggtcctagctagctgggttagtaagcggcgcgagcgtgcgagtt

SEQ ID NO: 133817 - DNA, 30 bp, Homo sapiens; identical to SEQ ID NO: 57832
  chr22:21356761-21356791
  hyper

SEQ ID NO: 133818 - DNA, 157 bp, Homo sapiens; identical to SEQ ID NO: 13344
  chr22:21368224-21368381
  hyper

SEQ ID NO: 133819 - DNA, 377 bp, Homo sapiens; identical to SEQ ID NO: 13345
  chr22:21368435-21368812
  hyper

SEQ ID NO: 133820 - DNA, 252 bp, Homo sapiens
  chr22:21385763-21386015
  hyper
agctcgcccatggatacgtaggtgaacaggtaggcagagcccgtgcgtggcacacgtgccccaaattctgcatagcatagggctgccagcagggaggccacagcggccacaccgaaggacaagagcacagcagggccagccacctccttggccacggcacctgtgagcacgtagagacccgagcccaccatgccacccacgcccagaagagtcaggtccagcgtggacaggcagcgccgcagtgacgtctcc

SEQ ID NO: 133821 - DNA, 376 bp, Homo sapiens; identical to SEQ ID NO: 57835
  chr22:21386500-21386876
  hyper

SEQ ID NO: 133822 - DNA, 110 bp, Homo sapiens; identical to SEQ ID NO: 57836
  chr22:21386893-21387003
  hyper

SEQ ID NO: 133823 - DNA, 491 bp, Homo sapiens
  chr22:21399921-21400412
  hyper
tcccattccatgaaaggggggcgatgctggaaccgcctaggggaggcagggggataaacgcagcaaggcgcccaatccggtgcatggtctgtggcgcatgcagtgtatcagcccgggcgaggagcctcagcacaagccggccacagtttctacggcaaccgacaacaccgggttgccggggcgaccgccgcgggagagcgcgtcgctattggctgtggggggtgcctgttgctggacggcacattcggttggtcagcgcagccgcagactccgcccacaatcccgggccgcgctctgggcgcggggtcaagctgtctccgactcagtgtctgagactgcgagagggtcgtaaccatgaggggttcctgtgagaggtctggggaggatgaagagcagaaagaagaggctatggtggcctgtgggcgtctttcaggggtccccgaggccgagcagggtcccgaggccaattgggactccgacctggagacgga

SEQ ID NO: 133824 - DNA, 196 bp, Homo sapiens
  chr22:21922623-21922819
  hyper
tcctagcaaactgtcgccttgtgactgcagagtcacacagcgggtaagttccaactccaggaaggcctgaggtcggccccgatcgcggcgcggttctgcttccctctcctccactcagtcatcccgatctcccctccctgataaagtgccatttttggggggataacggttgatttcagtcgttcgaatcaaaacg

SEQ ID NO: 133825 - DNA, 30 bp, Homo sapiens
  chr22:21984466-21984496
  hyper
ccggcaactgctcccgcgctaaccagacca

SEQ ID NO: 133826 - DNA, 30 bp, Homo sapiens; identical to SEQ ID NO: 57839
  chr22:21996411-21996441
  hyper

SEQ ID NO: 133827 - DNA, 30 bp, Homo sapiens; identical to SEQ ID NO: 13347
  chr22:21996694-21996724
  hyper

SEQ ID NO: 133828 - DNA, 30 bp, Homo sapiens
  chr22:21997316-21997346
  hyper
ccacttcccgtcgccgctgtccaacaacca

SEQ ID NO: 133829 - DNA, 1166 bp, Homo sapiens
  chr22:22005758-22006924
  hyper
aatatacttcctagtcatcagcgaagggtaggcgcttaatgaatgcttctccgcaaagtggatcacaatcacgaagaaaccaaagcttacacttccgttccccatatctcccacagatccaaaagaccacggggcccaggacccggtctccatagcccagccatacccgggggttttcaggaaagcctcactcgcgtcctgccgggcgatccggggtggttgagttgggaggggggctaccccagtttgtaagcccaccacgtccaaatatcccatccaggaggcgcagagagcaacctcagcatgcataacaaagcagcccgcggccgcgttcacagcaggcttggcgggggttcgggaatttccacagggtctcggcctcccccactgtgggctcgcgcctggcgcccctcaccgggcttccaagcgctcttgtcggtgtcgctagaaaactcgcagagattggagctgagaaaaggcgggcaaagttccttttgataagttatgaatggggaaaaagtgtttgtagaactcattgttaaaaccacggagcccgagactcggccggcgccgggccaatcggaacccggaggctattttgaaatctctcccgtctcagccaacaggcatgcaggaggcgaatccccgcgccagcgccggccaatgagcgcagcgctatgctaaggagtcgggggcccggcccctccgactgtcagcgggttaaagatggagccggcaggcgaggggccgccacgaggtgcagggtcgtctggacggggacccgggggcagacgatggccgggatcctcttccgtctaaccctccgcgtcctgaccgggccctgggcggaagggatgtctgcgtgagtcagctgtgtctgaggaggggatcctgggctgggctgggcggccctactcggcgggtcaggcggaggggcgcggccgggatcccgggggccctctttggagcagggaactctagaagggcggggagcccccatcctctgctccactctgggcctccaggcagaagaatatgttagaaaagaatccagagtgtatctagtgcagggcaaggggccagggatggagtcgtcagctagaaggggcgcgtcgtcccggggtggggccgccctttttctcctggagccgcgggccgagtcaggg

SEQ ID NO: 133830 - DNA, 322 bp, Homo sapiens
  chr22:22012020-22012342
  hyper
cgcgccgagaccctcgggagccccgcccagacgcctgctccgcttccaggccacccgggctctccagccgcgctcgctcgtagagatcctagacaagttcgacagcgaggtcccgcagagcaagacctgccagcagatctccgaggaggacttggagaggcaggcggacacctacactgggcgcgcgctgcgcctcctcttccgcagccccgtccgcaacccgtcgctggcggagagggtggtacaattggaacagcgcgggctctcttttttccggatgcggccgcggggcatgggaccggctgggcgggaactgtcacta

SEQ ID NO: 133831 - DNA, 97 bp, Homo sapiens
  chr22:22020154-22020251
  hyper
cgaaaagacgcctgcgggagatggcacacctagctaggaccccatactgggcaggcgatccttccgagcatgagcacctggcgctagcgaaccacaa

SEQ ID NO: 133832 - DNA, 30 bp, Homo sapiens; identical to SEQ ID NO: 57844
  chr22:22020542-22020572
  hyper

SEQ ID NO: 133833 - DNA, 42 bp, Homo sapiens
  chr22:22090485-22090527
  hyper
cgttcctccggctcgcggggatgggccgagggcgtgcagggc

SEQ ID NO: 133834 - DNA, 332 bp, Homo sapiens; identical to SEQ ID NO: 57845
  chr22:22220989-22221321
  hyper

SEQ ID NO: 133835 - DNA, 30 bp, Homo sapiens
  chr22:22221584-22221614
  hyper
cgggcgtggccggtcgcggacactcaccac

SEQ ID NO: 133836 - DNA, 31 bp, Homo sapiens; identical to SEQ ID NO: 13350
  chr22:22280174-22280205
  hyper

SEQ ID NO: 133837 - DNA, 373 bp, Homo sapiens
  chr22:22292759-22293132
  hyper
ctaaggcaaggctgcgctcccagggaatgcgggcagggagccagggcggagggcagaggacgagagcgaggaggagagcgcgggcacccactgatgctggcggcctcgggtattcgctttctctctcttctcccaccttgttccttttccccggatgcacgcatgcactagtaatgccgaatttagaacaacagggaaaggaaaggaaatggcaaaggaagggaaaggaaatggccgacaggaaatggcaaggaagggaaaatccactgcaactctgctgcctgctggcctgtccagggacaactattcagctgggtgggacgttgctacccccttgtggcacccctgctgcagcctgcgattcttacgccct

SEQ ID NO: 133838 - DNA, 217 bp, Homo sapiens
  chr22:22306475-22306692
  hyper
tgtcaagcgctgtgccgaaatccctgcagccggagccagttcttcctgttgtacagacaggttcaggggcttgcctgaccgaacccagcggcaatgtgcccggcctccgcgcctgaggctctggctcacagacctgtggctgaagcagctgcagcccgagcacttgtgcagctgacgctcgcttcacggacgcttgggaggccgcggagccgggggc

SEQ ID NO: 133839 - DNA, 312 bp, Homo sapiens
  chr22:22307055-22307367
  hyper
cccctccggttcctcggtcccatttcacccctgtgcgccttgggcgctcgcctgaccctcgtcccagccccgtcagccctctaatcccgtcccccccggcctcctcacccctggtctccgcgggcctcagctgtctcctcgcggctccgtgtcccgcaagctgctgccggccggccccgcccacttcccgtccctggccgccgcgggcgccgcgggcgccgcgcaggcgcagtcgggcctccaggctggcggggccggacctctgctgccccctggcggctacgtggacggtgactgcggccctttagtggt

SEQ ID NO: 133840 - DNA, 258 bp, Homo sapiens
  chr22:22337126-22337384
  hyper
ccacagccgcaccgcggatccagctccggtccttgttcccggggcggctaccgacaacccctatttccgggtccagccgcttctggcgtccccgcgtccggtgtgccagcgtctgccctccggctccggcgggtcggcgttcttaggttccgtggctcgcggattccgggagcaccccagggagtggcacttgcacgccgcggaccgcagggatccccaagccctgcacccagattcttccccgccacggagagacaa

SEQ ID NO: 133841 - DNA, 405 bp, Homo sapiens; identical to SEQ ID NO: 13352
  chr22:22862457-22862862
  hyper

SEQ ID NO: 133842 - DNA, 88 bp, Homo sapiens; identical to SEQ ID NO: 57851
  chr22:22863219-22863307
  hyper

SEQ ID NO: 133843 - DNA, 31 bp, Homo sapiens; identical to SEQ ID NO: 13354
  chr22:23254251-23254282
  hyper

SEQ ID NO: 133844 - DNA, 352 bp, Homo sapiens
  chr22:23411782-23412134
  hyper
tgggggccagctcctcggtccttctcccttccttccctcccaaggccacccttccgtgtgccaggattgccagggacgccaaagagcccctagacactgggcggtggcggcggggggcggcggcagagatgactaatgctccctcccatcgctgcacaaacctcaccggtgtaaatcgttagggtttgcataggcctttcacacgttctgaaggattggtgagacaatccaggagagcaggtgccactagccccactttgcaaacagaaaggctgggagaggtcagtcggttgcccaaggacgtagagctcacaagaggccgaactgggtttgaacccgagtggagagaagg

SEQ ID NO: 133845 - DNA, 30 bp, Homo sapiens
  chr22:23413051-23413081
  hyper
cgccggggatgccgcgcggggccgccgggc

SEQ ID NO: 133846 - DNA, 167 bp, Homo sapiens
  chr22:23484156-23484323
  hyper
cttccagtagcccgcgccactggccaacctattcagttgccaggcgacatcgttgccaggcgactccagcagcgtccgcggcgccgcggtcgacataatcagcacccactgcgcaggcgcaaacagcccaaggctgcggccggctgcaaagcgggaacaatcattta

SEQ ID NO: 133847 - DNA, 30 bp, Homo sapiens; identical to SEQ ID NO: 13355
  chr22:23500537-23500567
  hyper

SEQ ID NO: 133848 - DNA, 81 bp, Homo sapiens
  chr22:23522445-23522526
  hyper
tggaccagggagtccggtgtcttttttacgggggacccctgggctgcgagttgcacagtccaattcgctgttgttagggcc

SEQ ID NO: 133849 - DNA, 442 bp, Homo sapiens; identical to SEQ ID NO: 57854
  chr22:23523109-23523551
  hyper

SEQ ID NO: 133850 - DNA, 31 bp, Homo sapiens; identical to SEQ ID NO: 13357
  chr22:23546141-23546172
  hyper

SEQ ID NO: 133851 - DNA, 92 bp, Homo sapiens
  chr22:23864329-23864421
  hyper
tcccgggcgtcctccgcctgtatcctgggccccccaagcagcgagccccggtgccccccacccttacccctcctccccggtgcccagggccc

SEQ ID NO: 133852 - DNA, 30 bp, Homo sapiens; identical to SEQ ID NO: 57857
  chr22:23908322-23908352
  hyper

SEQ ID NO: 133853 - DNA, 230 bp, Homo sapiens
  chr22:23908683-23908913
  hyper
gccgtcagcgccaagcgcggccccgcggctccgccgagagatcgataactaatttcaccgcggtagccgccccagtttttccccgataattgcgcgccggcagctgtgagcgaggcccccagcgcggcgcgaagcccctcccgcgccgatcaattgacaccgccaccgggcggcaggaaaactcatttttctttctctccccggctccgggtgggcgcgagctgagctct

SEQ ID NO: 133854 - DNA, 30 bp, Homo sapiens
  chr22:24059071-24059101
  hyper
cgcctccaccgctccggccctcgcgggtcc

SEQ ID NO: 133855 - DNA, 30 bp, Homo sapiens; identical to SEQ ID NO: 57858
  chr22:24059627-24059657
  hyper

SEQ ID NO: 133856 - DNA, 30 bp, Homo sapiens
  chr22:24109836-24109866
  hyper
gcagctcctggaaacgacccccggagagat

SEQ ID NO: 133857 - DNA, 30 bp, Homo sapiens; identical to SEQ ID NO: 57859
  chr22:24110100-24110130
  hyper

SEQ ID NO: 133858 - DNA, 719 bp, Homo sapiens
  chr22:24110158-24110877
  hyper
ggcggggccccgggcggggcctcaggaacacgcccccagcgggaggcggcactgcccccaaccctatcccccttctcccgtcctccggacatctcccttccagcagctccgggtctcggctggaaatgggaccctgctccctccctgcgcctggcaggctgtgcgggttctggggacaggggccagtgtcgcaaagcgccgagggcttaaggagggcgacagtgccttctgttaggaccaccgcagagggcagggagcggagttgggggttgttgcgagccctggaggggagaggagacggggaggcgacgggatggggccagctgggaaggggacgcgaggctccaggctggactccgctctctgccccctcccggactcggctgtctgtcccctccctccagacagggtctgctgaccaccgcgtggcctgggagtctccggtggcctagggaagtgaagcgcggccctggggaaggcctggagcaacccatccccagaactcccacgagggggcgtcccaacccgtcttcgactgttggccaaaatgcgctgccaatgctggcagccttacgcagtgcccgcgggggatatgaggccccccgcgcggccctgaaccccaccggattccccgggccggcccgaccgcccccacctagtccctggccccgcgagtgcaacccccgacactaacggcctttacgcgacatccgagcagc

SEQ ID NO: 133859 - DNA, 31 bp, Homo sapiens; identical to SEQ ID NO: 13358
  chr22:24113336-24113367
  hyper

SEQ ID NO: 133860 - DNA, 30 bp, Homo sapiens; identical to SEQ ID NO: 57863
  chr22:24129322-24129352
  hyper

SEQ ID NO: 133861 - DNA, 465 bp, Homo sapiens; identical to SEQ ID NO: 13359
  chr22:24180528-24180993
  hyper

SEQ ID NO: 133862 - DNA, 734 bp, Homo sapiens
  chr22:24181054-24181788
  hyper
cgacgtccggtccgcccggccgcttaccaccgcggcggtggtgaggacacaggctgcggtgtaagcccgcgtcaccgccggcacctgcaggaactcggccgctagtccctgccacgccattgaaccttctcaagcacgcgtggcccagccagcaacgcgctctttaacccgcctcccagccccgccttcggccaatccgcatccgaggcgctgcgcgccccaggctgaaaagagagcccctgagcccgacagccaatggaaggaagaagagggaaattaggggcggaaagggagagtgggcgggtagaggctggtggccaatgggcaggcgccaaggttgagcacgtggcggttgttgtggctgcggtggtggcgcgggagaacgtgtggccaatgaggaactggtcatttcgcggctttctaggagaggaccagtagcgtggacccacgacaccacgggggcggggctaagatcgtatgggttacaggagcgaagacccgagcaggcgaggcaaaactggaaagggcggggcgcgtgggcggggcgcggagtgtggcggctcagaccgtgctggctcactaactgacgacctagccacaacgttgtcctcgctgccagcccaagacaggcccacctaacccacagcagggaggcattcgggaatgtgtccaaacctccccaaacgtccagggccccactcaaatgtgccggccgctgtcggggttcttccccg

SEQ ID NO: 133863 - DNA, 30 bp, Homo sapiens
  chr22:24200004-24200034
  hyper
cagcttcgtctcgacgggtttgctcctctc

SEQ ID NO: 133864 - DNA, 30 bp, Homo sapiens; identical to SEQ ID NO: 57866
  chr22:24236534-24236564
  hyper

SEQ ID NO: 133865 - DNA, 90 bp, Homo sapiens; identical to SEQ ID NO: 13361
  chr22:24236848-24236938
  hyper

SEQ ID NO: 133866 - DNA, 37 bp, Homo sapiens
  chr22:24372936-24372973
  hyper
ccggaaatcagagccggcacacgtgacttttgtttgc

SEQ ID NO: 133867 - DNA, 30 bp, Homo sapiens; identical to SEQ ID NO: 13362
  chr22:24407960-24407990
  hyper

SEQ ID NO: 133868 - DNA, 1397 bp, Homo sapiens
  chr22:24551714-24553111
  hyper
ggccaatgccatcccggcctgccgcactcctggccacccctacaccatgctctctggggccccacagcttcctgcagtgagagctgcacccactttgcccggcagcggtccacagcccgccaccagcggccagtccagggaaccggagaggattggccggcaaaagtcagttgcgctcctgggcccgcttccagtagagtgccggcgccccgtccggccgcgcctgccccgccccggcccgccgcgagcgagagagcgaacgagcctccgcggccatggcccggcgctcgccctagctccactgcacagatgccacggcggagccggcgggtaggaacttggcgggggcgggggccgggactggggccgggactggggccggggctggggctgcgcaaccgcttcgcctccgctgcccgtctgggtctccactttgctggcgcttttgctcaatcgtcccctggtgggctctggcggccgccccccgcctcggcgcaccaggcgcagcaggaagcccgtgggctgtggtttccccggcgcccccgcggaggaaatcggccggcggcggggtgctgcgcccccatgcccagggcgggctggcacccggttcagcgtcaggtgggcggccaagccggcttgggcggcggcgcgcgggggcggcaggcgctggtgaagcccgcacacgcgccagcgcatccagccctaccaagccccgggctgggagctggctcgtgggggcgtgcgctgcgcgaaagcgaaagccgcccgccagagcaactttgcggcggaaggcgccgacgaggagctgtgccgtgccgctcttggggatggtgagctggccgcccggccgggtgggcagcgcgtccgggcgcggtgcttcgctagctataaataggtgctgtgcggggacaggaagatggttccagccctttacaagcaccggcccgttatgtgcgctgggctaggaccttgccccgcagcggagtgggaggagtgaggttaggggtaacggttgcatgggatggggggtgggcacatagagcctacagcagagttggcggcggggctctcccatgcacttggttgtttgtcgtttctgcttttcccgggagggggaagggaggaacagcccggcagttctggggaccttagcgctccacgtcttatttggcaggagaggctggaaacgagcgggcgccagctgcaggcaaattgcaggctttcccagcccttgtctgcagagagaatcattacctgtggatggcgcggggaatcccttgccctcagtagccccgcctggagagacaggaccgcgttgtggggggtggggtgtaggagtgggcggaggccagggcgcccctggtggcctgtgtacaaccctgcggccagagaggccc

SEQ ID NO: 133869 - DNA, 31 bp, Homo sapiens; identical to SEQ ID NO: 13365
  chr22:24563089-24563120
  hyper

SEQ ID NO: 133870 - DNA, 37 bp, Homo sapiens; identical to SEQ ID NO: 13366
  chr22:24643677-24643714
  hyper

SEQ ID NO: 133871 - DNA, 238 bp, Homo sapiens
  chr22:24666725-24666963
  hyper
aggcggggcctccacgacgcctgcgcagacggccgcagccctgctgggcgcgaaggggctggccaagggcggggcccgcgagggaggccgggcggcccggcaagcggcgctgcggggtaggctgctttcctgaggccggactcaacgggtctcggctgagccaccgggtgagctcaccgcccagcccaaaccaggagattgcgagggagcgatgcggtgcagcgcggtaagagcagca

SEQ ID NO: 133872 - DNA, 30 bp, Homo sapiens
  chr22:24819664-24819694
  hyper
gcgggggatgtggcgcggtccaggcccgtc

SEQ ID NO: 133873 - DNA, 647 bp, Homo sapiens
  chr22:24819900-24820547
  hyper
gcgggagccggcgtgcgagcggcaggtcagccggggtgctaggtctggcgtgcggggtcctgggtgccgggtccggggtgcggggtgccgggggtccggggctggtggccgggcggcgtggggccgtcgggggtgcggggccgggaggactgggaggctggggttctgctcccctcagggttcctttcccgccgccccgagaccagttccccggcgcggggtccgagtcctgccccgcggcggctgccggcactgcctgtgaagggcccaggcacagtcacgtcccaggcgcagttgcggcgccgcgtgcgggaccctccgagctgtcccaaactgcaccggaaggcgcgcaggggtaggcggggagggaaggcaagtgcggcggccggcgcggcgcggggtgcggagccgcaggtagcgggcggggagcgtccgtccgtcagtccgtccgtccgtccatgcgccgcagaccggccccgcgcgctcgcatgaaccttcgcgagctcctccagcagggatggaccgggggcgcagaggcgcttcctgaggggtggcgggccgggccccggggcgagggagattccccaggtggaggagccgggcggagaccggttccccgggaaggtgaggcgcgggcagagataccc

SEQ ID NO: 133874 - DNA, 30 bp, Homo sapiens
  chr22:24830866-24830896
  hyper
gtagtggagctggggcgagtcctggaaaga

SEQ ID NO: 133875 - DNA, 30 bp, Homo sapiens
  chr22:24921749-24921779
  hyper
cgtgaaagagtagccggcttcagtgcctgc

SEQ ID NO: 133876 - DNA, 30 bp, Homo sapiens; identical to SEQ ID NO: 57873
  chr22:24951362-24951392
  hyper

SEQ ID NO: 133877 - DNA, 92 bp, Homo sapiens; identical to SEQ ID NO: 13367
  chr22:24989195-24989287
  hyper

SEQ ID NO: 133878 - DNA, 1570 bp, Homo sapiens; identical to SEQ ID NO: 57875
  chr22:25348187-25349757
  hyper

SEQ ID NO: 133879 - DNA, 514 bp, Homo sapiens
  chr22:25507303-25507817
  hyper
cagccccgagggaccgtgagcgagttgggacttgggggagaaaaaaatgggggcggacgtcagctccctgggcggccgccgccaccgcctccgcctccccgaggcccctcctgcattcctgggcagcgaagcccctcgctaagacgggggctgatgtcatcccgggctgctcagccaggggacccgggggccctggtggctgcctccggaagtgagctagccgcctgccggccgacaggtttggaatctccagccagaggacagaaaacctgcatgggtcaggtgagcggggtctggccgagggcagccgggcagggggcagcagggtgcggcagcttgcccaccggaacctcccagggtgcacctcaggggggctgcctacctgaagggaagtgaggacgagggtgcccaaaggccgccccctccacccccacccccatccccatcccccgcctttcgggaccgtcacgccctggagtgagtgcagccggcttgttcctcaaagctccttgtc

SEQ ID NO: 133880 - DNA, 683 bp, Homo sapiens
  chr22:25678185-25678868
  hyper
gcgaggttgggggcccggcccgctgggcgctgttcacaggtagcttggaccagagcaggggcttcatcattacctgcggggacaggtgggacacatgcatttccggggtcatcccagacctcctggaggatgctgattgatgctgtcccgtttgagaactactgtgtccaggtagcagaggcctccccgatgccccttgagtagtgggcacggggcccagggcttctctggatgagctgggcgggcatgagaacgcatggagctgggggcaggaggtcggagcagcgaacgaggaggagaaggagtaggcggaggccgaaggagaggtgggggaggaagaagaggaggaggaggagtcccttgtggccaccccgaagggagggagggctaccgtagagacttggtcgagaggcgcgggacaagcctggccgctgggactgtgcgctgaggtgcaccgaccgtcgggccgcgagctccccgcagaccctcgcggaatgagctggggggcggcgcgcgaggcggcggagcggaaggcgcactgcgaccccggcgggctacagcctgcggcgcttgcagggcgctggtggggcgcgccgagcaggggctgccctggggctgccccagtcccaccaggtcggggctcagctggcggcggcggcggcggtggcggcagcgcgtcccat

SEQ ID NO: 133881 - DNA, 207 bp, Homo sapiens; identical to SEQ ID NO: 57878
  chr22:25679042-25679249
  hyper

SEQ ID NO: 133882 - DNA, 170 bp, Homo sapiens
  chr22:25679267-25679437
  hyper
cgagcgccccagggaggggctggttatgacttggctggaccagctccatccctgtcgccccctccccccggccctgtcctgtcctgtcccatccccgtggttcttcctgttgcattggtgtggtccctgtgggctcgttgcctgtcactcctttgcgctccttcttggtc

SEQ ID NO: 133883 - DNA, 30 bp, Homo sapiens; identical to SEQ ID NO: 13371
  chr22:25800648-25800678
  hyper

SEQ ID NO: 133884 - DNA, 662 bp, Homo sapiens; identical to SEQ ID NO: 13372
  chr22:25816891-25817553
  hyper

SEQ ID NO: 133885 - DNA, 1252 bp, Homo sapiens
  chr22:25959828-25961080
  hyper
gaaagacaccgagaccgaagatcaggaagctggaaattccccccagcttcggtgtttgggctgtatctcgcttttccacttccctaaatcaccctcgtggtgcgagtgtgctcgcagcagatgctccctaattgtctcttgtattgaccgtaaaaccctaacgacaggaatactctctctccttctatttctcaacaccatttcaacacccaaactaaaacctctcacctgagtgtaagggagtggtgaccttcttaagcggagagctcttccatcagagggctccctaagggcatctctgttcctagccggggagccgtcaccccactttgttctgcttagcctaagacacgcaactttttccagcttttactcttcgctgaattctcacggtggggttggggggatgttcaggctcaggagcgaggttgggggcccggcccgctgggcgctgttcaccggtagcccggaccagagcaggagtttcatcattacctgctgggataggtgggacacatgtatttccggggccaccccagacctcccggaggatgctgattgacactgtccagtttgagaactactgtgtccagggagcagaggcctccccataaccccttgggttgtggacgtctggcccagggcttctctgggtgagcggggcgggcatcagagcgcgtggaacctggggcgggaggtcggggcagtgaaggaggaggagaaggaggaggcggagaccgagggggagggaggggaggaggaagaggaggaggagtccctcgtggccaccccgaggggagggcgaccgtagagacttggtcgggaggcgccggcccagcgaggccgctgggactgtgcactgaggggcgctgaccgttggacgcgcgctccccgcagaccctcgctgaaggagcagggggcggcgcgcgtgcgcggggcgccgggcggcgcgcgagggggcggagcggggaggcgtgctgcgaccccggccggctacagcctgcggcgcgcgcagagcgctagtggggcgcgcggcgcgcgcgcggggcgggggcgcgcggaggggggggctgccccggggcggcccccccaggtcggggcgcggcgggcggcggcggcgggcgcgcgtcccgtccaggtccggagtaaccgccgccgccgccgccaaagctcgccaacatggcggacctggaggctgtgctggccgatgtcagttacctgatggccatggagaagagcaaggcgaccccgg

SEQ ID NO: 133886 - DNA, 248 bp, Homo sapiens; identical to SEQ ID NO: 57883
  chr22:25961110-25961358
  hyper

SEQ ID NO: 133887 - DNA, 30 bp, Homo sapiens; identical to SEQ ID NO: 13373
  chr22:26564738-26564768
  hyper

SEQ ID NO: 133888 - DNA, 238 bp, Homo sapiens; identical to SEQ ID NO: 57885
  chr22:26565122-26565360
  hyper

SEQ ID NO: 133889 - DNA, 148 bp, Homo sapiens; identical to SEQ ID NO: 57886
  chr22:26565502-26565650
  hyper

SEQ ID NO: 133890 - DNA, 552 bp, Homo sapiens
  chr22:26565734-26566286
  hyper
cgccccgaggggcggggcgggcagggggcaaagttgccgggagagcggggcagccaggggtcggggctgaccagggcgactcaggcaccacccgccgggatgggaagcggtggtggctgtccaaaatcggggctaggaaccgcacgtccccttggcccgggctgatgggagtgtggaggcggggatgtgttgaaggactcgggcgcttccctgcttcggctgcgggctccctttcggtcttccccggctgcggggctgattctcctttgcagccaaagaggttctccttggagtggggtcgcctccaaaccccaaattcccggcgcttctctgcaaccgcacccggggctaggtgccagataattatcttcctctccgggagaggacaggaaggggggtgagaagctgacccaccctgcaactgaggactagactcaaacagtgcatttgccgctccccccgacaccacagaaacccttgactcctttggttcaggctaccccgagggtctgtgttcctggatcgatctcagccaagcgtcaggataccgga

SEQ ID NO: 133891 - DNA, 386 bp, Homo sapiens; identical to SEQ ID NO: 13377
  chr22:26756624-26757010
  hyper

SEQ ID NO: 133892 - DNA, 248 bp, Homo sapiens
  chr22:26763713-26763961
  hyper
gggtgatctcccagggcgttacctggcgttctgcaaaccctaatactcttaacgcccccagtttgtgcacacggggaatcgtgagcgccacctggtggcagctattattacacattattgctttaagcctcgcccccacctcccagatggtgaagtgagaaaattgcatcttagaatccattgaacactcatcactaaaattaagttgtaacacactaagtaaaatttggattcgtttatctggactt

SEQ ID NO: 133893 - DNA, 216 bp, Homo sapiens; identical to SEQ ID NO: 57890
  chr22:26773509-26773725
  hyper

SEQ ID NO: 133894 - DNA, 113 bp, Homo sapiens
  chr22:26824999-26825112
  hyper
aatgactgcacgcccgtcgccgcctgcgcgcaacctcgggctgggcgggcgctgcgtctcggggcgcactgccaggaccctccggagcggcggcgggcgcggcctcgggtcgc

SEQ ID NO: 133895 - DNA, 172 bp, Homo sapiens
  chr22:26879458-26879630
  hyper
cgcagcccccggggcgcaggcagcgactggtaacagcactagggctgtgcggtgtctggccccagctctacgggactgggaaatggtgggcgaacgcctaaggattaggcggggtcgggtcacgctctaagctgggggcccgcccctcggtatccccgcgctccgagcgccg

SEQ ID NO: 133896 - DNA, 140 bp, Homo sapiens; identical to SEQ ID NO: 13381
  chr22:26880365-26880505
  hyper

SEQ ID NO: 133897 - DNA, 45 bp, Homo sapiens
  chr22:26908200-26908245
  hyper
accccaagcagcaccgcccctctccgtgcctcggcagagctgtct

SEQ ID NO: 133898 - DNA, 99 bp, Homo sapiens
  chr22:26908292-26908391
  hyper
cgccttccctgagccttcgtccctactctcactggcgctgagtccccttgtggccagccgtgctcacctgtccgagggtccagcgtaccaaattcagct

SEQ ID NO: 133899 - DNA, 30 bp, Homo sapiens
  chr22:26908662-26908692
  hyper
actggtgtggaatccgctgagccaccttgg

SEQ ID NO: 133900 - DNA, 1168 bp, Homo sapiens
  chr22:27053096-27054264
  hyper
tgcgcccctggtccgcggtcgcgcgcagcccccgcgcctctccagccctgagctctctgcggcctaatgtggacgggcaagcgttgccatgacagcgccgcgggtggggatgcgggaggctgagcgcaccggccagctagcccctttgtgcggcgggggctgcggagtgctccctccaagaccggttgcaccccgctttcctggccaggactctgggcgcgggtaaggaggggttgggtgtgaggttgtaggggcgcaaggaggcgggaggagggtggaggtgagggccgggggtggggcgcctccgcccgccagccgctcccgcattaaaatttcatgggcgctgcagcagctacaaagacgacgccggctgcgctcgcgggaccagagggagggaggctgcggacgagtgcggggaggagtttgagatgggaggcgcttgcaggggctcccccagttctgcgctgtgagccggggcacaaagagccctctgcactagcgccgcaggaccgcggacccgaggtaagacgtcgccccatcctagaagccttccttcccaagtgtccttgtcccctaacggggaacagcctaattccccaaggctggggtcgagggtaggtcccagagtcccagggctgggttcagggatgcaacgccgcctgaagtgtcccgcattggatggatgaagaggctttacagcctgtaattctcaaacacagccaagactctggctgggatggggggtgaggtcaggcaaggggaggatgctttaggagtccagtgcgaatggggatcttgcaatcatgattatgagggggaacaaagaccctttccttccgacgacacaagacacaatttgggaggtggacccgcggaccttctcggtccaccaggttagcaattaactggccaagccacgggcagagccagagggtctcggaactggaggtgggggtggggcggtggggcagggtccttgagctccccttccctcatactcagcccgcccccgacccaaccccccgagcctgccattccttcacttcccagatgtccggcgtcaaatttggctccaaaaggatggagagggctggtaggtaacccaccctcgttgaaaacaacagtgacatcagtttatggagaggttactctacgcagggacgtgctt

SEQ ID NO: 133901 - DNA, 346 bp, Homo sapiens
  chr22:27054543-27054889
  hyper
tttcccctcttccagcggagggccctggggtagagaaattgtttctgggattgtgcaggaggaggcctggggggcgcgccctggattccccaccctcatcccaggctccggatccgaggctgcccggcgcctgggattgttggcgcgcacaccccactgcagtgccgccgcggggaaaacgcccccacctgctgcggcgggaggggaggaagtatgagagggaggactgcgagagaacttgagggaacggctttgttttttctcggggccaggctgggactgagcacgactcaaagcaaaacacttgctctggactcagtgctttgcaaagcgcattcccatttgg

SEQ ID NO: 133902 - DNA, 646 bp, Homo sapiens
  chr22:27068607-27069253
  hyper
ctgcacaggaagtcacgaggggggcgtatcccacgaggaaggcaggagggggcgtgcccctcaccggaaattagcagaggggcgtgtcccacaccggaagtcagaaagcggagcctttcttacaccggaagtcaatgaagcgggtctttcctacgctaaaaaccactgagtggagtatttagtacacaggaagtcggccagagaaacatttctcatatttgaaggccggaaagagggacatttctgacaccggaagtcagtgagaggactctttcccacacaggaagtcagctagagagccgtctcccctctctggagccgagagaggccggtttcccccaccgtaagtagacgtggggccgtgaccggaagtccttgggaaagatccgtcccattcccggaagctagagggcgttagttgtcgggttgaaaaggggtgtggggaggggaagcagctttaccccgggctcggagtttgcaggagagagaagtggggagcaagaagtgaacctcaggggctcacagggttcccgcagatgctcaggccggccaggaatgcatctctggctctctgttcccacggacgtcactgcctcagccagcctcccccagagcccgccagccgctaagccggggccacacctgg

SEQ ID NO: 133903 - DNA, 712 bp, Homo sapiens
  chr22:27299013-27299725
  hyper
ccttagtccttcagcaagggccggcccttgctcctttcctgagcggctattttgagagcgatggaggggagagggtattagattcctgaccttgaggtcggggaggggagggtgatgctagtggtggacgaaagacttgaagataatgagaaattgcatcaactttacccaggctgtttctgggtctagaagcaagcaaaaataaggcgggagcgggtggggggaagaaaaagaggcatttattttggagccgtatcggaagcacaagtgtcatgggctgaaaggccgccttctcctgcgggctaagggtgtgggcgacagctcgcacattcaaataagggagcgattacacggcgcttgcttctgaagacggatttcctggtagggggagcgggcgggggggctgggccggtgtaaaggggacggcaacattaggctttggcaagttaattagggttcaggagtccagcgagcgagcagggggagaggctggatttgcataaatccatttacataatgttcttcacaaattgtgcagccagaaggcagggagggggtggggagggaaagggctggggagggggaggtggttagacgcccgaggcagccgccgccaaagggggaagggcgaggcccgagatgggacccgctcctccttcgccgcttcacctctcccctgctcttgtctgcaccagggccacccctgcctatc

SEQ ID NO: 133904 - DNA, 164 bp, Homo sapiens; identical to SEQ ID NO: 57899
  chr22:27496884-27497048
  hyper

SEQ ID NO: 133905 - DNA, 98 bp, Homo sapiens; identical to SEQ ID NO: 57900
  chr22:27695126-27695224
  hyper

SEQ ID NO: 133906 - DNA, 1527 bp, Homo sapiens
  chr22:28196458-28197985
  hyper
cgttaaagttcctctcgccctggccagcgttcctgctgttgacctggggctcgaattggtccagcccaaacatacttggcggggggcagagggggatcaatagggcatgacagccggctctccgcggcgcgcctccggccagctactcgttccagcccaggattgggcgctccgggacgctcagcaccgcgggggctcagcgcgcacctccaccccgcctgatgtgagggacggggggcggggtattagctcctctcctgaagctccgattctgcccggggagggcctctcacatcttgcgaggccgcggggcctctaggagccgtgttggggggcccatgccccgggcggttgtcacagccgcgggtgggtctgcggggaggggacgaagccgcggatgaacggagacaaaaagttaagtggggggaatggggagggaagggggttgggagagcagagcgatcaccttctcaagtccgattgggtctgctggggagccctcaggacgccgcccgcagcctcccggagtccgtggcagagctgctaagggcaggggagggagacccttcaaagccgcggctggcgccgggcaccgacagagcggtccctccccccgccccccggagtccccgcgccccgcagcccgagcctccaccgagcacgatccgctcgcacaatccccgtaggctccgggcgagcggctgctgcttcttcagcgggtcggaggactggaggctccgctcggcatcgccggtgccggcccccgagccgaggacgcagaggggctgcgaggcggcaggcgccgggggctggagccgagggtcggggaaaggcgcggctcctctgctcggcagcgggtgcgctgcgttcggcgcgcagcttcgcggccacgtccgccgcctgccgcttctgttctccgccgttgggtgtctgagttcgccggagtctccgcgcaccgttgcaggcgcgggagggcagcgagacgaggggttgggtcgctccaaggctccggttccctgcctccgcgctgaggtgcttcgcgagtccctctcggacctgagggaggggggcgtacgcgggtcggggggccacgccgggcgagcaggctaaggcgttcccgctgcgctctcagagcccggaatggggggaggggggcgcgggggcagctctggggggtctgcgcacccctctcccgactagcgggggggctctgcgtggggcgttccgagggtctcggctcccctctctgtgtctgcctctcgcccagcgccgggagaagcagcaacaagttttgcatttcagcaatcaatttcagccattacatttgcaccaatcagcgccgcccaagttccgggctcggggcggggctcgctcttaaggtggtccggggtcctggctgccgaagcccccgccacgaacccgcactaccccagctctggggtcccctgcgcccgcctctcctcggggtccggcgtcagtgcgctgggggcgcgccccggcctccgggcgcatcgagctggagagggt

SEQ ID NO: 133907 - DNA, 450 bp, Homo sapiens; identical to SEQ ID NO: 57903
  chr22:28198203-28198653
  hyper

SEQ ID NO: 133908 - DNA, 268 bp, Homo sapiens
  chr22:28200772-28201040
  hyper
ccgtgtatgcgccggcgtgtgcgcctccacagtgtgggcacccctgcgtgtgcctgtgtgtgctttcgcccgcaaggtcccgcagtgtttctttggaacagacacattgccccctagcgctcagatgaattcaaagtccccgcaggcgcagagccgggagcagtaggagcctcagggccctccacccgccagggctttctccatcctcctccctccccaggtccccctccgggggcactgagtgtgctggcaacggccagaggaggcc

SEQ ID NO: 133909 - DNA, 30 bp, Homo sapiens; identical to SEQ ID NO: 57904
  chr22:28314622-28314652
  hyper

SEQ ID NO: 133910 - DNA, 13 bp, Homo sapiens
  chr22:28315322-28315335
  hyper
gtcgcgtcagcgc

SEQ ID NO: 133911 - DNA, 187 bp, Homo sapiens
  chr22:28315374-28315561
  hyper
cgggcacacgaggcctccactgcggttgcgcagcctgccgaagagcgtgcggcttctactgcggctgcgcaagctcgacgcgcgcactcttgtctgcttacgagggctcctcccttcagctttggtccctcggggcgtctgggcagcctacgctttccggtgagttttccagttggttctttggaag

SEQ ID NO: 133912 - DNA, 1365 bp, Homo sapiens
  chr22:28838041-28839406
  hyper
tcccacatttagaaacgttatttctgggaccaatagcaatttattttgatagaaccgctggatttttttttttcttgagttctcaacaaaggagccatattaggaaataatctcgcaaaaagcaaagtgccccctcccccttttccccatgatcgattcacacacgctggtgcacgctgacacgcacagacacacgcccgtgcacaatggccagcgcaggcaatcgcacgggcccacgaggcctcaggagccccgcaggctgaaggcccggctatggccagccccaggcgctcaggcaggaggcctctcggcccgccgccccggaaccagctgctgggctggtgtgctggggctgctcgccccccagcggggccctggggaaacggctgccagcggctcagagccttttaaccccttggggaaataggtgttataacaccacctgcggggcctgtgtcaggggtgcagcctcaaatccactcccgccccacgccccgccatggggcaacacctagtaggtcttggctggctcctgcaaagctaatcgtgtcgctgtctgcacaggacttctaaagcaaacgggtgcttccgagctgtcacccctggggctccaggcatatcatgaaggaaaaacttaaagggcagtggatgcagaccagatttggtaactcgtccctaagggactgatgcaagtcccaaaggaaccagggctgtttggaccagctggcccagcaaactacggaaggggtggagagacctgaaggtaaccgccccgtgttacccttccccgggttgggctttggggccccattcccctctccaggacacttaccttcttccggggctgccatttcatcatatttgtaaagccgatacgtggaacatcaagatgttggctgggggctgggggcagatgcagggcagcgacgactgcaagtcatgctgcctccctcccaccccctaattctttcccatattcactgcgaagggaaaagccccaggagagtccagtcttttcgccttcagttcaatgaaaagtatccccaaaccacgaacacacttcccaccaggctaggaagtcccagcagccaccggcgtactcctgccagagcggggcattttcccggccggcgcctgcaaaaggagcctgtagcagggggtctccaagctggctgcagagaccctccctcagagaagagactgagaacgcgggctgctacagaatcccagccgggcttctaccatccaaaccccttttggcgaattctcctcttctcaaaaaagattagacaagcaatcaaaccctcacgcgcagcctggagcaattcccacaattctgggtgtatttctcgtttgtaaaattta

SEQ ID NO: 133913 - DNA, 89 bp, Homo sapiens
  chr22:28839652-28839741
  hyper
ccttcccttcagtgcgagcacagccagcccagcttcagccacacagagcaaacggtttctgggtcttagtgccacgacatctgctccaa

SEQ ID NO: 133914 - DNA, 7 bp, Homo sapiens
  chr22:29075305-29075312
  hyper
aggggag

SEQ ID NO: 133915 - DNA, 839 bp, Homo sapiens
  chr22:29075343-29076182
  hyper
cgacaccccccaccccggtgtgcgcaggccaacacccatacacaccctcacacacccacacacatccacacacactctcgcggaaactgagccaggcaggcggcggaccaggtcccgccgcctcacggctcgcggctgggatcgaacccggactgcgagacgccttccgcctcgcaggcgctcctctgccgctgaggcccggcccggctcccaccgccggagtttcacaaagaaagtctcccggcccgagcccctcacgcactcaccggcgccgacgccggcggcgactctggctcccgccgccttcggctccttgcgggggtcggcccttgggtcggctcgggcgccggcggcggcgactgctccatccccacggggcccgggccgcgtccgcctcgagctaacggtcccgccagctaggcgcgcgcgccggttccgcgcgccatgttcccgccgtgctgcgcgccgccgcggcgcccctcactgcccccaaaccgcgcgcgcgcccccgcgggcccacacatgcaccgcgcacgcgcgcgttcgccgcgccccctccccgcgcgccccgcctcgcgccctctggagctggccgctgttcccagtgtctcgcccacccccgccgggcccgtcggactcggcgggtgagcgcgcggttcccggctccgcaccgccgcctgcctctctgcagaccaccccggacccgacccctcggccatttccccacactgccgctttcgcttcccccacgacgcggggcctgggacgacggtctgggccaagaggaacttccccgcaagaagtgtcgagttaaggacgctactaagggggcgggatcg

SEQ ID NO: 133916 - DNA, 30 bp, Homo sapiens; identical to SEQ ID NO: 13389
  chr22:29091825-29091855
  hyper

SEQ ID NO: 133917 - DNA, 96 bp, Homo sapiens
  chr22:29137893-29137989
  hyper
tggccgtcaggcgccgcctcaatgcctcctgggagttgtagtttagaagggagagcggaacttagaacccgggttcccctcgggtgatcccgcccc

SEQ ID NO: 133918 - DNA, 30 bp, Homo sapiens; identical to SEQ ID NO: 57910
  chr22:29168596-29168626
  hyper

SEQ ID NO: 133919 - DNA, 30 bp, Homo sapiens
  chr22:29169140-29169170
  hyper
cccacggccctccgcgggagcttcgcagcc

SEQ ID NO: 133920 - DNA, 30 bp, Homo sapiens
  chr22:29196032-29196062
  hyper
ctggtcatctctaacgagagagttaaaaag

SEQ ID NO: 133921 - DNA, 30 bp, Homo sapiens; identical to SEQ ID NO: 57911
  chr22:29196692-29196722
  hyper

SEQ ID NO: 133922 - DNA, 31 bp, Homo sapiens; identical to SEQ ID NO: 57912
  chr22:29279216-29279247
  hyper

SEQ ID NO: 133923 - DNA, 74 bp, Homo sapiens; identical to SEQ ID NO: 57913
  chr22:29279555-29279629
  hyper

SEQ ID NO: 133924 - DNA, 74 bp, Homo sapiens; identical to SEQ ID NO: 57914
  chr22:29279910-29279984
  hyper

SEQ ID NO: 133925 - DNA, 30 bp, Homo sapiens; identical to SEQ ID NO: 57915
  chr22:29300290-29300320
  hyper

SEQ ID NO: 133926 - DNA, 595 bp, Homo sapiens
  chr22:29426291-29426886
  hyper
tgtgcaatggcgccgcgacccggccgcggactccagcctctaaagtcgggtacctttaattaggagaaattaagtggggctgctacatattttgagaataagtaacactatttaaacttaggcagccttaaccactaacttaaccgctgaattctcgctgctacatgtctcctaaatagatcagcataatcttaactaggacttaaaatgcatcatcttcgttccggaactcagaacctgcagccgacgggagcctttggaggcttaatgactttaattatggcgagaaatatcttctcccggtggggaggggcgcggccggtggcgaggagggcactttcccgggtcggagaaggccggatggcagcccgccccgaaagtcccggcccgctggattgggggttcgggggtggggggaacatagagaagcagggctggtggaggggaggagggaccctgcagggcggtacacgacgggtgggagtggggaggaggagggctcctggcgcggggaggagccgcgggaggggggatgttggccgcagggcctcggagttctgagctgtgtttgtggcttcagcgctttgatctcctg

SEQ ID NO: 133927 - DNA, 507 bp, Homo sapiens
  chr22:29467391-29467898
  hyper
aggagtttgggggtacgcgggctctgggagtggataagggggtggcgcccgggggttgagggggcccaggggcgagtgtacccaaggcgtgccggtcccgcccagccgcgctctgggtgcggcgagtctgcacactggtgcagatgttcccgccgccgcgccgggcgcaggtctgcacttgcaagcccgggaccagggacttgaaagcgcccggcgcgccgcctggacctgccccgccgggcgtcaccgctgcgctttaggcgggaactgtaggaaaatcccctctgcctggcgggagggcgggggaggaggacggcccacgaccgaccccgggtgcggcaggggaagaccttgccggggtcggggcggggggaggcgggcaaagggcctaccacgctggggccgaaagtttaagcaagccgcgcgctctctgatccctaacatcccaggctgtaggataagcagtactgtctcatccatttctggacgttgcgttgggcgttttac

SEQ ID NO: 133928 - DNA, 425 bp, Homo sapiens; identical to SEQ ID NO: 57917
  chr22:29468747-29469172
  hyper

SEQ ID NO: 133929 - DNA, 201 bp, Homo sapiens; identical to SEQ ID NO: 57918
  chr22:29469213-29469414
  hyper

SEQ ID NO: 133930 - DNA, 45 bp, Homo sapiens; identical to SEQ ID NO: 13392
  chr22:29469460-29469505
  hyper

SEQ ID NO: 133931 - DNA, 30 bp, Homo sapiens; identical to SEQ ID NO: 57920
  chr22:29469704-29469734
  hyper

SEQ ID NO: 133932 - DNA, 221 bp, Homo sapiens
  chr22:29550498-29550719
  hyper
aaggagctgcccgcccgcccagctcccgctgcggcagagcccccagccgccgcctcctgccgccctcgcctttcctgcaggagccgtcccagcgcaggcttgctcaccagcgccgccccgtggtaagactgcagatctgcggaagaaggccagccctgaaccgcaactgctctcaagcccttccattacagttacacggattttttgcccagcgcggtgat

SEQ ID NO: 133933 - DNA, 41 bp, Homo sapiens
  chr22:29550778-29550819
  hyper
gttcagaatcagcctgggcaaaattgcgagagaaaagaaaa

SEQ ID NO: 133934 - DNA, 30 bp, Homo sapiens
  chr22:29602168-29602198
  hyper
tcccggcgcgcacacgcccccacctccagg

SEQ ID NO: 133935 - DNA, 30 bp, Homo sapiens; identical to SEQ ID NO: 57921
  chr22:29621461-29621491
  hyper

SEQ ID NO: 133936 - DNA, 214 bp, Homo sapiens; identical to SEQ ID NO: 57922
  chr22:29663972-29664186
  hyper

SEQ ID NO: 133937 - DNA, 30 bp, Homo sapiens
  chr22:29664424-29664454
  hyper
ctgagtggagttgccgagagggggttgagg

SEQ ID NO: 133938 - DNA, 30 bp, Homo sapiens
  chr22:29664751-29664781
  hyper
gaggcctccctccccgttttcagggtttcc

SEQ ID NO: 133939 - DNA, 969 bp, Homo sapiens; identical to SEQ ID NO: 57923
  chr22:29702351-29703320
  hyper

SEQ ID NO: 133940 - DNA, 30 bp, Homo sapiens; identical to SEQ ID NO: 57924
  chr22:29710261-29710291
  hyper

SEQ ID NO: 133941 - DNA, 797 bp, Homo sapiens; identical to SEQ ID NO: 57925
  chr22:29710516-29711313
  hyper

SEQ ID NO: 133942 - DNA, 30 bp, Homo sapiens
  chr22:29784426-29784456
  hyper
agctcccggcgccccggctcggttcggctt

SEQ ID NO: 133943 - DNA, 30 bp, Homo sapiens; identical to SEQ ID NO: 57926
  chr22:29784679-29784709
  hyper

SEQ ID NO: 133944 - DNA, 30 bp, Homo sapiens
  chr22:29875931-29875961
  hyper
caggctcttccgacgcgcacccgggggtcc

SEQ ID NO: 133945 - DNA, 23 bp, Homo sapiens
  chr22:29876271-29876294
  hyper
ggacgcgctgctgggcgccccgt

SEQ ID NO: 133946 - DNA, 198 bp, Homo sapiens
  chr22:29876677-29876875
  hyper
ggcgagctgtacgagcgcgaggtccgcgagatgcgcggcgcggtgctgcgcctgggcgcggcgcgcggtcagctacgcctggagcaggagcacctgctcgaggacatcgcgcacgtgcgccagcgcctagacgacgaggcccggcagcgagaggaggccgaggcggcggcccgcgcgctggcgcgcttcgcgcaggag

SEQ ID NO: 133947 - DNA, 30 bp, Homo sapiens; identical to SEQ ID NO: 13395
  chr22:29885579-29885609
  hyper

SEQ ID NO: 133948 - DNA, 30 bp, Homo sapiens
  chr22:29977048-29977078
  hyper
atgctgcacagccgcggagccatgttggag

SEQ ID NO: 133949 - DNA, 40 bp, Homo sapiens
  chr22:29999382-29999422
  hyper
caccccaaaggaggcgggacggagcgggaaagtcctgcct

SEQ ID NO: 133950 - DNA, 1278 bp, Homo sapiens
  chr22:30115855-30117133
  hyper
ggggagaaggagccccgggcaggtttggggcggccgctcaggggccggcggcgggaaggggcgggctgggggtggggagcgcggagggggcgggcgggcggctggcgggggaggcggggagcgcagccagcgcggcacagaacgagcgagcgagcgagcggagaggcggctacagcctgagcgccgggccggtagcggccgcgccggcgagcggactagcgggcggcgagcagcgcggagcgcgcggggcaccgaggagcgggcgcggcgggcaccgcgcgaggcagccggagctctcggaaaggccagagcggcgccgcccccgctgcccctgcggggccccggctgggagcccgacgagggagcgggcggcatggcccggcggcccggggcgcgggggcgctaggcccccggaggggcgtccccagcctcgccgctgccgccgccgccctccgcagccgcgcgccccgcccgctccagccgcccccggggccgccaccggcccatgagccccggcctcaaagtttgcggcgggcgggcgggcgcggagcctccaagatgccgttccacccggtgacggcggcgttgatgtaccggggcatctacaccgtgcccaacctgctgtcggagcagcgcccggtggacatcccggaggacgagctggagggtgagtgtccgccgggatccccgccccggcggccctcctacctgtgcgcccaggtgaagcgcgggccaggggcgcgggggcggggggcggggggcggtccgcaggtgccggttgccaggtgggcgccccagctagcagctgtgccccgcggcaagacctgtccgcaccccggggcgccgcggtgggggtcgctcaggcggagagcggcccagcccctgcccgcgtggtccccagcgctgcggaaacttgccgggccccgcagcggggtcacggggccgcgcagtcggcggtgacggtgcggcaacgcggcggactggggcgggggtccgcgctgagcccccagcgccggcccggccggagcacccgcatcctgatcccctccgcggcgcccgcccgcggctctctgctcgcattgacattccgctcgtgtcgctttaaaaattcaatctgctcgggcagcagcagaaggggagagggcgactgccctgctcttgcccgctgcggggccgcccccgtccccacctgcggccgtagccccttccctgcagccctgcggggacccccagcccggcgcgccgggaaggcggcccgggaggcggtggcgacaacaa

SEQ ID NO: 133951 - DNA, 491 bp, Homo sapiens
  chr22:30162875-30163366
  hyper
caagtcttccagtgcggagaaaagagactaggactcgcccctcgacgtctcgcggaaggtacctggctccccggtggctgcagctccgggctcctcctcctgcgtcctcgcgtcgcgtactgcttgctgggattcgtagtctcgccttggccatcagttcgcccttcccagagagctttgggaatctaagccgggactgggcggagggcggggagaaggtgatggcgcgcgagggcttctgggagttgtagtttgacatattctaacagccaggaattctggagaagaaaaattgggtaataaatcttatcagattatctgggctgtcctgatatgaaccttttgagtttttttcctcattcccaggataggaatacctctgtggttcaaaacacgaaggctgagattcagaggaactacaaatcccataaagtgttgcacgtctagggcctttggggaacgaggtcggccccagcgcaggcgcggtggcg

SEQ ID NO: 133952 - DNA, 30 bp, Homo sapiens
  chr22:30233909-30233939
  hyper
ggaaactgaagccccgggtgtgaggacgtg

SEQ ID NO: 133953 - DNA, 92 bp, Homo sapiens
  chr22:30234278-30234370
  hyper
cagacaggaagtctcggcctggccccgcccccagagccgagcaaactaccgccgggaagccggacccgggttgcgcctctcttcttaagact

SEQ ID NO: 133954 - DNA, 126 bp, Homo sapiens
  chr22:30234397-30234523
  hyper
cgcccccttcccctcctatctcccttcctgcttaagcagagaataggtcagctgagggcgggctgtgtgattacacctctcgggaaatccaagtatggcacctgagaggacgtctcggaatcccag

SEQ ID NO: 133955 - DNA, 30 bp, Homo sapiens
  chr22:30616606-30616636
  hyper
tacagcaggcacaggcggggcacagggaga

SEQ ID NO: 133956 - DNA, 327 bp, Homo sapiens
  chr22:30642416-30642743
  hyper
aagaggaggaggaggaaggctcggcgccccctccctcgccgccaacctgccgcggggcgtgcggtgcttgggaccatgtgcccgcgctcgctccgggccgccacccagcgcctccggtggctgcgcgggcgccccaagtgttcgtgtgtctgcggcgggtgggcgtccggctcgcgctgccaagcgccccaagttgccgccgcgccccgcagcggggacgcgaagccggcgcggggcgggtgtatttacctgccgccaagaccttcattatgggctgcacttcagagggccttggaggaaacctcagatgccggcagttttcagagg

SEQ ID NO: 133957 - DNA, 113 bp, Homo sapiens; identical to SEQ ID NO: 57933
  chr22:30642965-30643078
  hyper

SEQ ID NO: 133958 - DNA, 70 bp, Homo sapiens
  chr22:30685651-30685721
  hyper
acggccacgccccgcgggaagagaagcctattgggtggtcacgcctcctcctaacgccagaacctcatcc

SEQ ID NO: 133959 - DNA, 193 bp, Homo sapiens
  chr22:30723110-30723303
  hyper
tccccgccctcctccgggctgccaatcacaagaactcacctggacgagctcgggcctttccgggttggctccaagcggggcctgtcacctactgcagagcgcgagccggaggcccagggcttcctccatggattcctcatctgcctcctgagccccgctccctgcgagaccccaaggacgtggtagggattgt

SEQ ID NO: 133960 - DNA, 30 bp, Homo sapiens
  chr22:30752109-30752139
  hyper
tggcactgtatcatcgatggccattgggac

SEQ ID NO: 133961 - DNA, 265 bp, Homo sapiens
  chr22:30792873-30793138
  hyper
tgacttcaggagggcggagggggcccgtgtcagagccttccgcgccccagcgcatcgctccctactccgcctctcgggatcctttaagaggcggggcttggctgccagctccgcggcccgggcaaaaggctgggactttactccgggtggcggcgaggacgagtctgtgctccatcagctgccgcacccgccgcctcccgcccccaaaccccatccccgcggttgagccacgatgagcggcagagtcggcgatctgagccccagg

SEQ ID NO: 133962 - DNA, 30 bp, Homo sapiens; identical to SEQ ID NO: 57935
  chr22:30793423-30793453
  hyper

SEQ ID NO: 133963 - DNA, 30 bp, Homo sapiens
  chr22:30819721-30819751
  hyper
gggccgaggctgcacgggcctctgccagaa

SEQ ID NO: 133964 - DNA, 30 bp, Homo sapiens; identical to SEQ ID NO: 13398
  chr22:30820242-30820272
  hyper

SEQ ID NO: 133965 - DNA, 37 bp, Homo sapiens
  chr22:30821611-30821648
  hyper
ctcagtcctgggagcgattagcgccaacagctcagag

SEQ ID NO: 133966 - DNA, 313 bp, Homo sapiens
  chr22:30938193-30938506
  hyper
cggtcccctccggcccgcacccacccccaagaggggccttcagctttggggctcagaggcacgacctcttggggagggttaaaaggcagacacccccccacccccgcgcctccactccccgactccttcgccgcctccagcctctcgccagtgggaagcgggagtagccgcgcggccggagtccggaggcgaggggaggtcggccgcaacttccccaggccaccttaagaggacgatgtagccagctcgcagcgctgacctcagaaaaacaagtttgcgcaaagtggagcggggacccggcctctgggcagcc

SEQ ID NO: 133967 - DNA, 26 bp, Homo sapiens
  chr22:30938542-30938568
  hyper
cggcgtagccgcggcccatggagccc

SEQ ID NO: 133968 - DNA, 87 bp, Homo sapiens
  chr22:30987534-30987621
  hyper
ttggaatgaagctacgcttggtaagttcaactctctttcacagccctctccacagaaagaactctggagttcgttctcggatttcac

SEQ ID NO: 133969 - DNA, 103 bp, Homo sapiens
  chr22:30988133-30988236
  hyper
ttgactgtgagcctcgttgcatgttgggacggagaggggcggaaggcttagggacagcgcggtgccttctgggatgcagaggggcgccgcactccatggtgcg

SEQ ID NO: 133970 - DNA, 427 bp, Homo sapiens
  chr22:31002802-31003229
  hyper
ctgcagctgcagctcccgttccactccttgtcctgggctaggtgggcactaccaggggctcctttggtaaggagtaccgggtaggcacccggtcctgccaatccaccactggaacagctggggggacagcagacaggcacggtcggacagacttgacagatcaggcatcaggccctctgcgctggtcccgggctctttaagcaggaacgtgaatggcctcaagatgtctcacatggtcccactagccctcctcctccctttgttccctacctccaggagggctgctctgcccttccttcctctgttctttggccttatgttccccgccaccacagaccttcccccgccccacccctctgcagacttagccgtgcattgcaggcatggaggattaatcagtgacaggaagctgcgtctctcggagcgg

SEQ ID NO: 133971 - DNA, 30 bp, Homo sapiens
  chr22:31030584-31030614
  hyper
cgggctgggttcagcggtacccctttgaga

SEQ ID NO: 133972 - DNA, 212 bp, Homo sapiens
  chr22:31031670-31031882
  hyper
gtgtagggagcgggcggcggcgggggaggcagaggcggaggcggagtcaagagcgcaccgccgcgcccgccgtgccgggcctgagctggagccgggcgtgagtcgcagcaggagccgcagccggagtcacagccgcagccagagccgcagccaaagcctcagagagcaggagttggagcgcaggccctgctggatccgcgcctagctcgccg

SEQ ID NO: 133973 - DNA, 30 bp, Homo sapiens; identical to SEQ ID NO: 57939
  chr22:31063929-31063959
  hyper

SEQ ID NO: 133974 - DNA, 786 bp, Homo sapiens
  chr22:31090186-31090972
  hyper
ttgtttagagaacccgaacgatgtcgtcactggcagcgaagcgccttggcatgaaccgtaggccagctggctcaggaggtggaggcggtgaggcggccacttggggccaccgcttctggcggccgcaggagcgacccacagacaggtaatggctgccatggggggcggggcgtcgtctttagcctttagcgcccctgtgcttcgtgcgcatttcgtggcctctgggtgccgtacctgcttcccacccggctttcctgggtggcggagagcgaacccaccccagcctgggttgggggagggggcgtcggcgcagggtcccgtgggcagagctgcgctgggagctggcgggctccgcattcatcattgttcctccagcgcctggcacggctgggccgaagcagagaccgtggcctgaagcgcgccatccccttcggagttgaccgaccaccaagctcttccgcccacaggtgttgtcagagctccttccaccggccggacctaggaaggacccagggtccaaacatggcccgaggctggccgagagcacaacagccggcgggcgctgacgggcacggagcgcacgggaccgcggaggaacccgcgcgcgcccccgcctcgcgccgcgcgcacgtgactgcgcccccggccccgcccccggcctgccccccgcccccactggccgctcggccgcgcgcgggtcggccggctctatggggaaagcggcggctccgagccgaggcggcggctgtggcggccgctcccgcgggctctcgtcgctgttcacgg

SEQ ID NO: 133975 - DNA, 721 bp, Homo sapiens
  chr22:31198440-31199161
  hyper
gagccgtggaccatccgagggcccctcccctgctgggtccaggcaaagggccggccctctccagcctcgattggggcgcgatagcgcccttagtgtcgtgtcgggttccaggccacgctcgggcattttaagaggctgaggtgcgccttccgctgcccgcctgcgtcccgccacggagagctcgcctttatctagccctctgggcgagagaagaaggctaatcccagcctgggacaaggctggctgaggcgtgccggatcctccggggaccgatcggtggcctcgcgcggctctcatcgctctccgagcagtgctccagggggcggagggagcctcctcgggcggtggggaggaggctggaggaatgaggacgcagcacggcgcgcccttgcagcgctcaggctgacgggcgggcgggcggagcgggcgcacggctcctctaggtccggctgctctctgagctcgcgggctggacgctgtccgcggtgctgaagcggcgcccgcggcagggaggcggacccggagccgccgggcagcacacacccaatcccgggaccgccctcctcccaggctcggagaggcggtggcagccggcactgcacccagatggactgagagcgcggcggcgggaaggcggcggcggcggcggcagcagcagcagctgcaagagccctcgcagcctcggggcaggacccacgtccacacccgagagcccctccct

SEQ ID NO: 133976 - DNA, 380 bp, Homo sapiens
  chr22:31218344-31218724
  hyper
cgcgggacgaggccgcgctcctggggcgggaggaagtggtaggcagcaccgccgctcaggctgggctcggctcccgcggcgcggacggggttaacgcgctcatgtaccgggtggcgggcggcagtggtgcattgtggtaacgcggcgccgggacccacgagtgtccgccgcctccgccgggcggcccaccgagctgtgcacgcgtccgtgcaagcccccgggacccggcgccatgtagcgccccgccgattggaggctgccccgccgcgggaaatgaagggacgcggctgctgggacacggcctccgtgcgctccttctgcagctccggctgcctgaataaatttaagaagggttagtgcttgccgggcttccacccgga

SEQ ID NO: 133977 - DNA, 30 bp, Homo sapiens
  chr22:31365440-31365470
  hyper
tccagctcttggggcgcaggcccggccgcc

SEQ ID NO: 133978 - DNA, 121 bp, Homo sapiens
  chr22:31477076-31477197
  hyper
atgcccacccgactcgctaaagccaccgaggcagacgaccccaagactcccaatttccgacctccctggcccgcgaggggcggggccttcctctcggggcgtggccgtcaaattgaatttt

SEQ ID NO: 133979 - DNA, 856 bp, Homo sapiens
  chr22:31480650-31481506
  hyper
ctcagggttcttcagccgccacctccctctcttaagcgaggctcgggcggcgctggaaaagagttttggagagaagctggagcagtggttgaatctctgggaaaggacagatgagaacctgccccggtctcgggatcggtgcctctcgaagtctttccgaccccgggagcggctcctccagcacccggcgcccgccattactgcgccccgcgcgccggcccggcccccgctggcctcgtggcaagaacgggggcgtcccgagccgggctcctccccgcggggccgggccatataaggaaaagctaggcccgctccgcccgccctgcgccccagcgtctggccgatttggggacgcgggcagtcgcttccggccccggctcccgcacattcttgaggattgggccggggatgggaggaatggggacgcctggggacttgcacgccgcgtgcccctccaccacccgccgggacgccctctgcctcggtcccgagttcgagttcgacctccgccactcagctgggtgtcctggggaccttggtttcttccctttagatccggacactgaagcaggcggtagcgggtgtcttcctacctggctaccccttcggcgcctagcgcgaggcagggtgggcgaggcgagggcggcgccctgcgagggagggcggtcgcagaacctgcgggccttcagcgccccctggcgaggcttccctccaccgccggcgggacccccatgggcaaccgggggagctgggactgaaagcctggagagccccctccgttgtgctgttggggagactgaggcccagtgagacctcagggcctgccaggcgttcccaacagcgagggcagagagta

SEQ ID NO: 133980 - DNA, 30 bp, Homo sapiens; identical to SEQ ID NO: 57946
  chr22:31503484-31503514
  hyper

SEQ ID NO: 133981 - DNA, 30 bp, Homo sapiens
  chr22:31503732-31503762
  hyper
tccgagagtgtcgacgctccttttgtcgac

SEQ ID NO: 133982 - DNA, 307 bp, Homo sapiens
  chr22:31556065-31556372
  hyper
ctccgcttcctgcccgcaggcggaaccttagagcttcagccatggaaattaacctcttccggttggggccggaagtccctccgagaggggcggctccgcgtcatgtgactggagtccgcgtaggaggggtcggaggtcttacccaacagattgacgcggcgttagtattggccgtgtacccgaaaaactgattgactgggctggcgttaactgtgcggaggcaggtatgtgaggggctggggttggggcgggggcgccaaagtttagggacgggggcgggagacccgggtccgccttcccaggacac

SEQ ID NO: 133983 - DNA, 30 bp, Homo sapiens
  chr22:31608230-31608260
  hyper
tggtcctcccagggcgccgtaggcggtgca

SEQ ID NO: 133984 - DNA, 30 bp, Homo sapiens
  chr22:31608504-31608534
  hyper
gctggttgggtcctcgtgggtccgagctcc

SEQ ID NO: 133985 - DNA, 30 bp, Homo sapiens
  chr22:31688487-31688517
  hyper
ctagcttgctgcagcgcgagctgtttttca

SEQ ID NO: 133986 - DNA, 30 bp, Homo sapiens
  chr22:31741726-31741756
  hyper
gcgccgagtgtacacgcccccagcccggat

SEQ ID NO: 133987 - DNA, 32 bp, Homo sapiens
  chr22:31742463-31742495
  hyper
cggccttgcacgtgcgcgcccggatgcctagc

SEQ ID NO: 133988 - DNA, 30 bp, Homo sapiens
  chr22:31742724-31742754
  hyper
agtctcagcccccccggaccaatgcaaacg

SEQ ID NO: 133989 - DNA, 100 bp, Homo sapiens
  chr22:31743473-31743573
  hyper
gccgcgtgtgcgggcgggaagttcccacagttgcaaagaggcagcgaagtatgtgttccaaactttccacggttccaaactgagcgcttccattaagaga

SEQ ID NO: 133990 - DNA, 128 bp, Homo sapiens
  chr22:31795653-31795781
  hyper
cagggtactcgccacgatgagcagcaccttagctaagatcgcggagatagaagcagaggtaatggacgcagctggcggttcactcttagtctgagcattccttctttggtggcgtcgctccttcctgt

SEQ ID NO: 133991 - DNA, 30 bp, Homo sapiens
  chr22:31796108-31796138
  hyper
atcatccttcgctgcgtcccccttattccc

SEQ ID NO: 133992 - DNA, 30 bp, Homo sapiens
  chr22:31885126-31885156
  hyper
cacttgccaatggacggcgccagctgcccc

SEQ ID NO: 133993 - DNA, 220 bp, Homo sapiens
  chr22:31885558-31885778
  hyper
cgccccggcgcccgcgctcacgcacgcgaccccgggagcaatgcgcccgcgccccttctacacccgggagcaccgggcgcgcggtgccccggacccagccgccaccgccgccgacccttactcggtgcctccgccgctcggcggccctttgcctcggccgccgctcccctccccgctgcccgcaccggtcccagcgccgctccccgcagccttcgctctc

SEQ ID NO: 133994 - DNA, 52 bp, Homo sapiens
  chr22:31892030-31892082
  hyper
acctgccgggtccacgcatgggcgggtcatactccacgggttccggtttcca

SEQ ID NO: 133995 - DNA, 249 bp, Homo sapiens
  chr22:31892328-31892577
  hyper
gggtgcatgctccacgcccctcgaaaccgattctcattgctgctgctgcaaagcaacccgaagtgcgccacctacccgactgaggctgcgcaagccccggggtctgggcggggtggtcctcgtgcgcgccgcgtcgccgtggagacgagggcgggcccgcgcgagactggcgtctagaggcgcgcgaagcgctgaggcgggcgtggaccgcgcgggagttaagaagcaggtcccggatcgccgtatacc

SEQ ID NO: 133996 - DNA, 30 bp, Homo sapiens; identical to SEQ ID NO: 57950
  chr22:31893081-31893111
  hyper

SEQ ID NO: 133997 - DNA, 30 bp, Homo sapiens
  chr22:32058104-32058134
  hyper
aggtagtctctccgcgctgctatacctgct

SEQ ID NO: 133998 - DNA, 30 bp, Homo sapiens
  chr22:32145410-32145440
  hyper
tcttggggtacaggcgaaaaataaaggagg

SEQ ID NO: 133999 - DNA, 30 bp, Homo sapiens
  chr22:32145665-32145695
  hyper
ccgataaggggcgtcgtcctctccgaggag

SEQ ID NO: 134000 - DNA, 305 bp, Homo sapiens
  chr22:32145987-32146292
  hyper
tcctccgcggcccgcgcttgcccagccagctcagcccctgcagctgcagccccgtcgtcgccaggtctacctgagcctacggagccgacagaggccgggggcgctccggccgccgccacctcttcgtctctatggtccccctgcacttcctcatccggggcccgagccagccatgcggactcgcccaaatcccgcccccgcaccgcgcgcgcgcactccaagggaaggctcttcctgattctgacctcccgccctctgctagccccagcctccctcaaccccgcccctgcggctcaaactcttaa

SEQ ID NO: 134001 - DNA, 361 bp, Homo sapiens; identical to SEQ ID NO: 57952
  chr22:32149109-32149470
  hyper

SEQ ID NO: 134002 - DNA, 348 bp, Homo sapiens
  chr22:32149785-32150133
  hyper
tcgagggcaggaaacgccaggaggtggcccaaggaagaggccgcacacgacgccccgcccccggctcgagccccggatgaggaagtggtgcggccaccgagacgagacggaggcccggcgagagcggcgcgggggcgcgagggcgggaaggaggcggggccccggggcggagccaccggagcggcgcgggttctcaggtgagcgctacacggtcggggcgggcctagtaggcgcttcaggcttaggggcggaacagcgcgggccgcgcgggcgtaggcggggtatctggaggaggcgcagggaacctggagagggtccagccctcagtgccccggccagaggcgggaa

SEQ ID NO: 134003 - DNA, 233 bp, Homo sapiens
  chr22:32340155-32340388
  hyper
cgtttcagggtggggctatgacaatgcactgcatgtgcagccgccatcaccgcgccccctccaccggctccgcagtctcctgcccggctttcccttctccacctccatctctgcggcggtaaaatgcagcactcgcagagcgcctgcgcggctttcaggccgggcggcggcggcggcggtggctatttatagtaggtgacgtcaccttgaaatagaccgttagggccggcccg

SEQ ID NO: 134004 - DNA, 30 bp, Homo sapiens
  chr22:32340695-32340725
  hyper
aggcgaggccgagccgcgagcgacatgggg

SEQ ID NO: 134005 - DNA, 86 bp, Homo sapiens
  chr22:32341313-32341399
  hyper
gttccatcttcccacgcctgggggtctggctttgtgtgcgaagacccctttcctgcagtctaggcgtggacgggggcgggagagtg

SEQ ID NO: 134006 - DNA, 30 bp, Homo sapiens
  chr22:32367023-32367053
  hyper
gccgatcagtcagtcgcgtccccagcccgg

SEQ ID NO: 134007 - DNA, 456 bp, Homo sapiens; identical to SEQ ID NO: 57957
  chr22:32571843-32572299
  hyper

SEQ ID NO: 134008 - DNA, 23 bp, Homo sapiens
  chr22:32687449-32687472
  hyper
cactgcgccggggtcaactgttc

SEQ ID NO: 134009 - DNA, 30 bp, Homo sapiens
  chr22:32807864-32807894
  hyper
gcgggaggtggtgccggaacaggttgggcg

SEQ ID NO: 134010 - DNA, 36 bp, Homo sapiens
  chr22:32808156-32808192
  hyper
gtagcaaaaactcccggctccgctttgaagagccgc

SEQ ID NO: 134011 - DNA, 64 bp, Homo sapiens
  chr22:32870502-32870566
  hyper
gtcctggggagtggcgactgtattgtctgtctgcagcatccctatcagcgctaccgttgttcca

SEQ ID NO: 134012 - DNA, 106 bp, Homo sapiens
  chr22:32871124-32871230
  hyper
ggggctgggcggcccgcggggagtggggagtgcttggggtgggtgcagggcgggttggcgtcatctgtgggctgcaggcgcgggcgtggccgggcgataggccaag

SEQ ID NO: 134013 - DNA, 31 bp, Homo sapiens; identical to SEQ ID NO: 13411
  chr22:33149562-33149593
  hyper

SEQ ID NO: 134014 - DNA, 231 bp, Homo sapiens; identical to SEQ ID NO: 57961
  chr22:33192953-33193184
  hyper

SEQ ID NO: 134015 - DNA, 856 bp, Homo sapiens
  chr22:33197431-33198287
  hyper
cccagcggcaagcaccggtcccgggcgcgccccagcccacccactcgcgtgcccacggcggcattattccctataaggatctgaacgatccgggggcggccccgccccgttaccccttgcccccggccccgccccctttttggagggccgatgaggtaatgcggctctgccattggtctgagggggcgggccccaacagcccgaggcggggtccccgggggcccagcgctatatcactcggccgcccaggcagcggcgcagagcgggcagcaggcaggcggcgggcgctcagacggcttctcctcctcctcttgctcctccagctcctgctccttcgccgggaggccgcccgccgagtcctgcgccagcgccgaggcagcctcgctgcgccccatcccgtcccgccgggcactcggagggcagcgcgccggaggccaaggttgccccgcacggcccggcgggcgagcgagctcgggctgcagcagccccgccggcggcgcgcacggcaactttggagaggcgagcagcagccccggcagcggcggcagcagcggcaatgaccccttggctcgggctcatcgtgctcctgggcagctggagcctgggggactggggcgccgaggcgtgcacatgctcgcccagccacccccaggacgccttctgcaactccgacatcggtaagcgctcctggtgccccgcccgagccccacgctgcagccaggactgcagcgctgcttagggaggcagggcgagccccactcctttcctctgccccaggagaggggcagacggggttggggcggagtggagaaactcgatgtccttgggcgggggcgctggcatagctgagagggga

SEQ ID NO: 134016 - DNA, 203 bp, Homo sapiens; identical to SEQ ID NO: 13412
  chr22:33453871-33454074
  hyper

SEQ ID NO: 134017 - DNA, 65 bp, Homo sapiens; identical to SEQ ID NO: 13413
  chr22:33454193-33454258
  hyper

SEQ ID NO: 134018 - DNA, 154 bp, Homo sapiens
  chr22:33454345-33454499
  hyper
gggtcccgggagctcagcctctgcccctcaacgcgcgcgagcgcccccgcccggcggcccggcctccccgcgccgcggcgccccattggctcgggcaacgaggcccccggacggccccgcccacccgcgcccactccctcgcccacgcctctcc

SEQ ID NO: 134019 - DNA, 30 bp, Homo sapiens
  chr22:34315629-34315659
  hyper
acacggcaggctccgcgaaccacaggtgct

SEQ ID NO: 134020 - DNA, 1103 bp, Homo sapiens
  chr22:34315936-34317039
  hyper
acaccacggcgcccccgcggcgactctcgcgctccggggctcttaccttggccgtgactgccgccaggcagagggagacacggaagaacagggtggcgcggcggcgccgccgcctacgaggcgcagggggtccgggtcagggtcccggcaggcgctgccctactcggagcggcggtgccaagcacagagttcgggactgcccccggctccaaatgccgcggcgagggtccgggtcccccaagctgagcactgtcccttcttcctcttcctccggggccgctgcctggagctgctcccggcccgggggactcttccgagccaggggcgccccgcatgggcaggggcctgggtcagcctcgggttgggtccagggagcgaccgccggggccgactccacctcccgcgctccaagccgattcgtcccttcagggcagggcctgcccgcgaacagcccggcgagacgagcgcggccgcgcccccagcttcgggcgcccgggctccggcgcggcggcggggcaggagcagactggccgggccgggcgccgaacgcggcggcgcggggggggctgcaaccggccgcggcgcgctctcccccagggcctgcgccgcccgcccgcggctccgcgggaaagaagcgccggaaaaggcctcgccccggcctggggcgcggggccgggggcgcggggctaggggaggcgccccgggaaggtcacgggagcggaggcgcggcgagtggatcgcggcgcggtgggtgcggggagccgaggcgggcggcccccgccgccgggagcgctcgccggccttggccgccgccgccgcctccgagatgcgccggcttcccggagcgcccggcgctcggagctgggcggccgctgcagccgccgcgggcagccgggcgccgctggccggagccggcgcgcgatccccgcctcccgcgcccggccaggagtgggccgccgcgcgggaaccggcaggggcgggcgctggggtccgggctccgggctggccccgccgcctccgcgtgcccagagcgccggactcgctcagcagctgcagtgactgtgtgtctgtgtcatgtctgtgcagccgggggggaccgcgag

SEQ ID NO: 134021 - DNA, 30 bp, Homo sapiens
  chr22:34317537-34317567
  hyper
tctgtgaggagccccgccgaagggctctga

SEQ ID NO: 134022 - DNA, 30 bp, Homo sapiens
  chr22:34318312-34318342
  hyper
cctggctcccgcctcggtaaccacactctc

SEQ ID NO: 134023 - DNA, 30 bp, Homo sapiens; identical to SEQ ID NO: 57967
  chr22:34318599-34318629
  hyper

SEQ ID NO: 134024 - DNA, 338 bp, Homo sapiens
  chr22:35420071-35420409
  hyper
gcgagggcacggacacggtagaatcccaggtggaagaaggcaaagtgggcgggaggggagaacttgcatgttttaacctttttcctgcacccaaccccgccatccggacgccaagcttccagtcaaacctgagaccacagctccccctggcggtcagcgcgagcccgcaccgcggctctcctgtgctcacgcagccctgcgcggcggaggtggctggaaatgaatttagcgtcagcacagttatttaaattgttttaattaatcacagattgagcagtaaatgaaccactaagtggagagagcgcgcgggagcaagcgagaaagaggtgaggggagga

SEQ ID NO: 134025 - DNA, 30 bp, Homo sapiens; identical to SEQ ID NO: 57969
  chr22:35654188-35654218
  hyper

SEQ ID NO: 134026 - DNA, 349 bp, Homo sapiens
  chr22:35695610-35695959
  hyper
ggtcctttagacctcgccctaaaaggtcaggggcgtggcttaaagaggaccgcgcttcccgggccccgaccccagaccctacatcgtgtgtgacgcccgccgccgccgagcaagccgcagtgaggtcatcgccctccgcctcgggggcgggaccctggcgtctcagggcggggcttgtggtcgagcttcgcggtgccaccgccccgcccacgcctcctcgccggcctccgagtgcgtcacgtgacgggtcggtggcgctggcggttgctgtcagctgattcccggggttggtggcagcggcggtagcagcaatggactttctcctggggaacccgttcagctctccagt

SEQ ID NO: 134027 - DNA, 13 bp, Homo sapiens
  chr22:35696528-35696541
  hyper
ctgggctcttttc

SEQ ID NO: 134028 - DNA, 17 bp, Homo sapiens
  chr22:35697198-35697215
  hyper
gacgcagggagagccca

SEQ ID NO: 134029 - DNA, 31 bp, Homo sapiens; identical to SEQ ID NO: 13417
  chr22:35746850-35746881
  hyper

SEQ ID NO: 134030 - DNA, 381 bp, Homo sapiens
  chr22:35767853-35768234
  hyper
ccagagcctggggcgcgatgccacccgccccccccccccccgcccaggcgtacccccccttaccccgccccccacccgctcgccgcgcccagcccatctggcgccgctctgcccctgctgagtaatcctttcccgagccacgtggccgtgtttttcctgctgagtcacggtcccgaggtctattttcgctaagtcaccgccccgagatctgttttcgctgagtcacggtcccggtgtctgttttcgctgagtcacggtctagagatttgttttcctcagagttccagctgctccaggtttaatcccctggggcaaagtccggactgtccggctggagtctggagtcgggacatgcctcagccagcacgtcctcggcctcgt

SEQ ID NO: 134031 - DNA, 274 bp, Homo sapiens
  chr22:35776986-35777260
  hyper
tgcgggtgttgcaacgcccggccagaaagtgggcatcagctgttccgcctggcccacgtgacccgccgagcataaatgtgaccggccgcggctccggcagtcaacgcctgcctcctctcgagcgtcctcagcgcagccgccgcccgcggagccagcacgaacgagcccagcaccggccggatggagcgtccgcaacccgacaggcaagcgcggggcgcgggacgcgggacgggcgcctttctctcccaaccctgcttgcgtcctagccccaccc

SEQ ID NO: 134032 - DNA, 196 bp, Homo sapiens
  chr22:35796008-35796204
  hyper
ttcggcagacagtccgggcggcggggctggagggctcagaacggtccaatcgctggccgcgaggctccggcgaaccaatgggagcgcagcggctgcggcgtccgaacaccgcctcttgtttttcccgcgaaactcggcggctgagcgtggaggttcttgtctcccctggtttgtgaagtgcggaaaaccagaggtg

SEQ ID NO: 134033 - DNA, 31 bp, Homo sapiens; identical to SEQ ID NO: 57976
  chr22:35827119-35827150
  hyper

SEQ ID NO: 134034 - DNA, 30 bp, Homo sapiens; identical to SEQ ID NO: 57977
  chr22:35936707-35936737
  hyper

SEQ ID NO: 134035 - DNA, 291 bp, Homo sapiens
  chr22:35937043-35937334
  hyper
gaaggtggcataggcgaccaggagggttcgcccacctgggacacgcacccacagtcacctccaaaggaccccccctccccaagtctctaggagctgctccttcatcactggagtcgcccctacctctctgcccccagcccgagagccccaggcggggacccccggatcggacgtccccaagcctccgggcacctggctcagcaggaggcccccggctcggggcagggcagggccggcggcggcgagccggagcccgccccctgcccgggccccgccgagccctcggagccc

SEQ ID NO: 134036 - DNA, 100 bp, Homo sapiens
  chr22:36424034-36424134
  hyper
ccaaaacctatccactcgtcgtgcctcctggcccctcaggaatcaggaccctctcgggcacaccaggttcagtcctgcaaccttcgttcctagcccgagc

SEQ ID NO: 134037 - DNA, 58 bp, Homo sapiens; identical to SEQ ID NO: 57979
  chr22:36424336-36424394
  hyper

SEQ ID NO: 134038 - DNA, 78 bp, Homo sapiens; identical to SEQ ID NO: 57980
  chr22:36424418-36424496
  hyper

SEQ ID NO: 134039 - DNA, 187 bp, Homo sapiens; identical to SEQ ID NO: 57981
  chr22:36425194-36425381
  hyper

SEQ ID NO: 134040 - DNA, 316 bp, Homo sapiens
  chr22:36462013-36462329
  hyper
catggcaggaaatcagcgttttccaagaacgcccagtggcgcgggcacgggcctgagtcccgccgcccactgctctcgagaggccggagcagcagctccgtggcgccccctggaggccgcccctgctggcgccgtcccccgggtgtcaataggccatggcgcgcctccctctcggttgagagctgtgggagcccaggacgtgcctattaaaggtatcttttgaagtgagagggacaagaaaacgccttctctttatgtgactctctgttccccagcaaagttgccagggtccccaacaatcgtagtttctccttca

SEQ ID NO: 134041 - DNA, 30 bp, Homo sapiens
  chr22:36726841-36726871
  hyper
cttccttcctctaaacgggaggaggccgcc

SEQ ID NO: 134042 - DNA, 30 bp, Homo sapiens
  chr22:36782965-36782995
  hyper
cgcccaggcctgctcgtaacggcagagcta

SEQ ID NO: 134043 - DNA, 334 bp, Homo sapiens
  chr22:36784308-36784642
  hyper
tagggcgggtccaacggacagccaggttctaggacaaggattgacacagggggaatccaatcaggaggcggcgactcggggcgcggagagctccgggccggggttttggtgccttgcctgggccggggcgaggccctgcgggagccgactgggaaggtctggaactctgacaccccgccccgcgagctgtgctctcagtctcatgtcatcccaccacaaggacagatattaagtaccatatatgggaaaaatgctattttacataattatgatccctgtgggggcgggcatggactcagccctggattccattgtgagcgtcttgagttcgatt

SEQ ID NO: 134044 - DNA, 265 bp, Homo sapiens
  chr22:36847887-36848152
  hyper
ctgtcttggctcatgcgtcgtaagcctttgttccccaacagggggaagtgaaccagcacacaaggcccttccgtcctgcggagctcactgccttcctcagctcctggcccgcacttccgaccacacactggggacacaccctcgggggggccccaccccagcagctgcccatgttcacacctcttcagttatttcaaactccgcctctctcggcctgatgcccaacacttccttcacccaaggaggtcctgttcaaatatcactt

SEQ ID NO: 134045 - DNA, 130 bp, Homo sapiens
  chr22:36850992-36851122
  hyper
accaactttgtggccgaacaagccctccccggcttgttccgctggtcccaggcgcctgcgcatccggacacgatgaggagcaggtgcgcggggccggggtgtgttcgagggggtcgtgcgcgcctgggct

SEQ ID NO: 134046 - DNA, 30 bp, Homo sapiens
  chr22:36877682-36877712
  hyper
tcctcggggggggacgtacataacgtcact

SEQ ID NO: 134047 - DNA, 30 bp, Homo sapiens
  chr22:36878141-36878171
  hyper
agcaatgggcaggccgtcggggaacggatt

SEQ ID NO: 134048 - DNA, 876 bp, Homo sapiens; identical to SEQ ID NO: 13425
  chr22:36901806-36902682
  hyper

SEQ ID NO: 134049 - DNA, 30 bp, Homo sapiens; identical to SEQ ID NO: 57985
  chr22:36903367-36903397
  hyper

SEQ ID NO: 134050 - DNA, 30 bp, Homo sapiens
  chr22:36925160-36925190
  hyper
tgcgtgccggggaccgcgttagcagcagca

SEQ ID NO: 134051 - DNA, 170 bp, Homo sapiens
  chr22:36925410-36925580
  hyper
cgtcaggcggtatccggggacgcccaaagagggcgttcatcactgaaacttggcggccgcgcaatcgaagctcgaggcggggagcgactggcgcccttctgtgtcccacaatgcttcgcggcgcgcctcagcccccatgtatcccaccgtcacccgcgactccccgcctg

SEQ ID NO: 134052 - DNA, 623 bp, Homo sapiens
  chr22:37099171-37099794
  hyper
cttggggggtctcggcgctttcgtttcagaccagacttcccagtattctgtaagcccttgagctcagctgcacaggtgcgggggtctcgctttccatggttttgcccgggcagcggcggcggcggcggcggcggcggcagggcgggcaggcgcggcggcggcggcggcagcaggacgagcagcggcggcggttattgttgttggtggcgggggtagtgttggcgaagtgggggagagagggggtttctcctggagaatcgaggcggatttccctccccctatctgcaaagctcctggaaacgagggagccggcgtcttgctgcagggtgggccgcgcgcctgccccccactcgctaccggctgggcgcccgcggaggcgctcccacctactgcattacgggtggtgctgaaccggacagctccctgcgccgcccgctccgcgcgctccccggctggctcccagggccgcccgccaggaggggggcgctggccagagtcctccctccccggggcagcaaggccagcgcagagcgggggccgcctttcctctttttacccctctcccaaatcctaaaatgagcgctctcctgggctcccggagcttagaggaaggcgtagctaga

SEQ ID NO: 134053 - DNA, 208 bp, Homo sapiens; identical to SEQ ID NO: 57988
  chr22:37172010-37172218
  hyper

SEQ ID NO: 134054 - DNA, 51 bp, Homo sapiens; identical to SEQ ID NO: 13428
  chr22:37172608-37172659
  hyper

SEQ ID NO: 134055 - DNA, 141 bp, Homo sapiens; identical to SEQ ID NO: 57990
  chr22:37212368-37212509
  hyper

SEQ ID NO: 134056 - DNA, 1 bp, Homo sapiens
  chr22:37212772-37212773
  hyper
g

SEQ ID NO: 134057 - DNA, 504 bp, Homo sapiens
  chr22:37212813-37213317
  hyper
cggacagagtttgggaactgccaaggacgcccccgccccgacctcgccggcgcccagcgggaagtgtgggcagaagcgcgctggggaggatccgccggctgcggggccggcggagtgcaggggcgcgggcggtggacgaggggagagggatggggaggggagcgcgcttgctcaccgctaaaggctcccaccgccttcttgatgtcctcagcgttcagcaagtctgtcatcgacatcctgcaactgtttgagcgggcagagcaagtgcgaaaagattaaaaagtgcttttctcatcatttctgctcatatgaccagcgctgcagtgctgcgcgccgggcgcacgcccgccgggcctggcatggcgccaggggcccggactctgagcgcagcgggagcggctcagtccagccgcgccgctgagcagcgccggccgccggcaagaaggcgcgcggacctgctaccactcctgcaccgccaggccaggggtccgcgggatcccaggg

SEQ ID NO: 134058 - DNA, 120 bp, Homo sapiens
  chr22:37252547-37252667
  hyper
aacctcctctaggtggcgctgcggagcggggactcggctgctgatcgcggcgccccctggcggtctgttcccgtcaacatttagattaagcgcagagccggttccgccagggaagtgcgc

SEQ ID NO: 134059 - DNA, 480 bp, Homo sapiens
  chr22:37414884-37415364
  hyper
ccctccgcactcccccgggttccttgtttacagcaagccagcgaggctggggcgtgcagcgggataagtttgcagattccctctggaaagccggccccgcccctcccagccggcccgggggcccagcgcagaagcgggtggggcaagagtttccgaggactccaagtaggggcgcttcctggggcggggatctggctcctagaagttacagtactcgatcccgccaggaaagagcaatgaaagcatgcccgggatggggggcgatggcatcttgggcttagaatcccctttccttccaaggcagagggggtgggcgcacggctaggaagctccgcgagccgcgcacacgccatcgcctgcggcctccccaggcagcccgagctcgcccgcctccagagtgcccgagtccggcccgtagctcgctgccctctgccctaggtggatcaggggttcccggggcaccccgtcccactctcgcaa

SEQ ID NO: 134060 - DNA, 30 bp, Homo sapiens
  chr22:37415907-37415937
  hyper
acccgggtaactgccgcggcgtggcggctt

SEQ ID NO: 134061 - DNA, 30 bp, Homo sapiens; identical to SEQ ID NO: 57996
  chr22:37416173-37416203
  hyper

SEQ ID NO: 134062 - DNA, 30 bp, Homo sapiens
  chr22:37447607-37447637
  hyper
accaccccagactgcgggcctgcggggaag

SEQ ID NO: 134063 - DNA, 30 bp, Homo sapiens
  chr22:37501395-37501425
  hyper
gtaaacgtccggcaacgggtgggacagccc

SEQ ID NO: 134064 - DNA, 30 bp, Homo sapiens
  chr22:37595301-37595331
  hyper
ctcaaaccctggttcgtgtctccctctgca

SEQ ID NO: 134065 - DNA, 41 bp, Homo sapiens; identical to SEQ ID NO: 13431
  chr22:37595693-37595734
  hyper

SEQ ID NO: 134066 - DNA, 180 bp, Homo sapiens; identical to SEQ ID NO: 57998
  chr22:37640349-37640529
  hyper

SEQ ID NO: 134067 - DNA, 31 bp, Homo sapiens; identical to SEQ ID NO: 13433
  chr22:37713069-37713100
  hyper

SEQ ID NO: 134068 - DNA, 465 bp, Homo sapiens; identical to SEQ ID NO: 58000
  chr22:37720791-37721256
  hyper

SEQ ID NO: 134069 - DNA, 377 bp, Homo sapiens; identical to SEQ ID NO: 58001
  chr22:37730492-37730869
  hyper

SEQ ID NO: 134070 - DNA, 408 bp, Homo sapiens; identical to SEQ ID NO: 58002
  chr22:37730926-37731334
  hyper

SEQ ID NO: 134071 - DNA, 140 bp, Homo sapiens; identical to SEQ ID NO: 58003
  chr22:37816322-37816462
  hyper

SEQ ID NO: 134072 - DNA, 272 bp, Homo sapiens; identical to SEQ ID NO: 58004
  chr22:37816501-37816773
  hyper

SEQ ID NO: 134073 - DNA, 383 bp, Homo sapiens
  chr22:37823288-37823671
  hyper
tccccggtcggtcgcggcgctcggatccagaggaattcacttaccccagccccagccgggatccgggccaagcaccgcctccgggaagcggcggccgcggggcctgcgcgtgtgagtgtgagtgtgaatgtgagtgtgagcgcgggtgtgggtgcggggtgcgtggccgtggggtggcccgcgtgtgtctgtgtgtgtgtctgggagcgcgcgtgtgcgcgcagacgccgccgccccctcctccccgccgccgcgcctctgcccctgcctcggcggggagggcgcccgggaggggccaaacggcgcgcgtcagggaccgcggcaggctgtgtccgtctgtccgtccccgtctgtccgtccgccagcccgcccgctcccggtgc

SEQ ID NO: 134074 - DNA, 291 bp, Homo sapiens; identical to SEQ ID NO: 58006
  chr22:37882382-37882673
  hyper

SEQ ID NO: 134075 - DNA, 30 bp, Homo sapiens
  chr22:37914008-37914038
  hyper
ctggcccgtgagcagcgtgaagtgttcggg

SEQ ID NO: 134076 - DNA, 590 bp, Homo sapiens
  chr22:37914843-37915433
  hyper
cccactctactgatgcggagaccgagccccagggcagcagagccctagcttcgcgctacacggctgtgggcgctgcgccccagggcacggccggcccaggtcgtggcccactcgggacccgcggctcaccggtgcggttgacgcggcacgggaagcggtaggtgctcagcacctcctcctcgtcctgctcgtcgatgacccggcactggcgcagatacggcgtgagcttggccgggttcagggcgcgagccagccgatgccggacgccctcgattcgctcccacagcgcgtcctcctccgcctcagaccccgagccggccccggcctcctcctcggcctcccccgcctccgcccggcccggcatggccgtgtcctcagggtctgcgggcaagaggcgcacgggggtcgaccagggctccctagggctagatgtgcggccaagcacccccggggcgtcgtccgcagacccgccgtcgggggcgcgccccgagctccccgcgactcaccccgcacgctacagtcgcctcgggctcccgggtccgcactcgggcggcggctccgccggcgcaggggggcggtgcccgtggcgc

SEQ ID NO: 134077 - DNA, 124 bp, Homo sapiens
  chr22:37915686-37915810
  hyper
acaccccccgcgcgccgcgacacaccttccccgggccacgcgcatcgcctccccacgcccacagcgcgcccgcccgtgcggggctagccgctcacgcccggcgcagcccgcgggcactcaagct

SEQ ID NO: 134078 - DNA, 767 bp, Homo sapiens; identical to SEQ ID NO: 58008
  chr22:37956435-37957202
  hyper

SEQ ID NO: 134079 - DNA, 375 bp, Homo sapiens; identical to SEQ ID NO: 58009
  chr22:37957264-37957639
  hyper

SEQ ID NO: 134080 - DNA, 30 bp, Homo sapiens; identical to SEQ ID NO: 13437
  chr22:37963392-37963422
  hyper

SEQ ID NO: 134081 - DNA, 30 bp, Homo sapiens
  chr22:38003175-38003205
  hyper
cccaggcacaggaccgctggagaggtcgcc

SEQ ID NO: 134082 - DNA, 211 bp, Homo sapiens
  chr22:38004377-38004588
  hyper
cgtcattttcacagcggccaaggtacatgaggatgtagcttatcgcccttttaagggactctcccacgttcgactctaagcggaagtacccgctcagggctccggaagtggcctcagagcccctcagcaacatgcccgcagagaattcttccggaggcggtcacagacatctccgtgacgcagaacgagttagagcgtcccttggggtttc

SEQ ID NO: 134083 - DNA, 30 bp, Homo sapiens; identical to SEQ ID NO: 58012
  chr22:38035441-38035471
  hyper

SEQ ID NO: 134084 - DNA, 84 bp, Homo sapiens
  chr22:38054575-38054659
  hyper
gttggccacgaatccgcccctctctccaagttccgttagctcgcggcttcgctcctctcccagactctcgcccccattggctgc

SEQ ID NO: 134085 - DNA, 30 bp, Homo sapiens
  chr22:38054877-38054907
  hyper
tgtggaacggcgagcgcgccgtgccgggcg

SEQ ID NO: 134086 - DNA, 30 bp, Homo sapiens
  chr22:38055259-38055289
  hyper
caagctgagggaggcgtgcgcgcacctgcg

SEQ ID NO: 134087 - DNA, 217 bp, Homo sapiens
  chr22:38070986-38071203
  hyper
aacgcggccaagcccgaggccttagccaagccctgcagcctcaggcttggcgcccggcccagcctttctttagccttcccgaggagccagcgagagagcgctgcagcagccgcagtccttgcttccggggaaggcccgggtggggccagggcctgtggttaagtcagtggccctctgcagacgcgcacgcagcaggagccacgccctggtccctgcc

SEQ ID NO: 134088 - DNA, 35 bp, Homo sapiens; identical to SEQ ID NO: 13438
  chr22:38072874-38072909
  hyper

SEQ ID NO: 134089 - DNA, 48 bp, Homo sapiens
  chr22:38082316-38082364
  hyper
gacgctaaagtgtgcgcccgggaggatgagtacgctacacccggaagt

SEQ ID NO: 134090 - DNA, 30 bp, Homo sapiens; identical to SEQ ID NO: 58015
  chr22:38141819-38141849
  hyper

SEQ ID NO: 134091 - DNA, 200 bp, Homo sapiens
  chr22:38142983-38143183
  hyper
gcagcgggataccacgtcttcctgggcttgcactttgcagcggtcctggggccttgggacaagcctgcgagtctgagtagggggcatgatggcaggggtttgcctttctcatgggggtgagctgtacccaagccccatcaattacctgtgccatagttagcatattgagcctcacagctgggttcgctggactccccact

SEQ ID NO: 134092 - DNA, 30 bp, Homo sapiens
  chr22:38198948-38198978
  hyper
gccttacagtaccccgcccccaatccatcc

SEQ ID NO: 134093 - DNA, 115 bp, Homo sapiens
  chr22:38200879-38200994
  hyper
ggggtttcccgcaccgaggctccctagccccgcagagccagccccccgcaaaggggaaatgtgccggcacaccagcggtcctcggcgccgtttggggtgcgtggcgggcgcgggg

SEQ ID NO: 134094 - DNA, 205 bp, Homo sapiens; identical to SEQ ID NO: 58018
  chr22:38201306-38201511
  hyper

SEQ ID NO: 134095 - DNA, 94 bp, Homo sapiens
  chr22:38203676-38203770
  hyper
cgtgggaatgcggtggggagtctggtgggcttggccctgacgcgacttcctccgcccccttccctcccctctgccatccggacttcggcagtct

SEQ ID NO: 134096 - DNA, 30 bp, Homo sapiens
  chr22:38203974-38204004
  hyper
atgtggcctgggaacgcctggcgcgccgca

SEQ ID NO: 134097 - DNA, 322 bp, Homo sapiens; identical to SEQ ID NO: 58020
  chr22:38214526-38214848
  hyper

SEQ ID NO: 134098 - DNA, 744 bp, Homo sapiens; identical to SEQ ID NO: 13439
  chr22:38220617-38221361
  hyper

SEQ ID NO: 134099 - DNA, 49 bp, Homo sapiens
  chr22:38239778-38239827
  hyper
agtgtggccctcagcgcagacgtcgggggaccccggctgagggtcgggg

SEQ ID NO: 134100 - DNA, 214 bp, Homo sapiens
  chr22:38240369-38240583
  hyper
caaccgagcgggggcgggctcaggccgagacagagcggcgaaccaatgactacccttccagcttaaaccggtcccaaaaccaatcggaaagggagggcacagtacaagcaggataattggacagggtttccggcaacgtgactgacagacattgtaaccaattacaaacttgaagtgaccttggctttcgctgtacgtcgctaccggagccagt

SEQ ID NO: 134101 - DNA, 30 bp, Homo sapiens
  chr22:38245507-38245537
  hyper
cgcggtgggctccacgacggggtgatctct

SEQ ID NO: 134102 - DNA, 59 bp, Homo sapiens
  chr22:38302075-38302134
  hyper
ctccgcactggaggcggagctgctgctgggtggggcgcgcctccggcgcggacggaggc

SEQ ID NO: 134103 - DNA, 30 bp, Homo sapiens
  chr22:38302489-38302519
  hyper
ggcgtggagatccgcgacctgagcagctcc

SEQ ID NO: 134104 - DNA, 30 bp, Homo sapiens; identical to SEQ ID NO: 13441
  chr22:38349051-38349081
  hyper

SEQ ID NO: 134105 - DNA, 136 bp, Homo sapiens
  chr22:38349494-38349630
  hyper
tgggctcccggaggcggtgaccactgctttacagccgcatccgcaccggtgccacgcagaaatactgcgcgatctgggctgctggagctggcagctagcgcctctcgctactatagaaacgcgcacacaccagtca

SEQ ID NO: 134106 - DNA, 135 bp, Homo sapiens
  chr22:38476996-38477131
  hyper
agaaggcgacgagggcgccgtaggagcgcgcgcgtgcgctgctcaggtctgtgagcccattggccagcagggccaggctgaacagatacgggacgtgcggccgcagacgcgccaggcccgccagggcgccgcacg

SEQ ID NO: 134107 - DNA, 521 bp, Homo sapiens; identical to SEQ ID NO: 58025
  chr22:38477296-38477817
  hyper

SEQ ID NO: 134108 - DNA, 399 bp, Homo sapiens
  chr22:38577753-38578152
  hyper
ggacccccaggccccgcccacccgcgaggtcactcacctcggcttactcagcacttctacttcctcctacttccgcaaacaaacgggcctcgggccacgtgatggcctgaccaccgctctccgccaatcactggtggccctgtcccaggcctcctctaggctccgcccccgcgcccgaggacggcgggaggcggggtccgccattttttttaactgcccaatggaaggggctcccttagccaggaggacgagctttcggcgggagccaatcctcggcggcgaggcgcggccatgtttgtgcggggcagaaggtgcccggcttcttggcagtcctgttgatgagggccaggagtcctaccctagtccgccttccgcctcctaaagcgaccagagcctgga

SEQ ID NO: 134109 - DNA, 156 bp, Homo sapiens
  chr22:38597887-38598043
  hyper
tacgggggcggggccgagggaccaagcggccgctcctggccggagggcggccgggtcggtgacgtcaccgcatgactgggtttttatgaatgaaaggaatcctgtgagtgagtaattccgggaagctcgccttacaactccgcgcggcctcggccc

SEQ ID NO: 134110 - DNA, 30 bp, Homo sapiens
  chr22:38598562-38598592
  hyper
aggccctggcccggcgcccgcgggcggtgc

SEQ ID NO: 134111 - DNA, 321 bp, Homo sapiens
  chr22:38598860-38599181
  hyper
tgggaattctggcccgggccgccccagtcctactacccggggctgtccgtccccggctctccccggagtttcccagggcctccgccacgtgaccccagtgtttgtctcccgcccagagcccgcgcccgcagccacagggtggggcaaggtatcaaagaccccacccagctgagctaggagtgagggatgtgagccacccccgcttggcaccccggtggatctggtaacaaagtgagttggagcccaggttcttgtccccagattttggggcttcctggggagggaagaaccaagggactctcgttcgtccccagggttgcc

SEQ ID NO: 134112 - DNA, 30 bp, Homo sapiens
  chr22:38668520-38668550
  hyper
ccagcacacccacccgggagcacacaatcc

SEQ ID NO: 134113 - DNA, 306 bp, Homo sapiens
  chr22:38668914-38669220
  hyper
gtctgcggacgatgcgcggcagccggactctgcgggcggggcgggcggcgccgcagccccggagtctccgccgccgccggcgcgtcccgggcccagtggagtgcagccgcggcgcgcatgcgctctgggctcgccgccggggagggcggggcggcggacgcggctgagatcactgcctgggccttaaaggggccgcgccccgaaccccagcccgccgccccgaaccccagcccgccgccccgcgggttggggcgcgacccgggttctcttgccactcacaaaaccagctacgaccggcccccaacc

SEQ ID NO: 134114 - DNA, 30 bp, Homo sapiens
  chr22:38712195-38712225
  hyper
accagcatggcacacgggcagtgcttctta

SEQ ID NO: 134115 - DNA, 32 bp, Homo sapiens
  chr22:38713591-38713623
  hyper
ggcgcgcgggcttacgcgtgggggtgggggag

SEQ ID NO: 134116 - DNA, 30 bp, Homo sapiens; identical to SEQ ID NO: 13446
  chr22:38793918-38793948
  hyper

SEQ ID NO: 134117 - DNA, 303 bp, Homo sapiens; identical to SEQ ID NO: 58031
  chr22:38850745-38851048
  hyper

SEQ ID NO: 134118 - DNA, 30 bp, Homo sapiens; identical to SEQ ID NO: 58032
  chr22:38851869-38851899
  hyper

SEQ ID NO: 134119 - DNA, 30 bp, Homo sapiens
  chr22:38852139-38852169
  hyper
cctcgccccaggagcgctcctcccagaacc

SEQ ID NO: 134120 - DNA, 40 bp, Homo sapiens
  chr22:38857559-38857599
  hyper
ggagtggtgtttgccggaagtcctcggaatgccagcgcaa

SEQ ID NO: 134121 - DNA, 96 bp, Homo sapiens; identical to SEQ ID NO: 58033
  chr22:38863832-38863928
  hyper

SEQ ID NO: 134122 - DNA, 73 bp, Homo sapiens; identical to SEQ ID NO: 58034
  chr22:38864200-38864273
  hyper

SEQ ID NO: 134123 - DNA, 371 bp, Homo sapiens
  chr22:38902267-38902638
  hyper
tgccgcggtttaggcgtctccttccttcccagcgactgcacaaaatggcggccgccgctgagtcggctccaacttaacgctgcgtacggcggagacgatacgtaaacagcgcctcggaatagcccgagggctccgcggggaactacgggtattcttggaagcactttacgtcagttgcgacgatgggtgtattttgcggtctgtacaagaaaaacaaagtacggagcgagcgtagagttctcgcgccacccgaactagaacgtgggatgaggtgggaggaagcgcctctggtgcgacgtaacattctttgcgtcgttagccggcctgctgttgctaagatgcgcagtatgcgtaacgcattctgtttagag

SEQ ID NO: 134124 - DNA, 176 bp, Homo sapiens
  chr22:38966005-38966181
  hyper
tcccctcagagtcttcgcacgctgttcgtttttgccacttacccccctcgtacccacagtctccccgagattttcaaggtgaagcccctctgccccgcccgacctcctcagctgacaggattctaactcgggcctagaacacggagcctggagacccgcgcgccgttgaccacagg

SEQ ID NO: 134125 - DNA, 30 bp, Homo sapiens
  chr22:38966690-38966720
  hyper
tagaaggtcgaatccgggcccgtttccccc

SEQ ID NO: 134126 - DNA, 237 bp, Homo sapiens
  chr22:39052537-39052774
  hyper
cccgaggtgattcacggagtttctggggattggcgcaggctggcgctgggaacccccgcgccggttacccctttcctcggtggtagaggccgggcggggcagcgcatgcgcgtggcgggcaggcggcaggaggcgggtgggtcaaggtaactctgggctacagagtccttgctgggggttcggggagcgcttggaccccggcttctgggacgcgtcaggtacgtctccgagtccggc

SEQ ID NO: 134127 - DNA, 30 bp, Homo sapiens; identical to SEQ ID NO: 13449
  chr22:39052973-39053003
  hyper

SEQ ID NO: 134128 - DNA, 30 bp, Homo sapiens
  chr22:39077893-39077923
  hyper
cccggctcgcgcctcggctcccggaaaagc

SEQ ID NO: 134129 - DNA, 167 bp, Homo sapiens
  chr22:39078159-39078326
  hyper
gcgtggtacgggatcggagcgaagcggctgctttgggaggcggggttaggggccctgctgggccctgggtgccctagctccagtggggctcggcggctcccagtgccgcagcggggccaggaatggatgtcgctttttcggctaagacccgcgtctactccaccaca

SEQ ID NO: 134130 - DNA, 234 bp, Homo sapiens
  chr22:39096460-39096694
  hyper
ataaatttagcgcacgagtcgagtagctagcgcgggccggcaggcgtgggaccgcgagccgcgcgggggcctcgggggcagccctccatcccctcgggtacggtggggcccgcagggcgcggctccctcggaaggcgcggattctagccctctggccgcggccctgcggaggaggagacaactccggtcagcggcgagcgggcgcgggaagtgagcggcggggccggcccctgc

SEQ ID NO: 134131 - DNA, 72 bp, Homo sapiens
  chr22:39101416-39101488
  hyper
tgagcaggtccaggcgcgggacctgttctatgactcgattgggtcctgcccttgtccgtcatcggaaggctt

SEQ ID NO: 134132 - DNA, 125 bp, Homo sapiens
  chr22:39150522-39150647
  hyper
tgttggaaaagggaccgattggtagtaggaaaagcaggaagttggcctgggtccttgtctctattcctgtccttataaggtaatctcccctcccccctccctgccccgcccgtacggtccctacc

SEQ ID NO: 134133 - DNA, 30 bp, Homo sapiens
  chr22:39150920-39150950
  hyper
caagatgaaaaaggtcgaggccccattctc

SEQ ID NO: 134134 - DNA, 30 bp, Homo sapiens
  chr22:39151984-39152014
  hyper
ggccgggcggcgcgcgtgtggccgactctg

SEQ ID NO: 134135 - DNA, 115 bp, Homo sapiens; identical to SEQ ID NO: 58040
  chr22:39189707-39189822
  hyper

SEQ ID NO: 134136 - DNA, 294 bp, Homo sapiens
  chr22:39190103-39190397
  hyper
agccagcgaacccccgccagggttgtcaaggagcgaaacaagagtgtcttagcaaccagcaaggaagtcctgccccctcaccggacgttgacgagaatttcacttattattggtggataaaagtatcaatcagagtgaaaggcccttataagtcaggcgtttgcaaggacaggggcgtggtttagaggccagggaggcgggacttcacttatagttgtcttaagcgtgcccgaggagcaggggacacattgaagttctttttctagggaaacaaacttcgaaaagcagtactgc

SEQ ID NO: 134137 - DNA, 352 bp, Homo sapiens
  chr22:39239092-39239444
  hyper
gaaatccccccgcctcgccagcgaggaaggcgcgatcgtccccggaacacagacgggagaccggaggctcggggaccgccggacgaccgcggccgggcggcccctcacaccacccgggcggctcccccgacggcgcgcggcgctcacctccaggcggtcgatgcggtcccgcagggcgcgcacggcgtcctccagctccagaatgagcgcaggcgagtcccagggcccgtcggccatggtgtcgcggcggggcccggcgccctggaggccgcgcggcaggccgctctcgcagcggcccagcttgccggtgagctcacggatggtgtcctggtcggcgcggatgcgcgcctcc

SEQ ID NO: 134138 - DNA, 30 bp, Homo sapiens
  chr22:39239700-39239730
  hyper
ggcccggggacgcggcggcgcccgaggcga

SEQ ID NO: 134139 - DNA, 190 bp, Homo sapiens
  chr22:39239934-39240124
  hyper
gcgcgctgggccgagcggggcaggcgcgggagccggagccggagccggagccggagccggagctggagctgtcgccgcggccgctgctgccgccgctctgagcccgggcggcgggaggaggagaagacggcaggcggcggggagggggagcgggcgcggcggccccgccccactcgcttccccgggccgg

SEQ ID NO: 134140 - DNA, 30 bp, Homo sapiens; identical to SEQ ID NO: 13451
  chr22:39267525-39267555
  hyper

SEQ ID NO: 134141 - DNA, 38 bp, Homo sapiens
  chr22:39268147-39268185
  hyper
gatggattcggccgcgaagacccgctcgcccactgcag

SEQ ID NO: 134142 - DNA, 32 bp, Homo sapiens; identical to SEQ ID NO: 13452
  chr22:39268734-39268766
  hyper

SEQ ID NO: 134143 - DNA, 249 bp, Homo sapiens
  chr22:39268981-39269230
  hyper
gaccgcgggcaggaacgggctccccgcactccgccttgggcccacagcgggtcatcatctggtcattcggcagaaaccgccttcgcggtcatatctgtgttttccgattcccagcacccctcccggccccccgacctggccgcgtccctctccccgcccgcagctgcgcgaagcttccgccattgctctggggagcccagatcccagcttcccacttgaggaggggcgggggatcgagctggggctgtc

SEQ ID NO: 134144 - DNA, 30 bp, Homo sapiens; identical to SEQ ID NO: 58044
  chr22:39332607-39332637
  hyper

SEQ ID NO: 134145 - DNA, 30 bp, Homo sapiens; identical to SEQ ID NO: 58045
  chr22:39541447-39541477
  hyper

SEQ ID NO: 134146 - DNA, 30 bp, Homo sapiens
  chr22:39548246-39548276
  hyper
gacgggcccagcagcgcagggctgccgggg

SEQ ID NO: 134147 - DNA, 566 bp, Homo sapiens
  chr22:39549057-39549623
  hyper
agactgggcccgaggcgcagcccctcgagttgcaggagagccgggacccaaaaggcttcccaccgtgtccggacgtcgcagggccgaggtctccctaatccggccttctccgcggcgcagtttggccagtgtctccacgtccgtccacccacccctccatccgcccttccatttgtccatccacccgaccctcggtggtcggtgcccagacgcacgggtcagacgcgggcgctgcctcgagggctcccgggccgggccctcgttcgcggcaggagcggccgcggtggagctgaggtcccccggggacggattttgccgccgcgctgccccagccttccccaaacccgcgtgtactgggcgctaggtgcttagtgggggctcaaccatttgtggcacgagacgaactcttgattccccaccccccttcctttttcgctaacgcgcctccattcctcactgggagcccggcgtcgtccctgctccttcctgtactgaccccaacttctgtcgctccggcatcccctcggggactcgggtctgcctgccctcaccgcacccacctccca

SEQ ID NO: 134148 - DNA, 48 bp, Homo sapiens; identical to SEQ ID NO: 58046
  chr22:39638592-39638640
  hyper

SEQ ID NO: 134149 - DNA, 30 bp, Homo sapiens; identical to SEQ ID NO: 13454
  chr22:39639503-39639533
  hyper

SEQ ID NO: 134150 - DNA, 30 bp, Homo sapiens; identical to SEQ ID NO: 58048
  chr22:39640426-39640456
  hyper

SEQ ID NO: 134151 - DNA, 35 bp, Homo sapiens
  chr22:39641112-39641147
  hyper
gcttggggccagggcggggcgcttagggggtctct

SEQ ID NO: 134152 - DNA, 174 bp, Homo sapiens
  chr22:39696376-39696550
  hyper
ctccccggtctctcacgcgctccagaccacatctcccccgccctcccttctctggaagcctggagaacagagacccaaataaagggccctgccctagtgggactcggggagacacgcagtgaccatgacacagaagtgcatcctgctgccggtggcaggcgacagtgcctggaa

SEQ ID NO: 134153 - DNA, 90 bp, Homo sapiens
  chr22:39715081-39715171
  hyper
agtttctgtccgcccgtcaataagttcatcatctgtggtttctgcgagctccagaggccttcggagtgcaccagcggccccagatattca

SEQ ID NO: 134154 - DNA, 190 bp, Homo sapiens; identical to SEQ ID NO: 58050
  chr22:39715620-39715810
  hyper

SEQ ID NO: 134155 - DNA, 920 bp, Homo sapiens
  chr22:39745645-39746565
  hyper
tggtttcagcagagccgacggctcagaggggctgcgaccggggcaggggaccggggatgcggggcagggacacggcccacacttgctgtgcacgcaccgccctcccccaaacactttgcaaagaggtcaccgcactggctgcgagcgcgccctgagccccgggccgcagcacgcgcgcccccgcgcccgaggtcgcgcgctgcccagccccccgcccgcgccccgcgagctgcgcccgccgcgcacgacgccccctcgcgggagccctgggccgccggccgcgcgcgcaggggagggggcgggggcgccgcgcacgcgcacgggccggcggcgcgcgccgagcggggggcaccgcgcgggtgcagccacgatggaagggggtgcgtacggagcgggcaaagccgggggcgccttcgacccctacaccctggtccggcagccgcacaccatcctgcgcgtcgtgtcttgggtaaggacggactggccgacggctctgccaggccggggtggtgggggtgtgagcaaaggcggcgcgcccggaccgaccccgaccccgaccccaacgggcccccggcggcggcgcggcggcgggcgaggagctgtcctgcctgcggggcccgctgccgccgctcctccttcccgggcccggggcgggcgggatccctggtgctcgcgggagacgccgctccggctcccggagccctggtttcctggggcccccggttcgtgcgccccccttcccgccccgattgctgtgacctccaggccgcggctatgccgcgaaaggctcggattgtgcgcggccgccagggcggactggggaccgtggggacggagccagggtttaaggtggccttttttggggggtggatcagggcgtggaccatctcggtggggtgcatgccgcgcctgcgatggac

SEQ ID NO: 134156 - DNA, 30 bp, Homo sapiens; identical to SEQ ID NO: 58051
  chr22:39795871-39795901
  hyper

SEQ ID NO: 134157 - DNA, 30 bp, Homo sapiens; identical to SEQ ID NO: 13456
  chr22:39796155-39796185
  hyper

SEQ ID NO: 134158 - DNA, 713 bp, Homo sapiens; identical to SEQ ID NO: 58053
  chr22:39852943-39853656
  hyper

SEQ ID NO: 134159 - DNA, 375 bp, Homo sapiens; identical to SEQ ID NO: 58054
  chr22:39853690-39854065
  hyper

SEQ ID NO: 134160 - DNA, 18 bp, Homo sapiens
  chr22:39898605-39898623
  hyper
cccctcggctgccccgcc

SEQ ID NO: 134161 - DNA, 177 bp, Homo sapiens
  chr22:39898684-39898861
  hyper
cgcaccccggcccggcccccacggttggtgaagtgcagactggctggggctcagccgcccagtcgcccagcgaccttgtagttacagccctcgccgtgacagtcgccttttacagcatcaaacacttctgttgattttctgcatcgggaggtccttagggccgagggatctcttaaa

SEQ ID NO: 134162 - DNA, 30 bp, Homo sapiens
  chr22:39915750-39915780
  hyper
cagcagcgccgtgtcggctatgaatggggc

SEQ ID NO: 134163 - DNA, 30 bp, Homo sapiens; identical to SEQ ID NO: 58056
  chr22:39916535-39916565
  hyper

SEQ ID NO: 134164 - DNA, 30 bp, Homo sapiens; identical to SEQ ID NO: 58057
  chr22:39928293-39928323
  hyper

SEQ ID NO: 134165 - DNA, 41 bp, Homo sapiens
  chr22:39928912-39928953
  hyper
gcggaaactggaggcgggtccaaggcgcagaaagacacatg

SEQ ID NO: 134166 - DNA, 92 bp, Homo sapiens
  chr22:39930974-39931066
  hyper
ggacagctttctcacgcggcgagactccaaggcctcagctgcgcccacccgggctaggtgggggtgggggtccggacgtccttctgcctcgg

SEQ ID NO: 134167 - DNA, 209 bp, Homo sapiens
  chr22:39941855-39942064
  hyper
tcccttccttcctgccgcagcctcttccctcaatcctactgaactccttcctgggagaggttagggcgggaatcgccaccttccagggcacggagaggcgaagcggaattcagcaccacggacagcagcccggcgcgcagttggcgtgcggttggctcaggaagttattctgtaggttttgtaggtttatgacccgctgttgggtagca

SEQ ID NO: 134168 - DNA, 288 bp, Homo sapiens
  chr22:39953429-39953717
  hyper
aaggggtgggagctcaccagccgccgccgtcagtctgtctgtcgcctccacgcctcccccctccagcgtcccgcgcctgcagctttccccgaagacatttggtgtcagtataaggacggcttttcctcgcacgcagcgcggctcggtctcgccgccgccgcacgtccccgcaccgccaggcgctcgggctcctccgcagcccccgccgcgcgcagaccccgcgcttcgagccctgagccggaggcgcgagcagagccgaggcaggcgagagaccggcctcagccccgc

SEQ ID NO: 134169 - DNA, 36 bp, Homo sapiens
  chr22:39953970-39954006
  hyper
ctgggggtccctctcgatcgccggcttcgggtgggg

SEQ ID NO: 134170 - DNA, 356 bp, Homo sapiens
  chr22:39954043-39954399
  hyper
cgcggccgggccacgtccatgccaaggtaggtgggggctgggtgggtggggggaaggaagggagggcttcgcttcgatgccagtttcttggcgcgttggcttctctcttcactggggcatttatttatttatttctggggatcgatcctccccacccgcgcgtacccgtcaggtgagccccccatcccgcgccttcggggccatgccttgggaggaaggacaggaaactttgaccggtcctctctccaaggccacgaaagttctctcggtgccaatactgaagccagctgagccagcgctgcagaaatttattcaacaagtcaggctgccggccggggcccgggttgtccgcgcgt

SEQ ID NO: 134171 - DNA, 139 bp, Homo sapiens
  chr22:39954428-39954567
  hyper
cgggcagctgggccagagctggtgcccgtgtccggcgggctgagctgggagcgctggcctgggagcgcggcagcgggggccactggatgggggaatcccgggcagggtttaactttcccggaggcgggggtggcggaga

SEQ ID NO: 134172 - DNA, 149 bp, Homo sapiens
  chr22:40060841-40060990
  hyper
cgtggtgtccctggcctcagccgggggagccaagatcttgggggtcctccgagtcttgcggctcctgcgcaccctacgccccctgcggtgaggacccctcctgggcggatgggggaaagtgtcatgcactgtaccgagaagccacgggt

SEQ ID NO: 134173 - DNA, 181 bp, Homo sapiens
  chr22:40081594-40081775
  hyper
gccctgcggtgacgccgcctaagctggacgtgcggaggggagaagccctgctccgaagggagctccttggatggggtctgcctgctgcctgctgtgcgggggagggcggcgtccaggttgctggggtgggggccgacacaggcggcctccacggctcccacctccccccaggccaccggga

SEQ ID NO: 134174 - DNA, 337 bp, Homo sapiens
  chr22:40081791-40082128
  hyper
cgccagccccagcagctccgcgggcagcctgcagaccacgctcgaggacagcctgaccctgagcgacagcccccggcgtgccctggggccgcccgcgcctgctccaggaccccgggccggcctgtcccccgccgctcgccgccgcctgagcctgcgcggccggggcctcttcagcctgcgggggctgcgggcgcatcagcgcagccacagcagcgggggctccaccagcccgggctgcacccaccacgactccatggacccctcggacgaggagggccgcggtggcgcgggcggcgggggcgcgggcagcgagcactcggagaccctcagcagcctc

SEQ ID NO: 134175 - DNA, 103 bp, Homo sapiens
  chr22:40082159-40082262
  hyper
cgccgccagcccccggcctcacgcccgccaggaagttcagcagcaccagcagcctggccgcccccggccgcccccacgccgccgccctggcccacggcctggc

SEQ ID NO: 134176 - DNA, 13 bp, Homo sapiens
  chr22:40082282-40082295
  hyper
cggaccgcagcaa

SEQ ID NO: 134177 - DNA, 31 bp, Homo sapiens; identical to SEQ ID NO: 13460
  chr22:40280490-40280521
  hyper

SEQ ID NO: 134178 - DNA, 30 bp, Homo sapiens
  chr22:40440307-40440337
  hyper
tgacagtccaatgacgcacaaccagcccac

SEQ ID NO: 134179 - DNA, 74 bp, Homo sapiens
  chr22:40440607-40440681
  hyper
agccaatcctagctcgttaaacgggaagcacttaaccaatgaggggcgaaggcagcaacgaggaattggagggg

SEQ ID NO: 134180 - DNA, 99 bp, Homo sapiens
  chr22:40742290-40742389
  hyper
gtacctcttttcagacaggaaaactaaagtgtagcgcggctaagtaacgtaggaagcatcaatcatgtttctggtcaaagaagcgaaccaagtcaattc

SEQ ID NO: 134181 - DNA, 30 bp, Homo sapiens; identical to SEQ ID NO: 13461
  chr22:40742687-40742717
  hyper

SEQ ID NO: 134182 - DNA, 30 bp, Homo sapiens; identical to SEQ ID NO: 58065
  chr22:40766495-40766525
  hyper

SEQ ID NO: 134183 - DNA, 30 bp, Homo sapiens
  chr22:40767017-40767047
  hyper
aaccgcgcctgaggcggggggctttctaaa

SEQ ID NO: 134184 - DNA, 30 bp, Homo sapiens; identical to SEQ ID NO: 58066
  chr22:40876218-40876248
  hyper

SEQ ID NO: 134185 - DNA, 30 bp, Homo sapiens
  chr22:41032115-41032145
  hyper
gaccccagagaaagcggccgacaccccgtc

SEQ ID NO: 134186 - DNA, 30 bp, Homo sapiens
  chr22:41032702-41032732
  hyper
agccacggaagctgcgggcccgcccaccac

SEQ ID NO: 134187 - DNA, 30 bp, Homo sapiens
  chr22:41215228-41215258
  hyper
ttcgtaggacagcacggaagccattggtgc

SEQ ID NO: 134188 - DNA, 95 bp, Homo sapiens
  chr22:41215479-41215574
  hyper
gacagcgaggtgttcgcggggctgggctccaaggcgcaaggcggcctgacaccaggtacccggctcccggttcctccgacgttctctggcgttcc

SEQ ID NO: 134189 - DNA, 30 bp, Homo sapiens
  chr22:41252210-41252240
  hyper
gcaacctcagggtgcgaggaacccagctct

SEQ ID NO: 134190 - DNA, 183 bp, Homo sapiens
  chr22:41252791-41252974
  hyper
tgcctgcctccctgcgcatacattctcatattcttaactaggaaccagctccctggatggggcaaccccagaaatgggcgacttcaaggaggcgggagataacatcccctccagggggcgacgtccaagagcatattgtgtggctgcgtgcactgagtagagctcaacgcccgggacctaaaa

SEQ ID NO: 134191 - DNA, 30 bp, Homo sapiens
  chr22:41253206-41253236
  hyper
cccaagctggttcccgctgtagcaaacgtc

SEQ ID NO: 134192 - DNA, 30 bp, Homo sapiens; identical to SEQ ID NO: 58069
  chr22:41346933-41346963
  hyper

SEQ ID NO: 134193 - DNA, 355 bp, Homo sapiens
  chr22:41418632-41418987
  hyper
tgcaggtcacgtgcccgcggtgggggcagggagggacgcgcagcggagtctccgggctgcacgtgcaaggcctcggggagggtggagctctggcttcccgagctgcgctcgctcccggcttccgccgaggtgcccggggcgccggcctggagcaggcgggggtctgggtgcctgggctgcggtcgggagcgcctccgaagaagcactcggtgcctgccccgctgggagcgcaagcattgttacctatcagcgccgcacttaacagttgttaatagcagtaagccctcactaaattgtcactgctggcagaccgcagtaactcggtctgacctcaagcacccgataaaagagttct

SEQ ID NO: 134194 - DNA, 30 bp, Homo sapiens
  chr22:41488735-41488765
  hyper
gcggacgcgctcggcgaatttgtgctcttg

SEQ ID NO: 134195 - DNA, 30 bp, Homo sapiens
  chr22:41489036-41489066
  hyper
cgccttcagccaagcggcctaaactctcat

SEQ ID NO: 134196 - DNA, 192 bp, Homo sapiens; identical to SEQ ID NO: 58071
  chr22:41593088-41593280
  hyper

SEQ ID NO: 134197 - DNA, 105 bp, Homo sapiens
  chr22:41593897-41594002
  hyper
agagcacaggggcacgcggtacattatttgaatgaataactttcttatcctggcctttctctaactctctcacttctacttgggtcacccgccccctccccagga

SEQ ID NO: 134198 - DNA, 252 bp, Homo sapiens
  chr22:41601070-41601322
  hyper
gtaattggaacactcggcgtgaggcgcaccaggtttccagcgcccctggtttccacgtcgctatggtaacgactcaccctgcacacatgcgaactacaattcccataaccgcccgcggcttccccgcccacagggagagaatggcgggagcaggcacggaaccggcttttcctccttcctgcagcgtgattggcccgcggctcagggaggcgaccaatgagtgctctcgcggagagcgacggggcaggccaa

SEQ ID NO: 134199 - DNA, 30 bp, Homo sapiens
  chr22:41681639-41681669
  hyper
ccgcaaatgataggcgggcggcgcaggagc

SEQ ID NO: 134200 - DNA, 269 bp, Homo sapiens
  chr22:41682087-41682356
  hyper
acctccggatccagcggtccagatgtccagccggctagtctgttagctctctcgagctcccggcctcacgcgcttccagcaccacctgctctccgcaccgcggcggatgatggcggaggaggaggattttgaaagccggcagtttctttgcttcgatttgatttgttcgaggccccggccggcttgccctcgccccgctcgcgcggcctctcgggtagagtagtccggttccccatctgggagcgcgatggggcgcgcaccgcgaacta

SEQ ID NO: 134201 - DNA, 232 bp, Homo sapiens; identical to SEQ ID NO: 13464
  chr22:41682702-41682934
  hyper

SEQ ID NO: 134202 - DNA, 452 bp, Homo sapiens
  chr22:41697264-41697716
  hyper
gggaagggcggaggcgctgggtttgagcagcatcagcccagaaatgcagaactgccaaaagaaacccccctaaaaggcaggacacttttaaagaaaataaaggtgaattccaggcatgagctttcgacggggaatggggcttccccgactcgcccccacgccccccgcccttctccccaggtgcgcagcccgcgccgcccaccccgggcgcggcgaggcgacgggagccgagctctctaggacccgaggaggaagagctgcagggagacagtgcctccagcgggtgctgccgcgagcggccagccgaggggctggaaatgaaagtaaagcgctccagagccacatggacggagctgccggggcggcggcgccgggagcaggatgcggccgcccgtaattaaatagcatttactcttattattactaataataataacgtaatcatacctcta

SEQ ID NO: 134203 - DNA, 30 bp, Homo sapiens; identical to SEQ ID NO: 58078
  chr22:41697986-41698016
  hyper

SEQ ID NO: 134204 - DNA, 30 bp, Homo sapiens
  chr22:41698439-41698469
  hyper
cagtctctggacttcgaggcctgtgggagg

SEQ ID NO: 134205 - DNA, 213 bp, Homo sapiens; identical to SEQ ID NO: 58079
  chr22:41763238-41763451
  hyper

SEQ ID NO: 134206 - DNA, 30 bp, Homo sapiens
  chr22:41777881-41777911
  hyper
tgccagagccggtccgcaggcggggtagcg

SEQ ID NO: 134207 - DNA, 30 bp, Homo sapiens
  chr22:41809896-41809926
  hyper
cgcggagggggccgcgctggtgtcaccagg

SEQ ID NO: 134208 - DNA, 30 bp, Homo sapiens; identical to SEQ ID NO: 58080
  chr22:41810214-41810244
  hyper

SEQ ID NO: 134209 - DNA, 37 bp, Homo sapiens
  chr22:41843182-41843219
  hyper
ttgtgtttgggggacgagtatcgcgggggaggggagg

SEQ ID NO: 134210 - DNA, 30 bp, Homo sapiens
  chr22:41843719-41843749
  hyper
cccagtgtggggcacgcgggagagccccac

SEQ ID NO: 134211 - DNA, 396 bp, Homo sapiens
  chr22:41864719-41865115
  hyper
tgttcctgcctccacgtcgctgtgattggttctctaagcttccgtcagtttacaatccttgcaccaggcccgtcttgctctcgcgcgagtttttgtcgctgctgggcggccaggtcctggcaggtgcatgaaactcttaaaaactctcccagatttggatggcggagataactaaaatttgttcttgggtaaaacatctttgtgcttggtatctatttctgcaagtgtctttgggcagtccgatttcctcttgcgtgtctgttcgttgcacgtgagctccgcccattgcgttcacagggttctggcgcctctagggaggcctcgccttcaccgtgacgccccactcttccgggcacgcccctgcccaaaggctttaaaggcgccgtgtgggacgtc

SEQ ID NO: 134212 - DNA, 205 bp, Homo sapiens
  chr22:41940461-41940666
  hyper
cgcttgcgcgactgcgggcgagattccgaatccatcgcttccggaaaactcaccaataagaaacctctgtccacccccaccccgccgaggcggggcggggctgcctgtgtgctcgcgcacagcgtggggcagagagagggcgaggagagggcggggcctcctcctttcacaggagcagagcggttcccccgcccccgacagcgct

SEQ ID NO: 134213 - DNA, 79 bp, Homo sapiens
  chr22:41985627-41985706
  hyper
ggtgtccacggtcacgctgctgcagaccccacactcagcctcgggggtgtccgcgtgacactcccggtgggagcttcca

SEQ ID NO: 134214 - DNA, 30 bp, Homo sapiens
  chr22:42001173-42001203
  hyper
atggaaaaacgaggacggtgagaaatctgg

SEQ ID NO: 134215 - DNA, 30 bp, Homo sapiens; identical to SEQ ID NO: 58083
  chr22:42016192-42016222
  hyper

SEQ ID NO: 134216 - DNA, 270 bp, Homo sapiens
  chr22:42016976-42017246
  hyper
gagaggccgccctgcgctgctcgcgcccccacacccgctaccggcaacgactactgtgaggtgacagagaggggacagggagggcccacacggaagagggggcgggggcagggatgcacttttgcgcatgtgcttacagtcctgacgtaggaaggggcggggctttgccgaagggggcggggctctcgctgatgggttggctttcgtcagggacataggtagaagctggttggggagtgtgcgtgccagcctgacgcgatatagtgcgca

SEQ ID NO: 134217 - DNA, 30 bp, Homo sapiens
  chr22:42017490-42017520
  hyper
cagactcgagaccacgctccttcctcggga

SEQ ID NO: 134218 - DNA, 31 bp, Homo sapiens; identical to SEQ ID NO: 13470
  chr22:42062755-42062786
  hyper

SEQ ID NO: 134219 - DNA, 31 bp, Homo sapiens; identical to SEQ ID NO: 58086
  chr22:42084265-42084296
  hyper

SEQ ID NO: 134220 - DNA, 30 bp, Homo sapiens
  chr22:42084905-42084935
  hyper
cgcgcggcaggaagcgaaggtgacgctacg

SEQ ID NO: 134221 - DNA, 30 bp, Homo sapiens
  chr22:42196505-42196535
  hyper
gcgcgctggaggcacgccagagcctggagg

SEQ ID NO: 134222 - DNA, 81 bp, Homo sapiens; identical to SEQ ID NO: 13471
  chr22:42228657-42228738
  hyper

SEQ ID NO: 134223 - DNA, 142 bp, Homo sapiens
  chr22:42229197-42229339
  hyper
atgggcggtggcgacggcaccgcccccgcgtctccctgagcgggacggcagggggggcttctgcgctgagccgggcgatggacgacagcggcgagctgggtggtctggagaccatggagaccctcacggagctgggcgacga

SEQ ID NO: 134224 - DNA, 234 bp, Homo sapiens
  chr22:42229857-42230091
  hyper
ggtcgccgggtgctccgcgaaactttgggcagcgactgcagaagcaagttgctgatgaagagagcagtggcggcggagtgtggacacatctctccgggatggagacccgggcgctcctgctgtcacgctgcaaggggaattgagcagaagaaattttgagttgtggcccctcgggtacgggctggggagcgggtggcctttgttccagcgccttaacagcggagtggaagagct

SEQ ID NO: 134225 - DNA, 1055 bp, Homo sapiens
  chr22:42305984-42307039
  hyper
ggcataggggcccggcgcggcagggggcgcgtagaccggcggggcccaggggcaggcgtccagcggcgcaggcaagtccggggatggtcgcggagcccgcgccgggggttgccgcggggacggctcgagggcggggaaacgctgacagaagtcccgcggggcggcctctgcggggacagggcagggaagagtgacgccgcgccgagcacccaagctcaggactggacaaggggtcccggccggggactgggacggggaccgggccggggcgggccgggggcggggcccgctggggcgagggagccgattggccgagcggcgggcgcgcggaactgggaatttggcgcttggagctgcggccccgcgcttcgcagtccgggagctcgtgcgcccaggtgccctgacgctgcccgcacccgccactcacctgcggccttgagcgcggcggccttgaacgtggcgtacttggcgtagtctggctgcagcgtcaggctgccgccgccctgcagccgcgggccgcgcgggggccccggggcggccgacccccggggcgcgttgttgaggcgcttcttgtctggagcgaggagtgagacgcggctcggtccgatgccccggttcactccgccctcgctgtcacctctccgtagtcctctccccgaggccgttcggtgagaacctgggggaccgttctccgggcgaggctgcgagccaagcctgtcttcgccgcagcctccagcgcctggaacagggcctggctccgagtcacgcgcagcggcggcggcagccagcccggggggtgccaccctcatgaacggctcgcccggaggcgacgctcgagccaggcgcggagtcctgggacctgctcccgccgagacgggggatgtctgaggaacagaacccagacggggcgtgggggctgccaagcctgcctgcctctcgagagacccagggggaggctctggagcccgagcctcagatcacagccccggccagcaaatcctgcatctggaaccttcctcacacatcacagccccccagactcgaggccgcaggac

SEQ ID NO: 134226 - DNA, 269 bp, Homo sapiens
  chr22:42307095-42307364
  hyper
cgcagaggccgcggctcatttccaccggggaagcctctatgccccagccgagggaccgcctctcggcctctcacgcccctccgcgtgctccgccgccgctcagccccgcccgccaccgactcacctgcgctgttgtggggggagccccgggggaggccgtcccccatctgcacctggacacagccacccaggggtgggcccagggtgggaggcagtggctcctgggggcccggctgcttcagaagctctgtcagcgccctgcggggaca

SEQ ID NO: 134227 - DNA, 1028 bp, Homo sapiens
  chr22:42310036-42311064
  hyper
ggggcctgctgggagaaccagcgcttcgagagcggcgggaaggatcagcgggcagggagagcagtccgaggagcaggcgggggtccctgggcggcgcgtgctcacctggtcactgtgcgccgcgcgcgcgggctgtgcgccctctccagtcccaggcgcgccccgatgccggccagcaccagcagcgctgcgacgccgcacacagcgtagacggccgtatggctgcgctcgcggccggggtcccggggcgctgcggtgtcgcgggcgcgggcgggcggccggcctgtctggacccaggccggcgtgtcgtagttggaacagcggctctggtcgaggcgccgcggcccgtcgtggcagcagaagcggtagccgcacgtgccgcagcagaagctgtaggctccggagctgcagttgaagggcgggtcccactggcccatcacgtcgtagtagccgcggcagcggtcgcccccctccggggctgtcgtgccgggcgccgcgggaccctgcgcctcgggggctcccgcgcggcccgacggcggccgcgccagcagcaacgcgagccgaagcgcgagcgcgagccggaggccgggaggacggcggccgccgagcagtccccgcgccccggcccgcgccatcgggcccgcgcctcccgctactgcgcccggtgcatggccgggcgccgcggctccctccggctcggctcctccgctcccgcagggatcgcgctggctcccggcgcacgccgcctcggccgtcggcctcctctggggaccccagccccgagtgggctgggtctggagctccgaggccgcacctccggtgggcgcgtcctccgcccgggctcacctcggacccgagctgcccggtccgcgtcctgagatcttccccgggccgggcggcgggtcctcgcctgcgcgcggcccccggcttctccccggcccggcaggtgtgcgggtcttggccctagcggaggccgcgccggggccgcgggccgcccgactgcgctaccttcccgccgcgctctcagt

SEQ ID NO: 134228 - DNA, 241 bp, Homo sapiens
  chr22:42311268-42311509
  hyper
ccccgaaacattcatcggaactgggcgctcgaaggggatcagttctagggcccgcgactagagcgtccctgtcttacaggtgcggggacctgtaccttacaggcgcggaggtcaaagcagcccggaattgccccgggacgggcagggccaccctctcacctccttcccgtcccctctgtccgttctgatcataacataaggagggccccttcccctctcggcgcctcgattttcccacctg

SEQ ID NO: 134229 - DNA, 581 bp, Homo sapiens; identical to SEQ ID NO: 58092
  chr22:42315448-42316029
  hyper

SEQ ID NO: 134230 - DNA, 175 bp, Homo sapiens; identical to SEQ ID NO: 58093
  chr22:42322724-42322899
  hyper

SEQ ID NO: 134231 - DNA, 30 bp, Homo sapiens; identical to SEQ ID NO: 58094
  chr22:42342923-42342953
  hyper

SEQ ID NO: 134232 - DNA, 30 bp, Homo sapiens
  chr22:42343238-42343268
  hyper
ccttttctgaggggcgttccagcgctaccc

SEQ ID NO: 134233 - DNA, 460 bp, Homo sapiens
  chr22:42353610-42354070
  hyper
tctccctctgggtgggcgggacagggagcacctctgctggccctcaccacgctgtgtctccgcagccaaggccgccgcgatgccgcacttcctggactggttcgtgccggtctacttggtcatctcggtcctcattctggtgggcttcggcgcctgcatctactacttcgagccgggcctgcaggaggcgcacaagtggcgcatgcagcgccccctggtggaccgcgacctccgcaagacgctaatggtgcgcgacaacctggccttcggcggcccggaggtctgagccgacttgcaaaggggataggcgggcggcaccgggcgccctcccccagcccgccccgcccgcccagcccggagacccccaaggcagagggaggccggcctgttggccctccacgctatccctctgcagcctgggccctcccgacagaggccccaggtgcgctggcagtggagg

SEQ ID NO: 134234 - DNA, 30 bp, Homo sapiens; identical to SEQ ID NO: 58096
  chr22:42373283-42373313
  hyper

SEQ ID NO: 134235 - DNA, 16 bp, Homo sapiens
  chr22:42466344-42466360
  hyper
cgtgtatcagctgtat

SEQ ID NO: 134236 - DNA, 30 bp, Homo sapiens
  chr22:42466880-42466910
  hyper
atcccccctagcaacgctgtgccccgccca

SEQ ID NO: 134237 - DNA, 478 bp, Homo sapiens
  chr22:42470151-42470629
  hyper
gtttcccgccctggcagacctcgaggcggcctcggagatcccgggcctggcgaatactgggcggggaggggcgttaactccagcctcccgggcggggtctcccggctcccgcggccacgttgcagcccaggcggaggcgcgggatctcgagctgggatcgccctcttgggcttcggtgcgatcggcggcgggaggtgagagtgggcccggcgggctccgggaggaggtggccccagggaaggtgtggccgcggggaagtggcggcgaacagccccgacgcgaggacggggaaaccaaggcggcagccagggagaccctgaccgaggtgacctctgtttagggcgacaaccgggttggggctccccgcagtggccactggcccggcggtcccgcacccccagcccgcctctcctccaacaaaagaatccaggaagacggtggggcgggcgggaggcccggtgtgcggtggcctggcccc

SEQ ID NO: 134238 - DNA, 30 bp, Homo sapiens
  chr22:42665768-42665798
  hyper
gcgagaagcagccgcgtccacatggcttca

SEQ ID NO: 134239 - DNA, 30 bp, Homo sapiens
  chr22:42666150-42666180
  hyper
ctcttgggtcgggccgggcagcaacactcc

SEQ ID NO: 134240 - DNA, 30 bp, Homo sapiens
  chr22:42666649-42666679
  hyper
aggaaataacagagcgtcaggtgacggcgc

SEQ ID NO: 134241 - DNA, 401 bp, Homo sapiens; identical to SEQ ID NO: 13477
  chr22:42669779-42670180
  hyper

SEQ ID NO: 134242 - DNA, 51 bp, Homo sapiens
  chr22:42679428-42679479
  hyper
acgggggcgggcactcggcccctgggactgtgacccggggccctgcccttc

SEQ ID NO: 134243 - DNA, 222 bp, Homo sapiens; identical to SEQ ID NO: 58101
  chr22:42679916-42680138
  hyper

SEQ ID NO: 134244 - DNA, 47 bp, Homo sapiens
  chr22:42696043-42696090
  hyper
gcagcctggttcctttcgttccttcgttccttcgctggtagaagccg

SEQ ID NO: 134245 - DNA, 30 bp, Homo sapiens
  chr22:42764531-42764561
  hyper
cgacaggtgggtcccgtccccgccccagat

SEQ ID NO: 134246 - DNA, 328 bp, Homo sapiens; identical to SEQ ID NO: 58102
  chr22:42765053-42765381
  hyper

SEQ ID NO: 134247 - DNA, 30 bp, Homo sapiens
  chr22:42896191-42896221
  hyper
cctggcgggtgagggcggggcctggcaggt

SEQ ID NO: 134248 - DNA, 135 bp, Homo sapiens
  chr22:42896453-42896588
  hyper
ggggccggcggccctcgggatgggtcctgccagggcgcagagatggcggtggaaaggcggggcgaaggcggggcgtgaggcgtggaggtgtggcctgactggggcggggcggggcggggcggaacagcctagaag

SEQ ID NO: 134249 - DNA, 30 bp, Homo sapiens
  chr22:43010426-43010456
  hyper
tggagaccaggcagcgccgagatcacggag

SEQ ID NO: 134250 - DNA, 262 bp, Homo sapiens
  chr22:43010937-43011199
  hyper
ctacttccggcgtccgcggaccaactctcgcgacagccagctcaaagcaggcaagaaccggaaggggcggggacgttccccgtgagccttcgcggtgctggctgctcatctgcatacggaagttcggcacattatgaattatttattttcctcgagggaaaaaattaaatgaaaagcaacaaaatacattattaacaagtgagacaaacttcaatggaactggatcatgacctcaacagtcaactacgatagtcatcatacg

SEQ ID NO: 134251 - DNA, 249 bp, Homo sapiens
  chr22:43015552-43015801
  hyper
aagtgccaggcaggacgtactctgaaggctcagccgtggcccatctgggacacagccctgctcccgaaggggctccaggggaactgctcagccaggtgattcaccagggcacgggcaggccaggctgaacccggggccccagtgtgcgatgtggggaggtgactgggtgagcgtgaacagggcgtggggtgcgcggggcgggtggccgtgtgaccgtgcccggccctcagaagacgaagcagcgctccg

SEQ ID NO: 134252 - DNA, 30 bp, Homo sapiens
  chr22:43023566-43023596
  hyper
cttaacatgagccgccggacgcctcagtgg

SEQ ID NO: 134253 - DNA, 30 bp, Homo sapiens
  chr22:43023807-43023837
  hyper
cagctgccattctaacgcgagccatgagga

SEQ ID NO: 134254 - DNA, 519 bp, Homo sapiens
  chr22:43115855-43116374
  hyper
ggaacaatcactcgacgttggcggaggggaggaagccgcagagagggtgtcgtgagggaaaggtgggtgcaggggaaatggcgctttaacccactcagggccagaggctcagccgagactatccaggtgggaacttgtccctccggatgacaggtgatgaaactgagggaaggggactcgccctggcagtgaaacgggatgggcgctgggaccaggtgccccggcagatcctctcccaagcccagttccgctcccgctcagtcctcaaccttccccagctggagaggagggaggggcgcctgcggatccgaggcgagcgcggaggccgggcgactccaaccggctcgccccgtgcccagctcgtacccaggccgtttcccgcacggggagggcccttcccgcttctgggcaggtccaaatcctcaccctccctaaggccggcgccgacgctgccagcccggcagagccccctcctgccggccgctctccatccccgtccccggtcgcatccgctccggg

SEQ ID NO: 134255 - DNA, 118 bp, Homo sapiens
  chr22:43116623-43116741
  hyper
cgccgcgcggggttcgtgcgcgcacaaatgtcgcctccagaacaggtggcccgggctagggcggcggcccagcccctccgcccctgcccctgccttcccgaggcgcctcctccccact

SEQ ID NO: 134256 - DNA, 30 bp, Homo sapiens
  chr22:43117105-43117135
  hyper
acgggttaccatcccgttttccccattgaa

SEQ ID NO: 134257 - DNA, 31 bp, Homo sapiens; identical to SEQ ID NO: 13481
  chr22:43177262-43177293
  hyper

SEQ ID NO: 134258 - DNA, 30 bp, Homo sapiens
  chr22:43252448-43252478
  hyper
cctccagccagctgcgcaaagctgtaaaag

SEQ ID NO: 134259 - DNA, 48 bp, Homo sapiens
  chr22:43411068-43411116
  hyper
tccagacccagctccggccgggctcccgctaccgcttttgctccggca

SEQ ID NO: 134260 - DNA, 30 bp, Homo sapiens; identical to SEQ ID NO: 58109
  chr22:43411484-43411514
  hyper

SEQ ID NO: 134261 - DNA, 30 bp, Homo sapiens
  chr22:43485470-43485500
  hyper
gaccgccggcgctgcgactatttccggagt

SEQ ID NO: 134262 - DNA, 297 bp, Homo sapiens
  chr22:43506223-43506520
  hyper
ccaaatgtgaacctcggttttcatatttgtgaaataggctttaaaacacctaaatcccaaagctgccagcctaaggagcacacgtctttgaacgctggcttcacgctgtcatttaagtcatttcgtcctcttggagcctcggtttccacgtgggtaaaatgatcgtgaaaaaaagcaccgaggagtactttgagctcgaacggaggccatccgtgtaaagggccagattctgtcaatggatcgatccccccgatattgatggaaacccctgagtgcacgcccgtgctgggcgcaggg

SEQ ID NO: 134263 - DNA, 127 bp, Homo sapiens
  chr22:43547283-43547410
  hyper
tggacacacggcaacgttttagatgttgggtctggccgggcggccgtcaccggtcaccatggggaggaggaggagccgagagacttgctcgcggccggggggaggcagaagcgcgtcccgcgggaga

SEQ ID NO: 134264 - DNA, 30 bp, Homo sapiens
  chr22:43560974-43561004
  hyper
tgggcgagaggagaacgcatttagcatttc

SEQ ID NO: 134265 - DNA, 89 bp, Homo sapiens
  chr22:43583723-43583812
  hyper
ggcgctgtcaggaccggaaaaggccccaccgacggcccggaaggtgtcctggggcccgaacccggtgaggcggcgcttctgtgcctgca

SEQ ID NO: 134266 - DNA, 25 bp, Homo sapiens
  chr22:43659490-43659515
  hyper
aagctcaggcaggagtgaagccggc

SEQ ID NO: 134267 - DNA, 491 bp, Homo sapiens; identical to SEQ ID NO: 13484
  chr22:43659642-43660133
  hyper

SEQ ID NO: 134268 - DNA, 55 bp, Homo sapiens
  chr22:43738650-43738705
  hyper
tcctctctacccttccgcatctgtcttttctccgggcttccttttgtctgctccc

SEQ ID NO: 134269 - DNA, 156 bp, Homo sapiens
  chr22:43738743-43738899
  hyper
cgccccgtcccggtctctcggtccgtccctttccccgtccacctcctggcgtgtccccctccgcccgccccgccccgcgccccctctcccaggaggagcgcccctctgcgctcggggtcccgccccgcccaggtccgcacgcggggtccccgggaa

SEQ ID NO: 134270 - DNA, 543 bp, Homo sapiens
  chr22:43738928-43739471
  hyper
cgcgcttcccctcccggggccccggcccacccacccctggtgcggccccgccggactcaggagccccggccgcccgggctgcggggagggggcgccccgggccggccctagaagttactttgcaaagaggcagggggcgcggggccgcgcggggcgagctcgggatccgcggggaagaagccctccgggaccgcgcctcggccgcccgagccccccgcgcccgccgccccccacctcggtcgggggcttacctgggagcccgctgcccccggccagccgcccgcgtgtgcccagggccagcagcacgcacaagtgccagcgcacggccgccgcgcccatgctcaatgcgggccccgctgggcgtgcgggcgtgcggggcgcggggacccgaccgaccggccgctcccgcaggcgctgctcgctgctcgccgctccgccaccgctcgggctcccgagccgcccagccagcccggctgatgagctgacagcgcgcgctcattggcccgtggcgtcggaggggcggggcgtcgcccagggccggcc

SEQ ID NO: 134271 - DNA, 555 bp, Homo sapiens
  chr22:44208017-44208572
  hyper
cgcgcgtggccaccccgaatacagccttaccgggaacccctcctcgattctccgcctagctgggccggcacccgcgtgcgcggaccccaagccgcggggtctcagaggggctgcccattcggcgtctctaggacgctgttgcccgagagacgacggcagtcgctgactggagaatgagcctacgcgcctggcaagaagctgagctgtgattggtcaattggagataaacgaggagggggcggggccaggtcagtcccgcgcctccgctcccggaagaaatttccgccggaagtcccgttctctggggagcgggaaccctggcgacccgtgtcatgggagcgggtttctgttacgtgggctttagcgcgagctgggcggtcggcccggtcccaccgaactgcatagggccgtgtagccgggggaagtcagccccctgctctgagaagcagactctgcatctgtaaaaggctaagcgtgcccactggggcctgtggtcaggattggctgcagtgaggtccgcaaagcccctaccgcatcctgcgccttcgttagggt

SEQ ID NO: 134272 - DNA, 39 bp, Homo sapiens; identical to SEQ ID NO: 58116
  chr22:44258002-44258041
  hyper

SEQ ID NO: 134273 - DNA, 510 bp, Homo sapiens; identical to SEQ ID NO: 58117
  chr22:44258078-44258588
  hyper

SEQ ID NO: 134274 - DNA, 30 bp, Homo sapiens; identical to SEQ ID NO: 13485
  chr22:44263900-44263930
  hyper

SEQ ID NO: 134275 - DNA, 30 bp, Homo sapiens
  chr22:44279181-44279211
  hyper
tgataatttgtaggtcgtgagctccaccag

SEQ ID NO: 134276 - DNA, 30 bp, Homo sapiens
  chr22:44287008-44287038
  hyper
agcgaaatgcccagccgctgggaggccagg

SEQ ID NO: 134277 - DNA, 597 bp, Homo sapiens
  chr22:44287457-44288054
  hyper
gccgggggtagagggcgcagagcacagcgccaggcaccagcgtctctgggctcgatccgctttcattaagctgtccccgccccttttcgcccccgcggtccgggactcaccgaccgacttgccgcagacgatgctgactgcgttgagcgccccagacgaggaaccgtagatgcggcgggcgccctggaggaggcgcggggctcgctggcgcaggcattcggtggcgcccacgtggtgggcgcccaggtagccggcgccggagaaggacaggttccatctgccctcctcctctaagaagcccatggcgggtggaccgggcggggtgatcgggacgaggaagggtcactccgtgacccgggatagggccgggatgcagccttggacggggctgggcccaaatgtgggctctggagggagccgggctggggctggtgctggtgctccctgcgccgcccccgggctgcgtcacctgcgccccagccaatgaagtccccgggtcgcgatcagcccccactccagttgtgcgccaggtgtgccccagaagtgcccgcgcgctgtgtatacgctggcgccgcccccacgcgcccgccccggatc

SEQ ID NO: 134278 - DNA, 170 bp, Homo sapiens
  chr22:44319564-44319734
  hyper
cccgcccgggagggcgtcctgcccgctcattgggcctcccgccggctcatttgcatggtccgaggggggcggggctgacgtcgcgctgggaatgccctggccgagacactgaggcagggtagagagcgcttgcgggcgccgggcggagctgctgcggatcaggacccgag

SEQ ID NO: 134279 - DNA, 30 bp, Homo sapiens; identical to SEQ ID NO: 13487
  chr22:44320158-44320188
  hyper

SEQ ID NO: 134280 - DNA, 99 bp, Homo sapiens
  chr22:44351286-44351385
  hyper
gggcgcggagaaggcggggaatcatggccgcccccagtgttccgcgtccgggggtttgtgggagttgccttgacctgcagctccgccaccgcggacccg

SEQ ID NO: 134281 - DNA, 965 bp, Homo sapiens
  chr22:44419838-44420803
  hyper
tgacctgattctctccggctttcaggacgtcctgaggctgcacccacgtggcaatggtgtctgtcgcgctgtcgcctggatccggcaccactagcggagccgagcagagcccagggctccaacgcgtagggaaaaggctgcgccgctcccggggtggccccacgccccttctctgagcttgagcggcggcgcgggacggggacggctctggccgggaccagcaggcctcgggcatccgggacgccggggccgcgctccaggccaggggcgggggcgggaccggggcgggggccggcggcggggccgcgccctcggcctctccccggggcgaccgggcggctccacacgcgctgcgcccgccgccggccccacgcgcggcccatgtcctccgcgccgcgctcgcccaccccgcggccccgcaggatgaagaaggacgagtcgttcctgggcaagctgggcggcaccctggccaggaagcggagggcgcgcgagggtgagtgcgcgcccgcgcccgccgacccccggggacctgcccggcggtgcccgccctcggccctagagccccacgaggccgcccccgccctcccccacgcaccccgcccggcccacgcggctgcgcgaccttcgggacaggccaggcctttgacccaggacccgtaaacaacggccgggacctggcgcgtggggccgcggtggcctccggagtctgccaaacgcgcgtgcgggcgcctgcgcggcggggacctcgggccaccgtgcggggcccgcgcctgctctgcctgccgggtgttcagctcttccctgggccagcggcatagccagccgcgcggggtgaccgttcattccatgagcagtgacgctcacgtgtgcagggcactctgggcagacacggcctgggggacccactactgggtgttgcgcgggcgccctgcagggtgcggggctcagggcgtgcagggctgagg

SEQ ID NO: 134282 - DNA, 250 bp, Homo sapiens
  chr22:44726727-44726977
  hyper
ccccggaggcgacagcggttccgcaggggccgcgcggcggaccaggacccaggggcacgcacttgggaggggtccttctacccgtcccctgcgctgcccagctgggacccccaggcccctctgggtccgcagcgtggccctcagtccccgtgcagcccgcacggggctcccagctcactgagctccccgactctgttcttggaagccagtcccccccttggacgcggattccggtcccggccgccgcgtc

SEQ ID NO: 134283 - DNA, 986 bp, Homo sapiens
  chr22:44727058-44728044
  hyper
cgccggcgcggaccccagtgccgaacaccggctgtcccgcacggttcctgcccccggacccttccccggtcgtccccagcccctttctaaagagccccggacccccgtcatatgccccttacccgcctctcccaaagcgcccacccttcaccccttctccggagccccgcgccgcagaccccgccccccactcgcccagaccctcctccgccaggagctccgccccggcccctttccccgccgctctcggaccccggcccaggcgcgcccctcccccgcgcggcccccgccctgcccgccccggggctcagctcacctcgtgcccgccgcccgctcgttcctcgcttcgtagccgggagccggcgcccgcgggagccgcctgctggggtgcgggggctgcccacgcccccgcgatgcccctgccgccgccgcaacagttgtccgggttctgggggctgcggggacgcggggactccgggctccctgatcggcgctcggaaggcgcccgctcctaggcgcgccgggcgcggcgcggagctggggccggggccggggctggggctggggccggggctgcagctccggctcggcgtccggctcggggtccggctgggggtccggcggccggccgcatgccccgtcgccgcccgcggctactcggcggcccgcgccgcccggccgcccgccggccccgagccccgcgccgcgcccgccgccgccgccgccgcgctcatgctcgccgggccccgcgctcgccgccgccgccgccgccgccgccgctgcccacttcactctttggcgctcgctccgcgccgcgccctctgctgccccctcgcccgggctcgccgagctcccgccgccctgcccgccgcgtcctgcgccctcctctctctcccttcctctctcctcccttcctctctctctctccctctctctctcttgcgtcctcctctcattttttttttttctttcgcggtctcttttct

SEQ ID NO: 134284 - DNA, 643 bp, Homo sapiens
  chr22:44893740-44894383
  hyper
gcaggagggtgaggggcggcgtggagggcccgcgcgtgggtggcgaggctgcacaaagccccgcggcgcccgccccgcgcccgcccgggggagaacaaagggggctgctccttggcggccgcgggcctgggggccaccacagtggcggggcccggccgggcagggggccgggggcacgcgtacctggggtctcgcggttcctccgcggctctgtccgccgccggccgtgaccaagatggcccgcgcgggggacgcggccaggccgatgaatcaccgcgcggaccgccgagaactgcttcccggtcagcgcagccaagcgacggcgctggcgatggcggcgggcggcctccggcaggtgcagggaccgggccaggccggggccggggcaggggcggggccggggtcgcggcagagggcgggtcaccgcgcggcctttgtgcgggcggggccggcgcggtggcggtggcgggcgggccttaggctggccccgctggttgccatggataccgaccgctcccgcgcgtgcggagacgaccgctgccccgcccccggaagtgatgcacaaagtcccacccccccccaccccccaactcgggctgctgccaatcggggaagactgtagttgctgcggcgtcttcatcag

SEQ ID NO: 134285 - DNA, 526 bp, Homo sapiens
  chr22:45015982-45016508
  hyper
tgtgggtgtggtgtgcgtgcccacgggggtgggagaagcccaggggtgagcacagggtcagcgctgtgacggggcccaggccgctctcagtgacgcccgcaaaaccccacgtggcgggaaccaggctcagccacactggcggggtcagcagagcctgtcggtgcaggcggcgttcccggaaactaggaggccgctgtgacccccagacgtgcagacctgctgagggtccagcgctgcggctgggcggggtcgaattgtgttctgggcaatgctggtgtcacttaaagtgaaatacacaaggggcggacgggcggctcccgggctccgggtccttggcctggacctcggcctccccaaagtgaccccggatggcaccgcgagtccccgtttccgacaaccacacggcgccggctgcacacgtcctgtttgcgtggttgctaggaggttgccatggcgactaatcggggatgagggaagcctagcgcttaacacatccccctccgacggtcaaaattgggcctctctg

SEQ ID NO: 134286 - DNA, 87 bp, Homo sapiens
  chr22:45064149-45064236
  hyper
cctccctccccgctccgcccgcggctggaccccgatccccgggacagggactgagtctgaccgtctgatttgtcctcccggcttcta

SEQ ID NO: 134287 - DNA, 781 bp, Homo sapiens
  chr22:45064286-45065067
  hyper
cggcccgccgaggggtggggtgagggcgtcacgggccgatccgggccgccgggtgacccgggacgccccctgccccggcgggcgccgcccacagcctgcgcagtgctcaggggcggaggccgggagggggcccaagcgccagccccccagctccggcggacccgggtgggcgtgcccgcggacccgcttgccgcacttaggcgagtctcccctgcagcgccccgagtccctgggggctgcggcggctgcgggcgcccccgcgcgggcccgaggggcgggacgcggcggagcggggcggggcggggcctccgcggccccctcccccggccccgggctccggctccggctccggctctggctctgcgcggtggcagcggcggcggcggcgcggggaccgaggtgagcggcggctacgggtccggaggcccggccggagaggggaccgggtggctggggttggggggcggcacgcgcgaccctgcggaagggggggccccggggcggtgccggcggagcggcgcgcgcgtgtgtgtgcgcgcgtaggtgcgcgcgcgcgcgacgccgactgcggggccctagggtggggtaggggtcggacggaatctgcggggcaggggcggcccccttgggtgaaggtccagcctctcccaccccagcctcccgggacctcccgagctcgttctctcccagcctctctcgctcgccccccgccccgcccccttccctctatctctgagtttgtccgcgtctctgtgggtgggtctccgtccagccgccccgt

SEQ ID NO: 134288 - DNA, 1239 bp, Homo sapiens
  chr22:45097772-45099011
  hyper
gacatcgtgtgggcgcgaccgcagtgctgggcggggggcgggcgcttgggcttgggccctgcgtcctgtgcgtgttggtttcctgtgggcacgtggggccctcggaagaggggaggagggtgagcacgtcctcagagggcagacccagcgaggcgtcgtggcagctgcggccgcggagacgccggctccgcctcttgcacacgccccctcgcctgaggccccgccccgcccgcgatgcccccgcccccttccccgccccgccccccggggcgccgagacccgcccctgggcccgcccccgggtccgcccccggcctccgtttgcgccgggtctgtgctggccgcgcgcctggcgctccacgctgagcctctccgtgcaatgattaacccggcggggcggccggcgcgggacccgagacggaggcgcggggccggggcgggaccccgcaggaccgctcggcttcctgctctcgccggagtttccgcgtagagggcgcatcgccggcccggggcccttggtgcggcgtggcgcagggcgcggcgtggggcgcgcgtgggcgcggcgcaggcggcccgggtcaccatgaggactctccgcaggttgaagttcatgagttcgcccagcctcagtgacctgggcaagagagagccggccgccgccgcggacgagcggggcacgcagcagcgccgggcctgcgccaacgccacctggaacaggtaaggccgcgccctcccggccacccggaggccctggagccgggggaggggacccctgagccgtccgcgggctaggggccgccccgagccaggaacgctgccgaaggcggcgcggcgcttcacagtttgcaaagaacttgccccgccggagtggtgcgggcctggaggaaagttcagtgcagcgtggttccagaacccagggaagggagcgaggcccgccagcgcccggggctggcccagaagcgcccggcgggtgggcggcggggtgggccgggaagccgcgtgcccgcctcctacccggggtctttccacgtctccactgcggtgctcgtgacaacctgggaggctaacggagcaggaagtatttttcccattttgcggctgagcacgggagcctcggggctcagtgggtgggtcgcgcaggcttcctgtgtctctttaagctcccttcggctttcccttgagaggccccctgtcctccagctgtcagcagggggtgcggcagctgcgaggcattctttag

SEQ ID NO: 134289 - DNA, 837 bp, Homo sapiens
  chr22:45148202-45149039
  hyper
ggcatgggtgccgtgcgggacggggacgcggcccagccgggaatcggggtgcccagggtgcgatgtgcgaggggctcctgagcgcgtgtgctccgcccgaccccgccctgtccccccgacacacaggtggacccagggtcagctcgtgcacctgggaaatggctcccgccgggtagcaggggcggaggggcggggctgggcggaggggcgggggggcggggcctgcccgggagccacgtccggggaggggccaggtgagcggcagacccggcacgcaggtgggggccggcggggtccgtggccaggtaaggcgggcggcggcgggagggagcgcgcagggaggaggccgtgctcggggtgggggggtgcgccgcgggggctcccagggcgtgtacggggacaaggggccgctggccgggtagggacgcccaggcgggcgcgacgccacgtgcggccggggggagaccctccggccggcgcgcagcctccgggtcccctgtgggttctagactccctctcccttcacctcctttctttcccgcccccccacactcccctcctctgctttttcccctgtcctgttccttctcaccccgcaccgccttccccgccctcgcctctctcagcctgcgttttggtctggtctggccggacggtgtcagctcaaatgttccttttttgcttccgtcctggggtctcaggttaggtcgggtcagcgcctgggggaggcacctcccccgcccccacacaccccaaacctacaaggtgggtgaggtcattcccgtttcatagatgagaaaacggaggccggggcaggtgctgcgctgattcaaactc

SEQ ID NO: 134290 - DNA, 233 bp, Homo sapiens; identical to SEQ ID NO: 58132
  chr22:45402267-45402500
  hyper

SEQ ID NO: 134291 - DNA, 2110 bp, Homo sapiens; identical to SEQ ID NO: 58133
  chr22:45402900-45405010
  hyper

SEQ ID NO: 134292 - DNA, 385 bp, Homo sapiens; identical to SEQ ID NO: 58134
  chr22:45405046-45405431
  hyper

SEQ ID NO: 134293 - DNA, 482 bp, Homo sapiens; identical to SEQ ID NO: 58135
  chr22:45405476-45405958
  hyper

SEQ ID NO: 134294 - DNA, 521 bp, Homo sapiens; identical to SEQ ID NO: 58136
  chr22:45406039-45406560
  hyper

SEQ ID NO: 134295 - DNA, 113 bp, Homo sapiens
  chr22:45559224-45559337
  hyper
ctgagtgcccaggacggatctcactggctgaaaaaaacagaagagaaggcacccaatgcaaaatcaaatgtcagcgaacgaggggtcctttaacaggcggcccacacggcccc

SEQ ID NO: 134296 - DNA, 44 bp, Homo sapiens
  chr22:45560663-45560707
  hyper
ggcgtggtcttctccgtttccttcctagcgattcctctcgagct

SEQ ID NO: 134297 - DNA, 30 bp, Homo sapiens
  chr22:45636462-45636492
  hyper
ggcggccccggagacgctcacctctcccgg

SEQ ID NO: 134298 - DNA, 88 bp, Homo sapiens
  chr22:45664600-45664688
  hyper
cgtccctgctgaaaggcgactccgggagcacaggcttctgccctctcctgatgtccctagcagcgccgggcacgcagcagtgctcgct

SEQ ID NO: 134299 - DNA, 30 bp, Homo sapiens; identical to SEQ ID NO: 58140
  chr22:45680829-45680859
  hyper

SEQ ID NO: 134300 - DNA, 30 bp, Homo sapiens
  chr22:45705497-45705527
  hyper
atgaggaaacgggacgcgcggctcgccggg

SEQ ID NO: 134301 - DNA, 30 bp, Homo sapiens
  chr22:45705855-45705885
  hyper
ggcggcgtggcgtccgctctggctccgact

SEQ ID NO: 134302 - DNA, 30 bp, Homo sapiens; identical to SEQ ID NO: 58141
  chr22:45809587-45809617
  hyper

SEQ ID NO: 134303 - DNA, 641 bp, Homo sapiens
  chr22:45898543-45899184
  hyper
catccggcccgaaggcgccccctctgtgccccctccggggaagtctgggatccaggccctcgcccccagccgtgggcgcgcgcccctcgcagccggggtccggggagggagggtcccggcagggggcgccggggagggaggaccaggagacccgcggccccgcctccgccgcgccctcctcccgggcgggataattgaacggcgcggccctggcccagcgttggctgccgaggctcggccggagcgtggagcccgcgccgctgccccaggaccgcgcccgcgcctttgtccgccgccgcccaccgcccgtcgcccgccgcccatggagcgcgccgcgccgtcgcgccgggtcccgcttccgctgctgctgctcggcggccttgcgctgctggcggccggaggtaggggcgtcccgggtccgccgccccagcttagggtcccgaccccctcggcctcgcgctccctgcgagtttcggaaccacggggactcggagtccgtgcgttgccctgcgcggcgcccccggactgtcagcgccgaggcctcggcgacgcccccctcccccacggccagctccggtcctcatctcctccccggcctggggacttgtttcaaaaccggattcccccacccctcaaacaca

SEQ ID NO: 134304 - DNA, 2 bp, Homo sapiens
  chr22:45899227-45899229
  hyper
cg

SEQ ID NO: 134305 - DNA, 150 bp, Homo sapiens; identical to SEQ ID NO: 58143
  chr22:45973978-45974128
  hyper

SEQ ID NO: 134306 - DNA, 30 bp, Homo sapiens; identical to SEQ ID NO: 58144
  chr22:46041470-46041500
  hyper

SEQ ID NO: 134307 - DNA, 108 bp, Homo sapiens; identical to SEQ ID NO: 58145
  chr22:46067493-46067601
  hyper

SEQ ID NO: 134308 - DNA, 639 bp, Homo sapiens; identical to SEQ ID NO: 13501
  chr22:46262412-46263051
  hyper

SEQ ID NO: 134309 - DNA, 112 bp, Homo sapiens; identical to SEQ ID NO: 13502
  chr22:46263511-46263623
  hyper

SEQ ID NO: 134310 - DNA, 3 bp, Homo sapiens
  chr22:46263743-46263746
  hyper
cgc

SEQ ID NO: 134311 - DNA, 102 bp, Homo sapiens
  chr22:46274464-46274566
  hyper
tgagtatgtccaacacgtttgaacagagtcgcttctcacagcccatcctcaaagccagcaccggggcccaacaccccgccccccacacgccgcccctctctc

SEQ ID NO: 134312 - DNA, 96 bp, Homo sapiens
  chr22:46276963-46277059
  hyper
cctgaaggaagtccccgggcacccgggccctgatgaatgcagccgcggttgagaatcgcccgcgtgaatccctattcagagcggagcccttgttct

SEQ ID NO: 134313 - DNA, 20 bp, Homo sapiens
  chr22:46302162-46302182
  hyper
ttgctggctgttaacacgag

SEQ ID NO: 134314 - DNA, 51 bp, Homo sapiens; identical to SEQ ID NO: 13505
  chr22:46302264-46302315
  hyper

SEQ ID NO: 134315 - DNA, 176 bp, Homo sapiens; identical to SEQ ID NO: 13506
  chr22:46363414-46363590
  hyper

SEQ ID NO: 134316 - DNA, 802 bp, Homo sapiens
  chr22:46366557-46367359
  hyper
ggcctaaggctgaaacgccaggattctggggagggggaggcttcctggcctccaaccgctagacgctgaaattccaaagtcccctggttgatccagttcctggaaaggacaccagaagcaggacccagggaccctggcactttatcagcctgggtccccactgctcaggcggtccccacccgcatgcgccctgctgccccgcccccctcaggcgatgcctccgcagccggggctgcccgccgggcctggagcgctctctgtgcccggaccttgtaattatgtcccacagcccgggaaaccgcgggcctcgcagcatctggctgcggttgcgaacttttgtttcaagatgcgcgactatttatagaaggaaaactggtaggatagtaatttcctaggagcaagaggagaaattggctgcgtctttattaaatgggggtgggggcgaggcgatgtattaggactgcaaccgcatggggggagggggtggcgcagggagcgggaaggcagcggctgccccctctggccgcgtcaggcgaccccggacgtggcccgcgtgtaaaggagggggagggggaagggaagagaaggggagggagagcaggctctgaggtttaatcagtagcatccagcttaaattcccccaaacggcggttccataaatgaaacttctttttaagtcagaggccagagcatatgcgtcccattaggaattcggcgaagccaccactgcgcgccccctgggctcactgggctggactcggccctgcccggagcttctcagagccccgtgggctctgccttg

SEQ ID NO: 134317 - DNA, 119 bp, Homo sapiens; identical to SEQ ID NO: 58153
  chr22:46367867-46367986
  hyper

SEQ ID NO: 134318 - DNA, 21 bp, Homo sapiens
  chr22:46368102-46368123
  hyper
cgacagtagaagcatggtggg

SEQ ID NO: 134319 - DNA, 30 bp, Homo sapiens; identical to SEQ ID NO: 58155
  chr22:46371137-46371167
  hyper

SEQ ID NO: 134320 - DNA, 1227 bp, Homo sapiens
  chr22:46371533-46372760
  hyper
cacctgcccctcccgcgggtctgttcaccgccttgcctgtggcctggacggggctcgcctcggggcagccggcggcgcacagtaggcgcgcagggcgcggcggggcccgggtccccgcaggtgcgaggagcgcggggccagcagcgggcggtgggcgccccaggcgaggtgcaccgcaccccctctccgtcacgccgtttctccacccccacttcgagcgaagccgagacagattctgtctaaaggagatcgcggctcaacaggtaaggactcggctgggttcaggaatgtggaaatacgactcggagcagctaccgcagagagcagctagcgcggctcgccgggcgcccgcccgccgggccgcgccagggggagcgcggcgagagggggccgggcccagggcccagggccccgggcgggcggggcacgggccccggaccgagcccgaggcggcccggccggccccacggcccatcccgagccagccggacgagttgtcaaggtaatttcaacacgtctgggtgatggatagagacgaagggccgcggcgggtgccccggcctgcgcgctcgcggccgggtgcgcgccccccgccctcccgggcctccgcaggcgccggacgccccccgaccccgccccggcgcaccctccaggcggcgagcgctcggcccgggctcggcgcccagcgcagcccgggggagggaaggcgcgtcccacccccggggcctggagcccaaacaggtgaaagtacgcgccgggcacgctcgccgctacccgcgagcccggccggaccgcccgcgcgccccgctctctctcctcccgcgctgggctcggcgcctctcgggagctcagggggttgggctgcgtctctgctggcgtggggcgagggtctgacacacgggccagccccggagcccagagagctgcagtggccccctccagtccccacgtccccacggggacgccccggaggcagctccttcgtgctgtcttggcccctggctgctgccctcgcccacggggtactcacccgagcttcacgtacaggacgccaaagcagagaaacacgtagaaaatccacttgcgaaagtttctgtgcatgatccagggaggggggctgcgccatagacagcggcggccggaggggacgcgcgggcccggcagggccgggcaggggccagggggctgcgggcagactgcgctcagcccgcgctgcggctcgggcgg

SEQ ID NO: 134321 - DNA, 302 bp, Homo sapiens
  chr22:46372769-46373071
  hyper
cgcgggcactcggcgcgcgctgccaccatggtgagcccgggatgccgccgccgccaccgccgcgtgagcccggggaattgacccaggctgggggccgcgacctcgaagcccggttgagcgaccgtggacccctgcaagcgcgggccgggggcccgggcgcggctggcgggcgggtgcagcctgcactaggcgcagccgcctgaggccgtgagcgcctcgccgagcgccgcggcggccaatgtgtccgcacttgtcggccgccccaggtgactcgcggccccggcaagcgagccgcgagcgag

SEQ ID NO: 134322 - DNA, 166 bp, Homo sapiens; identical to SEQ ID NO: 58160
  chr22:46373379-46373545
  hyper

SEQ ID NO: 134323 - DNA, 30 bp, Homo sapiens
  chr22:46402471-46402501
  hyper
cccccggggtcactcgaggccagcagagga

SEQ ID NO: 134324 - DNA, 30 bp, Homo sapiens
  chr22:46465663-46465693
  hyper
cagctcagtgggcagcgaggccctggcaga

SEQ ID NO: 134325 - DNA, 369 bp, Homo sapiens
  chr22:46465892-46466261
  hyper
gaatgccaaggccggcggcggggggttggggggagacaggcacagacagacattgggttgggacccgggaggccttgtttctctcgggccctggccgccaaagggccgtcgcaggcgtctggggacatcagctccatgcggctctgggccagggcatgctcgggcagggggacggggtctgcgaatagtgactctgtgtccgcgtgcgtccccgagagccggaggcccaggccggcccctctgcggtttgggaaccactcaggcgcctctgtggagcgggcgggaaaagacgccgcggcctccttggcattctaacccgtgtccggaccctagaggccggccggtctcaaccaccgggagggcctggga

SEQ ID NO: 134326 - DNA, 30 bp, Homo sapiens; identical to SEQ ID NO: 58162
  chr22:46466843-46466873
  hyper

SEQ ID NO: 134327 - DNA, 360 bp, Homo sapiens
  chr22:46468169-46468529
  hyper
actctgtggcgcagtcgggtcgctaagcgcagggaagccggagcccgaaggcaaggagagacgcggcgcggggccggggaagtggggcctgggccgtgcgcttcgcccgcggcagtccagagccgtcccaccctgcgaagagttgcgggaactggcaccgctctgccgtccgccgcttcgacgcgggaagagggtgagcgtttggaacccaggactcagaccgctagctgagggcctgtgcagctctgggcacgcgagcgcggcgccggcggcggccaggcacggtcctcccgcaagggcagggctgtcgacctgtgcgccccaggtcacgatcgggttcacggcgactcctgaggacgg

SEQ ID NO: 134328 - DNA, 43 bp, Homo sapiens; identical to SEQ ID NO: 13509
  chr22:46512496-46512539
  hyper

SEQ ID NO: 134329 - DNA, 30 bp, Homo sapiens; identical to SEQ ID NO: 13510
  chr22:46545332-46545362
  hyper

SEQ ID NO: 134330 - DNA, 30 bp, Homo sapiens
  chr22:46546771-46546801
  hyper
accgaggactcttgcgagggatctcggggc

SEQ ID NO: 134331 - DNA, 61 bp, Homo sapiens; identical to SEQ ID NO: 13511
  chr22:46634891-46634952
  hyper

SEQ ID NO: 134332 - DNA, 30 bp, Homo sapiens; identical to SEQ ID NO: 13512
  chr22:46645888-46645918
  hyper

SEQ ID NO: 134333 - DNA, 32 bp, Homo sapiens
  chr22:46646366-46646398
  hyper
gtgctgaggggcgtcgcgtctggccgtgcgct

SEQ ID NO: 134334 - DNA, 112 bp, Homo sapiens; identical to SEQ ID NO: 58168
  chr22:46658171-46658283
  hyper

SEQ ID NO: 134335 - DNA, 109 bp, Homo sapiens
  chr22:46658633-46658742
  hyper
cggcctgcaacatcacgcgcgcggggccgtctgtggggcactcggtgcgggccacgaagccctgctggggccgcgggcctggcgcggcggagcgcggggagacgcgggc

SEQ ID NO: 134336 - DNA, 171 bp, Homo sapiens
  chr22:46663530-46663701
  hyper
ccagagggagaagccgctactgcaggagacagagcgatttttccgctgcaaatccttgagaagggaggatggaggcggcgggacgacccagtgaagccggccccgaacgccaagtgagtgtgtgccgtgcgcgcgcgggtagctgccgaccgcaacgacataaacttgaaa

SEQ ID NO: 134337 - DNA, 180 bp, Homo sapiens; identical to SEQ ID NO: 58170
  chr22:46663945-46664125
  hyper

SEQ ID NO: 134338 - DNA, 30 bp, Homo sapiens
  chr22:46732048-46732078
  hyper
tcacggatctgcggcgtccacattcacctg

SEQ ID NO: 134339 - DNA, 30 bp, Homo sapiens
  chr22:46732284-46732314
  hyper
ttccggcatctaaacggagccccacgggtg

SEQ ID NO: 134340 - DNA, 31 bp, Homo sapiens; identical to SEQ ID NO: 13513
  chr22:46774456-46774487
  hyper

SEQ ID NO: 134341 - DNA, 1937 bp, Homo sapiens
  chr22:46932837-46934774
  hyper
cgacgtcctgccagccgcccatcgcggcccacgtccagcagctcccgcggcgcccggggcgtgcaagcggcgcccaccgcgtaggtacagccgggccggagggcgaaggcgcgggtcccgccgggtacgcgcggctcccaggcggccgctcgcagccccatcgccggcagggcggcggcggcggccaggagcagcagcacgggcagcacgggcggcggcggcggcgccatggcccggagcccgagcccgagccgggcgcccgaacacaatccatgcacccggcgcgcctccgcatccacccggcgaggccggggagcggctcccgggcgcccggccctcggggcggtccgcgtcccgcctccccgggggccctggcggggactgtggggaccacgcgcccggcctcccccgcagcttccacttcgagagcactttgcgaaagtttgcgaagttggtttcaagatggctcctccgcgcgtcccgggagggcgccgcgcatcaacctgcggcggcggcggcggctccaggcggctccaggtggctccggcgcgggctcggccggacgggcgtgggaagcggggcgggcccggcgcggggcgggggctgagttcccggagcgggctgggcagctccgcgccgcgcagaccccggcggccggctgctgcctgggcggtgcgcttggcccgcgcccactccgcccgcgctctccccgcccccggcccggccccgccccgcccccggcccagcggcgtattgttcggccccggggggagccggctcggaggtgcgcgccgagaggatcgctatggagacgcgagggcgcggccgggacggggactggggccctactccccggaggcctccccacccagcctcccggtggggcggggccgaggcaacagggccgggaaaggtggggctggggcccccggtggccgctacccgtggggcggtggctccgcacctcgggctcggggccgcggctcagagcctggctccccaccccggcagaacagatccacggagaccgccgccaggagtgccgcgcgggtaggacccgggggcggaggactggggccgagaggccggggagcccccccccacccattaaggactgcggaggctgtcgaggagggttacccattttacagcaagacgcacggaggctaaaatgcttcaccccgactaaaactccctggactttgaagcccaataggcagctaccggatctgcgtcccacttggtttaaagcgcaacttttaaatgaaagaagaaaaccccggttgacataagggatttggagaggacggcggaggcgcgctcatctcccgcgtgcggcccgacccgagcgttcgcggacgcatcgcggaatccccgagcgtccggctcctcccgaagcgggttgcggggaaggcggggggctgcgggtcctggaagctgcctggggcaagcaagcacccgcagggatttagagctgtgccacagcccctgcccagcctcctacggaggacagcggggggcggggggcagagaccttagagctttcagaaaagtgacacacacccccgcctcctgcggggaaccacggggggccgggggcagctttaggtttgcgtgacgggtacacctgcctccggatggggcacagggataaagggggtggaggcttaggacttggcgaccccccgcatgggcggggctttgggactgtgccaccagcggctgggaagggcgcgcactcccttggtggcgctcggggcgccggagtccagtgcagcccttaggcctcccagtggtcggggacggtaggtgggggtcgcctcttctctcctagaagggcttctcctggggccggtcggagcggtgggggtgggagtaatgcgcagtcacccctagaacgggtctttttggcaagggagggtcggatcctgcagcca

SEQ ID NO: 134342 - DNA, 30 bp, Homo sapiens
  chr22:47133949-47133979
  hyper
cagcagagcccgcgcgggctccaggctcac

SEQ ID NO: 134343 - DNA, 116 bp, Homo sapiens
  chr22:47158138-47158254
  hyper
tcgtcactcagtgccgggtgacccagcttgaccagcacccgcagccgccctgccactgttgggccgggtatggtgtgtctggcttccctctgttctgggccggctccgaaacgcgc

SEQ ID NO: 134344 - DNA, 128 bp, Homo sapiens
  chr22:47158506-47158634
  hyper
gacttccgggcgcgcgtaggcacaacttccggaaggaggcggaagagcttctcggctctaggctctggagtcccgggagcagtgaggggccacccggggcacaggaaagggccgctaggggagggccg

SEQ ID NO: 134345 - DNA, 235 bp, Homo sapiens
  chr22:47199299-47199534
  hyper
cggttttctctcctgtgggccttgttggagatctcgcttctgctgtgggagctggggcccggcccccaggagctgaggcggggagggcggttggttcttgcgacccggccgtcagcgttcagcgtcgccctctagtggccaggtgctgtctttgcagcctgggcttcatgaccacagcagggcacgttggccttgtgggtggggggtgcttacacttgcgcgtgtctgtgtgtgt

SEQ ID NO: 134346 - DNA, 30 bp, Homo sapiens
  chr22:47348178-47348208
  hyper
ggcttctgtgtgtgccgcttgtcctcctct

SEQ ID NO: 134347 - DNA, 30 bp, Homo sapiens; identical to SEQ ID NO: 13516
  chr22:48137393-48137423
  hyper

SEQ ID NO: 134348 - DNA, 308 bp, Homo sapiens; identical to SEQ ID NO: 13517
  chr22:48885529-48885837
  hyper

SEQ ID NO: 134349 - DNA, 114 bp, Homo sapiens; identical to SEQ ID NO: 13518
  chr22:48885907-48886021
  hyper

SEQ ID NO: 134350 - DNA, 607 bp, Homo sapiens
  chr22:48886204-48886811
  hyper
gggcgtgagctgagggctggggtagggggtgaccgccgcgggctccctgttgcctggagtgaagggtggggggtggcctgtgcccctgccgaggctccaggcgggtggaatgaggggtggttggagtcccgggtgcagactccagcctcggcgctggggagggtgctcagcatcccggggcacgttcgcggctggtggggtaagtgggggccgctcagcgtcccgggcacaggctctggccccagatggcgcgggctggtcggcttcagctccgggagctccgggcttcttgtcttcagcgggagaataggacgggtgctggggagcacctgtcatggagaattgccatgggcgcgggaggtgatggaaaaatatggattctttacaaaaaaaaaaaaaaaaggccagcaccgaacctccctccacagacaccacctcctccagagccccgggcctccaagctcccagtccgatctgatccttccgctgtcgccaaaatgagagcacagtggcccagggagacccgggcagccgcgggatcggcctccggagtcctgggacagcccagctcgccaggatcgcaagggaaacccggggaccagagcag

SEQ ID NO: 134351 - DNA, 30 bp, Homo sapiens
  chr22:48888456-48888486
  hyper
gaagtgccaggagacgcaaacaggggaaag

SEQ ID NO: 134352 - DNA, 30 bp, Homo sapiens; identical to SEQ ID NO: 58181
  chr22:48929553-48929583
  hyper

SEQ ID NO: 134353 - DNA, 23 bp, Homo sapiens
  chr22:48970900-48970923
  hyper
gccgctggtcgggcccggctggg

SEQ ID NO: 134354 - DNA, 147 bp, Homo sapiens; identical to SEQ ID NO: 58183
  chr22:48971532-48971679
  hyper

SEQ ID NO: 134355 - DNA, 377 bp, Homo sapiens
  chr22:48971758-48972135
  hyper
cggcggcggaggaagaggaggaggaggaaggcgacgccgagcagcgggcggtgggggccgacaggcggaggagggggccggggccgcgccggaccccccccccccccgcgccgcccggccgttgcgcaatccgcggcccgccgtccgggccctgctggcggtgcggctccgggggcggcggcggggctgattcatggggccgcggcggccgccccccggcgccccgcagccagcgatggtggccgagtggtcggagcggcggccgccgcggcccgagactttctgctaacctccccgcccccgcccgccccctccgcggcgcccccctccccccgcccgctcccctcccccctgcccagaaagacacaaatcgcctc

SEQ ID NO: 134356 - DNA, 246 bp, Homo sapiens
  chr22:48972219-48972465
  hyper
ggcggggcgctgatgcggcgcctggaccttcgctgcgcgacttcgggggcgtcggccgagttgggactccgcgatgcagctcctgaaggcgctctgggcactggcaggggccgcgctctgctgcttcctcgtcctagtgatccacgcgcagttcctcaaagaaggtaattgtccccgggcgcgcggaccggtcctccgcgctctgcccggctcgcggcggctccggcgcccgacccggcttccagc

SEQ ID NO: 134357 - DNA, 105 bp, Homo sapiens
  chr22:48972766-48972871
  hyper
ggtggccggccgggctggggcgggagcggagctgggacccgccagggtgggcgccgggctgggacccgcggacgtcgggaaaccggcctgcgcacctgttcccca

SEQ ID NO: 134358 - DNA, 30 bp, Homo sapiens; identical to SEQ ID NO: 58185
  chr22:49338722-49338752
  hyper

SEQ ID NO: 134359 - DNA, 198 bp, Homo sapiens
  chr22:50118498-50118696
  hyper
gcctcccaagtcgcacgcgggacccgggcatgggtggccctgctccatacagccccggccaccccacccctggccggtcccacagcctcacaccagccgctccagccatagccacggacggctgagtccggccccgatgctcatccctggagctcgtgctccctcctctggactccccgagaactgtgcccggaccgc

SEQ ID NO: 134360 - DNA, 66 bp, Homo sapiens
  chr22:50118722-50118788
  hyper
cggcactcggcgctgtctgcagaatgagccggtgtgcagagacacgcgggccggccagcccctgag

SEQ ID NO: 134361 - DNA, 462 bp, Homo sapiens
  chr22:50170509-50170971
  hyper
acagcccagagcccctcggtgtgtgatgaacccttccccgggaggttggccagggtggggctccacacagggcaccatgctccctgagccggagtccagtccccagcagtcgagccctaagacgctaaccaggaggtgtggagagccatggaggcaggtccgggcgactcaccggctgcgatcctggccgccttggcgtagttcccattctcgatgcaggagatcagctcactgcggtcctccagcgtgtgccgtcgcacaagagccggtttgccccgcccacatttgggcgcattaaagcttcgggaggaagagcagagggagtcaggcgccccgcccctgccttcagcctcactcgggcttcgtcccgtgagctgtccgccaccaagctggccacgcatcctgcctgacacccccgcggccagacgggcctgtgggtgcgcaggtctggagggagtgaac

SEQ ID NO: 134362 - DNA, 87 bp, Homo sapiens
  chr22:50242068-50242155
  hyper
ttcagccccctccccggtcccccaggaaggggccagactccagctcagcacccagcgcttcctggtctttcccttctgggcgccctc

SEQ ID NO: 134363 - DNA, 1323 bp, Homo sapiens
  chr22:50242190-50243513
  hyper
cgctcccacccccggccgccgcctggacagaggcgcgcaatccggagggcgcaggctccggcccggagaagggggtgccgccggcgttccgatttctcaggaatggggaaacagaggcacggtggatccggcggcggggctgggtctggggctggacgttgacctaggaccccgcccctgcccgccctgcgccgcgcccctcccgggccggccttgaccgagcagctccacgcgggcccggggctcgtccacccgacaggagcggggggctgcagcccacgagcccacgagcccgcagcgacgcacccggagtgtaacctcgcagagtcacggagacactttcccggtgtgggcgcctcgccgcgcttcctccccgcgggctgcggccaccccagggcaggacagagccgagatgcccgggtgggagcgatgcccgcgtgggggcgatgcaacgggggagatgcctggggggagggtggtaaggtgaaacctggtggagaacaatgggggtgggtgggcgattcctggggaggtgcccggtgtggggtgtttctggttcgcccggggacagtgcgcgtcccctcgcccgcggcgcccgccctgcccgtcccaccgaggtcccccgggagcgtctgggcccacggcttcggggggtttctccgagacctgggcgctgttctgggggagcaggggcccgggccaccaaggttcgtgcggaccgtggggtgtcccacgcccaggccgggggatcccagagccccgcttccctcaagggcgccgcgccccggactgcaggtggagacggggaccggccccgcggggtcgccgacaggcgcggggcgggacagggtgggaggcggcggggcgcagagtcctccggtcgccggcgcgatccgggcaccttcctggaggcggcgggagcgcggtcgcggcgcctccggggtggggtccaggttggaggctccggggcgcaccgccctagccccaccccggccgggtccccgcgctgcctctgcggagagggaggaaggaaggaaggcagggagggaggggacggccggcaggcgtggggtccgcggcgtcagggctccttcctcccgtccgctccatcctgcaacccgtagcccgggcggggtctcgctgccccctccccgaacacagccgccttttcctccctccccaaccccgagcgcctcccttcccgaatgcgggagtccatagtgcacgggaagcctcttcccctccccaccgaggctgcccgacgccccttccaccctccgaccccccgcaaccatccctcaaatgccccggcggccagcaggg

SEQ ID NO: 134364 - DNA, 442 bp, Homo sapiens
  chr22:50246432-50246874
  hyper
gccaccgtgcccggccgatatttgaatgtcatatacttttcatatatgctaaaatactgttttaattctcccccaacctcttaaaaacgagaaaagcattcttagctcaggcaccatagaaaacccggctgcaggctggacgtggactttggaacagtcggcgtgcgggtgaaggggcacagccgcggggcaggggcgggctccgggcagaggcggccgtgataactccacgctcccgctccagccggtgaccgccacgcgggctcctctcactctcacactcaggccgagaaaatgccgaaagccgtgtcaccaacgggggacctcggggccacattcagcatgcagagtttatttggtctgctcaaacatttgtgttaggaaataacacattaaaagtgcacatttccttcagaccctgagaagcgggcgagtcccgtgc

SEQ ID NO: 134365 - DNA, 30 bp, Homo sapiens
  chr22:50247161-50247191
  hyper
gccaagccacgggacgaaaccaaggcgccc

SEQ ID NO: 134366 - DNA, 222 bp, Homo sapiens
  chr22:50311962-50312184
  hyper
ggcaggaagcaggacggcggaaacagaacagagcccgaatctaaagtccttgcccaaatctaaagtggctaccgcagccccggccgctacggccgcagagaccctctgtgccctgagtaaagatggccgccgcgggctgcgcgcgaggggcggggagcgggaggcggggtcggacctgcacgccccgcccccggactcctggcggccgctgatccggggcct

SEQ ID NO: 134367 - DNA, 30 bp, Homo sapiens
  chr22:50329845-50329875
  hyper
cgtgggccggagcgcggttggccttgacct

SEQ ID NO: 134368 - DNA, 30 bp, Homo sapiens; identical to SEQ ID NO: 58192
  chr22:50354801-50354831
  hyper

SEQ ID NO: 134369 - DNA, 30 bp, Homo sapiens; identical to SEQ ID NO: 13525
  chr22:50356064-50356094
  hyper

SEQ ID NO: 134370 - DNA, 305 bp, Homo sapiens
  chr22:50421920-50422225
  hyper
ctccgggttcctgcgcgtggagggggcaggacgccccgcccttattcccgccgccagggggctccacggaggccgcccctcatccacagcagctgcgggtcctgcccggccctccagggcctgtaagccaagcccgagcctcgcccccgggcccgccccctcctcccgcccccgcagctgctccctctcgcctccccgggaagcgcgacgcccccgccttccctcagggccccgggcgggcggacaccagaccgagaaatccgggcgggaggtcggggcggcgtctgctccgccgggggcaggta

SEQ ID NO: 134371 - DNA, 408 bp, Homo sapiens
  chr22:50453233-50453641
  hyper
ctccctccgcgcccgcgctgggcaccagatgggaggaaacggggtgcggagaccctgggcggcgccgagactcgtcggacgaacgcgggaaggaacgaaccagcgtccgcccgggacccgggctggagccttccccagagcggctcggagggtccggagcgggtgcgggggtgctgggcacgaggttcccaagaaaaccacggcgaggacgcgggttcaccacaacagcgctgtgttctcggcctcagctccgcgcaggtttccacggagacgcgcgtggctccgggtcgtcgtcctggtccccgcgccggtcccgactcacggggtccgcgggctgcagctccgcccgccgagccgcacgaaggacgcgccctgcaggaccgcggcgcagaacgagcggcagcgctt

SEQ ID NO: 134372 - DNA, 30 bp, Homo sapiens
  chr22:50468949-50468979
  hyper
atcccagcttttggcgggctgggctacggg

SEQ ID NO: 134373 - DNA, 211 bp, Homo sapiens; identical to SEQ ID NO: 58196
  chr22:50496971-50497182
  hyper

SEQ ID NO: 134374 - DNA, 170 bp, Homo sapiens; identical to SEQ ID NO: 58197
  chr22:50497213-50497383
  hyper

SEQ ID NO: 134375 - DNA, 30 bp, Homo sapiens; identical to SEQ ID NO: 58198
  chr22:50608494-50608524
  hyper

SEQ ID NO: 134376 - DNA, 35 bp, Homo sapiens
  chr22:50623254-50623289
  hyper
taagcccagcgccagcgccaggtcagccaagaacc

SEQ ID NO: 134377 - DNA, 102 bp, Homo sapiens; identical to SEQ ID NO: 58199
  chr22:50623612-50623714
  hyper

SEQ ID NO: 134378 - DNA, 303 bp, Homo sapiens
  chr22:50623741-50624044
  hyper
cggggcccctggggcccgaccttcccggggtgccccaacctgcggcaaggccgaggtcccgctgaggcatgagtcccgggtcggggaccgctctgggccgacccccggaggacggactaggccgatccccagagggaagggggccaggccgaggccatggcagcgcgttccctgatcccgtgttctcggctcctcgcgtcccactatcggctgtccctttcgtgcgggactgacggctcacagaacagttacatttcaatatcattcgactgaaaaccatcctgtggacgccgtgcgagcatt

SEQ ID NO: 134379 - DNA, 30 bp, Homo sapiens
  chr22:50640259-50640289
  hyper
ccaggggcgggagccgggatgagaggttag

SEQ ID NO: 134380 - DNA, 30 bp, Homo sapiens
  chr22:50683514-50683544
  hyper
ggtgaggcctgggccgcggcatacttccgg

SEQ ID NO: 134381 - DNA, 30 bp, Homo sapiens; identical to SEQ ID NO: 58201
  chr22:50689146-50689176
  hyper

SEQ ID NO: 134382 - DNA, 283 bp, Homo sapiens
  chr22:50690036-50690319
  hyper
gaaaggcgaggggggcgaggggtctgcagggcaaaggccacgaggcgggaggagcccgcggggaggcaggtggcgctgcggccggctcagggcggtggtcgtggctgcatggaggcgcagcaccgcccccgaggtttaaggagggagtgagtccggttctagctccaagaagacccctggcccaagagcagagtcaaggtcggtggaggtggggacactggaccggggttgcggtagcatggtgggggactgaggaagataggaggcacgggcacagccacgg

SEQ ID NO: 134383 - DNA, 190 bp, Homo sapiens
  chr22:50699693-50699883
  hyper
ccttagcgccggtgcggccgtccacggccgagctgcggggcggaccgcttagcgggaaggccgggcaccccgcgcaggccccgcccgccccgccggccgccccgcccggcccgcgctcaccacaccgcgccgtaggcgcccgagcccacgggctgcaggtcccggtacacggcgcgcacctcccaggccg

SEQ ID NO: 134384 - DNA, 30 bp, Homo sapiens; identical to SEQ ID NO: 13526
  chr22:50700548-50700578
  hyper

SEQ ID NO: 134385 - DNA, 30 bp, Homo sapiens; identical to SEQ ID NO: 58203
  chr22:50708624-50708654
  hyper

SEQ ID NO: 134386 - DNA, 210 bp, Homo sapiens
  chr22:50708932-50709142
  hyper
ctgcgcctcggaggcggtggcagagcggaaaccagccctccccttcccggggggggcgccgagggcggacacctccctccggctctcacctcttgggggccgcgcgcttctccagacttgcgcccgcgtctgggctcggcccgggcttccctaccccggcggcgccctccccaacgagggagaaccgtcaaaagcgaagaagccaggggt

SEQ ID NO: 134387 - DNA, 30 bp, Homo sapiens
  chr22:50710474-50710504
  hyper
gggggcggtggaaacgggcccctctcatca

SEQ ID NO: 134388 - DNA, 85 bp, Homo sapiens; identical to SEQ ID NO: 13527
  chr22:50745644-50745729
  hyper

SEQ ID NO: 134389 - DNA, 184 bp, Homo sapiens
  chr22:50765109-50765293
  hyper
ggcccctccaggaggcggcggccgaaggccagggagagtgcggggcggccgagggccccaagcgaggcgggactggccccgagaggcgcagccctgcccacccgcccgcgcccgcgctcgcgcccgctcacctccagcgcctggcccagctccaggtcgaaggtgaccacgcacacacactcca

SEQ ID NO: 134390 - DNA, 45 bp, Homo sapiens
  chr22:50766077-50766122
  hyper
cccggcgtggaagggcgagtttggggctgtcggtaacttaatgag

SEQ ID NO: 134391 - DNA, 30 bp, Homo sapiens
  chr22:50781515-50781545
  hyper
acctcaaagggaaacgtaaaaggggaaaga

SEQ ID NO: 134392 - DNA, 131 bp, Homo sapiens
  chr22:50781871-50782002
  hyper
ggcccgcccgaggccgcccgggctttgcctccaccagcgccctggcctccgctcgggcctccacacgggcctccgaagagctgccgcgacgcccggcccgcagggcaggtgagtgcggccgcccgccgctc

SEQ ID NO: 134393 - DNA, 635 bp, Homo sapiens
  chr22:50873754-50874389
  hyper
agagacagtccctcccggggtagttggtgactccggagctggcactcagaagccgttagcgccaccgggctccttgcagctcagggagccctgcctggctaggctgtcctggctgtgtgctctgcactcaggtgattggagagtctcattctcactcaggtgtgagatttcgtagcacaagtctcaggggagcaggttgcagcctgtttcttaagaacgcagtgggttaggtgggcgcaggcacagcacatgtgtggcagaggcgggcccagctgtggcctctcctccctatacccgtgtaaggtgaggaagctctggatagtcctccccgcaccccaggaccatagtgaggggactcctgggttgggctccattagcccctggcgaggtcaggcctgccggctgccatcacaaataataaaagcagggcaggaggagcttccccacatcctggagggcaaagtagatgggtggaggtggaggccagggacagctccccagggcaggggcagtttaaggaggcgaggggcaagcaggaagctgttggatcattccatacgatctccagattgtgaatccttccaggactctgacctccccggaaaaacaggcaggacacgcgcccaggcctgtag

SEQ ID NO: 134394 - DNA, 6 bp, Homo sapiens
  chr22:50912805-50912811
  hyper
gccact

SEQ ID NO: 134395 - DNA, 30 bp, Homo sapiens; identical to SEQ ID NO: 13530
  chr22:50913816-50913846
  hyper

SEQ ID NO: 134396 - DNA, 215 bp, Homo sapiens
  chr22:50919519-50919734
  hyper
cggggtcggcggcaccgcgtcagaggagagcggaatggccagcccgctgcggaatcccgcggacttgctggtcaggctggggggccggggtccaccgggtcagaccctggagggtgggaccgcccggactcgggaggtggttgacggggtgggccccgtcgggtccgagtccgccccagccgtgggatcagctcggacgacggttcgccccccag

SEQ ID NO: 134397 - DNA, 81 bp, Homo sapiens; identical to SEQ ID NO: 58211
  chr22:50920027-50920108
  hyper

SEQ ID NO: 134398 - DNA, 25 bp, Homo sapiens
  chr22:50946694-50946719
  hyper
tggcgggctgaggacgccgtacccc

SEQ ID NO: 134399 - DNA, 30 bp, Homo sapiens
  chr22:50964204-50964234
  hyper
ctgcggcggcagaacgagctctgcgaaggg

SEQ ID NO: 134400 - DNA, 266 bp, Homo sapiens
  chr22:50964978-50965244
  hyper
gctcccctacaccccgtccccctcaccgagcgtggtgaccaggtcccttaagtctggcgggcctgcgccgtccatgcagagcagcgcctcctccacctccagggcgtggcccacgcagcgacccaggggcttgtccatggcggtcagcgctgccgcgacccgaagccctaggctggctcccacgccaacctgcggagaggaggctcagcgtggaccccccatggcggggccttctgcagccggttcttggtcgaactccagcccct

SEQ ID NO: 134401 - DNA, 46 bp, Homo sapiens; identical to SEQ ID NO: 58214
  chr22:50968297-50968343
  hyper

SEQ ID NO: 134402 - DNA, 30 bp, Homo sapiens
  chr22:50968837-50968867
  hyper
gagagaggcggacacgatgcggactcgcag

SEQ ID NO: 134403 - DNA, 30 bp, Homo sapiens; identical to SEQ ID NO: 58215
  chr22:50969663-50969693
  hyper

SEQ ID NO: 134404 - DNA, 640 bp, Homo sapiens; identical to SEQ ID NO: 13532
  chr22:50970391-50971031
  hyper

SEQ ID NO: 134405 - DNA, 167 bp, Homo sapiens; identical to SEQ ID NO: 58217
  chr22:50982555-50982722
  hyper

SEQ ID NO: 134406 - DNA, 17 bp, Homo sapiens
  chr22:50982902-50982919
  hyper
cgcggaaataaatttta

SEQ ID NO: 134407 - DNA, 30 bp, Homo sapiens
  chr22:51001315-51001345
  hyper
tctggcgcccccagcggccgcttgaggaac

SEQ ID NO: 134408 - DNA, 30 bp, Homo sapiens
  chr22:51001791-51001821
  hyper
gaggcagaggtgcacgcaggtctatgtggg

SEQ ID NO: 134409 - DNA, 13 bp, Homo sapiens
  chr22:51021396-51021409
  hyper
ctctttccgaagg

SEQ ID NO: 134410 - DNA, 69 bp, Homo sapiens
  chr22:51021437-51021506
  hyper
cgcccctatgggcaaggaccaatggtctctctctgggcggggctgctgttggacggcctgggccaatcc

SEQ ID NO: 134411 - DNA, 30 bp, Homo sapiens
  chr22:51038708-51038738
  hyper
tcagcacccgacggcggacagctcctcccg

SEQ ID NO: 134412 - DNA, 222 bp, Homo sapiens
  chr22:51042182-51042404
  hyper
cgggggaggagggcagggaggatggactggctgctggaagaggcctgggtggtgcagagagggtgaccccacctccctgcccagcagagctcccgggccccctccctgccacggacaccgggcccggcggggcgcagtcgccagtgcgcccgggttgcgactgcgaagggaaccggcctgcggaaccccctgcgccaggggggacttcgccctcctcagatc

SEQ ID NO: 134413 - DNA, 108 bp, Homo sapiens
  chr22:51042457-51042565
  hyper
cgcagcagccaggagctgtcctcgcccggctccgactcggaggacgcgggcggcgccgcctggggcgcatgatctcgtccatctcggagacggagctggagctgagca

SEQ ID NO: 134414 - DNA, 235 bp, Homo sapiens
  chr22:51066541-51066776
  hyper
caggaggagccggtaccgggctgcgggcgcttccgcctcggccccgccccgtgacctgtgacccttgcggggcggggccgggggcggggccgggggcggggccgggggcgggccggggcgaggggcgttgctgcgcgtgctcgctccgaggccgccgtgtgcgcctgaggctgttggctgcggtcttgaaacgggctctgggagcttcctctgcgcggtcggccctggctgaggc

SEQ ID NO: 134415 - DNA, 14 bp, Homo sapiens
  chr22:51111995-51112009
  hyper
catcaccccctccc

SEQ ID NO: 134416 - DNA, 525 bp, Homo sapiens
  chr22:51112026-51112551
  hyper
cgtaaaactaaaattcacttcccagtcgcaggtggagactagtagcgccccctcccctaggcccttccccgtaggtcgcgcccccatcccgccgtcgctaaggtgacggggagggggcgacaggcgttggatccggaccggccaggggtccttggggggaagtccggagcaaactccccaaactaggctggcgtgggggagccgcgccgaacacgccagggcgcggtcgaaagggttaattcggagggcctctcgccgaggcggtgggaagggccccgggccctccccggtctggaggtccccgtggtccgacccccaggcctggggcgggggggggtccccgccatctcctccaggcccgaagctgggggtcggtggagtgggggggagaagccgccacctccggaaattaattgtttttctttccccttctcgccctaccttggtcttcgtgccccgacgcggcccccaccccagctccgggaccccttcctccgccgcacccgccccggtggtccgcggatg

SEQ ID NO: 134417 - DNA, 30 bp, Homo sapiens
  chr22:51113139-51113169
  hyper
ccgccgccctgggcccggccgtgcccctgc

SEQ ID NO: 134418 - DNA, 344 bp, Homo sapiens
  chr22:51113371-51113715
  hyper
cccggactccttcggcgggggcccggggctcggcaccccgcatggggccggcggggcgggtccgcgctcccgggacctgagctcacgagcccgctccgctgcagaagtgcctgcgcctggacccggccgcgcccgtgtgggccgccaagcagcgcgtgctctgcgccctcaaccacagcctccaggacgcgctcaactatgggcttttccagccgccctcccggggccgcgccggcaagttcctggatgaggagcggctcctgcaggagtacccgcccaacctggacacgcccctgccctacctggaggtaagtggccggcgcgggggtgagctgaggagcgcg

SEQ ID NO: 134419 - DNA, 30 bp, Homo sapiens; identical to SEQ ID NO: 13536
  chrX:2647654-2647684
  hyper

SEQ ID NO: 134420 - DNA, 102 bp, Homo sapiens; identical to SEQ ID NO: 58224
  chrX:2747434-2747536
  hyper

SEQ ID NO: 134421 - DNA, 636 bp, Homo sapiens
  chrX:2815891-2816527
  hyper
gaactgtaactagcgcgtcataaatcccagcccttatcttgaacaagagtcaaagaccggacttgaaggcatcccccaagataaaggtaggccctctgcagggcagctgtaagtcagctctcctccacccctctggctggccccctccttatccgagtcctgcttccttcctctttaaatctgcagacaatgctgcttctctgcaggtctctgcatattccctcagctcacagaccggctgcatacttggtattttcagggttaggtttgcaacacatgactggggaaatgcatgaaaaggaaatgatgcaagaattcaccgcggacacctttaggtgagaaggagatgtgacaaaaagtctctgcctggccaaaccgtagccaggctcctgaagcccctcccaggcccggtggtgcgtttccttatagaattagatttcagcaaagtaccggctaagtcagtttggcgagaagccaccattcttgatatcatgttcctcgtcgtccaccacccctggttgatgtttaacccccttggctggctttaacaagccaggttggtttagccaggacccgcttcacctctgatgtttccttttagtgctttgccatctgtacacccgctgcctgcccccg

SEQ ID NO: 134422 - DNA, 30 bp, Homo sapiens
  chrX:2846408-2846438
  hyper
aggggcgtgtcttaccgagcgtgttggggg

SEQ ID NO: 134423 - DNA, 848 bp, Homo sapiens
  chrX:2846677-2847525
  hyper
cccggggaacacggccgtgctggaaggcatcgagctggggggttgggggcgggacggggtgcctcttaggaagtggggcgggcaaggctacgcttcgggggatggagccttggggcgggacggggcgcgtcttagtggggcagagcggggggcgcggttcggggcgggtcttagggagcctttgaaggccgaatccgggcagcggtgtagctgggcgtggaaggcggaggacccagcagggcgtgaccggcccagtttccgctccctccgggtcccggccagccttcctccgccctcccttcccttcctcctttgttctctttccctgcccttccgccttcccttcagttcggtctcctccacccgcccttcgtcccctcagtcgccccccatccctgggctctgctgtctggcgtctttcccgggcacagaacgcgcctccagctacattttggagactacaaggcgccggacacaaccacgccctttacaggggcccaggctcgcccggggcgcccctcgccgtgctcgcgaccccctccccaggcccccaccctaggccttagtatgggccgcgtcccggggtcccaggcacctggcggcgggcgcggcgcgtcccctccgcgcggcggatcgcatggccgagcgctggcccagagcgcaggaccttgccctgcgcactccgcgcccgggcgccgctagtgccaaggcttccgccctctcagctgcgggatctgggccgggcgcccgcccctccttcatccgcgtcatctcctggctctcgggacctccgggacctgcgcgtggaaacaggttttcccaggtcgtcacacgggaaggcctgggct

SEQ ID NO: 134424 - DNA, 283 bp, Homo sapiens; identical to SEQ ID NO: 58227
  chrX:3630854-3631137
  hyper

SEQ ID NO: 134425 - DNA, 111 bp, Homo sapiens
  chrX:3631930-3632041
  hyper
ggaggcgagggggcccggggacagggagggcgtagctcagcagaagtgaagttcaaaactaaaaagtgaaactggcgtttggtgaagagaggggctcggattagcccggct

SEQ ID NO: 134426 - DNA, 132 bp, Homo sapiens
  chrX:3632320-3632452
  hyper
cccaagaggggctgccgggtcttcgggatgagttcagcgtcctggttttgctgtaggactctggtgattctagatttctacttggaaggggcggggaagggcgggctcgaccctgtgcgtttctttgcagct

SEQ ID NO: 134427 - DNA, 30 bp, Homo sapiens; identical to SEQ ID NO: 58228
  chrX:4636843-4636873
  hyper

SEQ ID NO: 134428 - DNA, 30 bp, Homo sapiens
  chrX:5795506-5795536
  hyper
ctactgggacactcgcgttgcttcatggaa

SEQ ID NO: 134429 - DNA, 2091 bp, Homo sapiens
  chrX:6143628-6145719
  hyper
atgttgcccgcagaacgcccacacaaactggcaattctgcttcgtcaggataacgaggtctccctaaactttttcttttccttttttttctttctttttttcttttttttttttttttttttttttttttttttgcttttgccttcctcacatcaccggaagggctgattctgagatgggagctcacgcacaccaccccctttcaagaaaatataatgcaacgcgctccgatgtaaaccctacgggcaacggatgccttcaaaaagcataagataagagcaacaacaacaacaacaaaccaccgccccccccaaaaaaaatgaccaaatagaaataaaataaaataaaaataaaaagaagccatactaccaccttgtggatccagctcgcaagaacatcacctgcttagttccaaaacccccacccaacccccaccccaaatttcttaagttgggtccaaatgacagatcgggatcctctgtcctcactccccgcagactcgcccaagccctaggctgaattcgtgacgcgcgcgcccagcacccgggcgagttgcaagccccggcgcaccgcaggggccaaaaccccgccggaacctcctaggaccccttcacgctgcctcctgcaccccctcccccgccatccccgagatagcagcagcacatacacaaaaagaggctgacacctgccgtaggttcagaggaagaaggcagagaaaaagaaacccgcagtccggaaaaaaaaaaagccttctggggaaggggaggggtatgatgcggaggacgtcctccggctgcccctcgctctccatgcagaacatccgttcccagggtggcccgggccaggcctcgggggtgcaagggttggcctgacccccctgctcccgcccccgccgctccgggaagaaagggcgctgtgtctggcggcgagcaggcgccggaatcgtgcgctcgggcccagggttgcacggagcactgggcccggataccgggggcgcaaagcttcgggtgcggcccaggagaaccccgccgagggaccccagcctaccggttctcggaggggcgaaagagccaggtcaggttgagggacaggaggaggaaggggtgtccaggagactgactgaaggatgagagtgtcctccggggtagcgaccggcctcttggaaaaccagaggcggagggagcagccgcggagtggagggcgcaggccgggacctgggcctctcctcccacagcaagccccccacccacgcatcatctgcagccgagcggcacctacctccctctccctacctcatccccgctcgcgcttccgcaggtcaggccacgcgggtgccagcgcgggctgtgggcgccccagccgcggccttggggaggggtcaggactgaagttcactctctctctgcgtggtctcgaagcccctcgcccaccccgcactgtctcctccgccgccggctgcgcgcttggcggatcttctccatcagttctgcccactggagtgggaaggggctgagccgagccgcgcgggaattgggaggcggggaagcggggaggcgggggaagagacgagatgaaatcggcccgggacagcagagaggcttgggatgggatggaagggaagagggggtggcggttgcgttttccagggctgtagaggtggtgcgcctattggaaccgactcctcagcctcctcccccgtccccacctcggggactggcggaccgtgcgccccgcaggcttaacactccccccgacaccctcgctccgagaaggggtgttctcagtgggcaccgactagggctccagatcccccgagacccagaccagggctccggtagtctgtcctcgcagcttccaacttttccgctccttcggaaaagcgggcagttcagagatggttcccagggcggcagctgcaagcccccccgcgcccccctcaaaggttcagactacactcaaaggctccgaaagaagcaaaaccaccagctctaccctccttctgcggcttgcctcacccttcccacccgcctcgaaacccacacacacgggaaaggggtgcatggagcccgctccccggtttacagaagcagc

SEQ ID NO: 134430 - DNA, 91 bp, Homo sapiens; identical to SEQ ID NO: 13540
  chrX:6145835-6145926
  hyper

SEQ ID NO: 134431 - DNA, 30 bp, Homo sapiens
  chrX:6146641-6146671
  hyper
tagggaacccgaaacgaggtatgattcagg

SEQ ID NO: 134432 - DNA, 30 bp, Homo sapiens
  chrX:6147097-6147127
  hyper
gtaacggagagatcccgggtactcgggaga

SEQ ID NO: 134433 - DNA, 328 bp, Homo sapiens; identical to SEQ ID NO: 58231
  chrX:7065513-7065841
  hyper

SEQ ID NO: 134434 - DNA, 30 bp, Homo sapiens; identical to SEQ ID NO: 13542
  chrX:7066061-7066091
  hyper

SEQ ID NO: 134435 - DNA, 374 bp, Homo sapiens
  chrX:7066302-7066676
  hyper
gcgtcctgggctgcctagtggcgctccgcgcacgcgcaccttgggctttcgccgcagctgtagctgcagacccgggatgcggcgcgggccggcgctgtatgtttacccgcatcaattcctcctcacttcacacccggaatcgggccaagctactcagccagcggccgcgcagagccgaggccctcgtctggggacaaattcagtgcttgagtttggatcaggggtgtgaatgaggaaggagggacagtacaaggggctgtagagtggggaaaggggattgaagatgctcagggtggtatcacttctagccatcaggttgcagacaaatggccttggtcaggaggtccctgggtgggttcgcccgagcccccagt

SEQ ID NO: 134436 - DNA, 140 bp, Homo sapiens
  chrX:7895482-7895622
  hyper
gcgcaggtatgtgacgtcatcgcgccgacgaaggcgcccgctaggccccgcctgctctatttaaacttctggactcaacctggccgctagaccggagcgtcctccagcgcaggcaaggattcctcgtttagagtcatgtt

SEQ ID NO: 134437 - DNA, 30 bp, Homo sapiens; identical to SEQ ID NO: 58235
  chrX:7895846-7895876
  hyper

SEQ ID NO: 134438 - DNA, 36 bp, Homo sapiens
  chrX:8698480-8698516
  hyper
actcaactgcacactcgcgaacgcgccagcttcacc

SEQ ID NO: 134439 - DNA, 221 bp, Homo sapiens; identical to SEQ ID NO: 58237
  chrX:8698836-8699057
  hyper

SEQ ID NO: 134440 - DNA, 651 bp, Homo sapiens; identical to SEQ ID NO: 13546
  chrX:8699110-8699761
  hyper

SEQ ID NO: 134441 - DNA, 704 bp, Homo sapiens; identical to SEQ ID NO: 13547
  chrX:8699940-8700644
  hyper

SEQ ID NO: 134442 - DNA, 31 bp, Homo sapiens; identical to SEQ ID NO: 13548
  chrX:9240652-9240683
  hyper

SEQ ID NO: 134443 - DNA, 52 bp, Homo sapiens; identical to SEQ ID NO: 58241
  chrX:9310728-9310780
  hyper

SEQ ID NO: 134444 - DNA, 1606 bp, Homo sapiens
  chrX:9432815-9434421
  hyper
ctcacccaccctaggcgtgggggagcggggcgggcttggtagggacgctggtcccccgaccgtgggacaggggctgggttgggacgcgggtccccactaggagccgcgggggaggggcagggccggagtccctaccctcgtaggggaggggctggttcgggacgcggctcccccggggcgcaggggcggggccgggtggtacgccgggtcccctcccacggccgtgagggaggggccggcggcgggggcggacccctggcggtcctcctggctggggtccgcgcgctcgcggcagctccccgtggaggtcactgtccgtgccagtccctcccgctgtcccgccctctcccgctgccgccgccgccgccgccgcgcccgcctcagcgcccccactccgcgcttgggagcgaggagccgccagcgcccccgccccgccgccgccgcagcgccctcaggccgccattcgccaccgaaactttccagcgcccgcgctctctccgggactcggcggcggcggggcgggggcggcccgggggcggcgcgcggctgctccggggcgccgggccctcttcggccgccgcacggccgggactcggaggctgccggctggagggaggttcggagcgcggccgggcgcgcggcgccgccacaagttgcgctgctcgcgacgaggtgagtgcgcagggctcggcgggccgggcgcggggtccgcaaacttctgcggggaggcgggtcccgcgctgaccctccagggtccggccggcggctcggggcgcccgaacgctccacccgcccctggaactcctgtaggtgcaggtcgccaactgtccccgcggcgctcggactggggtgcggcgcgctcccaggagcctgaacaataccccgaggtggccgctccccgaagtgccggcgcgccttgcggggagagacggaggtcggcggggggctcctttgttttggggagggggaagtggccggtaagtttagggaagcgctcggcttttcctccggtgcccctttgtctgccgattcaggggcttgctgggcaaacctgcgccaccgcgggctccggggaccggggtggagggcggtggcgggatttccccgctgttggggagaagagccccattcatacccgggacgcgggccggccctcccggacccgggtggaagcgcagcctcgcggagtggggcaagcggcgggcgaggtggcgcgggccccgtgtctgctcagtttctgacgcgcagaaactgtcaaggaagtcgggagccccagtcctccgcccatctccccggcctgagcgcacggctgggctgggggcacccttggcccgtcgagggtctgcagagcgccgcccggggagagcgcagacctgttgctgctcctgggctctgacggggcgggtggggtgggtctcgcagatcctgggccccggccttgctatccagggggaccttccctaacgatgggaccggtgctcggagtggagtatggggagtgcgccttcgggagtcggcgctggccggatatgtgacaactgtgggtcgctggaggcccgcctgcgctgggatagggcctggacttcacgtgcgtcgcctgtgttcc

SEQ ID NO: 134445 - DNA, 30 bp, Homo sapiens; identical to SEQ ID NO: 58245
  chrX:9751458-9751488
  hyper

SEQ ID NO: 134446 - DNA, 152 bp, Homo sapiens
  chrX:9753672-9753824
  hyper
cagaggccggacccgcgcccggctcaggctgctggggggcgcccttcccggctctctaagtccagagtgtgagtgcgcgcagggccgcgcgggacgggcggtccctctgccccggggcagcggccacagcgcgggcaccagggcctcccgcg

SEQ ID NO: 134447 - DNA, 304 bp, Homo sapiens
  chrX:9753862-9754166
  hyper
cgagaacaaagtgtgggcgccggcgggccgcgcgccccgagacggaggaggccggagactcccgccacgccaccccgcgcccatctcacctgccgcctcacctgcccggtcctggcctccaaccggcgggcgggggcgcccagagcttcgaagcactgcagagctctggcgcgggaggaaaggcccgacctggcgccggggcctccgcccccgtcctcgcccgcgctggctccgccagccccggggcgcgcgctcctcgaccccgaccccgaacccgctgaacggcgcgcgcgcctgagcgccc

SEQ ID NO: 134448 - DNA, 30 bp, Homo sapiens
  chrX:9963967-9963997
  hyper
tgccaccagggggcgcgcggagagcaggat

SEQ ID NO: 134449 - DNA, 45 bp, Homo sapiens; identical to SEQ ID NO: 13550
  chrX:10023768-10023813
  hyper

SEQ ID NO: 134450 - DNA, 184 bp, Homo sapiens
  chrX:10583970-10584154
  hyper
tttctttaatcacagcgtatttgatattctcttccttgaatgaactcattttcatagtagctttggtcacaagattaaagaatcgctaactaattgttccaaataagcagagcaattctctctgactctgcctcgggctccctgcagtgaagtccgctgcctgatcttccgaccacgggaactt

SEQ ID NO: 134451 - DNA, 162 bp, Homo sapiens
  chrX:11776189-11776351
  hyper
cgcgccaggcgcctccgaggtcccggcagcggctcggggcgggcggaggaggggccgagggcggggcggccgcagcctccgccattcccggccccccccggccacggcgcaccgcctccccgcccccgcccgccctcccccaccgcgcgcgctccgcccgcc

SEQ ID NO: 134452 - DNA, 30 bp, Homo sapiens; identical to SEQ ID NO: 13551
  chrX:11948897-11948927
  hyper

SEQ ID NO: 134453 - DNA, 30 bp, Homo sapiens
  chrX:12157257-12157287
  hyper
ggccgggggcttccacgttcaacttatttc

SEQ ID NO: 134454 - DNA, 1070 bp, Homo sapiens; identical to SEQ ID NO: 58248
  chrX:13706947-13708017
  hyper

SEQ ID NO: 134455 - DNA, 1000 bp, Homo sapiens; identical to SEQ ID NO: 13553
  chrX:13752356-13753356
  hyper

SEQ ID NO: 134456 - DNA, 1085 bp, Homo sapiens; identical to SEQ ID NO: 58250
  chrX:13955971-13957056
  hyper

SEQ ID NO: 134457 - DNA, 167 bp, Homo sapiens; identical to SEQ ID NO: 58251
  chrX:14048162-14048329
  hyper

SEQ ID NO: 134458 - DNA, 415 bp, Homo sapiens; identical to SEQ ID NO: 58252
  chrX:15511290-15511705
  hyper

SEQ ID NO: 134459 - DNA, 30 bp, Homo sapiens
  chrX:15694208-15694238
  hyper
tcccagagacattgcgggatgagaggagtg

SEQ ID NO: 134460 - DNA, 714 bp, Homo sapiens
  chrX:15755973-15756687
  hyper
ggagatgggaggaaccgagggaaagtcactttttagataaggctctgaagccccaggtctagtttcaatccactaatgcggccagcggcgagcaggaggagggaggattggtccggcgggggcggggccagagcagggctcagaggcgtggcccaggctagagggaagagcccagggggagcgcagaggcggggctaggagggagcaggggtgaatgggggcgtggcccgggcgagaggggcgtggctgtagctaaaggggtgtggccagggtggagggcagagactggcacagtttggttgggcgtgaccggggcaataagtacggacgtagtggggcgtggatctgccaggtgggggcgtggcctccattgaggggcgtggccctggtatgtggggcgtaacagggcacgagggggcgtagcttcgatggccggacgtgcaggctgcggatccccgtaggcgagcgagcggctaggttcgtgatctggagagacgctcaggtaaggacgggtggccgagaggagtggggggcgaccagggacaggccgatccagacagggccgtgattcttcccacgactctccgctctggcgcaccgggttccggagctaggagagctgttgatcctgcgagtattgtctgggtcccggcagggcgcccgggagtactgagtggggcctaatggggtgtcgaactcccccaccccagccct

SEQ ID NO: 134461 - DNA, 30 bp, Homo sapiens
  chrX:15808220-15808250
  hyper
gaacctggacaggtcggaaataaagccggg

SEQ ID NO: 134462 - DNA, 135 bp, Homo sapiens
  chrX:15808572-15808707
  hyper
ccgccctttcctgccagacctggaggggcggggcggtgccggcaagatggctgcgcccgagaagatgacgtttcccgagaaaccaaggtaagcgccgtacggggagatgagcaggcgagcgggccgatcgtgggc

SEQ ID NO: 134463 - DNA, 100 bp, Homo sapiens; identical to SEQ ID NO: 13557
  chrX:15809045-15809145
  hyper

SEQ ID NO: 134464 - DNA, 83 bp, Homo sapiens; identical to SEQ ID NO: 13558
  chrX:15817993-15818076
  hyper

SEQ ID NO: 134465 - DNA, 123 bp, Homo sapiens; identical to SEQ ID NO: 13559
  chrX:15821796-15821919
  hyper

SEQ ID NO: 134466 - DNA, 88 bp, Homo sapiens; identical to SEQ ID NO: 13560
  chrX:15822232-15822320
  hyper

SEQ ID NO: 134467 - DNA, 40 bp, Homo sapiens; identical to SEQ ID NO: 13561
  chrX:15826354-15826394
  hyper

SEQ ID NO: 134468 - DNA, 123 bp, Homo sapiens; identical to SEQ ID NO: 13562
  chrX:15827321-15827444
  hyper

SEQ ID NO: 134469 - DNA, 215 bp, Homo sapiens; identical to SEQ ID NO: 13563
  chrX:15833798-15834013
  hyper

SEQ ID NO: 134470 - DNA, 57 bp, Homo sapiens; identical to SEQ ID NO: 13564
  chrX:15836708-15836765
  hyper

SEQ ID NO: 134471 - DNA, 111 bp, Homo sapiens; identical to SEQ ID NO: 13565
  chrX:15838328-15838439
  hyper

SEQ ID NO: 134472 - DNA, 536 bp, Homo sapiens; identical to SEQ ID NO: 13566
  chrX:15840847-15841383
  hyper

SEQ ID NO: 134473 - DNA, 30 bp, Homo sapiens; identical to SEQ ID NO: 13567
  chrX:15872201-15872231
  hyper

SEQ ID NO: 134474 - DNA, 30 bp, Homo sapiens
  chrX:15873136-15873166
  hyper
ggggaggtgcgaaccggaagccgggccacg

SEQ ID NO: 134475 - DNA, 183 bp, Homo sapiens; identical to SEQ ID NO: 58266
  chrX:16729956-16730139
  hyper

SEQ ID NO: 134476 - DNA, 806 bp, Homo sapiens; identical to SEQ ID NO: 58267
  chrX:16730152-16730958
  hyper

SEQ ID NO: 134477 - DNA, 30 bp, Homo sapiens
  chrX:16737545-16737575
  hyper
acctacaaagctggcgaatgaggaaaagag

SEQ ID NO: 134478 - DNA, 30 bp, Homo sapiens
  chrX:16738185-16738215
  hyper
ggtgaggatctggacgaggccagagcttca

SEQ ID NO: 134479 - DNA, 234 bp, Homo sapiens
  chrX:16805209-16805443
  hyper
cgcagtaagataaccgcgcgggagccggggtgtgcttggccccccttcccccgcccccctgcgctccccgccactgcgcgggcgggcaggcgagcgggtgagtgtcgcagggccggtgcgagcgggacgctcggcccccgggacctagaccccggggctccgagggcttggctgcacgtggggccggggatggatggggaggcgatgctggaggacctcggtcctgcagagttg

SEQ ID NO: 134480 - DNA, 727 bp, Homo sapiens
  chrX:16887883-16888610
  hyper
cggggccgagggcgccggagggagcgcagccgctggaggagggaagggaagaggggggcccagccctcggccccgcgcccggctccggaagtgctcggagccctcggcgcggcggtcccgtcccgcgcaggcccctcgaggcgcgcgcccagtctcgcgcccggccccgccccctgctccgcacgccaattcgcgcctttcgccggcgcgtgccgcggcctcgcgcgcccgccgccccccgcggccccggcgcgcgccgccccgcagggcctcttactctctttactcgccatcttgcgtcgggtcgttcgcccctcgccgccgcctcggactcctctcgttagccaagagcagcccgaccgctggcgctcctgcctttcccaagcgcgtcacactccccactgtcgaaagcccgggccccgtcttgctgcctgggtgctccccagacgccgcgtccttctttcctgcctcctccccgctcgcgggtaccgaggtctgaggcgctcttctctctctctccaaacttggaacgagacttttcaacccgcgcctcccagcccgcccaggcagctgagcgcaggcgcatccgccctgggaaaagtgagaggaggcggagaggcgggtctgggagccaacggctccggcgccgagaccaatgacgcgcggcgggcgggtttcacgcggcgttcggaggcgggcttctgggggtgggcggagcgtgccgcgg

SEQ ID NO: 134481 - DNA, 46 bp, Homo sapiens; identical to SEQ ID NO: 13571
  chrX:16965289-16965335
  hyper

SEQ ID NO: 134482 - DNA, 202 bp, Homo sapiens
  chrX:23801080-23801282
  hyper
agagggcgccgctagcgaatcccacagcgcgccccgctgcccccacttttgtcctccgggttcacacgggcgcccggaagagagggtggtgcctgggagaggaaacgatgcgccccggggccgcggcctcattggatgagaggtcccacctcacggcccgaggcggggcttctttgcgcttaaaagccgagccgggccaatg

SEQ ID NO: 134483 - DNA, 30 bp, Homo sapiens
  chrX:24168769-24168799
  hyper
ggcaggtggcattccggacacctgggctta

SEQ ID NO: 134484 - DNA, 14 bp, Homo sapiens
  chrX:25021565-25021579
  hyper
cgctgtgacacgac

SEQ ID NO: 134485 - DNA, 71 bp, Homo sapiens; identical to SEQ ID NO: 13572
  chrX:27999797-27999868
  hyper

SEQ ID NO: 134486 - DNA, 30 bp, Homo sapiens; identical to SEQ ID NO: 13573
  chrX:36854169-36854199
  hyper

SEQ ID NO: 134487 - DNA, 31 bp, Homo sapiens; identical to SEQ ID NO: 13574
  chrX:37765683-37765714
  hyper

SEQ ID NO: 134488 - DNA, 358 bp, Homo sapiens
  chrX:39680205-39680563
  hyper
acggcttggagcgggcgtataaattaaccgggggccgcagagtgaatacattgcacgcggtatttattatgcggccggacctccgaggggttctccggctcccggacgtggcaaatcttgtccggagcgccgctggccgcgctgccaagggctaggacgagaggacccgtggcggggggcggggggcttctcctccagtcctcgggagccccggggcagcccgcttacagcggcggcagcggggagggtttaggcgaggagagacgcggccccgggcgccgctcgggctaggggccgggcggggagggcggggcggtgggagcgggcggcgcgcccggccccttagcattccgccggc

SEQ ID NO: 134489 - DNA, 193 bp, Homo sapiens; identical to SEQ ID NO: 58276
  chrX:39680630-39680823
  hyper

SEQ ID NO: 134490 - DNA, 30 bp, Homo sapiens; identical to SEQ ID NO: 13577
  chrX:39729507-39729537
  hyper

SEQ ID NO: 134491 - DNA, 30 bp, Homo sapiens
  chrX:39866856-39866886
  hyper
gggaagggctgcctacgggtaattgggttt

SEQ ID NO: 134492 - DNA, 159 bp, Homo sapiens
  chrX:39868175-39868334
  hyper
cggctcccgctgccccgggcggcctcctcttcccggcctgccccaaagccaacactgtcacccggaacgtccccgccccccgccccgggtgcatgcatggtggaaactccggcttgcagcgaaacagagcgctgcgcgcgggcgcgcagggagcctcgc

SEQ ID NO: 134493 - DNA, 30 bp, Homo sapiens
  chrX:39868705-39868735
  hyper
atgggggcatcatcgcgcctcggagatggg

SEQ ID NO: 134494 - DNA, 111 bp, Homo sapiens; identical to SEQ ID NO: 58278
  chrX:39871648-39871759
  hyper

SEQ ID NO: 134495 - DNA, 201 bp, Homo sapiens; identical to SEQ ID NO: 58279
  chrX:39871778-39871979
  hyper

SEQ ID NO: 134496 - DNA, 30 bp, Homo sapiens
  chrX:39872849-39872879
  hyper
taaaggaaaccagaccgcgctacctcgccg

SEQ ID NO: 134497 - DNA, 509 bp, Homo sapiens
  chrX:39873111-39873620
  hyper
gccgagctggcccacttggcacggaagggcaggcaggccaggcgacgcggcgcgagattccacagctcccgctccggaccgggggaaatcctggagtgccagagagcccggggagggggcgctccgggagcctctccttgaaaggcgggatgctttccccgttcctcccgcgcacgtgtcctcagcagagcaggcaagcgctgcgcgcctggggctgcgatcctcgggtgacagcgactgagagcgcgccctctccacccccacccccgccgtcgccgcctctcctggggagctccagtctccagggtgcgctcggggcaggccccaagagccagagaaacggaaaagtgccggggaggcgattaggaagagaagacattaaaaagcccagccctgaaagacaggcagccgagctgaaaaagacgcctgcgaacccccaccccgccgcccctcgcctactgcgcccagacggcccctccttgtcccggctgagcgcacccacccccggc

SEQ ID NO: 134498 - DNA, 808 bp, Homo sapiens
  chrX:39873679-39874487
  hyper
cgcgcgcgcgcgcgcgctcgagtgccgggagggcagttgcgaaacgggctcttggctgcagcgcggcataatggaggtggctggaacaatgcgcgctttgtgcgcgcggggagttgttttccacccgcctcgccccccttgctcgggccgtatggcactttaatctccgccacgactcggcacaaatgcacttgtgtcctgcgggtcactgggggccgtgcggctggagccgcccccaccccgacccccgcggaacccaccgccggctgccccatcttccttcctgagcaccccccaccaccacctcaattcccggcgtgggccggtgagctggcgtggaagcttccgggcccgccggccacttttattttccgtgaagacggcccctcccccgctccacgagcgcgcgcgcgcacacacacacacacacacacacacacgccgcccgcaggccccacactcaccgccctctctcgcctagcctctcctcggcccgcctccgcccccgcccccgcccccgccccgcgctccggactcctgcgaacaatagtaaatgtcaacagattccgcgcggcgagtgtctgactcggccgagataagggtgcgcggttggccccgcgctcctcgtcgccgcggggggagcccaccctgaccccggctggaaggaaccggctgtgactaaacccgtgccgggagaggggggcgggagggcagggcaccagtcccagctcggtggggcagcctcgccaggagaccaggccctgccccgcccccaccccacttaacccgttgccgatgggggaaccta

SEQ ID NO: 134499 - DNA, 1156 bp, Homo sapiens; identical to SEQ ID NO: 13578
  chrX:39910497-39911653
  hyper

SEQ ID NO: 134500 - DNA, 158 bp, Homo sapiens; identical to SEQ ID NO: 13579
  chrX:39913137-39913295
  hyper

SEQ ID NO: 134501 - DNA, 79 bp, Homo sapiens; identical to SEQ ID NO: 13580
  chrX:39913507-39913586
  hyper

SEQ ID NO: 134502 - DNA, 147 bp, Homo sapiens; identical to SEQ ID NO: 13581
  chrX:39914619-39914766
  hyper

SEQ ID NO: 134503 - DNA, 168 bp, Homo sapiens; identical to SEQ ID NO: 13582
  chrX:39916406-39916574
  hyper

SEQ ID NO: 134504 - DNA, 274 bp, Homo sapiens; identical to SEQ ID NO: 13583
  chrX:39921381-39921655
  hyper

SEQ ID NO: 134505 - DNA, 327 bp, Homo sapiens; identical to SEQ ID NO: 13584
  chrX:39921997-39922324
  hyper

SEQ ID NO: 134506 - DNA, 346 bp, Homo sapiens; identical to SEQ ID NO: 13585
  chrX:39922859-39923205
  hyper

SEQ ID NO: 134507 - DNA, 265 bp, Homo sapiens; identical to SEQ ID NO: 13586
  chrX:39923587-39923852
  hyper

SEQ ID NO: 134508 - DNA, 188 bp, Homo sapiens; identical to SEQ ID NO: 13587
  chrX:39930224-39930412
  hyper

SEQ ID NO: 134509 - DNA, 55 bp, Homo sapiens; identical to SEQ ID NO: 13588
  chrX:39930888-39930943
  hyper

SEQ ID NO: 134510 - DNA, 2833 bp, Homo sapiens; identical to SEQ ID NO: 13589
  chrX:39931600-39934433
  hyper

SEQ ID NO: 134511 - DNA, 80 bp, Homo sapiens; identical to SEQ ID NO: 13590
  chrX:39935705-39935785
  hyper

SEQ ID NO: 134512 - DNA, 127 bp, Homo sapiens; identical to SEQ ID NO: 13591
  chrX:39937095-39937222
  hyper

SEQ ID NO: 134513 - DNA, 927 bp, Homo sapiens; identical to SEQ ID NO: 58295
  chrX:39953710-39954637
  hyper

SEQ ID NO: 134514 - DNA, 1950 bp, Homo sapiens; identical to SEQ ID NO: 58296
  chrX:39954905-39956855
  hyper

SEQ ID NO: 134515 - DNA, 877 bp, Homo sapiens
  chrX:39957026-39957903
  hyper
cgcggcttgggctctccgcccggcggctcgcgggctccccctccgccgccgccgcccgcctagctcccgctctcggtcgcggtctgggctcctgcgcgtctcccccgcagccgccgagctcggcccgcgttcagcgaggagcgcagctctgcctcaccttgccgctgggagcccaggctccgtctgccgccgcacgccgcgatcccaacgcgtcccccctccctggttccctcctcttcctcctccccctccctccgcccgtcctccctcccgcccgccctacctccctccctcccaacagccgcctcccctccccccgcaggcgcagcgctcgggcgacagccgcccgcccgccgccgcctccagctctcgcaagtttgagctccgccagtctccgctcaccctccgctgcggcgcctccgcggcggggtttcgggaggggtgattccccaggaaaggtttgcccgagtttccccggccgtcatcgatgcacggcccggcacgttttggcctctctggatccgaaccccggaccacttgggtggcgccccccctcctcgtcccccggcctcccctccccagctcgggccgagttggctgcgcacgcccgacccgggcgcacgtcctgggcgagccggagaccgacttgggcggcggcggcggcgagggctgccggcagagccagagccgaagggatgggggcggcgggggcggctctcccagccgcgcgccgagactcccctcgctacccagaaggccagtggaggaccgcaattaccataaagcgcctcgcactccgctcagccaaagctgtcaaaccccagcggcagcagccgctgccgccgcctcttgccaccagcgctgcgctctcccggcc

SEQ ID NO: 134516 - DNA, 528 bp, Homo sapiens; identical to SEQ ID NO: 58299
  chrX:39958064-39958592
  hyper

SEQ ID NO: 134517 - DNA, 31 bp, Homo sapiens; identical to SEQ ID NO: 13596
  chrX:39959180-39959211
  hyper

SEQ ID NO: 134518 - DNA, 973 bp, Homo sapiens
  chrX:39963954-39964927
  hyper
ggttggggcctgccgcggacggattgtccctggggagctgaaaccgcccagcggggaaacccctcctctcgcccttccccgaaaagcttggccgcggtctaagctccgagcaagcgggtatccgctgacagccgggcctcacgtaaggcccacacgcgtcccattagtcagcccgagttcccctcgggcgagccgcctggcgcggccccaaggccgggctcaggcggggagagggtgcggggccgcagcgagctgcgggcggaggtgcgggctccgcggagcccggccaggctcggttccgcgttcctgggcccgcgggtaagctgagtcggcggggcaggccgctccctggctggcgccggggcgccaagctgcgcttcacgtgcccgccatatcagcagcagcggcggcggcggcgaggagggggtgctgggaggcgcgcggccgttcccgcggggtctccggaccccgcctccccgcccctccccgtgggggctgggccgagaccaccctgcggcccccatcccagcgcaagccgaaagcggcgctgccagacgcagagaggctcctggggcgccgttccgagagccgcgcggcggcagcagccaggggagggtgctcctcgcggccgccccgccgccgccgccgcagtcacggggaccggaagccctcgcgccgccccgagcggcctccgctggccccagggctgttccagacgagggctggccgcgcgtcacccctgatccctcctcgccccaggcgaccacccgggccctgcggtatcccggtgtaagccgagaggacccttcctgcggtccgatgagatgtccctgtccctctgctaccaccataagcacgcccccccgcaccgctcgcagctccgcagctgggaccggaggggcgcggagccgccactccggccgggcaggaacacctgctcccaggccctgcagctgggcgcgtgctgctgtga

SEQ ID NO: 134519 - DNA, 1325 bp, Homo sapiens
  chrX:39965256-39966581
  hyper
gggagtaggtcatggcggcaccggtactccacccgcccccctccacgtagggacgtagggtcggctgcggggctcggactttgccactccacctagggaagggccaatggacgctccccgtctcctccgtgtccggaggagatccggcggcggagctgacctgcaaggcttgccctgcctcacccaccccccacctccgtcccaccctccccgactctcctggcccagggcccggcccgggaaggcgttgttttgccagcgggagccgagcgagtgcacagagaaaagcctccctactctaatgagagtgcacacagcgctgcagcgaggaggatgattacccggcgggcggggggcgcgggctcgggccgcgggcggcgtgtgcggcggccccgcgggcccggagtccccgcctgtctggctgctaatcgcacgctttctgctgttacggaggcaggcgggagccggcggccgagcccagcgccgacgactcggcgggtgacacggaaacatggcgcagcgcccctcccccgcccgcgctcccgcctcccgccctccccgcgctcccgcctcccgcctcgcacttcctcccgcccgcgcggcttttgcagttttaatgctctgctttcggcctggcaccattacgctagcagccgcttctccgcggccccgcgcgtctctttcccctttgttttcggggtctatagaaaacgtttgcttttgtcccgagctctcgttaaaccaaacttgtggtggcaacggaaggcggtgcaggcggggaggggtccggggattttggcagtagccggccagagcgtggtggaaacttctctcgctgggttctccgctccctcccactccccctccccaacacagagccgccggcctcccgacgcttctcccttcgcccccgagaggccccagtgctccaggaaggtctgggccacagagactgtgaccaggggtgaagaactcagagtgcgtgtctgtgagccccgaggttttggcactcgatgaccttgctccctgcagccccgacttacctctttccctttggtcattcggggctttgtatcagtcggtgaagaaggggagggaagagaaagtgtttctttcgtgcgtgtggtttttattttaaggatttgttggaatctgtcacccccaactgcacagccccctcccgtataggatctagggcgaaagcggggaaacgtcggatttagggggaaagggtcgggtcagaaacctagccctggaggctggatcgtactctcctggcgggctcagccacacttggtcggcacgcggggcggggcgacccagca

SEQ ID NO: 134520 - DNA, 906 bp, Homo sapiens; identical to SEQ ID NO: 58303
  chrX:39968297-39969203
  hyper

SEQ ID NO: 134521 - DNA, 662 bp, Homo sapiens; identical to SEQ ID NO: 58304
  chrX:40005424-40006086
  hyper

SEQ ID NO: 134522 - DNA, 3153 bp, Homo sapiens
  chrX:40012142-40015295
  hyper
gaaaagccgagagggcgggaggagacagggagacttccgcgggaggccgatggtcaaagtggggggtgaaaccgctcagggtgaccgggctggagacccaggaacccgattcggcgcgaaggtgccgcgcgagttccagcgagcagcctgcccggccaagtggcgcctgcccagccgtcggccgtgccagcttcctgccctgcccaggaccgcggagcagtcggggacgccgccgcaggctggcccggaatcgcaggacagcggcggggggagggggtagccaggccgcaagtaaactcgcactagagctttctgcacacctccgccctagagagggggcccggacccccggtctgtgaggcgtcggctttggccttccaaccttggggtgcgcgaggaagcaaagacccagggggcacccccaccctcgcccaaggcccgagggtgggggacagctgaaatgtctttggtcttgtttgatgaccgcttggcggatctgctcccatccgggttctgccgttccgagagtgccgggtcagtgatacccaggccggtctgagcaggcatgtggatgagcaaaagcaaatctgtcgctcctccgaccgccacccctcacttaacctttcctgcatccaaggaaggggagggcacccagactctgccccaccccccgcggggcgctccctctgcctcggaagctgagactaagagcgagggttttccccctttcccctgggctcgctgggtttctaacttcctctaaacctccctcctcgctccgaaaagccccgaggagaggagctgagaggaagcacgccgctagtgtgcaaaatgaagaccatgtgtgaggacggcggcatcagagtgcagccgcgggggttagggggtggcaaaggcccccgcgcggccggaggctcggggccgcagcagccagtgcctctgctctgcgttggggactcggagccgcagcgagaggcagtggagaggcagggctggcctcgtggcgggaggcgaggagggggtgcgagggctgccgcgccgtggggggcagggggcggggacgcagccccggcttcctgggccgcagctgcgaccgagggcgcaagagcagatcgtgctctgcggcggtggcggctcgggcccgccgctctagcagctgagaatcaacaaagggaggcggcgggggaggggcgccaccgagcgttcgctggctgctctggaataataaaaaataattaataatgataataagagaaaaatcccccggctttcatggctctgggtttccgtgtggctgcagcgggaagcgcgctgtccttgaggcggcctctctcgcctggcctgcccgcccctccccctcctcgccccctcccctccccaggaaccgggaagagaaaggtctgcagctgacaaatattatccattctccccatcgatcgcggagtgtacagatgtgagcgcttgatgtgcccgcggagcggcggatcctccctgctcgctcgctctcgcccaggctccgctcgccgtccccctcctccccctttgttctcctcccctttccctctctttaaatagatttcagggcgctgcctgttggagagcagctggcgatctctcccgagagagggagcgagcgaagcccgaggtgccctgtcaccagcctcccctcccccacctcggcttttctctacgtcccccccaccccacctttctccagtttccaaaatagaaaacaccgggaacacccacgtccactgcaccgcgagcccctgggagcctttggacccctcgtgctgttccttgtgtctgtgtctgtgcagaggaagggcagtgcagggaggggacccagggccgcggcagaagagccaagggtccggatctttccctggcagcagcagggacgcagcgtgggtcacgctaacagggtacagtttacccattagggaaagtcggcggagacggccctgttattcctcttttgcagatggcagattaatccggcagcacccggcctcaaagggaccggctgctcggcaaagggttaacccgtcggccggtaatcgtggacacgcgcgcacacacacacacgcacgcgcgcgcgcgtcctctccgcctgcccgagcgcccgccgcggcccgcagtgcgcccggggctgggggagtagctgcgggaggggagggggtcgggggaggggcggggcgggcttaaccaggccgctcgactgagccggggccacctcgccgtctgtcacttaaatgattgtcctccgctccgctcagtgcggtcagtacgggctgttaacaggcagttgcaatcagtttccgaaaggtcagccaaggtcctccggctctcgcagacggaaggcattacgaaaccgcttttgtatctgcaggcactttagaaaaagaggcgagaaggggcgcaccgcagtgccgcggctgctgcgaccgggggagagggtcgggggctgcggagcagaggagtccgcacccccgcggccagggtcaggcggcgtggatatcacccgcggagtgacccagggcctccgggtttcggtggggaagcaggaagggggtggggagcaggcggcaagggaaggaggagtgggaggaagtgggagaggcgtcctggctcctctcctcacccagccaacagcccacacccggacccagacgggagcgggcggccttggacgcgaggagaccccactcggactctcaggccctcctggcgcctggaagtagggagggggtgtgggggggggaaagaccctcgccgagcgagcgagtcccagcgcggtgtctgaagacgctgctgccgccgccgctagaagtcgtccatcagcaaccagtccaacctgccagtgataatgtgcgatcaacaccaaatcacccccgccaggcgcgatccatcatcgcagcgcgccgcgggcccgcgtgaggctgactcgcggctggggtggggagggggggcgcgcggagcaggaggcggtcgcccagcacacccggactctccgcgcacctcgctgcccctcctggaggcctgcacccaggcgctcataactctccaagttccccagctacagagcgaaaacccagtggctccgagttctgggcacagctcacttaggaatccgcgcgtcctccgcgccct

SEQ ID NO: 134523 - DNA, 574 bp, Homo sapiens
  chrX:40017447-40018021
  hyper
cgaagtggcaggactggccctcggggtccccgtgggtaaaggaggagcggcttcgcgccctgggacagcgcgcgccccggctgacacggggctgtcgccgcttctcccccggacgcgggcggctgcgcaccggccgccatcttggcccggctgcgcaggcggcgctgcccccggcggtaggaccgcggagccgcaggctgggccggggctgccgcgcgggcgttcccgggctgccggggggcgctccctcccgaggcccccctccccgctgcgggccacgctgacccaggtcggggacgatggggcggccgtccctggtgaaagcgtggcctgtagtgtcgcccctcctcgaaacgctggagcggattttaatcctgagaaacgacctctggttcccggactcccgcgatggtcaacgtgttatcgcttctcccgcgcaccccagaactctgtccccagaggcaacctgccgaggcagctgggggtggggggcgaggcctacccaccgttcacagggcgctgttgaggccagagaggatttgagagttaccacggtttagggctcctgattgga

SEQ ID NO: 134524 - DNA, 229 bp, Homo sapiens; identical to SEQ ID NO: 13602
  chrX:40030831-40031060
  hyper

SEQ ID NO: 134525 - DNA, 928 bp, Homo sapiens; identical to SEQ ID NO: 58308
  chrX:40031175-40032103
  hyper

SEQ ID NO: 134526 - DNA, 323 bp, Homo sapiens; identical to SEQ ID NO: 58309
  chrX:40033572-40033895
  hyper

SEQ ID NO: 134527 - DNA, 1520 bp, Homo sapiens
  chrX:40034218-40035738
  hyper
tctggtccctctgagaatccacgttttctagcccgagaaggggcaggcggccctcatggcgcctccttcggcggtttcctggcgaagcgcccatcctccccaagcaccaggaacggaggccgtccatattaatactcgcgggcagcctgttctgacctatactgtcattttttccatcggtcgggatcgggctgggggtggggtggggcgggggctctcctccgaggggctcagcacggatcgttgggttttccccggcgaacttaacacggaggcaaaaggggcagatggaaaccaggccccggctggccccgcgcgcgtaagcgcggcactcagcagctcgacgcaaagccagggctggattttcgcggcccgggcccggcggccgcccagcgcccgcgcgatcctctctccttcgggttgagcaaacgtggtcgcctaattccgcccgggagacagcagctgtgcggcgagagggggagaaaaaatatcgcaacttttccaacagaaagtgtgtgcgcacacgagaggtgaaggcccaccccgattctgtgcacgtatcgacacagcatctaatcagtgtcactgccaggaatacgcttccgcggcgggcgacaccgccgccctcgccaacctgcaggagggaggggggatgcaaatggcgtctcgcgtcgtcctagactccgcgcagcacccgctaccgcgactccaagcagacgttgcagcaaactggggtgcagcgtctggggacgcgaacgcgcaggcggcccgagcggtcgcagggaagaggaactagcaccactccccgctacgagaccgttccccgcccccacctccggaagagccgcccttactcgactggggtgaggggcgggaaactttgcaagaagactgttccgcgccttccccgcgtggcacctcagaagaacgtgggtgggtttcccgtccgaggccagaccacgctaccctacttttccaggtttcggacctgaacctcgtggactacgggagggagagtacatttcgggccactgcggggggcggagggacaccaaagacaggcgtcttcaagggttctggcagatggccaagtttgtgtcctttccctcccacgctagagtagcgcacgccactttggggaagcgtgagaccgttcaccaccggccacgaggccaccaatgtcttccaggtggggccgatggtttgtctgcagcactcccttccgccttgcggtcctcgcctggctcccacagtcctggggagcccccagagctagcccgcgtcttccctcgcccgctcttccgggggaaagggaggctgtttgtgtggtgtgtagccccgctccggcttgcacccccgcgagccacctcgcagccctccccggcctcggcctcacggatcccctcccggagtagccccgcgggcccccccgccatgcgtaatggggcgcccctgggacgcaggcggggatggcggttccggtcgttccgggatttgcgtgcaagaagaaaacaaggccg

SEQ ID NO: 134528 - DNA, 730 bp, Homo sapiens
  chrX:40035852-40036582
  hyper
cgattcctcgtccggcccgtgccgcaccacgcggagctccgcgcgccctggctcccacaccggtccctccataactcgcgctcctccctcgctccgggctcggggagccgctcgctcccagcgcccagagtcagccggttccaccttcggctgcgagagccgccgccccgcgccacccccgcccggcccggcccttgtcccagcccggctcccccgccagctgcgccgccaccgccgcacgtgacccgcccccgtcgcggcttccgctgagctgcctgttccggggcacaaacaatttttgctctgacgcggggtctctcgggggccctggcgtcctctactccctgctccccaccccaccccaccccctaccttccgggtaggagaactcaaaacaactcgctgaccttcgggccgaccagctccgtcttccactgactccagcattccgttcaaacccagcagccacggcttctaagatttcactccgctctgggctgggggggagggggcgagttctccgggagggggtgtctcagatcgaaagagccacttcacgctctttctcctcctccgaggtgagtttttagactatttggaggccttggggaaacgcgagcagccgcgtgcaaaggagcccccccgccttctccccgcacatgcagccttgtctagtgtgacccgatttccagggtcagcagcagagggcctggccagcttcggaaatacc

SEQ ID NO: 134529 - DNA, 187 bp, Homo sapiens
  chrX:40126401-40126588
  hyper
tccgggacgcgcagccgcccggcgcagaggaagcccgggacgctggggacaccgcctggagcctccgcgcatagcaccggggcgttttttccttccagctggaggcttcccatttaacctctaaggtgccagaagatccggatccctcgcgggcaggcctttggctggctccgggctaggctgggac

SEQ ID NO: 134530 - DNA, 218 bp, Homo sapiens
  chrX:40506424-40506642
  hyper
gagggagggacgtcgcggtgggccccgcatcgcggagggaacaggacacttgcgctctgggtctgggacaggaacggggatgaggaggggtggggtgggggcggtggtcaaggccccgagccaggtgctcacctggcgggcgcgagggctgcaccgtgagccgccgcggcagacggcgcggggccccaggccgggggctgcggcgagtaggccgcggt

SEQ ID NO: 134531 - DNA, 119 bp, Homo sapiens
  chrX:40506869-40506988
  hyper
cggcagcgacgcctgcgcctgcgcggcgcggtgccaccgatcccggggcggggcatcttgacttccggggcacgtcggctccaccccacttgggtgacgtctgacgtctgacgtctaac

SEQ ID NO: 134532 - DNA, 230 bp, Homo sapiens; identical to SEQ ID NO: 58315
  chrX:40595082-40595312
  hyper

SEQ ID NO: 134533 - DNA, 65 bp, Homo sapiens
  chrX:40944722-40944787
  hyper
aggacgggcatccgcggctgcggacgctagtctccgccgccgccggagccgcaacctctccgcac

SEQ ID NO: 134534 - DNA, 30 bp, Homo sapiens
  chrX:40945559-40945589
  hyper
cggtgtcccgagagcgtgtctgtgtgtttt

SEQ ID NO: 134535 - DNA, 292 bp, Homo sapiens
  chrX:41112859-41113151
  hyper
acttcactagggaggcggcgctctctctgccccggttctatcacgcgcatccgttaggaactaagcggcacctgcgcgaggctaggcttgttgacatatttcttgctggcggcgtcctctcgcgtggagcacgactgcgcaaagcgccgacagtcccccgagcgaggacggcagcgagactccgaagcccccttagcaaccaagccggtgccgctgcccttgcgccgggactgcagccgggtcttccgaagtgaggatatgctgccctctagaggccgcggggtgacatggc

SEQ ID NO: 134536 - DNA, 428 bp, Homo sapiens; identical to SEQ ID NO: 13607
  chrX:41135194-41135622
  hyper

SEQ ID NO: 134537 - DNA, 30 bp, Homo sapiens
  chrX:41190678-41190708
  hyper
atattccaattataacgtattgattaacaa

SEQ ID NO: 134538 - DNA, 30 bp, Homo sapiens
  chrX:41190958-41190988
  hyper
aaactgaaacaaaaccgaggtccttcacca

SEQ ID NO: 134539 - DNA, 30 bp, Homo sapiens; identical to SEQ ID NO: 58318
  chrX:41192523-41192553
  hyper

SEQ ID NO: 134540 - DNA, 30 bp, Homo sapiens; identical to SEQ ID NO: 58319
  chrX:41194199-41194229
  hyper

SEQ ID NO: 134541 - DNA, 30 bp, Homo sapiens; identical to SEQ ID NO: 13608
  chrX:43379710-43379740
  hyper

SEQ ID NO: 134542 - DNA, 50 bp, Homo sapiens; identical to SEQ ID NO: 58321
  chrX:44202869-44202919
  hyper

SEQ ID NO: 134543 - DNA, 81 bp, Homo sapiens; identical to SEQ ID NO: 58322
  chrX:44402317-44402398
  hyper

SEQ ID NO: 134544 - DNA, 30 bp, Homo sapiens
  chrX:44731798-44731828
  hyper
gagcgccctcctcgcggaggccattatttc

SEQ ID NO: 134545 - DNA, 137 bp, Homo sapiens
  chrX:44732333-44732470
  hyper
aaggtcacgtgaggcgtgcgggccgcgccgattggtggcgccagccgggcggggagggggggtcacggcggcggcgtggggttcgctgtgtgacacaattacaacaactttgtgctggtgccggggaagtttgtgtc

SEQ ID NO: 134546 - DNA, 176 bp, Homo sapiens
  chrX:44733191-44733367
  hyper
tttcatgaagatggcgccaggacgaaggccctactgggcaaggtaaggcagctgcgagtcggagcgcggacaccgtctccctggccggcgccgcgctcgccccgggccccgcggccgggtctgtgctcattgtggccacggacgatggtcgaggggcttccggaaactatttcctg

SEQ ID NO: 134547 - DNA, 38 bp, Homo sapiens; identical to SEQ ID NO: 13610
  chrX:54834567-54834605
  hyper

SEQ ID NO: 134548 - DNA, 95 bp, Homo sapiens; identical to SEQ ID NO: 58325
  chrX:68758219-68758314
  hyper

SEQ ID NO: 134549 - DNA, 33 bp, Homo sapiens
  chrX:71497206-71497239
  hyper
ccgagttgaggaaccgccgcggaaagagggtgt

SEQ ID NO: 134550 - DNA, 93 bp, Homo sapiens
  chrX:71524761-71524854
  hyper
caatcgcatttccatcggcatccctggctctgcttccccggctttctgccctcctccaccaccctctagcccgttcgtgggcaaaacttggca

SEQ ID NO: 134551 - DNA, 40 bp, Homo sapiens
  chrX:71524952-71524992
  hyper
cgccggctgatgcctggcggccccccggccaccagttccc

SEQ ID NO: 134552 - DNA, 1887 bp, Homo sapiens
  chrX:71525284-71527171
  hyper
tgtttgcggacagctcggctgccctcctcgccgcatcccagatggagccgcggaaccgggggcggccgggagcatcccttgcacggcgggcgcgtgcacccaggccaccggggccctgagcgtccgttcccgcaagtgctgtatcaggaactgatcttagagacaggatggacaggcaggaaggggcacggggtgtcggcctccgcggcgagtccgcactccggcgccggctgctgccactctcgcgcctgatcaacacttactgagcgcccgctgagcatccgacgcggcagcaggctgagcctaccccctagccaagccgcctgcggtcagtgctaaaaccccgctaggagaagagtgagagaggctcggagaggtgcggtaacttgcccaaggtcacagcgctagaaagtggcggagccgggattcgcagccaggtctctctgactccaagtccggtgctctgcgaagcagggactcggcgcgcggctcgccagcccgcgtttatagggagaggggtgtgcgcgtgggtgtgtgtgtgtgggcgtgtgtcgggggaggggagggctgaggtcgactgggcagtagaggcaagttgcccaaattcgctaacttccatcccgcaattccgctgaactcggcccgaaaagccccctcttgcctcaattccccgaagtaaatctgagctttgtgcagctccggagccagagcgtccagatgcggtccgggagattagcaaagtcggtggaagccaagctggagaaagcgcgggcgcagggagaaaaggtgctgccgtctccccgggagaagcgggcacccggccccgctggccggcaggggggcgcgctggcaagcgaacccgagcgctggcgggcgggcgggcgggcggcccctcgcccccagcagagcagctttccaacagaaagcaagtctccccagaaccctccggcccgcctggcggccgcccactccccatacccgctccacgggagtcctcggccccgccgcccagcccggcgcccagcccggcggcccggcttacctctgagaagccgcctgccctggagagagggaagcgcggagctcggtgagccgcaagagaggcggcggagcccccagcccctggcacgcacgccgccgccaccgctaccgcgaaccggtcgcgctcagcgcccgcggccgcgccgttggccacccgaccccggggcgcctgggaaaagcccgcaccgcgccgcgccgccgctgcaccgcacagtgccgcgccaagcagcccctgaccgagctggtgcccgcccgcccgcccgcagcttcggcgccggactccggggcggtggcggtggcggccaccgcgctcccttcccggcgctggggacccggctctcaagcccccattgccgcccggagagccctgacgcacacgcacacggcagcagactggcctcggctaggaatcccaggaaggacagaccctttttttccctttttttttctcccctcaatttccacgtctttataaccggcttagggcattattagcacatgtcctggctcgtgggcgagttggtggcaaaatctgaactggatactcacggagggcccgcgcgggtgctgtgccgtccgctgctctcttcctcctcaccgagaactgcccctcgccggcggactacaagagggcagccgggcagagcgagcttcctctcggcagctcagcggtgccccttctgcagctttgccgccgggcacatttttatagcagcggctggcgtctgtggccctttaaaggcgctcgagctggtgcagtcaccgcggatcgtgtgaaagcaaagggccggctggggaacggagtccacgcggccacgcgagtccggcagccctgtggaccggcca

SEQ ID NO: 134553 - DNA, 563 bp, Homo sapiens; identical to SEQ ID NO: 58328
  chrX:73163982-73164545
  hyper

SEQ ID NO: 134554 - DNA, 30 bp, Homo sapiens; identical to SEQ ID NO: 13615
  chrX:80722921-80722951
  hyper

SEQ ID NO: 134555 - DNA, 30 bp, Homo sapiens; identical to SEQ ID NO: 13616
  chrX:87762080-87762110
  hyper

SEQ ID NO: 134556 - DNA, 84 bp, Homo sapiens
  chrX:92928027-92928111
  hyper
caacggggcccgccgcgcccttctggaaggctcaggtaccctcttctttctatacaagcggctgcggctgctagtgctgccgct

SEQ ID NO: 134557 - DNA, 224 bp, Homo sapiens
  chrX:92928170-92928394
  hyper
tgtcactagtgctgctgctagagctactgctgtcagattcttccccagaatcactagtcgagctagccatctcctcttcggcaaccccatgggcgacaggttccgagaccattttaaaatctgcttctgccatcttgcaagcctacaaactctaccagggagaccgcgcgaccagagatgggcagaaaatgactcacggatgcttgagtggcggcggcggaggc

SEQ ID NO: 134558 - DNA, 646 bp, Homo sapiens
  chrX:92928507-92929153
  hyper
cggtggcggcaaggcctctcccggctgcagctagagtgccgagatgtaccgcagccgaatggcgcagtatgagaccccgagatctcttctcgttttagatcgcgagccccctccccttgcagtcagacctcccgttaatttcgttcccagtgtgcctttagttcgctcctcatttgctggtccaccttaattgacaaactgtacgcccaacgaacggccaaacgccactactcctggctccgcccaccttcccagacgccgctcgctggctgaggtgcgaccccttggaaggtgtccccctgccccccaaaaagtctatatttatagttttataattaaaaaagaaaaaaaagcgtagacatgaggtaaaaataccagccatagttcctaacaagggcaaaagaggcgtgtcttccttctcccatccgcccaccctgaattcccgtttagtttgtcacgggtctcttgacaaaaagctgtaaaaaaaaaaaaaaaaaaaaaaaaaaattgaatgaaaatggtccaaatggcgtcattgggtagtgtgactatggacgatttaaaaacaaaacgattttctctaaatattctatgagcatgcatttttacactggataaaaaaggggagagtcggttattggcagag

SEQ ID NO: 134559 - DNA, 30 bp, Homo sapiens; identical to SEQ ID NO: 13619
  chrX:93928298-93928328
  hyper

SEQ ID NO: 134560 - DNA, 264 bp, Homo sapiens; identical to SEQ ID NO: 58334
  chrX:95940027-95940291
  hyper

SEQ ID NO: 134561 - DNA, 31 bp, Homo sapiens; identical to SEQ ID NO: 13620
  chrX:96606843-96606874
  hyper

SEQ ID NO: 134562 - DNA, 73 bp, Homo sapiens; identical to SEQ ID NO: 13621
  chrX:100475065-100475138
  hyper

SEQ ID NO: 134563 - DNA, 30 bp, Homo sapiens
  chrX:102206670-102206700
  hyper
accgtggtgccctctcgtgacagaaggctg

SEQ ID NO: 134564 - DNA, 435 bp, Homo sapiens; identical to SEQ ID NO: 58337
  chrX:102862893-102863328
  hyper

SEQ ID NO: 134565 - DNA, 34 bp, Homo sapiens; identical to SEQ ID NO: 13622
  chrX:102941573-102941607
  hyper

SEQ ID NO: 134566 - DNA, 30 bp, Homo sapiens
  chrX:103087213-103087243
  hyper
agggggcggggcccgcgccgcctcctcgtg

SEQ ID NO: 134567 - DNA, 30 bp, Homo sapiens; identical to SEQ ID NO: 13623
  chrX:103731902-103731932
  hyper

SEQ ID NO: 134568 - DNA, 30 bp, Homo sapiens
  chrX:103810625-103810655
  hyper
ctactctggtaaggacgctagacggcgctg

SEQ ID NO: 134569 - DNA, 30 bp, Homo sapiens
  chrX:103810968-103810998
  hyper
tggaggcggcagcagcggtggcaggatgtg

SEQ ID NO: 134570 - DNA, 30 bp, Homo sapiens
  chrX:103811229-103811259
  hyper
acaggctgaggcgcccgcgtcccggagtgc

SEQ ID NO: 134571 - DNA, 30 bp, Homo sapiens
  chrX:106515894-106515924
  hyper
catctggaagaaattcgagttggtgccgcc

SEQ ID NO: 134572 - DNA, 30 bp, Homo sapiens
  chrX:106516145-106516175
  hyper
cgccctcgggatactcgcccaaggagttcg

SEQ ID NO: 134573 - DNA, 173 bp, Homo sapiens; identical to SEQ ID NO: 13624
  chrX:107003133-107003306
  hyper

SEQ ID NO: 134574 - DNA, 116 bp, Homo sapiens
  chrX:110342112-110342228
  hyper
gcgtacttaagcctccgctacgcgtcccccacccccacccccacctgccgggggctaggcgtttccctctgcagggcctggaatggactcgtctgccaagtcggcactacacagct

SEQ ID NO: 134575 - DNA, 88 bp, Homo sapiens
  chrX:110924331-110924419
  hyper
ccctggcggccattacggatttccgcctccctcacagaaggcagtcactgcaacgtgcgtggcctcagttgcgtcatatccggccctt

SEQ ID NO: 134576 - DNA, 162 bp, Homo sapiens
  chrX:110924466-110924628
  hyper
cgtagggaccaccagctttgacgacctcattgcgtgtgtgtcggcgcccgacagtctgcaagtgagtgagggaggcgagcaggcggcggcttggctcgccacccgccatctccggccatactgccagccgcgttagccttgcctgaccgtcgcgctcggaaa

SEQ ID NO: 134577 - DNA, 30 bp, Homo sapiens
  chrX:110924906-110924936
  hyper
tggaccgcacgtcggcgccggcgtctgagc

SEQ ID NO: 134578 - DNA, 31 bp, Homo sapiens; identical to SEQ ID NO: 13625
  chrX:118101022-118101053
  hyper

SEQ ID NO: 134579 - DNA, 21 bp, Homo sapiens
  chrX:118451726-118451747
  hyper
caaaataattttcactcgtgt

SEQ ID NO: 134580 - DNA, 30 bp, Homo sapiens; identical to SEQ ID NO: 13627
  chrX:120184126-120184156
  hyper

SEQ ID NO: 134581 - DNA, 87 bp, Homo sapiens
  chrX:123094089-123094176
  hyper
gaaccgcggctcgatcgggtccgcggcggaagcgcggccaaacgaatgagtaagtcaggcgcgggcacggcaccttgtttaccccac

SEQ ID NO: 134582 - DNA, 98 bp, Homo sapiens
  chrX:123094335-123094433
  hyper
cgctccctcccaacgggagccgggcgcgggttcgtggccgacagatggcgcctgcgcgttccattcgcctccaagtcgccgaagagcgaacaccccaa

SEQ ID NO: 134583 - DNA, 224 bp, Homo sapiens; identical to SEQ ID NO: 13629
  chrX:123094492-123094716
  hyper

SEQ ID NO: 134584 - DNA, 125 bp, Homo sapiens; identical to SEQ ID NO: 13630
  chrX:123095160-123095285
  hyper

SEQ ID NO: 134585 - DNA, 152 bp, Homo sapiens; identical to SEQ ID NO: 13631
  chrX:123095554-123095706
  hyper

SEQ ID NO: 134586 - DNA, 66 bp, Homo sapiens; identical to SEQ ID NO: 13632
  chrX:123155215-123155281
  hyper

SEQ ID NO: 134587 - DNA, 142 bp, Homo sapiens; identical to SEQ ID NO: 13633
  chrX:123156379-123156521
  hyper

SEQ ID NO: 134588 - DNA, 80 bp, Homo sapiens; identical to SEQ ID NO: 13634
  chrX:123159688-123159768
  hyper

SEQ ID NO: 134589 - DNA, 166 bp, Homo sapiens; identical to SEQ ID NO: 13635
  chrX:123164809-123164975
  hyper

SEQ ID NO: 134590 - DNA, 98 bp, Homo sapiens; identical to SEQ ID NO: 13636
  chrX:123171375-123171473
  hyper

SEQ ID NO: 134591 - DNA, 78 bp, Homo sapiens; identical to SEQ ID NO: 13637
  chrX:123176417-123176495
  hyper

SEQ ID NO: 134592 - DNA, 206 bp, Homo sapiens; identical to SEQ ID NO: 13638
  chrX:123179012-123179218
  hyper

SEQ ID NO: 134593 - DNA, 153 bp, Homo sapiens; identical to SEQ ID NO: 13639
  chrX:123181202-123181355
  hyper

SEQ ID NO: 134594 - DNA, 75 bp, Homo sapiens; identical to SEQ ID NO: 13640
  chrX:123182853-123182928
  hyper

SEQ ID NO: 134595 - DNA, 136 bp, Homo sapiens; identical to SEQ ID NO: 13641
  chrX:123184023-123184159
  hyper

SEQ ID NO: 134596 - DNA, 279 bp, Homo sapiens; identical to SEQ ID NO: 13642
  chrX:123184965-123185244
  hyper

SEQ ID NO: 134597 - DNA, 109 bp, Homo sapiens; identical to SEQ ID NO: 13643
  chrX:123189976-123190085
  hyper

SEQ ID NO: 134598 - DNA, 113 bp, Homo sapiens; identical to SEQ ID NO: 13644
  chrX:123191714-123191827
  hyper

SEQ ID NO: 134599 - DNA, 132 bp, Homo sapiens; identical to SEQ ID NO: 13645
  chrX:123195072-123195204
  hyper

SEQ ID NO: 134600 - DNA, 105 bp, Homo sapiens; identical to SEQ ID NO: 13646
  chrX:123195619-123195724
  hyper

SEQ ID NO: 134601 - DNA, 307 bp, Homo sapiens; identical to SEQ ID NO: 13647
  chrX:123196748-123197055
  hyper

SEQ ID NO: 134602 - DNA, 214 bp, Homo sapiens; identical to SEQ ID NO: 13648
  chrX:123197687-123197901
  hyper

SEQ ID NO: 134603 - DNA, 72 bp, Homo sapiens; identical to SEQ ID NO: 13649
  chrX:123199724-123199796
  hyper

SEQ ID NO: 134604 - DNA, 263 bp, Homo sapiens; identical to SEQ ID NO: 13650
  chrX:123200023-123200286
  hyper

SEQ ID NO: 134605 - DNA, 94 bp, Homo sapiens; identical to SEQ ID NO: 13651
  chrX:123202412-123202506
  hyper

SEQ ID NO: 134606 - DNA, 176 bp, Homo sapiens; identical to SEQ ID NO: 13652
  chrX:123204997-123205173
  hyper

SEQ ID NO: 134607 - DNA, 141 bp, Homo sapiens; identical to SEQ ID NO: 13653
  chrX:123210180-123210321
  hyper

SEQ ID NO: 134608 - DNA, 103 bp, Homo sapiens; identical to SEQ ID NO: 13654
  chrX:123211805-123211908
  hyper

SEQ ID NO: 134609 - DNA, 151 bp, Homo sapiens; identical to SEQ ID NO: 13655
  chrX:123215227-123215378
  hyper

SEQ ID NO: 134610 - DNA, 134 bp, Homo sapiens; identical to SEQ ID NO: 13656
  chrX:123217269-123217403
  hyper

SEQ ID NO: 134611 - DNA, 225 bp, Homo sapiens; identical to SEQ ID NO: 13657
  chrX:123220395-123220620
  hyper

SEQ ID NO: 134612 - DNA, 391 bp, Homo sapiens; identical to SEQ ID NO: 13658
  chrX:123224423-123224814
  hyper

SEQ ID NO: 134613 - DNA, 128 bp, Homo sapiens; identical to SEQ ID NO: 13659
  chrX:123227866-123227994
  hyper

SEQ ID NO: 134614 - DNA, 79 bp, Homo sapiens; identical to SEQ ID NO: 13660
  chrX:123229220-123229299
  hyper

SEQ ID NO: 134615 - DNA, 2084 bp, Homo sapiens; identical to SEQ ID NO: 13661
  chrX:123234422-123236506
  hyper

SEQ ID NO: 134616 - DNA, 31 bp, Homo sapiens; identical to SEQ ID NO: 13662
  chrX:124338609-124338640
  hyper

SEQ ID NO: 134617 - DNA, 21 bp, Homo sapiens
  chrX:127856750-127856771
  hyper
tttaaagctcatcatccggct

SEQ ID NO: 134618 - DNA, 137 bp, Homo sapiens; identical to SEQ ID NO: 13664
  chrX:129139162-129139299
  hyper

SEQ ID NO: 134619 - DNA, 92 bp, Homo sapiens; identical to SEQ ID NO: 13665
  chrX:129146552-129146644
  hyper

SEQ ID NO: 134620 - DNA, 3265 bp, Homo sapiens; identical to SEQ ID NO: 13666
  chrX:129146924-129150189
  hyper

SEQ ID NO: 134621 - DNA, 178 bp, Homo sapiens; identical to SEQ ID NO: 13667
  chrX:129154947-129155125
  hyper

SEQ ID NO: 134622 - DNA, 82 bp, Homo sapiens; identical to SEQ ID NO: 13668
  chrX:129156870-129156952
  hyper

SEQ ID NO: 134623 - DNA, 393 bp, Homo sapiens; identical to SEQ ID NO: 13669
  chrX:129158961-129159354
  hyper

SEQ ID NO: 134624 - DNA, 228 bp, Homo sapiens; identical to SEQ ID NO: 13670
  chrX:129162608-129162836
  hyper

SEQ ID NO: 134625 - DNA, 223 bp, Homo sapiens; identical to SEQ ID NO: 13671
  chrX:129168428-129168651
  hyper

SEQ ID NO: 134626 - DNA, 168 bp, Homo sapiens; identical to SEQ ID NO: 13672
  chrX:129171340-129171508
  hyper

SEQ ID NO: 134627 - DNA, 149 bp, Homo sapiens; identical to SEQ ID NO: 13673
  chrX:129173110-129173259
  hyper

SEQ ID NO: 134628 - DNA, 79 bp, Homo sapiens; identical to SEQ ID NO: 13674
  chrX:129184690-129184769
  hyper

SEQ ID NO: 134629 - DNA, 158 bp, Homo sapiens; identical to SEQ ID NO: 13675
  chrX:129185833-129185991
  hyper

SEQ ID NO: 134630 - DNA, 2231 bp, Homo sapiens; identical to SEQ ID NO: 13676
  chrX:129189827-129192058
  hyper

SEQ ID NO: 134631 - DNA, 52 bp, Homo sapiens; identical to SEQ ID NO: 13677
  chrX:130110129-130110181
  hyper

SEQ ID NO: 134632 - DNA, 157 bp, Homo sapiens; identical to SEQ ID NO: 13678
  chrX:133507340-133507497
  hyper

SEQ ID NO: 134633 - DNA, 185 bp, Homo sapiens; identical to SEQ ID NO: 13679
  chrX:133511600-133511785
  hyper

SEQ ID NO: 134634 - DNA, 103 bp, Homo sapiens; identical to SEQ ID NO: 13680
  chrX:133512033-133512136
  hyper

SEQ ID NO: 134635 - DNA, 135 bp, Homo sapiens; identical to SEQ ID NO: 13681
  chrX:133527529-133527664
  hyper

SEQ ID NO: 134636 - DNA, 45 bp, Homo sapiens; identical to SEQ ID NO: 13682
  chrX:133527937-133527982
  hyper

SEQ ID NO: 134637 - DNA, 480 bp, Homo sapiens; identical to SEQ ID NO: 13683
  chrX:133547516-133547996
  hyper

SEQ ID NO: 134638 - DNA, 278 bp, Homo sapiens; identical to SEQ ID NO: 13684
  chrX:133549044-133549322
  hyper

SEQ ID NO: 134639 - DNA, 135 bp, Homo sapiens; identical to SEQ ID NO: 13685
  chrX:133551197-133551332
  hyper

SEQ ID NO: 134640 - DNA, 131 bp, Homo sapiens; identical to SEQ ID NO: 13686
  chrX:133559229-133559360
  hyper

SEQ ID NO: 134641 - DNA, 3133 bp, Homo sapiens; identical to SEQ ID NO: 13687
  chrX:133559689-133562822
  hyper

SEQ ID NO: 134642 - DNA, 31 bp, Homo sapiens; identical to SEQ ID NO: 13688
  chrX:133913512-133913543
  hyper

SEQ ID NO: 134643 - DNA, 30 bp, Homo sapiens
  chrX:136651537-136651567
  hyper
cgagagtagccgcgccgaacccgagggtgg

SEQ ID NO: 134644 - DNA, 30 bp, Homo sapiens; identical to SEQ ID NO: 13689
  chrX:144475782-144475812
  hyper

SEQ ID NO: 134645 - DNA, 732 bp, Homo sapiens
  chrY:2655224-2655956
  hyper
cttcggcagcatcttcgccttccgacgaggtcgatacttataattcgggtatttctctctgtgcatggcctgtaatttctgtgcctcctggaagaatggccatttttcggcttcagtaagcattttccactggtatcccagctgcttgctgatctctgagtttcgcattctgggattctctagagccatcttgcgcctctgatcgcgagaccacacgatgaatgcgttcatgggtcgcttcactctatcctggacgttgcctttactgttttctcccgtttcacactgatacttagagttacagctttcagtgcaaaggaaggaagagcttctccggagagcgggaatattctcttgcacagctggactgtaatcatcgctgttgaatacgcttaacatagcagaagcatatgattgcattgtcaaaaacaaggagagtgcgacaaaattgaaaggtgccagagttcgaaacttattttactatccaaaactcacttctaccagattctttgttacgttaacttttgtaatgaaacttgcatttctccgccctcaacaccccctcaaccccgcccaaccagcctaccccctagtaccctgacaatgtattcattctcaagcaaaacatggtaattcagtaacgttgactacttgccctgctgatctgcctccctgactgctctactgctgtcctgaaaaatgcgaatttgacttaatcgccaattttttcat

SEQ ID NO: 134646 - DNA, 192 bp, Homo sapiens; identical to SEQ ID NO: 13690
  chrY:2802950-2803142
  hyper

SEQ ID NO: 134647 - DNA, 68 bp, Homo sapiens; identical to SEQ ID NO: 13691
  chrY:2804267-2804335
  hyper

SEQ ID NO: 134648 - DNA, 30 bp, Homo sapiens; identical to SEQ ID NO: 58410
  chrY:4869218-4869248
  hyper

SEQ ID NO: 134649 - DNA, 170 bp, Homo sapiens
  chrY:4869596-4869766
  hyper
cgcgtagcgataaaacggctcttttttttttcgaggaaagtaatgtaccttttaaaagaggttcatcggaaaatgtgactttttaaaagcgagcagccgcaaacgggtgcattttttagactttagaagagcggagcggcagtccgcccgggttgcggctgggactcgca

SEQ ID NO: 134650 - DNA, 30 bp, Homo sapiens; identical to SEQ ID NO: 13692
  chrY:6777840-6777870
  hyper

SEQ ID NO: 134651 - DNA, 84 bp, Homo sapiens; identical to SEQ ID NO: 13693
  chrY:6778626-6778710
  hyper

SEQ ID NO: 134652 - DNA, 30 bp, Homo sapiens; identical to SEQ ID NO: 13694
  chrY:6778924-6778954
  hyper

SEQ ID NO: 134653 - DNA, 377 bp, Homo sapiens; identical to SEQ ID NO: 58415
  chrY:7140717-7141094
  hyper

SEQ ID NO: 134654 - DNA, 30 bp, Homo sapiens; identical to SEQ ID NO: 58416
  chrY:7141301-7141331
  hyper

SEQ ID NO: 134655 - DNA, 31 bp, Homo sapiens; identical to SEQ ID NO: 13695
  chrY:7180425-7180456
  hyper

SEQ ID NO: 134656 - DNA, 347 bp, Homo sapiens; identical to SEQ ID NO: 13696
  chrY:14532862-14533209
  hyper

SEQ ID NO: 134657 - DNA, 447 bp, Homo sapiens; identical to SEQ ID NO: 13697
  chrY:14533221-14533668
  hyper

SEQ ID NO: 134658 - DNA, 35 bp, Homo sapiens; identical to SEQ ID NO: 13698
  chrY:14774178-14774213
  hyper

SEQ ID NO: 134659 - DNA, 30 bp, Homo sapiens; identical to SEQ ID NO: 13699
  chrY:14774511-14774541
  hyper

SEQ ID NO: 134660 - DNA, 30 bp, Homo sapiens; identical to SEQ ID NO: 13700
  chrY:15017282-15017312
  hyper

SEQ ID NO: 134661 - DNA, 30 bp, Homo sapiens; identical to SEQ ID NO: 13701
  chrY:15591245-15591275
  hyper

SEQ ID NO: 134662 - DNA, 114 bp, Homo sapiens; identical to SEQ ID NO: 13702
  chrY:15591518-15591632
  hyper

SEQ ID NO: 134663 - DNA, 30 bp, Homo sapiens; identical to SEQ ID NO: 13703
  chrY:15816346-15816376
  hyper

SEQ ID NO: 134664 - DNA, 230 bp, Homo sapiens
  chrY:15863194-15863424
  hyper
ccttaggaaacaaagcgtgtggaactaaaggaaggtaggacgcccctggcggtcctgaggcctctttggtcctgctaaagagagcacccctgctggcaggcgtgggcctgctcacacctggacggagaggggaggtaggaggggcaggaagcggttggtgcggacggggaggcgactgcgtggggtcttccgacatcacccttcagctgagtgtccggggtctcattccc

SEQ ID NO: 134665 - DNA, 461 bp, Homo sapiens
  chrY:15863655-15864116
  hyper
gccctcgcatccgatcggcagccatggtgcccgaggtgcccggcgcggtcctgaccctctgcctctggctggaggcctcggagggctgcctggcggccggccccggagcagctgctgctcagctgctggacgagtcgctgtctgccgggagcgtcctgcgcgcccgctgcgcctccaggtgcctaagcttgccaatcatacgcatctctgccttcttccagcacttccaggttagtggagactcccgcccgccccgggttctttctggtgctgcggccgcggcgggagtgcacccgggcgcgagagtgcacccgggcgcgcgccgaccagcctaggcgcgaaaagttttcggccagcgcagcgagctgacctggcttctcctgggcgtggatcttacagtcggggtgcttaaatcgtgttttccagcctcctcccggctcccgatacgaaaaagaagcccg

SEQ ID NO: 134666 - DNA, 1414 bp, Homo sapiens
  chrY:16635743-16637157
  hyper
gcgcgctggaaaccccgcgtgaagatgaaatgactgtagctccgtgctgctcctccaaactcgggagcggtatccatgcacccctttcccgtgtgtgtgggttacgacgtgggtgggagtggtgaggcaagccgcaaaagtggggtagagctggtggttttgcttcttcggaagcctttgagtgtggcctggaccttagatgggggtgcagggcggtttgccgctgccaccctcggcaccatctctgaactgcccgcttttccggaggagcggaaaagttggaagccgaaaagacaggcgcccggagccctggtctaggtatcaggtgatccggagccctagtcggtgcccactaagaacaccccttctcccatcgggggttcggaggagtgttaagcctgcgggtctgccagtccctaaggtagggatgggggaggggtctgaggaatccgttccaataggcacaccatccccacagccctagaaaaggcaaccaccacccgctccttcctcccgcaccatcccatctcaaggctctctgctgacccgggccgatttcatctggtctcttctcccccgcttcccacctcccaattcccgcgcagctcggctccgttccctcccactcccctaggcggaactgaaagcgaagatcagccaagagcacagtcggaggcggcagagacggtggcgggtgagctaggggctgtgagacgaagcagggagagagtgaacttcagccccgtcccctccccactgccacggctggggcaacccaacccgcgcctgaagcggcttggcttgacctgcggaagcgcgggccgggatggcgtggggagagggaggtaggtgccactgggctgcagatgacgagtgggttgggggcttgctgtgggacaagaggttcaggttccggcctgcgccttccactccgcggtggcgctctctgcctgcggttttccaggaggccgatctaccccagggacactctcatccttcaggcggtctcctggacgccctttcctccccttgcctcccagcctgacctggctctttcgcccctcggagaaccggtaggttggggtccctcggcgggggtctagtgagccgagtcgcgagctttgcgcccccggtatctaggccccgtgccgcgcgcaaatccgggcccaggcgtacagttctggagcctagtcgccgccagacacagggccctttgtacccggaggagcgggagcgggagcgggggcgtcagggcaacccttgcaccccagaggcctgcctaggaccaccctgggaacaaatgtctcgctcggaaaacgaggtgaacccggaggatgtcctacgcatcatacccctccccttcttgagaaggctttttctttttttctttttttttcccggtttccttttctct

SEQ ID NO: 134667 - DNA, 31 bp, Homo sapiens; identical to SEQ ID NO: 58429
  chrY:17245169-17245200
  hyper

SEQ ID NO: 134668 - DNA, 62 bp, Homo sapiens; identical to SEQ ID NO: 13709
  chrY:21729022-21729084
  hyper

SEQ ID NO: 134669 - DNA, 30 bp, Homo sapiens; identical to SEQ ID NO: 13710
  chrY:21729299-21729329
  hyper

SEQ ID NO: 134670 - DNA, 30 bp, Homo sapiens; identical to SEQ ID NO: 13711
  chrY:21729540-21729570
  hyper

SEQ ID NO: 134671 - DNA, 30 bp, Homo sapiens; identical to SEQ ID NO: 13712
  chrY:21906959-21906989
  hyper

SEQ ID NO: 134672 - DNA, 31 bp, Homo sapiens; identical to SEQ ID NO: 13713
  AC010098.8_29020-31687:1032-1063
  hyper

SEQ ID NO: 134673 - DNA, 31 bp, Homo sapiens; identical to SEQ ID NO: 13714
  AC153808.1_1-20788:7948-7979
  hyper

SEQ ID NO: 134674 - DNA, 105 bp, Homo sapiens; identical to SEQ ID NO: 13715
  AC209420.3_23583-33864:1608-1713
  hyper

SEQ ID NO: 134675 - DNA, 626 bp, Homo sapiens; identical to SEQ ID NO: 58437
  AC211344.3_7702-13588:3922-4548
  hyper

SEQ ID NO: 134676 - DNA, 541 bp, Homo sapiens; identical to SEQ ID NO: 13717
  AC241851.2_88-34049:15062-15603
  hyper

SEQ ID NO: 134677 - DNA, 99 bp, Homo sapiens; identical to SEQ ID NO: 13718
  AC241851.2_88-34049:15842-15941
  hyper

SEQ ID NO: 134678 - DNA, 200 bp, Homo sapiens; identical to SEQ ID NO: 13719
  AEKP01168736.1_1-4752:1588-1788
  hyper

SEQ ID NO: 134679 - DNA, 739 bp, Homo sapiens; identical to SEQ ID NO: 58441
  AEKP01168736.1_1-4752:1847-2586
  hyper

SEQ ID NO: 134680 - DNA, 31 bp, Homo sapiens; identical to SEQ ID NO: 13721
  AEKP01218621.1_1-6359:538-569
  hyper

SEQ ID NO: 134681 - DNA, 46 bp, Homo sapiens; identical to SEQ ID NO: 13722
  FP325318.4_87426-89530:1057-1103
  hyper

SEQ ID NO: 134682 - DNA, 7860 bp, Homo sapiens; identical to SEQ ID NO: 58444
  HPV16:0-7860
  hyper

SEQ ID NO: 134683 - DNA, 7800 bp, Homo sapiens; identical to SEQ ID NO: 58445
  HPV18:0-7800
  hyper

SEQ ID NO: 134684 - DNA, 127 bp, Homo sapiens; identical to SEQ ID NO: 13723
  JH636052.4:789298-789425
  hyper

SEQ ID NO: 134685 - DNA, 31 bp, Homo sapiens; identical to SEQ ID NO: 13724
  JH636052.4:790113-790144
  hyper

SEQ ID NO: 134686 - DNA, 467 bp, Homo sapiens
  JH636052.4:1361756-1362223
  hyper
tggggggggagggggggcctgcgaagcacaggaaaacttgtcttttcgttgtaacttccgcttcgttactacaagttacgcagctgagcttcccacgttagagaaaatgacagaacagcacacttgaaatgaaatagttgagtcgggtttaaaagccatttcagtaaccacaatatctgccctgccacataaataagattgcacctatctccgccccgccacagctccatacgcctcaccctttaaacgcacagtcacttgccccagcaccactccagccaatccccaaccaccccgagccctcctagccctaacacacagctgggactctcatgtccagccagtggtcctggacttgctcctacagcgcgggaaatccttcgtggcgaagcagcagcccctgcgctgcctcatctacatagaaacgccctatcggtgatgtcaccgacagtgcctttcccagtctc

SEQ ID NO: 134687 - DNA, 97 bp, Homo sapiens; identical to SEQ ID NO: 58450
  JH636052.4:1376241-1376338
  hyper

SEQ ID NO: 134688 - DNA, 31 bp, Homo sapiens
  JH636052.4:2302749-2302780
  hyper
ttcgcgttctttgcgccgccttcacccactg

SEQ ID NO: 134689 - DNA, 31 bp, Homo sapiens; identical to SEQ ID NO: 13725
  JH636052.4:3185459-3185490
  hyper

SEQ ID NO: 134690 - DNA, 31 bp, Homo sapiens
  JH636052.4:5118722-5118753
  hyper
gagggtcaggacggggcgaaggccattccgc

SEQ ID NO: 134691 - DNA, 113 bp, Homo sapiens; identical to SEQ ID NO: 58452
  NW_001838402.2_289580-297926:6068-6181
  hyper

SEQ ID NO: 134692 - DNA, 30 bp, Homo sapiens; identical to SEQ ID NO: 1
  chr1:569477-569507
  hypo

SEQ ID NO: 134693 - DNA, 31 bp, Homo sapiens; identical to SEQ ID NO: 13728
  chr1:714260-714291
  hypo

SEQ ID NO: 134694 - DNA, 30 bp, Homo sapiens
  chr1:785619-785649
  hypo
tgttttctcggcaagcgagtctttgaggct

SEQ ID NO: 134695 - DNA, 34 bp, Homo sapiens; identical to SEQ ID NO: 58455
  chr1:809312-809346
  hypo

SEQ ID NO: 134696 - DNA, 36 bp, Homo sapiens; identical to SEQ ID NO: 58456
  chr1:834688-834724
  hypo

SEQ ID NO: 134697 - DNA, 43 bp, Homo sapiens; identical to SEQ ID NO: 58457
  chr1:851056-851099
  hypo

SEQ ID NO: 134698 - DNA, 65 bp, Homo sapiens; identical to SEQ ID NO: 34846
  chr1:859735-859800
  hypo

SEQ ID NO: 134699 - DNA, 406 bp, Homo sapiens
  chr1:864733-865139
  hypo
gcggggcagggtttgcggaacaggggacctgggctggtgagggctcctcgtctggtgacctgtgagccccggggcctgcagtctgcgagggttcagctcagacagttgccagtggccttgcaccaggctgcagctgcccctgagccgggctgtgcgtggcgctgatgaaatagaaaagggcattcgcttgtcaacgttggcatcggtggcagggtgtggtgggcagaagggtcacaaagtacgggtgggattggcaggcagatacacggagggaacgtgcgcatttgagtgcacgtccaccagcaccagccccaggccacaggcagatcccaggagacacgcaggggccctaagaagggagctgggaatgaggggccacacaagcccgggacggaggcctgtcgca

SEQ ID NO: 134700 - DNA, 150 bp, Homo sapiens; identical to SEQ ID NO: 13730
  chr1:872319-872469
  hypo

SEQ ID NO: 134701 - DNA, 38 bp, Homo sapiens; identical to SEQ ID NO: 13731
  chr1:879360-879398
  hypo

SEQ ID NO: 134702 - DNA, 30 bp, Homo sapiens
  chr1:884949-884979
  hypo
gggcctacagggtgcggctgcagtgaacca

SEQ ID NO: 134703 - DNA, 30 bp, Homo sapiens; identical to SEQ ID NO: 13732
  chr1:892842-892872
  hypo

SEQ ID NO: 134704 - DNA, 599 bp, Homo sapiens; identical to SEQ ID NO: 58462
  chr1:896819-897418
  hypo

SEQ ID NO: 134705 - DNA, 283 bp, Homo sapiens
  chr1:897733-898016
  hypo
ggttctggaactggtctctagcgacagcctgaacgtgccttcagaggaggaggtctaccgagccgtcctgagctgggtgaaacacgacgtggacgcccgcaggcagcatgtcccacgggtgaggcgcggccgcggggggctcccacagcatccaggagggcatgcaggtggctgagggcctggtgcaccctgaccttccccgagttcagggactccgtgggggtggtgcccccacctgtctgaagaagaatccatcacacaggtggtacgggcatctgggggg

SEQ ID NO: 134706 - DNA, 643 bp, Homo sapiens
  chr1:898242-898885
  hypo
agccgcacacgtccccggcgctgcgagggggccgggcctgtgctttttgctgtgggtatggccccccgcccgtttccctcttgccctgtgccttctactccccaccagcacaagcccaccccacctgtgccggtcaggtcctgacctgcccctccgcccctccattcaggggcctctccaggagcctggggtgtggcccagcagtgggatccactcacgagtcccgtctccacctgccctccccaggcggcgggagcctgtttgccatccacggagactgtgaggcctacgacacgcgcaccgaccgctggcacgtggtggcctccatgtccacgcgccgggcccgggtgggagtggctgcggtggggaaccggctctatgctgtgggcgggtaagcctggaggctggacttgggtcgggtctggcacgtgcccgccaggccagtcttgacctgcagtggcttaattccgctagctatgatgggacctcagacctggctaccgtggagtcctacgaccccgtgactaacacgtggcagccggaggtgtccatgggcacaaggcgaagctgcctgggtgtggccgccttgcatggactcctgtactcggccggcggctatgacggggcctcctgcctgaacagg

SEQ ID NO: 134707 - DNA, 832 bp, Homo sapiens; identical to SEQ ID NO: 58465
  chr1:899136-899968
  hypo

SEQ ID NO: 134708 - DNA, 618 bp, Homo sapiens
  chr1:900229-900847
  hypo
agggagttctcccaacctcagcgagcatgtcccgccaccacccctttttgtggtgcagcccctccccccgcatcccttcctgcagccaggggctcaccccgccttccccccaggagcacgcatgacctggtggccatggacggatggttgtacgccgtggggggtaacgacggtagctccagcctcaactccatcgagaagtacaacccgaggaccaacaagtgggtggccgcatcctgcatgttcacccggcgcagcagtgtgggtgtggcggtgctggagctgctcaatttcccgccgccatcctccccgacgctgtccgtgtcctccaccagcctctgacccacctaccaccagaggcctgcagcctcccacatgccttaaggggaccgtggcccccaccagggacgtcctgcgccatccgttcacgtctctgcatccattccttcatgtctttatttagttgtttatttatttagttatttatcttatttattgaggggtgaggagtgccacggctgcccgtttacacctttagcgtctggtcctcctgcgtgtcctcccctccactgcctgcatggggggcgcggggagtgaccaggcgggggcctcaccgcc

SEQ ID NO: 134709 - DNA, 30 bp, Homo sapiens
  chr1:903437-903467
  hypo
tcctccccggggccccgaggctgagctgcg

SEQ ID NO: 134710 - DNA, 180 bp, Homo sapiens
  chr1:906923-907103
  hypo
ggtcagtctggtctccgctgtgacatggaggagcccctgcccgccctgaggttctcaccctgaggttcttgaccgtcaccctggggcgggcagcatggggctgagagcccctcccggggactcccttgtgtgtgcctgcccgtgaggcgtgtgtgtgcacacgtgcgtgtgcgtgtgtcc

SEQ ID NO: 134711 - DNA, 1248 bp, Homo sapiens
  chr1:913465-914713
  hypo
cttcccccgcaaccccgggaaccacctgccccgcacacggccgccccgggaaccgcctgcctccccctccaaccccaggaaccgcctgccccaccctaaccctgcacactcttggcctgggaactgcctgccccgcacacgcccgccccgggaaccgcctgccccagatacatccatcatgggacatgtctgtcctaagatacatttgtgctggacacgtctaccctggacacgtcttcccgaaacccctctgtcatggacacgtcttcctgagaactggttgccccgggaaccgcctgccccgggaaccgcccgccctggacgcgtctgtcggagtcacatcgcccccgtgcttcttctgcctgagatttgggtgacctggttgagttgggccagtttgggggaactgccagtggaggccccgtgttctggtctgtaaagcatctcccagaggacatcagtgtgagatgggcctcgtagagtgcctgaccctgaaggtagccaggcctgggcgggaaccctgccagaggctgggggagggacgccgccgtcacatgggcccgaacacagggcaacggcggcgcagagccaaccccctgaacaacccgggtgcttggactgggccgccccatctggactgtgtgctgggatgactgggggctggtccccaggctcccctgctaggggatgacccaagcccggcctgcccggcccctgcggccccctgcttggccaagatccctggacagtgtgtgcctgggatctggacgggctgtgggatccgagagcacgtacctgcccgtctaagagccaggtggagccgctctaccacggctggcttgaggggggtcccaggccccgccccctcggaggccgaccggggaggctccagggcctgcagtgggagcgggacagccggccccagcacgccctcaagcctgtcctccccgaagaagaagtgttcatagacctcagggatggagatgggcacggggtctccaggtatgggggccggcacaggatcagctctcgggagcggctccggggacccccgccgcctcgacctctgggctccaacgtctgggaagaagaactcgcacatgtccggccactggacgcctgccggatcctgaccggccgctgccgcctcagcctcttcgttctcctcgatggtgtcacagaagaagaactcgtaggcctccgggagggtcacggcaaagctgctcccgggcccgaccctcgtcacgg

SEQ ID NO: 134712 - DNA, 1006 bp, Homo sapiens
  chr1:915022-916028
  hypo
gggtgggaggccaggcgaggccagcggcgtcggctctgggaacaggtgtagacacaagcccgctggactcggtcatcctcggcacagcctccgagacaggtggagatgaagccacctctagcttagccactgggcctgctgtaggcaaggccacatccaggccatgtttggaggcaggtgtggacacagccacgtccgtgtccaattgtggcttggagatgggtgtagacagagccacactggactgaggctcagaagctggtgtagacacagccgtgtcagattgcggcttggaggcaggtatagacacagccatgtccctgtcaggttgcggctcagaggcaggtgtagacacagccatgtccgtgtcaggttgcggctcagaggcaggtgtagacacagccatgtccctgtcagattgcggctcggaggcaggtgtagacacagccatgtccctgtcaggttgcggctcggaggcaggtgtagacacagccatgtctgacttagcccttgagacatctgggagggcttcccagacagtcgtggacactgtgtgcagcttggctcggcgcggggttctgatttggtctgtgccttgctctgtcacagggacaggtgtagacaggcccaaacctggccctggtctgtcttcctgcacaggggacctggggccaggctcaggagctcctgcaggacctggccccaactcctcctgcccggctttggccatcagctttgccgtctcaggactggccgcagggagcagcggggagcccgtctgggcagaagcagaggctcctgtgtgcccaccccccttggcacccacagctcgcctcttctttcggctggggctccgtggtggggctccagggctatcggggggcctctgggagccagtgctgtggccaggggacttgggactcccagggggctcaccagggggccgtggggcagggccctgcagaagcctctgcatctggtctccagaagacgccggaccagggca

SEQ ID NO: 134713 - DNA, 478 bp, Homo sapiens
  chr1:918152-918630
  hypo
tgagagttcagggcacgatactaggagactggggtgtgcgccgtgaggggtggcagtgagagctgggcgtgcagaaagtgcatgcctggtgccatacgatgcttttccagaaagtagctgccacgagaccacaggacaaggcgtcccgccacgcagggccggcctgacttgagctttcacaagtggaatcgcaccctgcatccctttctgcatctgtgtcctcgggcccacgccgtgctctggagacagctgccatgagggccgcgggcgactgcccgggcgggtgaggctgtcctgtgtgaacgtgccacgcggctgtgccgtttcccgtgggtggcgatgtgggtcgtttccagtttgcagctaccacacacggtgcggctgtgaatatctgggaacattcctttcggcgaacctctcacatttccaggacgcttggggtcagcgtcagaaggtgccgccccgttccccaggtggc

SEQ ID NO: 134714 - DNA, 30 bp, Homo sapiens
  chr1:919125-919155
  hypo
ctgtgtcgcctttcacgctcggctctgcca

SEQ ID NO: 134715 - DNA, 899 bp, Homo sapiens; identical to SEQ ID NO: 102287
  chr1:935361-936260
  hypo

SEQ ID NO: 134716 - DNA, 403 bp, Homo sapiens; identical to SEQ ID NO: 58474
  chr1:942307-942710
  hypo

SEQ ID NO: 134717 - DNA, 393 bp, Homo sapiens; identical to SEQ ID NO: 34857
  chr1:955507-955900
  hypo

SEQ ID NO: 134718 - DNA, 207 bp, Homo sapiens
  chr1:959106-959313
  hypo
cacatggcaggagagtcaccccggctgaacgaggctctgcatcttaccgaagccgctctacgggtgccaggcactggctctggagcgagtgcccaggcggagcagagcgctgggaggagggtccgtggggagcccctgccaggtgggtgtggcttagcccagctgtgggcagtcgcactcagggacgagctccaggtggggagcctg

SEQ ID NO: 134719 - DNA, 31 bp, Homo sapiens; identical to SEQ ID NO: 58477
  chr1:973222-973253
  hypo

SEQ ID NO: 134720 - DNA, 30 bp, Homo sapiens
  chr1:973872-973902
  hypo
gctctgtcttgggacgtagcaggacctcgg

SEQ ID NO: 134721 - DNA, 381 bp, Homo sapiens; identical to SEQ ID NO: 102291
  chr1:975561-975942
  hypo

SEQ ID NO: 134722 - DNA, 30 bp, Homo sapiens; identical to SEQ ID NO: 102293
  chr1:976431-976461
  hypo

SEQ ID NO: 134723 - DNA, 30 bp, Homo sapiens
  chr1:976988-977018
  hypo
gtcacctacgaaaacgactgtgtcatgggc

SEQ ID NO: 134724 - DNA, 30 bp, Homo sapiens; identical to SEQ ID NO: 58478
  chr1:978649-978679
  hypo

SEQ ID NO: 134725 - DNA, 30 bp, Homo sapiens
  chr1:979469-979499
  hypo
ctgctccccttccccgcagccgagtgcggt

SEQ ID NO: 134726 - DNA, 222 bp, Homo sapiens
  chr1:980097-980319
  hypo
tacgtccatccggtcgatgtatcacatcaattaggtaaaagtggtgcccggtgtgtgtgatgcgcgtgcacagatgtgtgtctgcagaggggcgttaactgtacggtttggaggaatgtgggtgagaacgcatgctgacgtcttcagatgtctgtttctcgatttgcaaggaagctcgcgtgtgtgtgtgcacagagctgcgtgtccgtgatctttggatgc

SEQ ID NO: 134727 - DNA, 30 bp, Homo sapiens; identical to SEQ ID NO: 58480
  chr1:981207-981237
  hypo

SEQ ID NO: 134728 - DNA, 192 bp, Homo sapiens
  chr1:982293-982485
  hypo
tgggaagacgccctcgctggacgcagagggctccaactgccccggtgagtggacggctgggcgaggggagtgtgaggatagcctgggctcggccgaggtgctgccccctcgcctgggcagcaggtcagtgccgggggttatggtcttgggactcggccccctcaaacatgtgcgtgccggggaccccacgcc

SEQ ID NO: 134729 - DNA, 994 bp, Homo sapiens; identical to SEQ ID NO: 58482
  chr1:984138-985132
  hypo

SEQ ID NO: 134730 - DNA, 1210 bp, Homo sapiens
  chr1:987798-989008
  hypo
gggacatgtagatatgcgtgtgtgactatgcggccgtgtgtgtgcatggctccatgtatgtgtgtgtatatgagggagacatgcaggtatgtgtccgtgtgtgtgtgtgtgcatatgggtccatgtatgtgtgtgtatatgagggagacacgcaggtgtgtgtctgagtgtgtgcgcacatgggtccatgtatgtgtgtgtataggtgagggagacatgcatgtgtgtgtccgtgtgtgtgcatgggtccatgtgtgtatagtgtgtacacatgggtccatgtatgtgtgtgtatatgagggagacacgcaggtgtgtgtccgagtgtgtgtgcatgggtccatgtgtgtatagtgtgtgcacatgggtccatgtatgtgtgtgtatatgagggagacacgcaggtgtgtgtccgagtgtgtgtccatgggtccatgtatgtgtgtgtatatgtgggggagacaggtgtgtgtccgagtgtgtgcatgggtccgtgtatatgcgtgtatatatggggggatatgtagatgtgtgtgtgtatgaacaggtgtaagtggggagcactcaggtgtgtctgtgtgtgttcgtgtacacgtgtgtatgtgtgtgaacatggaggggtgtgtgtgtccgtgtgtaggtttgcgtgcatgcacacatgcatgtgtgtactggggcatccaagcccctggtctccactccataccaccctacgcctacctccttgatctctgcgcccagccttggctgtgctcccctgctgtctgcacgtgggtgtctgcacgtgggtgtctgcatgtgggtgtctgtgccctcaagtgtctcgtgtctgcacgtgggtgtctgcaccctcacgtgtctcgtgtccgcacaagcatgtgtaggtgtccctgctgggctctttggtgggcggccagtgatcctcgaggtcacgcatgtcttctgtgggtgcctgctccttgcaccccacagtgttgagatgggtttgcattggccccgcctgtcccctgctcacccgcctccctctcttcctgcttctaagccccgaaactctggattccggggcccttcacaggtgagcacgtggcagcagtgcctgcagacccctggctggcccatctgtcctcccgcccgtctctctgatctctctctgccaggctgcccctgtctccatccctcttctccctcccactgtcggtgtctgcccacc

SEQ ID NO: 134731 - DNA, 198 bp, Homo sapiens; identical to SEQ ID NO: 58484
  chr1:989209-989407
  hypo

SEQ ID NO: 134732 - DNA, 785 bp, Homo sapiens; identical to SEQ ID NO: 58485
  chr1:990258-991043
  hypo

SEQ ID NO: 134733 - DNA, 30 bp, Homo sapiens; identical to SEQ ID NO: 13750
  chr1:991552-991582
  hypo

SEQ ID NO: 134734 - DNA, 62 bp, Homo sapiens; identical to SEQ ID NO: 102294
  chr1:994998-995060
  hypo

SEQ ID NO: 134735 - DNA, 30 bp, Homo sapiens
  chr1:1008693-1008723
  hypo
gtcaggcacgacctgcggcctgcggggccg

SEQ ID NO: 134736 - DNA, 30 bp, Homo sapiens; identical to SEQ ID NO: 58488
  chr1:1017100-1017130
  hypo

SEQ ID NO: 134737 - DNA, 255 bp, Homo sapiens; identical to SEQ ID NO: 58489
  chr1:1018239-1018494
  hypo

SEQ ID NO: 134738 - DNA, 128 bp, Homo sapiens; identical to SEQ ID NO: 58490
  chr1:1019319-1019447
  hypo

SEQ ID NO: 134739 - DNA, 30 bp, Homo sapiens; identical to SEQ ID NO: 58491
  chr1:1019987-1020017
  hypo

SEQ ID NO: 134740 - DNA, 30 bp, Homo sapiens
  chr1:1020723-1020753
  hypo
tcagaacccgcccccgcctgaaggcaccac

SEQ ID NO: 134741 - DNA, 30 bp, Homo sapiens; identical to SEQ ID NO: 13753
  chr1:1022515-1022545
  hypo

SEQ ID NO: 134742 - DNA, 93 bp, Homo sapiens; identical to SEQ ID NO: 58493
  chr1:1022917-1023010
  hypo

SEQ ID NO: 134743 - DNA, 30 bp, Homo sapiens
  chr1:1023232-1023262
  hypo
cacgccgagcaccccggccccgagtactcc

SEQ ID NO: 134744 - DNA, 414 bp, Homo sapiens; identical to SEQ ID NO: 58494
  chr1:1024246-1024660
  hypo

SEQ ID NO: 134745 - DNA, 30 bp, Homo sapiens
  chr1:1026240-1026270
  hypo
ggtgctggcacttacggtgtgtgtgagggc

SEQ ID NO: 134746 - DNA, 328 bp, Homo sapiens
  chr1:1046071-1046399
  hypo
acgcccgccaaacacgtgcacaaaaataggcccaactcttcagacagcggaaacccacccgggcgccctcagagacgacgagcacgcaacagcgcatcccacacccactccttgtgcagcacctcagaggaagctcaacaacagttctctgcgtgagccgtggcagacgcaaaaccgcccgcacgtgtgactcctaacactcagagtgtcggtaaaatcacagcagcgctcctgtctggcgcggcaggcgggcgctggagcagcctgcgaggcaatctccatggatcacaggcagattctacatcacgacaggagtctggtgaatcct

SEQ ID NO: 134747 - DNA, 1291 bp, Homo sapiens; identical to SEQ ID NO: 58496
  chr1:1046996-1048287
  hypo

SEQ ID NO: 134748 - DNA, 350 bp, Homo sapiens; identical to SEQ ID NO: 58497
  chr1:1049842-1050192
  hypo

SEQ ID NO: 134749 - DNA, 131 bp, Homo sapiens; identical to SEQ ID NO: 102300
  chr1:1052181-1052312
  hypo

SEQ ID NO: 134750 - DNA, 30 bp, Homo sapiens; identical to SEQ ID NO: 58499
  chr1:1053885-1053915
  hypo

SEQ ID NO: 134751 - DNA, 30 bp, Homo sapiens; identical to SEQ ID NO: 58500
  chr1:1061506-1061536
  hypo

SEQ ID NO: 134752 - DNA, 30 bp, Homo sapiens
  chr1:1062654-1062684
  hypo
gaataagcttttccgcgtggatgctttatg

SEQ ID NO: 134753 - DNA, 671 bp, Homo sapiens
  chr1:1062953-1063624
  hypo
ggacagagtggggctgagcagcggccacgggaagccaccggccacccagacccccgtcctccccgggtgctgccctgggcctaggtggccaggtctggggggccgataccacgggctacgcccagccccacccggctcctgtgtggtgtcaggggctctggcatgccggcaggccagtgctctcgtgagaggtgggtccccaagccggccccagcgaaactcagttaaaggacgagtctgcttttgggccttatgtttcccaactccatgggcagagccacagggccgctgcctcctccaccgtggctggagacaaggcggccccgggtctctgtgaagccctggccacgttcagccgcagggccctgggtgtcatcgccaccgccccactgtggcccaggactggggctttggtggcccgtgctgtgggagtgggggcagccagcagccagggtcacaggcctgagcctcggacaagcacagaaggacccccaggtctggtgctcgtgctgactgccaagggcagcgactgcaagacgggggtgcaggtttcgggcgtggcgcgggctgcgtcgggttctggcattcaaacatatcatgcgggaccaggcctggggttacaggtggggcgggcgcgcaggagaggggagccgtcccggagccgctctgca

SEQ ID NO: 134754 - DNA, 267 bp, Homo sapiens; identical to SEQ ID NO: 58502
  chr1:1064885-1065152
  hypo

SEQ ID NO: 134755 - DNA, 588 bp, Homo sapiens
  chr1:1065878-1066466
  hypo
tggtgccaggtccaccgtggccgcctgttctcacccgaactctgagctgtttccctgaagttaataatcgcctttgcttttcttcttgcttagctttctctgaactcattactaattcagcctcagactctcccccatgacttaaattccggcacgccaggtatttctgaggggcctccgggagcctcctgccctgcccggggctggtcggctccctcgggcctggggcagggctggcgtcttgcaggcttcgtggtccgtgtcacaaaggtcccattgcttctcccctgggtgggattttcccgggccccacacctcccctttcttgtcttctcagtgttttggtggaacaagcccctcgcagctccccgtgaggtgcagggggtgggcccccaccacgcccacagctgcagctgcctgtgaagggcacagggcgggcccccaccaaggccttcgcttccctgcgagttgagaaaacctcgccgcagggtccccggctcccgaggctgctgtgggtccggcaatggcatcccaaccccggggccttggtatggaacctgtttctgcgggttttttcctgaaagtttt

SEQ ID NO: 134756 - DNA, 100 bp, Homo sapiens; identical to SEQ ID NO: 58504
  chr1:1066720-1066820
  hypo

SEQ ID NO: 134757 - DNA, 129 bp, Homo sapiens; identical to SEQ ID NO: 58505
  chr1:1067696-1067825
  hypo

SEQ ID NO: 134758 - DNA, 30 bp, Homo sapiens
  chr1:1068165-1068195
  hypo
ctcaggcggcctctgcgcaggtccgtcccg

SEQ ID NO: 134759 - DNA, 30 bp, Homo sapiens
  chr1:1068726-1068756
  hypo
tcctgccaaggatgacgctccggctgggtg

SEQ ID NO: 134760 - DNA, 317 bp, Homo sapiens; identical to SEQ ID NO: 58506
  chr1:1069738-1070055
  hypo

SEQ ID NO: 134761 - DNA, 31 bp, Homo sapiens; identical to SEQ ID NO: 58507
  chr1:1074034-1074065
  hypo

SEQ ID NO: 134762 - DNA, 58 bp, Homo sapiens
  chr1:1079128-1079186
  hypo
gccccgtgtctgagggcgcggctgtgtggagtggggtcccctcggccaggcgggaaag

SEQ ID NO: 134763 - DNA, 150 bp, Homo sapiens
  chr1:1080475-1080625
  hypo
tcaccccacagccccccgctcctcccctccacacccaaccacagtccctcctggctgacaccgtggcccctcctggcctgtgctccccgggaacctcagtcagtgtcacttgaactccagcaccggacctggccccgtccatccagcctc

SEQ ID NO: 134764 - DNA, 30 bp, Homo sapiens
  chr1:1083631-1083661
  hypo
gccgaggtgccggtgcgtccctgggttgcc

SEQ ID NO: 134765 - DNA, 172 bp, Homo sapiens
  chr1:1084061-1084233
  hypo
gccttcctagggccacgaggacctgagccccgcgtgcgacgtcctggcccggaacctgcgagggcgtcggggaatggcccaggcacgtcccgggctgatggagatgaaagaaaataatggctcatcatgtgacccgggtcctgcctacaaatggggacgaggtgtgggaagg

SEQ ID NO: 134766 - DNA, 30 bp, Homo sapiens
  chr1:1086762-1086792
  hypo
cggcacccagatctcgggctccaggcccct

SEQ ID NO: 134767 - DNA, 30 bp, Homo sapiens
  chr1:1091228-1091258
  hypo
cttcgaagctttaatcggatggttgaacat

SEQ ID NO: 134768 - DNA, 114 bp, Homo sapiens
  chr1:1091615-1091729
  hypo
ttcccagcctccagacgccttgtccccatctccatccaccccctccatttccccggcaccagcaccccagcccgctggttcccaggaatgcctgtgctccggtggctgagtggg

SEQ ID NO: 134769 - DNA, 154 bp, Homo sapiens; identical to SEQ ID NO: 58510
  chr1:1094262-1094416
  hypo

SEQ ID NO: 134770 - DNA, 504 bp, Homo sapiens
  chr1:1094748-1095252
  hypo
atgctgccaagctcccgcttctccgagcagctccacacaaggagcagaggcagctccagttccacagccagacacagtcattttccctctactcaggaattaggcaggatggtgtggggcctgagtgtcaccatgaagccgggaagcaggtgttcagccagacgcaaatattcctcctcaaagccaggggagcggccacagtggattttattatggggcgacgggggcacgcccagtgccccgccactctccatgtccacagcagcgagggtggagggccctgtgctgtgcagggcagagctcggctgcacctgggccaggacacagctgcccaggtgggaggaaccgtggacggggctggggccttcctcgtcccagggctggtgagctgctcgctcactgtttctcagttccaggtagacacagtttataattctgcagaaaactctggggccttttgcctttgtgttttcttttttgagacagggtctgactctgtggccc

SEQ ID NO: 134771 - DNA, 564 bp, Homo sapiens
  chr1:1095491-1096055
  hypo
atggtgttttaccactgaggtcagagggcagacgttgctccaagcgtttcgtctgcgggtggagctttggaactgatggagaaggcagagtcctgaccaggggccgccatcagagcgcagggacggtcgggggggatgcgcagggaggagggaagggaaggaaggaggtgccaagccctccgctcagtggaggtcagtggaggtttgcttcctgctcacactgggcctgattgggtcggagggcacgcgggggccgctgtctgtcctccgtggggccttggcttgtgtccaagggagggagacagtagagggacccacggctctgtgaggcgttccctggcatgacctcacctgtgtgctctctctccctgtctcagtcagagctgaacccaggctcctgtggaccaagagggggtccaggaagaactgctcctgggacccggacagagcggaggccgtgtgcacgagcagcgtggaccagaggggcctcgggggccacctgctccgtccgaccaggcaccagtccttccagactcgcctgaggatgcccgtgggccccagcga

SEQ ID NO: 134772 - DNA, 504 bp, Homo sapiens
  chr1:1096414-1096918
  hypo
ccgaagcccccagaccgggccctttgcccctcctgccccccggctctccctactgcccagagcctccgccagcacccagggacccacgtccacctcccagagcggccctgcccagggtccttccctgccctccacgattctccgtggcccttggagaaagagcagcttctccccaggctctgcccccagcccttccaccccagagcctctgcccagacgtcccgtcccatcccggggggctgtcacgcttccgccccacctctcgcccattcccggacagtcacagccgtggaacaacgcagcgtgtggacacagccccagggaagcttgactctgcctggtccccatggcgtgcggtggctcaccagccgcccccatcgctccatgaaatctgactacacctgtcccaaaaatcaaccagctcccaggcaggtcccgccgtgcagggggccaagggccacacctgggaccagtgagtgaggcggcgtgcgggtagtgggggtg

SEQ ID NO: 134773 - DNA, 261 bp, Homo sapiens
  chr1:1102200-1102461
  hypo
agaggggtgggggcagagggccgagcggggcgggcagagggcccgtgtcagccccactccgacctagtcctcggccgtctggccaggacacttcggccccccaggtgcccaccccaggacccaaagctggtggctgctggactcggcagggctggcgggtggggctcacccgggcccctgccctccggcgatgctgtcctcagtgccccaggaggacgaggccccccagctactgagcttcccagcgagtcccatgcaacc

SEQ ID NO: 134774 - DNA, 30 bp, Homo sapiens
  chr1:1110974-1111004
  hypo
gagctctctgcctcccgtcacccccacagt

SEQ ID NO: 134775 - DNA, 241 bp, Homo sapiens
  chr1:1111232-1111473
  hypo
tggagaggctgctgccgtgcaggtggagagaggctgccgctgtgccggtggagaggctgctgctcccagccgctgtgcaggtggagagaggctgacgctgtgcaggtggaaagaggctgacgctgtgcaggtggagaggctgctgctcccagccactgtgcaggtggagagaggctgacgctgtgcaggtggagaggctgacgctgtgcaggtggagagaggctgccgctgtgcaggtgga

SEQ ID NO: 134776 - DNA, 30 bp, Homo sapiens; identical to SEQ ID NO: 58514
  chr1:1114157-1114187
  hypo

SEQ ID NO: 134777 - DNA, 86 bp, Homo sapiens
  chr1:1114508-1114594
  hypo
ctggggcctcgggccgcgcggaggtcccacaggagggtcagagcggcatcttcccttcagggccctcgcccgggcaccccccggcc

SEQ ID NO: 134778 - DNA, 30 bp, Homo sapiens; identical to SEQ ID NO: 13762
  chr1:1115714-1115744
  hypo

SEQ ID NO: 134779 - DNA, 24 bp, Homo sapiens
  chr1:1126993-1127017
  hypo
ggggagaccctaacccggcggcgc

SEQ ID NO: 134780 - DNA, 39 bp, Homo sapiens; identical to SEQ ID NO: 58517
  chr1:1140774-1140813
  hypo

SEQ ID NO: 134781 - DNA, 301 bp, Homo sapiens
  chr1:1145590-1145891
  hypo
gagggacacagatgtcgcttagacgcccggggtgtcttccctgcgggaagcctgcagggctgctcccgccttgttcccgagctgtggcctcgggcgtgactggcgctcgggagcaggctctgtgctgctcgaaggataccccactcccagacaccagcttgagaagattcccgcacggccggggacggccccagggccttgggagcgtctgtggacacctgtggtgtgggccgaggagctgggagctcatctgaacacgccagcactcgcgcatccacgctgctggcggatgcctgggttt

SEQ ID NO: 134782 - DNA, 156 bp, Homo sapiens; identical to SEQ ID NO: 58520
  chr1:1146762-1146918
  hypo

SEQ ID NO: 134783 - DNA, 129 bp, Homo sapiens
  chr1:1148327-1148456
  hypo
cgctatgcacacccccaaccgccggccgcagccaccgagctcaccaactccaggcttgtagctgtccaggggctgggtgcccgcccggcagcggcagactgtgtcctgtgtggccgtgcacagctgctt

SEQ ID NO: 134784 - DNA, 30 bp, Homo sapiens
  chr1:1148662-1148692
  hypo
acctggggctggttccgtggcagccccagc

SEQ ID NO: 134785 - DNA, 262 bp, Homo sapiens; identical to SEQ ID NO: 13766
  chr1:1151686-1151948
  hypo

SEQ ID NO: 134786 - DNA, 377 bp, Homo sapiens
  chr1:1152899-1153276
  hypo
cctcgtgcacgctgcgcgcgtagtccaccagcttgctgcccgtgaagaactcgctgtacttgagcacctcctcgggctccaggtggtggttctggttctcgtcggcgacggcgatcatctgcttggcctcgttcagcgcgttgtactcgttcatggggtccatgtagctctgcgggcgagcggggcacaggtcagcgtcgcctttccccctccgagctccgcggccagccgcacgaagtggctatttaaggtgcctattggctgcagcgggagtgtgggcacgttctggaaggttcccgaagggaggcggcacaaatgaaaacacagggcagggagaagccgggggccccggaaggcctgcccggggccagcagggg

SEQ ID NO: 134787 - DNA, 69 bp, Homo sapiens
  chr1:1153574-1153643
  hypo
ctgtgagaaccctgacgcctccgcaaggggctgaggatggagcccggccaggctcgcctgtctctgatc

SEQ ID NO: 134788 - DNA, 30 bp, Homo sapiens; identical to SEQ ID NO: 58522
  chr1:1153909-1153939
  hypo

SEQ ID NO: 134789 - DNA, 30 bp, Homo sapiens
  chr1:1154303-1154333
  hypo
tgtgctgagaggggcgcagcctgtgggtat

SEQ ID NO: 134790 - DNA, 255 bp, Homo sapiens
  chr1:1154785-1155040
  hypo
caccccccacacccgcgcctgcccctctggaggagcggaatcaccctgaaggctgacgtgcgcacggcgccgcggggcgaaggactcactgcccttttccgtttccttcacgtgtgacgtcacagggaggaaaacacagtttctagaaatgactgagactggggctgagcagagcttcccaggaaccctcccagccgggacacggcactgcctctgggtgtgtggcccccgctctcctgccgtgcccacccggcc

SEQ ID NO: 134791 - DNA, 30 bp, Homo sapiens; identical to SEQ ID NO: 58523
  chr1:1155457-1155487
  hypo

SEQ ID NO: 134792 - DNA, 30 bp, Homo sapiens; identical to SEQ ID NO: 58524
  chr1:1155716-1155746
  hypo

SEQ ID NO: 134793 - DNA, 579 bp, Homo sapiens
  chr1:1160632-1161211
  hypo
gaggtcttgagaccccggctggtgcgtttgccggaggcatccccgagagtagggtgccctggccccttgcctctatgctccgctcaggggcagccgcggccacgttatgaggtggcaagcaggccctcgtcaggcaggtgtggcctctgggacctgggccaggcaagcttcgagggtgcacacaccgcaggcacggctcagaagcactgggcagagatcctcatggaagaaggccaggctgccgctcacacgcgcccctccctcagcagccgcagcagcccagaggtggacgggcctgggaggcaccctcagctccacagtccccaaaacacaccggctggggacggggccacccgggtggccatgtggcaggtggggcacctggtgggtctcacgtggacacgtgcatcctcgaatgctccggtcacgctccacacgcgccacagacacaggccacacgctccacacgccacagacacgggccacacactccacatgccacagacacgggccacacactccacacgctctacacactccacagacacagacacacacgaggcagagcaaaaagcaaaa

SEQ ID NO: 134794 - DNA, 30 bp, Homo sapiens
  chr1:1163656-1163686
  hypo
ctctgggctgccagcgcaggcctccgcgca

SEQ ID NO: 134795 - DNA, 1209 bp, Homo sapiens
  chr1:1168239-1169448
  hypo
gggggggcgctggcgcgaggccgcctggcaactctgcgactactacctgccctacgcgctgggcggcggctacgtgctctcggccgacctggtgcactacctgcgcctcagccgcgactacctgcgcgcctggcacagcgaggacgtgtctctgggcgcctggctggcgccggtggacgtccagcgggagcacgacccgcgcttcgacaccgaataccggtcccgcggctgcagcaaccagtacctggtgacgcacaagcagagcctggaggacatgctggagaagcacgcgacgctggcgcgcgagggccgcctgtgcaagcgcgaggtgcagctgcgcctgtcctacgtgtacgactggtccgcgccgccctcgcagtgctgccagagaagggagggcatcccctgagccgccgcggcccggccctccgggacacctgcttcacccggcggcgccttggggcaggtgccgagcgggcgcactacgcccgggccccaaggcccccgtcccgcagccacgcttgtggtcgctgcgtcccggtctgcgtttgggagacccctgggggttgccggggcagcgcgccgtgtccaggtggaggtgcccgttcctggacctcagcgagcctgagccgggcccggccgcacgctgacccccgtgctgtccccgaccggctcacggggctgggctccgatcttccgtgtctcttatcagtggcgtttctcacgtctgcgtctcagatctaacgtggtttcacatcaatccgctttcatgggattttggtctctgtccagtgacttcgtggtaaatgtaactcagtgtttgcttgcgacttatttataaatattgtaagtttgtgtcgatgagtgtaagttggcagtgcgcacgtctcggtttttttacatgatttaaggaaagacttttatgtcagaacttggtgcctgtaccgtcaaccccgctgctgcccgtgtttaaacgcaggagaactttaaaactggccatctatcttttcagtgtacaagtcactgaacccattgtttctttctgaagagactttcctttcaaggcttcccatgggtccgcgccacacagggccggtgctgctttatttcagactctgccccaggttccaggaatccgaaccccggagtgctgacgcggttccccaacttccgccttaagaaaacaggaccagccggcaccaggcccgt

SEQ ID NO: 134796 - DNA, 30 bp, Homo sapiens; identical to SEQ ID NO: 13769
  chr1:1170054-1170084
  hypo

SEQ ID NO: 134797 - DNA, 30 bp, Homo sapiens
  chr1:1171961-1171991
  hypo
cctccgcacccagagcggggccgggaggag

SEQ ID NO: 134798 - DNA, 30 bp, Homo sapiens; identical to SEQ ID NO: 58529
  chr1:1178030-1178060
  hypo

SEQ ID NO: 134799 - DNA, 192 bp, Homo sapiens; identical to SEQ ID NO: 102304
  chr1:1181913-1182105
  hypo

SEQ ID NO: 134800 - DNA, 56 bp, Homo sapiens; identical to SEQ ID NO: 102305
  chr1:1182226-1182282
  hypo

SEQ ID NO: 134801 - DNA, 30 bp, Homo sapiens
  chr1:1189782-1189812
  hypo
ggcttctggcccaccggacataaggaattc

SEQ ID NO: 134802 - DNA, 867 bp, Homo sapiens
  chr1:1190080-1190947
  hypo
ggccgtcactggccccgctaagcctcatcaccacacggccaggccagaccagcacccgcggacgccagctccacccctgggccccgaggttcccacccgctgaggagccgggagctccgagaaacgcgccaggagctccaagaacgcaggagcagcccgcggtcggcagcaagtttgcatttctaagtgaccacatctaataaaatgaaaaacgggtttactaaaacaggtccaaagacaacacggaagataagctacaaatccagcacacaaggcccacccacaccagccccagcggcccgtggccaggacagggctgaggctccagtctcctccaaagcccagtcacacattttggtttttgcttcccctttcaggtttttaaaagctaaacctaggagcctggtgggtctgcctgtgctgggcagtgtgtccagcctgccgaggtcacgctctggtgcgcggtgccctcagtggcgccttgggtctcggcgcctgggcctcactcctgcgcgatgctcctcagcacgtacttgaccgtgtaagcaaaggctgcaaacccaactatcacaaacaagttcgccagggcgccacccaggagtccgtggtgccggttggcctgctggagccctgcgaggtttgggacggcccccggcgcatgcccgttgagcagctgaatcccgttctggacgaggtgcgtctccccgtctggaaccacgtctggcaaggggagagtctggggtctgctactgagttcgtcttgtgctttctgtttttgtttaatctcctaagagaaaaacagcgagaaaagcagctggtctccaaccagcgcctttcaggaccagcactcccgttctcaggagtcca

SEQ ID NO: 134803 - DNA, 403 bp, Homo sapiens
  chr1:1194375-1194778
  hypo
tgcatgccatcaggacgcgtgtgtgcgtgtctgagtgtgtgcatgccatcaggacgcacgtgtgtgcatgtgtgtgtgcatgccatcaggacgcacgtgtgtgcatgtgtgtgcatgccatcaggacgcacgtgtgtgcatgccatcaggacgcgtgtgtgcgtgtctgagtgtgtgcatgccatcaggacgcacttgtgtgcatgtgtgtgtgtatgccatcaggacgcatgtatgtgcgtgtctgcatgccatcaggacacgtgtgtgtgcatgtgtatgtgcatgccatcaggacgcgtgtgcacgtgcgtgccatcaggacgcatgggcgtgggcatgtgtgtgcgtgccatcaggacacgtgcatgcgtgtgtatgcgtgtgcatgccatcaggtttg

SEQ ID NO: 134804 - DNA, 210 bp, Homo sapiens; identical to SEQ ID NO: 58533
  chr1:1200458-1200668
  hypo

SEQ ID NO: 134805 - DNA, 30 bp, Homo sapiens; identical to SEQ ID NO: 58534
  chr1:1203152-1203182
  hypo

SEQ ID NO: 134806 - DNA, 59 bp, Homo sapiens
  chr1:1206787-1206846
  hypo
gctaagtggccaggccgcaggtttaacgaaagttcatggacagccgcgcaaaaataaaa

SEQ ID NO: 134807 - DNA, 31 bp, Homo sapiens; identical to SEQ ID NO: 13772
  chr1:1218648-1218679
  hypo

SEQ ID NO: 134808 - DNA, 191 bp, Homo sapiens; identical to SEQ ID NO: 13773
  chr1:1221480-1221671
  hypo

SEQ ID NO: 134809 - DNA, 31 bp, Homo sapiens
  chr1:1222236-1222267
  hypo
gcagagccgccctctccgccactgtcccccg

SEQ ID NO: 134810 - DNA, 25 bp, Homo sapiens
  chr1:1223585-1223610
  hypo
tgtctctgctccgtcccgtgtctct

SEQ ID NO: 134811 - DNA, 752 bp, Homo sapiens
  chr1:1228253-1229005
  hypo
aagtggcaaagtggctttatgcgcaggctctgggccgagtaccaggagaaggtgcctccggaggaggccgggatgcggctggggctgtctggcacggggaccttcgtggccagccacgtggccttgggacgcccgcgtccagccagggctgaggacccaggccagagcccctcccgcccagcacccgcgacgccagcctggatgctggggtcactaagtgaggtactcgttggttccctggatgggccaccctttctgccctgggaggaggctctggggtgtgcaggagggagccagctaacaggtcagtgttctgggcagaagtggggcacgaagtaacacaggccctgaggacacagggacacaggtgacacgggccttaaaagtggcttgtgacatgagcaacccaggcccctgaaaaggggtgacctgaagacagaggttccccaggtggggtgagggacacccgacgatgcagcacccccccagggaaacgtgaggcttcaagagactcagtgtggggccctcgctctcctcctgggcgagcagggccgcggcgccccagcactggggctgccaggtatcgacccgcgggtcacacgcagggccgcggccgggtgggcgccagggacttcggggcatgcggggcgtcgggccgggcggggtggcagctgcccggcctgcccggccctagctctcttccaggtggaggctgatgaactcctggatacacctgcggaactggagctccg

SEQ ID NO: 134812 - DNA, 30 bp, Homo sapiens; identical to SEQ ID NO: 58538
  chr1:1229775-1229805
  hypo

SEQ ID NO: 134813 - DNA, 30 bp, Homo sapiens; identical to SEQ ID NO: 58539
  chr1:1230058-1230088
  hypo

SEQ ID NO: 134814 - DNA, 30 bp, Homo sapiens; identical to SEQ ID NO: 58540
  chr1:1231863-1231893
  hypo

SEQ ID NO: 134815 - DNA, 31 bp, Homo sapiens
  chr1:1232281-1232312
  hypo
cgtgggcagatggtgccgagcacactcccac

SEQ ID NO: 134816 - DNA, 504 bp, Homo sapiens
  chr1:1234769-1235273
  hypo
aaagccagtgagtgacggctgccaactcctggtgactggtggacccgtccccaactcctggtgactggtggacccgtccccaactcctggggggctctcccctatcccaaaatagccactcctgcctgcagccaacctctgcccgggatggtggccggggctgctgtcccacaggcaagcaaaggccccgcaaggagccagtgactgaggccacagaggtgaccaccgcctcaaaaggagatcccagcagcggccccacccacacgtgcccctccactgcacacatcaaagggagcagccttggtcccctagagagggtgtgggcagggcaggtgggagacaggcaggaggaaggggcggggagggtgtgccgggcatggggtgaggacgcaggggcctcccaggcgcctggtgtgcagggagccggctgcgcggcctcacccgctgctggatggcggcgtgctttcgctccatctcacgcttttccaccgcagagtcgatcac

SEQ ID NO: 134817 - DNA, 326 bp, Homo sapiens; identical to SEQ ID NO: 58542
  chr1:1235845-1236171
  hypo

SEQ ID NO: 134818 - DNA, 496 bp, Homo sapiens
  chr1:1238230-1238726
  hypo
cttcaggtgagccagcgcagctcggttccaggccaggcacagcccacaggtggcagggaggccgcgctcaccatgtggtagttcaccacctcctgtaggctgtcagcgaacctctgcagacattcctggaggagcagatgggaacccgtgctgagatggcaaatccgggcccaggtcacccagccacgccctctgagcccctgggcggtgcagacaccggcctgcttctggcctggacgccctcaaggggctgcctccctcggcctctcccccaaccccaccttgaggtcagaggtcagtcggcccctcaccgagatgacggtgtcgccctggcactgctgggacaggtcgcggacgccgctcacgaaaagcctgctggtgctgacgtaggccttaccggcttccaccatgccactgcacagcttcaccagctgtgggccagcggggcgtggtgagcacagtgggcactggcgcctgcactcgccaccacacacgg

SEQ ID NO: 134819 - DNA, 753 bp, Homo sapiens
  chr1:1239012-1239765
  hypo
tggggctcatggacacggctcccctctccacggcctgttgccccctctttctcagcccatgtggggctcatggacacggctcccccctccacggcctgttgccccctcccctttctcagccccagccccagccacaccaaggctcagcccacacagcagctgtccccgtgtcaccagcccagcagaggggacgggcagccaccgtgggtcggggactcaccacagcccagcccctcccagatgggacgagactcagggccagccacatgtgtgcatgtgacatgtgcaccctggaacacacatgctaagacacagggaccaggacctggagcaccacacgcatgctccacatatggggggtgtaagtggcttagtaaggcctggagggcgagtctggccatgtggccatcccaagcttggccgggcacagggcgctccaggcccgcccttcaccttgtccagtttggcctcaatctccaccacgtccgtctccacctcgtcaatggtcgccctaaagcaagaacggggctggctggggtcacctgcagcctcagccccctcggggcttcacctccccccgcacctccctgaggggctccaccatgggaaggggctttcaggaaacaggctgggagacagacgcctgcctgctacgggggcaggactgggaccaggttcagtgcacttccccccgcccccccaaccccaggcaggcagaggcagccgctgctgtgccctcggggaagaaggctg

SEQ ID NO: 134820 - DNA, 293 bp, Homo sapiens
  chr1:1246136-1246429
  hypo
gctctgggtcgtgggcggctctgggtcacaggtacggaggatgacggctgtgctggtgggtcacgggcggctctgggtcacaggtacggaggatgacggctgtgctggtgggtcacgggcggctctgggtcacaggtggctctgggtcacaggtacggaggatgacggctgtgctggtggccgtggggctgggggctttggcacctgcccaggtgaagacgattctggagagccaagatcccctgggcaagcaccagacacgtgtagccccagcccacggcttattcctcaag

SEQ ID NO: 134821 - DNA, 643 bp, Homo sapiens
  chr1:1247719-1248362
  hypo
gcttgctctgaggacaccagccggaagttctgtggggcagggacaggtcagtgagcgcagcagcggccctcccccctccagagaccgtcctggcactcacgctgtccttcatgatcagggtgccgtgcaggagccgaggcttcttggcctcagggagcagccctgcggaggaggtggcaggagccatcaatgtgagggccgctcccagccgcctgccccgagcaccctgccctgccctgcccagcccgcataccctgcgccatctcccgcttcagcagccccagcgagatgcctacggggatgctggggcttgtgggcagcgtcaccgtctcgccattggccggcatgtagcagttgacccctggaccccgggggaagagagagcctcagcccaggctgcccgtgctgacccgaggtgggccccacgccgcccgcccggctgcctacggagctcctgctcgatcttctgcttcaggaactccatcttcttggcctcgccatgcaccagcagcacgctctccggctctgcctggcccaccagctgcatgatgcccttggcgtccgcgtgtgcgctgaatgacatgtactccacctgcatcttgacctccagctacagaggccacggggcgtggacagtggttac

SEQ ID NO: 134822 - DNA, 30 bp, Homo sapiens
  chr1:1249352-1249382
  hypo
gggcaggactcggccgggtcacccccaaca

SEQ ID NO: 134823 - DNA, 137 bp, Homo sapiens; identical to SEQ ID NO: 58547
  chr1:1253109-1253246
  hypo

SEQ ID NO: 134824 - DNA, 17 bp, Homo sapiens
  chr1:1253545-1253562
  hypo
ggccaaggcaaataaaa

SEQ ID NO: 134825 - DNA, 30 bp, Homo sapiens; identical to SEQ ID NO: 13779
  chr1:1254213-1254243
  hypo

SEQ ID NO: 134826 - DNA, 30 bp, Homo sapiens; identical to SEQ ID NO: 58550
  chr1:1257566-1257596
  hypo

SEQ ID NO: 134827 - DNA, 34 bp, Homo sapiens
  chr1:1258112-1258146
  hypo
tgggtagggggaccggcggcggggggggtagcca

SEQ ID NO: 134828 - DNA, 30 bp, Homo sapiens; identical to SEQ ID NO: 58551
  chr1:1262803-1262833
  hypo

SEQ ID NO: 134829 - DNA, 30 bp, Homo sapiens; identical to SEQ ID NO: 58552
  chr1:1263080-1263110
  hypo

SEQ ID NO: 134830 - DNA, 237 bp, Homo sapiens
  chr1:1264862-1265099
  hypo
atgcttgtgccgtttgcgtgtcccaagtgcgagtgtgctatttgcgtgtgccgcacgtgtgccgtttgcatgtgctgtttgcatgtaccatgtgcatgtgtgccatctgtgcaatgtgcaggtgccagttgcatgtgccatgcgtgttggccgtgagcgtgtgctgttttcgtgtatgtgccatgcacgtatgtgctgcgtgttggccgtgcacgtgtgccacgtgcatgtgtgcca

SEQ ID NO: 134831 - DNA, 210 bp, Homo sapiens
  chr1:1265339-1265549
  hypo
gtgtgtgccatgcgcgtgtgccatgcacttgccgtgcgtgtgccatttgtgtgtaccatgcgcatgtgccattcgtgtgcaccgtacacgtgtgccatttgcatgtatgctgtgcacgtgtggcatgcatgtgtgccgtttgcatgccatgcatgtgttccttgcgtgtgccgtgcgtgtcccatgcacgtgtgccgtgcatgtgccatt

SEQ ID NO: 134832 - DNA, 1322 bp, Homo sapiens
  chr1:1266863-1268185
  hypo
gaggaggctggcctccgcagccggacacggcccagcagccctgtgtgcaccaggtacagaggtgggacggcctgggtcggggtcagggtgaccaggtctggggtgctcctgagctggggccgaggtggccatctgcggttctgtgtggccccaggttctcctcaaacggcctgctctgggcactggccatgaaaatggccgtggaggagatcaacaacaagtcggatctgctgcccgggctgcgcctgggctacgacctctttgatacgtgctcggagcctgtggtggccatgaagcccagcctcatgttcctggccaaggcaggcagccgcgacatcgccgcctactgcaactacacgcagtaccagccccgtgtgctggctgtcatcgggccccactcgtcagagctcgccatggtcaccggcaagttcttcagcttcttcctcatgccccaggtgggcgccccccaccatcacccacccccacccagccctgcccgtgggagcccctgtgtcaggagatgcctcttggcccttgcaggtcagctacggtgctagcatggagctgctgagcgcccgggagaccttcccctccttcttccgcaccgtgcccagcgaccgtgtgcagctgacggccgccgcggagctgctgcaggagttcggctggaactgggtggccgccctgggcagcgacgacgagtacggccggcagggcctgagcatcttctcggccctggccgcggcacgcggcatctgcatcgcgcacgagggcctggtgccgctgccccgtgccgatgactcgcggctggggaaggtgcaggacgtcctgcaccaggtgaaccagagcagcgtgcaggtggtgctgctgttcgcctccgtgcacgccgcccacgccctcttcaactacagcatcagcagcaggctctcgcccaaggtgtgggtggccagcgaggcctggctgacctctgacctggtcatggggctgcccggcatggcccagatgggcacggtgcttggcttcctccagaggggtgcccagctgcacgagttcccccagtacgtgaagacgcacctggccctggccaccgacccggccttctgctctgccctgggcgagagggagcagggtctggaggaggacgtggtgggccagcgctgcccgcagtgtgactgcatcacgctgcagaacgtgagcgcagggctaaatcaccaccagacgttctctgtctacgcagctgtgtatagcgtggcccaggccctgcacaacactcttcagtgcaacgcctcaggctgccccgcgcaggaccccgtgaagccctggca

SEQ ID NO: 134833 - DNA, 30 bp, Homo sapiens
  chr1:1271463-1271493
  hypo
gcatgcggcaggaccgccagctccccacct

SEQ ID NO: 134834 - DNA, 132 bp, Homo sapiens
  chr1:1271745-1271877
  hypo
cggccggacgctctcgccagctgctccccaccccactcggtgccgtgtgatccgattcactgccactgcccccagctcccgccgcccgacgctccttctcacggcccggggcccggcggctgctccgggtgg

SEQ ID NO: 134835 - DNA, 109 bp, Homo sapiens; identical to SEQ ID NO: 58557
  chr1:1272383-1272492
  hypo

SEQ ID NO: 134836 - DNA, 162 bp, Homo sapiens
  chr1:1273360-1273522
  hypo
actctgctgactcccggtgctgccgctgccatagctaaagcccgggtcctggtaggcaggcgggaagcagggtgggggtcccgggtactggtaggggtagccctgacccagaggccagggggcagccgggtggggcagcggggccagcgtgtcctgatccga

SEQ ID NO: 134837 - DNA, 30 bp, Homo sapiens; identical to SEQ ID NO: 58559
  chr1:1274405-1274435
  hypo

SEQ ID NO: 134838 - DNA, 30 bp, Homo sapiens
  chr1:1275122-1275152
  hypo
gggaaacgatctcccgcagcacccgcacgg

SEQ ID NO: 134839 - DNA, 30 bp, Homo sapiens
  chr1:1277484-1277514
  hypo
ctccgtgcctgtctcgttgtccatcccgtc

SEQ ID NO: 134840 - DNA, 113 bp, Homo sapiens; identical to SEQ ID NO: 58560
  chr1:1277897-1278010
  hypo

SEQ ID NO: 134841 - DNA, 30 bp, Homo sapiens
  chr1:1280499-1280529
  hypo
agagtggcccaagcccgcatggcccaccca

SEQ ID NO: 134842 - DNA, 431 bp, Homo sapiens
  chr1:1280780-1281211
  hypo
aggtcccaggcagagccctgccgtccccaccccagccagatgggggagggtgctggaggctggccaggcattgggggcgtacccacaacccggggtccccgcgcctctgtagcagcctccgctgaaactcacggcagctgccaggggcgcccctgccggcactgtgcccccaccttgggattccctgtgaggcctggctaacctgtgtgctgcccccacagacccgccccggggaggaatccactcagaggcagcgccctgggagccagcatggccacacaggatgcagagaaccctccagactcccagaggccacagccagctgccctagacgtggcgtggtcccgaatgcaccccattctcccaaggcggagcaggaagctggcaggggtagctggcccaggacaggcggtgcagagccatcctgtgcc

SEQ ID NO: 134843 - DNA, 30 bp, Homo sapiens
  chr1:1309146-1309176
  hypo
acagcagcaacgggcgggaagggcggcgcc

SEQ ID NO: 134844 - DNA, 30 bp, Homo sapiens
  chr1:1313129-1313159
  hypo
tattggcgacccagcgcacatctgcctata

SEQ ID NO: 134845 - DNA, 30 bp, Homo sapiens
  chr1:1322768-1322798
  hypo
aacgggaagaactccggctccgagacttgt

SEQ ID NO: 134846 - DNA, 38 bp, Homo sapiens
  chr1:1329021-1329059
  hypo
gcagccaggcaggacgcatgcccgtgagcccagccaca

SEQ ID NO: 134847 - DNA, 30 bp, Homo sapiens
  chr1:1344049-1344079
  hypo
ctccagatttaactcgcttcaaatgtcttt

SEQ ID NO: 134848 - DNA, 411 bp, Homo sapiens
  chr1:1354515-1354926
  hypo
cccccctccaagttcaggcagcgcctggggcaggtccccctcaggcatctgggccacctcggcccactgcgtccgcagagtggggctggcccctcggctcagcagaagccccacggtaggcccatgccctcgctctgcagccaggtgtaggggggtctttcggagccagccggtagcatccacctgggcacccctgtccagcaggcagccggcaacctccacgtggccttcccgagaggcgtgatgcaggggtgtgaggcccagggtgtcccgcgcatccacctcggccccctgggtgaccagcaactggacggcaagcaggtgtcctcgggcggcagccctgtgcagcgcagagcggccatgcctgtccctgatgcctgggtctgccccgtggcccagcagcacctcaat

SEQ ID NO: 134849 - DNA, 30 bp, Homo sapiens
  chr1:1356924-1356954
  hypo
gccttggatgtaccccgatgtgcccctgga

SEQ ID NO: 134850 - DNA, 413 bp, Homo sapiens; identical to SEQ ID NO: 58563
  chr1:1377719-1378132
  hypo

SEQ ID NO: 134851 - DNA, 31 bp, Homo sapiens; identical to SEQ ID NO: 58564
  chr1:1380694-1380725
  hypo

SEQ ID NO: 134852 - DNA, 31 bp, Homo sapiens; identical to SEQ ID NO: 13786
  chr1:1385741-1385772
  hypo

SEQ ID NO: 134853 - DNA, 34 bp, Homo sapiens; identical to SEQ ID NO: 58566
  chr1:1388340-1388374
  hypo

SEQ ID NO: 134854 - DNA, 48 bp, Homo sapiens; identical to SEQ ID NO: 58567
  chr1:1389832-1389880
  hypo

SEQ ID NO: 134855 - DNA, 57 bp, Homo sapiens; identical to SEQ ID NO: 58568
  chr1:1390128-1390185
  hypo

SEQ ID NO: 134856 - DNA, 159 bp, Homo sapiens; identical to SEQ ID NO: 58569
  chr1:1400494-1400653
  hypo

SEQ ID NO: 134857 - DNA, 30 bp, Homo sapiens; identical to SEQ ID NO: 58570
  chr1:1410834-1410864
  hypo

SEQ ID NO: 134858 - DNA, 88 bp, Homo sapiens; identical to SEQ ID NO: 13789
  chr1:1421577-1421665
  hypo

SEQ ID NO: 134859 - DNA, 31 bp, Homo sapiens; identical to SEQ ID NO: 17
  chr1:1434134-1434165
  hypo

SEQ ID NO: 134860 - DNA, 30 bp, Homo sapiens; identical to SEQ ID NO: 58573
  chr1:1451119-1451149
  hypo

SEQ ID NO: 134861 - DNA, 30 bp, Homo sapiens; identical to SEQ ID NO: 58574
  chr1:1462958-1462988
  hypo

SEQ ID NO: 134862 - DNA, 30 bp, Homo sapiens
  chr1:1471195-1471225
  hypo
gctggcacctctcccgccacccccggcctg

SEQ ID NO: 134863 - DNA, 30 bp, Homo sapiens; identical to SEQ ID NO: 58575
  chr1:1471923-1471953
  hypo

SEQ ID NO: 134864 - DNA, 30 bp, Homo sapiens
  chr1:1473304-1473334
  hypo
atacacgttctccacgtcaacgtctacgta

SEQ ID NO: 134865 - DNA, 308 bp, Homo sapiens; identical to SEQ ID NO: 58576
  chr1:1476830-1477138
  hypo

SEQ ID NO: 134866 - DNA, 30 bp, Homo sapiens
  chr1:1477916-1477946
  hypo
ggcagcctggtcatcggagcatcctggcct

SEQ ID NO: 134867 - DNA, 30 bp, Homo sapiens
  chr1:1478155-1478185
  hypo
aataacttctgggacgacattttcttatga

SEQ ID NO: 134868 - DNA, 30 bp, Homo sapiens
  chr1:1480588-1480618
  hypo
aggtgcttgctcctcgctgtcccccaactc

SEQ ID NO: 134869 - DNA, 228 bp, Homo sapiens; identical to SEQ ID NO: 58577
  chr1:1487053-1487281
  hypo

SEQ ID NO: 134870 - DNA, 210 bp, Homo sapiens; identical to SEQ ID NO: 13792
  chr1:1491936-1492146
  hypo

SEQ ID NO: 134871 - DNA, 152 bp, Homo sapiens; identical to SEQ ID NO: 13793
  chr1:1492358-1492510
  hypo

SEQ ID NO: 134872 - DNA, 483 bp, Homo sapiens; identical to SEQ ID NO: 58580
  chr1:1494400-1494883
  hypo

SEQ ID NO: 134873 - DNA, 124 bp, Homo sapiens
  chr1:1496747-1496871
  hypo
tcaccgcgccggcccgtcctttgtcttgacgctgtgaacactcgaccaagtgctgcgtcttatctttgggccgcatcttgaaccccgtcttgcttccactgcagtttacggcgatgacttctgc

SEQ ID NO: 134874 - DNA, 30 bp, Homo sapiens; identical to SEQ ID NO: 58582
  chr1:1500078-1500108
  hypo

SEQ ID NO: 134875 - DNA, 291 bp, Homo sapiens
  chr1:1502408-1502699
  hypo
ccctacggacatacacgtgcctctgcaacatggctgcctgcaggatgcccactgccggccttccacagccacaaaagaacagacaagtagaataatccatccatggggcaggacaggccatgcggctccacgcgcacctccgaagatgagtagaggaagcaaaagagcccaagggcaccctgctgcgccaccacacacgtcacccacacacacagagaagatgtgctcatctagtgtacgtgaaacacctgagtcccctgaggctgatgacagctgcgtcagtccttacat

SEQ ID NO: 134876 - DNA, 123 bp, Homo sapiens
  chr1:1519091-1519214
  hypo
gtccacgaggttctgcgtctcggctgggcccagcacagatggtggcagctacgtgagcagctcagtggcacgccgtgcacctgggaatgcagcccgactgggcactcccgccctgcacaccgt

SEQ ID NO: 134877 - DNA, 96 bp, Homo sapiens; identical to SEQ ID NO: 58583
  chr1:1525407-1525503
  hypo

SEQ ID NO: 134878 - DNA, 207 bp, Homo sapiens
  chr1:1552945-1553152
  hypo
ggcttgctggctgcccgtctggtttgctgtgttgtgtctccagtggctttagcttccaacaggaaagcctggtagccgagcgaatctgtgacccaggaagtagcaattaaatgcctgggacgctgcctcgaggctggtgtgtgctctgaggtaagttccgatttgccaaagcacatctgtcgatctgtcgcccgagtcttcacaccc

SEQ ID NO: 134879 - DNA, 30 bp, Homo sapiens; identical to SEQ ID NO: 58584
  chr1:1556692-1556722
  hypo

SEQ ID NO: 134880 - DNA, 30 bp, Homo sapiens
  chr1:1558607-1558637
  hypo
cccgcctttcccaccggcctccctggtgcc

SEQ ID NO: 134881 - DNA, 30 bp, Homo sapiens; identical to SEQ ID NO: 58585
  chr1:1559140-1559170
  hypo

SEQ ID NO: 134882 - DNA, 573 bp, Homo sapiens
  chr1:1562212-1562785
  hypo
gcaggccctgggccgcgtcgggaaggtggtgaaagtgtttggagacgggaacctgcgtgtagcagtcgctggtcagcggtggaccttcagcccctcctgcctggtggcctaccggcccgaggaggatgccaacctggacgtggccgagcgcgcccgggagaacaaaagtgcggcacagctcaggcggccagtgggaggtggggctgcccctggccaccactaacctcagccctgcccccaggctcactgagcgtggccctggacaagcttcgggcccagaagagtgacccagagcacccgggaaggctggtggtggaggtggcgctgggtaacgcagcccgggctctggacctgctgcggaggcgcccagagcaggcaagctcctgaccccgtcctcccatactggccagtctgagagtgaggggcagagggccagggactcacctgctggcactcttggcaggtggacaccaagaaccaaggcaggaccgctctgcaagtggctgcctacctgggccaggtggagttgatacggctgctgctacaagccagggcgggcgtggacctgccgga

SEQ ID NO: 134883 - DNA, 875 bp, Homo sapiens
  chr1:1563170-1564045
  hypo
cgggccctgtgtgagcgcggctgtgacgtcaacctgcccgtgagtgctgctccctggcctgggtgccccctgcccgtgagtgcttgtccctggcctgggttccctctgcccatgtgtgctgctccctggcctgggtgccccctgcccgtgagtgctgctccctgggtgccctggctcttgacccaagcagaagtcacccccaggtgaccactgactccgccccagcaggacgcccactcggacacgcccctgcactccgccatctcggcgggcactggagccagcggcattgtcgaggtcctcacggaggtgccaaacatcgatgttaccgccaccaacagccagggtttcaccctgctgcaccatgcctccctcaagggtcacgcgctgtgagtgtggggtgggcacacagctgcagccggcctcttgctgtgctgcctgggggcagtcccaggtcccagaccaacctccctgctccacagagctgtgagaaagattctggctcgggcgcggcagctggtggacgccaagaaggaggacggcttcacggcgctgcatctggctgccctcaacaaccaccgcgaggtggcccagatcctcatccgggaggtgcggacgcggcccagtcctgcccaaggaccggggagcgggaggcccactggggtccctgggctgagcccgtccccacccctccccagggccgctgtgacgtgaacgtgcgcaaccggaagctgcagtccccgctgcatctcgccgtgcaacaggcccacgtggggctggtgccgctactggtggacgctgggtgcagtgtcaacgccgaggacgaggagggggacacagccctgcacgtggcgctgcagcgtcatcagctgctg

SEQ ID NO: 134884 - DNA, 223 bp, Homo sapiens
  chr1:1597512-1597735
  hypo
cgtggccagcagctcggctgagcctgggtctggaggctgggtggggttgggggactcagcgtcacggtgacatcagccctgcggccagcagctcggctgaccccgggtctggaggccaggatggggcgggggtgctcaacgggacctcggtggtggtgagatcagcccaggggtttgggagctttcagcggggcttgcctgctccctcgtcccttcttttttg

SEQ ID NO: 134885 - DNA, 30 bp, Homo sapiens
  chr1:1602998-1603028
  hypo
ctgatctcagtggccgtgcacagcgccagc

SEQ ID NO: 134886 - DNA, 49 bp, Homo sapiens; identical to SEQ ID NO: 58589
  chr1:1610924-1610973
  hypo

SEQ ID NO: 134887 - DNA, 343 bp, Homo sapiens; identical to SEQ ID NO: 58590
  chr1:1611922-1612265
  hypo

SEQ ID NO: 134888 - DNA, 43 bp, Homo sapiens
  chr1:1612384-1612427
  hypo
gcgcctgccaccacgcccagccgcttcttattcaaacactggg

SEQ ID NO: 134889 - DNA, 30 bp, Homo sapiens; identical to SEQ ID NO: 58591
  chr1:1613896-1613926
  hypo

SEQ ID NO: 134890 - DNA, 30 bp, Homo sapiens
  chr1:1618536-1618566
  hypo
atggaatgacccccgcggtgtcggcctgtg

SEQ ID NO: 134891 - DNA, 273 bp, Homo sapiens; identical to SEQ ID NO: 58592
  chr1:1625719-1625992
  hypo

SEQ ID NO: 134892 - DNA, 194 bp, Homo sapiens; identical to SEQ ID NO: 13797
  chr1:1647564-1647758
  hypo

SEQ ID NO: 134893 - DNA, 39 bp, Homo sapiens
  chr1:1652606-1652645
  hypo
gggtgagcaagactcttgagacaccgtctcaaaaaaaaa

SEQ ID NO: 134894 - DNA, 135 bp, Homo sapiens
  chr1:1668524-1668659
  hypo
gaaattgtgggcaggagaatccgcgtgaaatggacacagcagctcacaagggttcattcggacaaagcccagcagaacaacgtggaacgcaaggtccaaactttttctggtatcgataagaagctcacagccaag

SEQ ID NO: 134895 - DNA, 30 bp, Homo sapiens
  chr1:1669132-1669162
  hypo
tgcacccccacactccgttcaagatgccgc

SEQ ID NO: 134896 - DNA, 30 bp, Homo sapiens
  chr1:1669397-1669427
  hypo
ctgtatggtgctggccgaaggcggcccccg

SEQ ID NO: 134897 - DNA, 45 bp, Homo sapiens
  chr1:1671715-1671760
  hypo
gggctttgtggctgccgctgccgggtgcccaggactaattccatg

SEQ ID NO: 134898 - DNA, 30 bp, Homo sapiens; identical to SEQ ID NO: 58595
  chr1:1683723-1683753
  hypo

SEQ ID NO: 134899 - DNA, 129 bp, Homo sapiens
  chr1:1691802-1691931
  hypo
ctgcctgggacgcacgctgccgcggggcccacactttgcagagcagctcctcggatgactcccccgtggctcctgggacctgaacttcggtgacagcccagggctggggcctccgtccctgctgtgcgc

SEQ ID NO: 134900 - DNA, 30 bp, Homo sapiens; identical to SEQ ID NO: 13798
  chr1:1693353-1693383
  hypo

SEQ ID NO: 134901 - DNA, 450 bp, Homo sapiens
  chr1:1694218-1694668
  hypo
aatgaatgaatgaataaaagacgccagatgaacggctcaacaactttcctagtgatttaaacatggccaggtcacagttaaatcacccagccaggggctgtggcagccgcacgcgtcctggggagaatgctgtcaggaccgctgtgctcctcagggtccagcactgaggctgccctcgtcctaggtgcccgggagcctcccagtcccttcacaaactcagaaaacttgcacacagctggccaggcaacggcccaacaaaatcctcaagtcccaatgcagaagaacggccttccgctgcctcgcagggccagacaaccccaggagagccgtggtgccctgagggctgctccacaggtgacacaggcgtggccatcagtggtcacggacttgtttacctcagccttttaaaaattggtaagtacaggccgggtgcagtgactcacgcctgta

SEQ ID NO: 134902 - DNA, 181 bp, Homo sapiens
  chr1:1706068-1706249
  hypo
ctcccacagtgctgggattgcaggcgtggccaccgtgcgcggtcaccactgtattttttgacaagggtgagtcaggactgacacttaattcatttgtttgatatattaactgctttaaaaggacacacaatgctagctgcaccaaagtgcattcaaattcctcatagcatgaatctaattt

SEQ ID NO: 134903 - DNA, 23 bp, Homo sapiens
  chr1:1713192-1713215
  hypo
accaagcagcctagtataagacg

SEQ ID NO: 134904 - DNA, 550 bp, Homo sapiens; identical to SEQ ID NO: 102333
  chr1:1713454-1714004
  hypo

SEQ ID NO: 134905 - DNA, 233 bp, Homo sapiens; identical to SEQ ID NO: 102334
  chr1:1714067-1714300
  hypo

SEQ ID NO: 134906 - DNA, 91 bp, Homo sapiens
  chr1:1715001-1715092
  hypo
agcaccttgcctggagcagggcggctgggccctgctccgtgaatcccaagtgccctatgggagcctctccggccagggactgccagcctag

SEQ ID NO: 134907 - DNA, 30 bp, Homo sapiens
  chr1:1717008-1717038
  hypo
aaggagtgcggggggcggggcggggggtcc

SEQ ID NO: 134908 - DNA, 98 bp, Homo sapiens
  chr1:1717279-1717377
  hypo
atcccgctacccaagcgtgtagagccgcgcgctgtactgcttccgatatgtgccacagagcagcaacgagaagtggacagagccgcaatggttacaac

SEQ ID NO: 134909 - DNA, 73 bp, Homo sapiens
  chr1:1718794-1718867
  hypo
tcccaggaccctgtcgccacagccatgccatcgtcagtcacgcccaggcagctgacgcggttgtcatgcccag

SEQ ID NO: 134910 - DNA, 281 bp, Homo sapiens
  chr1:1724693-1724974
  hypo
ctccagagctggtgacgatctgattgtcatccaggaatcggcagcaggacaggtaacctggcaaagaacaggcctaagtgatgagctgaatccagcaggccttgcacccagcctcatacatagagaaacacattggcccggtggaagctctacgtctaaggtaagaccagcaccatgctagtgaccttttattcccatctgtgcacacagcagaaggtccacacgcactgctggtgagggtgagagcctggccaggcaggacagcacgtcccacagagacc

SEQ ID NO: 134911 - DNA, 99 bp, Homo sapiens; identical to SEQ ID NO: 13799
  chr1:1729267-1729366
  hypo

SEQ ID NO: 134912 - DNA, 239 bp, Homo sapiens; identical to SEQ ID NO: 34886
  chr1:1737717-1737956
  hypo

SEQ ID NO: 134913 - DNA, 45 bp, Homo sapiens; identical to SEQ ID NO: 34887
  chr1:1747213-1747258
  hypo

SEQ ID NO: 134914 - DNA, 30 bp, Homo sapiens
  chr1:1750545-1750575
  hypo
atctcaaaagagaacgtacgtttagaaata

SEQ ID NO: 134915 - DNA, 37 bp, Homo sapiens; identical to SEQ ID NO: 58606
  chr1:1781839-1781876
  hypo

SEQ ID NO: 134916 - DNA, 31 bp, Homo sapiens; identical to SEQ ID NO: 13802
  chr1:1795941-1795972
  hypo

SEQ ID NO: 134917 - DNA, 18 bp, Homo sapiens
  chr1:1839748-1839766
  hypo
ccccatcatacttctaag

SEQ ID NO: 134918 - DNA, 160 bp, Homo sapiens
  chr1:1848270-1848430
  hypo
ctgagggcggcattccgtgtctttgacaaagagggcaagggctacattgactggaacacactcaagtagggcccgggttgggggcgggtggtgggcgggcacgggcagggccgatggagtggctcagcgccaggccccgtaggtacgtgctaatgaacgc

SEQ ID NO: 134919 - DNA, 30 bp, Homo sapiens; identical to SEQ ID NO: 13803
  chr1:1848634-1848664
  hypo

SEQ ID NO: 134920 - DNA, 30 bp, Homo sapiens; identical to SEQ ID NO: 58609
  chr1:1849058-1849088
  hypo

SEQ ID NO: 134921 - DNA, 30 bp, Homo sapiens; identical to SEQ ID NO: 58610
  chr1:1849290-1849320
  hypo

SEQ ID NO: 134922 - DNA, 31 bp, Homo sapiens
  chr1:1856320-1856351
  hypo
catgcaacgcccgtctcgggctctgcctcca

SEQ ID NO: 134923 - DNA, 30 bp, Homo sapiens; identical to SEQ ID NO: 58611
  chr1:1857499-1857529
  hypo

SEQ ID NO: 134924 - DNA, 30 bp, Homo sapiens
  chr1:1857847-1857877
  hypo
tccccgctcccaccccgcaggccgcctgag

SEQ ID NO: 134925 - DNA, 161 bp, Homo sapiens
  chr1:1861660-1861821
  hypo
gtacactgtagccacggaggtgtcgtatagggccgtggcggcaaacttgatctggtagtgggacagctccaggggtgggtggacgcctacagcccggcaagacagcttgaagcacctgcaagcagcagcatgggaggccctcagccgtgcagggcgtccgt

SEQ ID NO: 134926 - DNA, 31 bp, Homo sapiens; identical to SEQ ID NO: 58613
  chr1:1869915-1869946
  hypo

SEQ ID NO: 134927 - DNA, 289 bp, Homo sapiens
  chr1:1874712-1875001
  hypo
ggacgatgccggaggcgagcagactccaccgcagacacgccaacacacgcagctggctcccgggtcaccgcaggctgcacattcccggcccatgccgggcccacaggagtccgacagcaggaggacaggcgccgcgggagctgttcctacccaggtcaccggggagaggtggctgtgcctggggccggtgcccggggcctctgtgtccgcacaccctgctccttggtgctggtggcacaggggctccgtcatggaaaccccgcaggcccagcctcgccgtccctctgcg

SEQ ID NO: 134928 - DNA, 30 bp, Homo sapiens
  chr1:1877715-1877745
  hypo
ggccagggtgtgtgcgtggcgtggcagcag

SEQ ID NO: 134929 - DNA, 30 bp, Homo sapiens
  chr1:1886850-1886880
  hypo
gccctgtgcggctccgcccgtgctgggcct

SEQ ID NO: 134930 - DNA, 196 bp, Homo sapiens
  chr1:1888176-1888372
  hypo
cctaccacgtagctgccgaagtcaatgagctccttgtcgagggacagctgccagaggacatggagtgaactcagggccaccgtgccaggcccacagggtgcccagcgtgaggcctgcacgtggctccaggcagggctgccctgagcatttgtgcgcgttgtgcactgcacaagcaggtacacgattcaacccagaa

SEQ ID NO: 134931 - DNA, 504 bp, Homo sapiens
  chr1:1888802-1889306
  hypo
aggggcaggaccaggggccaccgacgcaaatggacgtggttcgcagagggcggtcggggtccagccaagggaggccgcctccttcccgcctgcaccgcctgggtcctgttctccccttgttcagatggggttttactgtttttacagtccccagcctggacgctcccctgggagaagcaagcccctgctcaggggagccgagggtctcggtgctcctgtcacagaggagcacttgacactgcaaagaccaaatgcgggagaggccggggcagctctggccaggacacctggggcctcgccgggcacgtgctccatgatgctgatccggagtggagcaggccagtaccagactcctgccgggctcccaggctgagcaggagggagccggagcctggctgtctgcgggggggcgggggacttcctgctgcccctggccctggtgctcggtgtcctgggcctgagtcttggctcaccaagagcccgcacagccgagtgccggcccaa

SEQ ID NO: 134932 - DNA, 30 bp, Homo sapiens
  chr1:1896520-1896550
  hypo
ggctggggctgttagcggctccacctgggc

SEQ ID NO: 134933 - DNA, 368 bp, Homo sapiens
  chr1:1901957-1902325
  hypo
cccgtgccccacagccgcctgagtgggcgccctgggagagagagcagctttgctcaatgtgaagccgaacccccttggctctccctgcacccactgactgggcgggtgcctcccggtggcacctctgccaccaccctcacctcttctgggcctccagctcctggcgccggcgctggtggacaaggtgcctgaatgcatccctgccctgggccagaatcgccttcttctcagcctggaccctctgctccgccagctctgccttggcacggtcccatgcttggaacttccgcagtgtgtccttggaaacagagagcactgagatgacagcagcagcacccacgggcacatgcacacgctcacacctgcac

SEQ ID NO: 134934 - DNA, 30 bp, Homo sapiens; identical to SEQ ID NO: 58618
  chr1:1903410-1903440
  hypo

SEQ ID NO: 134935 - DNA, 289 bp, Homo sapiens; identical to SEQ ID NO: 58619
  chr1:1910163-1910452
  hypo

SEQ ID NO: 134936 - DNA, 30 bp, Homo sapiens
  chr1:1913816-1913846
  hypo
ccagctgtggtcacacgcagggacatgcag

SEQ ID NO: 134937 - DNA, 456 bp, Homo sapiens
  chr1:1914127-1914583
  hypo
cccacaggaggagggcggcaggtgggctccgggcgctcggggccgcctgcgggtagggatggggcaactacctgcccgaaatgagggtggtgggaggcagggttcacaccatcagagaagggggtgaaatagacctgtggctttggttgcaattggaattacagatgtgaacgggtggttttcaatacaggcaggcagagctgcgtgcgtttcccacctctgtctactgacggttaagggtctgggtccaggcaagggcagggaagaagaagggaacctgagcctctcactgtgcccgaaaacgcccacagagcggcagacacgaacgcaggatgcggaaggatgccaccgccaaacgcaaggcggctggagcacccagaccaatcctgatgggccggatcatacccgcagggacacagcacccccagcctacacggagagcgatcacggaggggg

SEQ ID NO: 134938 - DNA, 96 bp, Homo sapiens; identical to SEQ ID NO: 58620
  chr1:1923484-1923580
  hypo

SEQ ID NO: 134939 - DNA, 30 bp, Homo sapiens; identical to SEQ ID NO: 13806
  chr1:1953094-1953124
  hypo

SEQ ID NO: 134940 - DNA, 30 bp, Homo sapiens; identical to SEQ ID NO: 58622
  chr1:1965779-1965809
  hypo

SEQ ID NO: 134941 - DNA, 31 bp, Homo sapiens; identical to SEQ ID NO: 58623
  chr1:1967235-1967266
  hypo

SEQ ID NO: 134942 - DNA, 389 bp, Homo sapiens
  chr1:1974712-1975101
  hypo
ataaccccagggagccgagggcggtggaggtgggggcccaccacccagcagcaactgttggaccccgcagcgcaggagtggcagggcccgtctgcagtgcaggagtggcagggcgtgtccgcggtgctgaccggttggtcttgggccctggcgctgtgtccccgcacaggtctcgggagaggttctccactctgagggcgtgtccagtccagagaaggggacgcgcggcgtgttccccagtggtctggaccctggggtcccgccccatccctgccctgcccaggccctgccccctgctggtgtgtgtccctggaccaggcatggagcgaccccggccctggtgtctcatccacagaatagggtcatgattctcacgtcctagggatggg

SEQ ID NO: 134943 - DNA, 31 bp, Homo sapiens; identical to SEQ ID NO: 13807
  chr1:1979189-1979220
  hypo

SEQ ID NO: 134944 - DNA, 1456 bp, Homo sapiens; identical to SEQ ID NO: 102346
  chr1:1981168-1982624
  hypo

SEQ ID NO: 134945 - DNA, 321 bp, Homo sapiens
  chr1:1986094-1986415
  hypo
attatggaattatttaatccccgccacttcaccgctggcaccgtcgaggtctgggggcaggtctgactggtttcctttaccttagtgaagccggcggcctgcaccgacccggctcgcgcccatcccggggtcacccacatttgggtgaacttgaacgagtgcccgaccaggtaacgttgccggacctcccacaagagggcactttcttttctcccattttgtcctcattctttccagccaggtaggtcgcgcttttttctctgtgcaaggaagttgatggtggtcatttttttttttttttttttaatacggagtctctct

SEQ ID NO: 134946 - DNA, 30 bp, Homo sapiens; identical to SEQ ID NO: 58629
  chr1:1987114-1987144
  hypo

SEQ ID NO: 134947 - DNA, 213 bp, Homo sapiens
  chr1:1990853-1991066
  hypo
ggcagtgccacgtgcgccttgcgtgaagtccacgtgctcagcctgactgaggcgggacttcctccgtgagactgttgagtggcagccgcagggtcttgacgctgtctctttctctctcttgtccagttttcccgagcacccctgagcagcctggcctgccatgtccgggagaagacagtgagtactggggtttcctacgccggtctcgcatgt

SEQ ID NO: 134948 - DNA, 30 bp, Homo sapiens; identical to SEQ ID NO: 13809
  chr1:1992217-1992247
  hypo

SEQ ID NO: 134949 - DNA, 122 bp, Homo sapiens
  chr1:1992994-1993116
  hypo
tgtttaccaggggtggctccacggcttcggggaccactcagcctggttggggacattccgccagagcctctggggcagcctttgccgaggaggtcagaggcgggtgctgggggtggggagcc

SEQ ID NO: 134950 - DNA, 167 bp, Homo sapiens
  chr1:1999031-1999198
  hypo
gctgccacgtgtgccgggctgcccagggcccatgagggtggtggcacgggggtccgcatgaggggccgcaggtgcctcgggcccctctcccgcttgtttctccatcttcactgtccgttcactgcagtgccgggtgaggccagtgtgtggccggtagattcccgggt

SEQ ID NO: 134951 - DNA, 30 bp, Homo sapiens; identical to SEQ ID NO: 58633
  chr1:2011898-2011928
  hypo

SEQ ID NO: 134952 - DNA, 1091 bp, Homo sapiens
  chr1:2013459-2014550
  hypo
catattaaagcaggcttgatccgggctgccgtggttccgatcgactccgaataggacaccacacagtcgtgccaagaaggcgcctaagtgtctttccacacggccatccgagggcggacgtggtcaggggtgctggacgcgtcagacgggttctttgcagcccttggcagcgtcgcccgctctgtcccgcctgttgtgtgcgccttttccctgctccagggctgtgtatttggcaagagggaggctccgtggcacgatcacacgtgcaggagctgggggctgccagagcggctgttcaagatggacttggcaaatcacctctttcaagttgccggctacccggctgccgtagacagagtgaagtctggtagtttgtgtttatttatttatcttggccagcagagagaattgagtttgcatggagactgtaatttcattctgtgagtgtaagatcacgtccgcgttcctagcgaccggttttgtgatgtgggcagtgccgtgctggtaaatgctctgtgaggaaggaacgatggtgggatttgtcactcagtcgatttccctggtgtaaatgctcccaccacggccgatttcaggctgccgaagtggaggggttcagtgaaggtggagttgggcaagggcgtacacggtcggcttctgagagttggtccccccgcccaaccctcccctggagatgggatgtcaggagacctggttccatttgtttttttgcctgagcgtccgggggtggctttgaggacacctgtcctccttcacaggggcactccggatgtagtagcagggagagggtggaggggcggccaagggcgtgagggagagggtggaggggtggtgtgagggtgcaagggagagggtggagagggtggcagtgagggcgcgagagggtggaggggcggcatgagggagcaagccacctcgggcacaggtgaaggacaggtgtccacaccttgggtgcccccgtcctccctctcctcatgtcctaataggtctgaacaggaagttacatttagggcggctgtacagtgagttttaaataccttggtccaaattttcaaacacgtatcgttagcgtt

SEQ ID NO: 134953 - DNA, 30 bp, Homo sapiens
  chr1:2015959-2015989
  hypo
gatgggcgtacctgcgtccggcccacccgc

SEQ ID NO: 134954 - DNA, 409 bp, Homo sapiens; identical to SEQ ID NO: 13812
  chr1:2016616-2017025
  hypo

SEQ ID NO: 134955 - DNA, 30 bp, Homo sapiens; identical to SEQ ID NO: 13813
  chr1:2024578-2024608
  hypo

SEQ ID NO: 134956 - DNA, 102 bp, Homo sapiens
  chr1:2025267-2025369
  hypo
cacagcctgccttggcgggcacgggacgagccgaggatccccgcgtcgacgtggaggtccgcggccgtcagcgttgcagcccttggccgggcactaagggct

SEQ ID NO: 134957 - DNA, 548 bp, Homo sapiens
  chr1:2025645-2026193
  hypo
gggagctggaagggacgtggttccagtcctgctgtgccaagcctggtgacccgagggtaccctcggcctcccggcctgaactcttctcctaccatgatggtgcctgggatgctgtgtggtgcccgtgggcagtggcggaggcagtggccccggctcgttgaaccttgggcactgcccattctgaggcgcccgctgtgcccggctcgttgaaccttgggcgctgcccgttctgaggcacccgctgtgcccggctcgttgaaccttgggcgctgcccgttctgaggcgccctctgtgcccggctcgttgaaccttgggcgctgcccgttctgaggcgccctctgtgcccggctcgatgaaccttgggcgctgcccgttctgaggcgcccgctgtgcccggctcgatgaaccttgggcgctgcccgttctgaggcgcccgctgtgcccggctcgttgaaccttgggcgctgcccgttctgaggcgcccgctgtgcccggctcgttgaaccttgggcgctgcccgttctgaggcgcccgctgtgcccggctc

SEQ ID NO: 134958 - DNA, 30 bp, Homo sapiens
  chr1:2027560-2027590
  hypo
gcagatggggacctcggctgccccaagact

SEQ ID NO: 134959 - DNA, 30 bp, Homo sapiens
  chr1:2027968-2027998
  hypo
tgggcgctcagaggcggttgtgagcagtgc

SEQ ID NO: 134960 - DNA, 202 bp, Homo sapiens; identical to SEQ ID NO: 13815
  chr1:2039529-2039731
  hypo

SEQ ID NO: 134961 - DNA, 186 bp, Homo sapiens
  chr1:2041057-2041243
  hypo
tggagagtcccggccgtggtgaggacacggggttgcggcagctcacgcccactgcagtgtccggaaggcggtgctaggtccacctcatttacggggtcgggctctcattctccccattgtacagcccagcctgtagaggcaggtgaggtccaggccatgggcctgtgggccgtgccacgtcgctca

SEQ ID NO: 134962 - DNA, 52 bp, Homo sapiens; identical to SEQ ID NO: 58640
  chr1:2058199-2058251
  hypo

SEQ ID NO: 134963 - DNA, 219 bp, Homo sapiens
  chr1:2065386-2065605
  hypo
gtggccgcccctgggggtctgcgcctcttgtggagcccaggcctggcgcccaggtgggtggagtgtggagggggcacaggctgcacgaccccagcctggcctcgggcttgctgggagtcgcgtctgtggccggaggggcctttggtgtcaccaggcctctgtcaaaccccaagccgcatcctgggagggctgggtgggctgagccgcccgctgccgtga

SEQ ID NO: 134964 - DNA, 769 bp, Homo sapiens; identical to SEQ ID NO: 58642
  chr1:2065917-2066686
  hypo

SEQ ID NO: 134965 - DNA, 155 bp, Homo sapiens; identical to SEQ ID NO: 58643
  chr1:2068691-2068846
  hypo

SEQ ID NO: 134966 - DNA, 168 bp, Homo sapiens
  chr1:2069359-2069527
  hypo
aaggcgagagtggcccgaaagcctgcaacctgactgctcagggagggcggctgccctgcagttcagcctgtccgattcccgcctaattgtgcccgggctctgatctcgccacctgctcgtaacgttctctgtccggacctcagagccgctccatgtagtgctcacttc

SEQ ID NO: 134967 - DNA, 30 bp, Homo sapiens; identical to SEQ ID NO: 58645
  chr1:2085702-2085732
  hypo

SEQ ID NO: 134968 - DNA, 31 bp, Homo sapiens; identical to SEQ ID NO: 58646
  chr1:2096693-2096724
  hypo

SEQ ID NO: 134969 - DNA, 30 bp, Homo sapiens; identical to SEQ ID NO: 58647
  chr1:2100350-2100380
  hypo

SEQ ID NO: 134970 - DNA, 30 bp, Homo sapiens
  chr1:2100969-2100999
  hypo
attgagtacgtcaacggcggggacctgatg

SEQ ID NO: 134971 - DNA, 76 bp, Homo sapiens; identical to SEQ ID NO: 58648
  chr1:2103117-2103193
  hypo

SEQ ID NO: 134972 - DNA, 246 bp, Homo sapiens; identical to SEQ ID NO: 58649
  chr1:2103459-2103705
  hypo

SEQ ID NO: 134973 - DNA, 30 bp, Homo sapiens; identical to SEQ ID NO: 58650
  chr1:2104626-2104656
  hypo

SEQ ID NO: 134974 - DNA, 30 bp, Homo sapiens; identical to SEQ ID NO: 58651
  chr1:2105377-2105407
  hypo

SEQ ID NO: 134975 - DNA, 31 bp, Homo sapiens; identical to SEQ ID NO: 58652
  chr1:2107101-2107132
  hypo

SEQ ID NO: 134976 - DNA, 522 bp, Homo sapiens; identical to SEQ ID NO: 58653
  chr1:2107352-2107874
  hypo

SEQ ID NO: 134977 - DNA, 31 bp, Homo sapiens; identical to SEQ ID NO: 13820
  chr1:2111393-2111424
  hypo

SEQ ID NO: 134978 - DNA, 265 bp, Homo sapiens
  chr1:2111814-2112079
  hypo
cacagacgacatggacgcacagacgatgtggatgcacggacgacgtagacacacggatgactcatccacagatgactcagatgcacggacacccagacgacgcggacgcacagacgacgcggacgcacagatgacgtggacgcacagatgacgtggacgcacggacgacgtggatgcatggacgacgtggacgcacagatgacctggacgcacggacgacgtggacgcacggatgactcagatccccagacgactcagatgcacg

SEQ ID NO: 134979 - DNA, 624 bp, Homo sapiens; identical to SEQ ID NO: 58655
  chr1:2116357-2116981
  hypo

SEQ ID NO: 134980 - DNA, 34 bp, Homo sapiens; identical to SEQ ID NO: 13823
  chr1:2121713-2121747
  hypo

SEQ ID NO: 134981 - DNA, 30 bp, Homo sapiens; identical to SEQ ID NO: 58657
  chr1:2122586-2122616
  hypo

SEQ ID NO: 134982 - DNA, 65 bp, Homo sapiens; identical to SEQ ID NO: 58658
  chr1:2123196-2123261
  hypo

SEQ ID NO: 134983 - DNA, 165 bp, Homo sapiens
  chr1:2123461-2123626
  hypo
ggcagctccactccccagacccgcctctgccagggctccaggctcagcaggcgcctgtgcgggacagggcgacggttcaagaccaagtccggctgttagaccagaccctccaatccaggcggcctccctgctggggtcctgtgcggtcaggagtcccagggcatc

SEQ ID NO: 134984 - DNA, 355 bp, Homo sapiens; identical to SEQ ID NO: 58659
  chr1:2125160-2125515
  hypo

SEQ ID NO: 134985 - DNA, 286 bp, Homo sapiens; identical to SEQ ID NO: 58660
  chr1:2129649-2129935
  hypo

SEQ ID NO: 134986 - DNA, 381 bp, Homo sapiens; identical to SEQ ID NO: 13825
  chr1:2132533-2132914
  hypo

SEQ ID NO: 134987 - DNA, 30 bp, Homo sapiens
  chr1:2134541-2134571
  hypo
cctggcaaccttccccggggccagagggca

SEQ ID NO: 134988 - DNA, 30 bp, Homo sapiens; identical to SEQ ID NO: 34897
  chr1:2135699-2135729
  hypo

SEQ ID NO: 134989 - DNA, 410 bp, Homo sapiens; identical to SEQ ID NO: 34898
  chr1:2135929-2136339
  hypo

SEQ ID NO: 134990 - DNA, 30 bp, Homo sapiens
  chr1:2141312-2141342
  hypo
aggcgcttcagtggacgcacatccctgctg

SEQ ID NO: 134991 - DNA, 249 bp, Homo sapiens; identical to SEQ ID NO: 13826
  chr1:2141558-2141807
  hypo

SEQ ID NO: 134992 - DNA, 240 bp, Homo sapiens
  chr1:2142327-2142567
  hypo
agggacgcaagctggcgattgctgcgggggacctgggcctgggcttagcgactgctgcccctatccagatgcctgattgggaccagggtgtggggccgggccctgcagcgcctgtcttgcccgggctggagccctagagctgtgcgacctggggccagggtgttctgacagactcactctcaggggctggatgcccttgggcaccacggcgggtgcctagcagaccgtgctgtacaccat

SEQ ID NO: 134993 - DNA, 30 bp, Homo sapiens; identical to SEQ ID NO: 58666
  chr1:2147498-2147528
  hypo

SEQ ID NO: 134994 - DNA, 101 bp, Homo sapiens; identical to SEQ ID NO: 58667
  chr1:2154149-2154250
  hypo

SEQ ID NO: 134995 - DNA, 338 bp, Homo sapiens
  chr1:2167222-2167560
  hypo
accagatggactgagcacctgcgttggccatggcccggaggtggcgtggtggtgcctggcgcctgtggccctcagcatgtgtcctgccggccgcctagtaggccttcgcttgaagtgcttattcctttgagtaatgctcctgtcttttgtttggggggaaacagataaagggggctttgagaggcgtctcggcgtgatcctgggaaacggccgagattctgttcggtgcttggtgttcgtgtcttctctgattttacctttttgactcataaagatggaaggagtgctctgcctcggtgcctctgcagctgcagatgctgaatcggggcgtttaggcc

SEQ ID NO: 134996 - DNA, 30 bp, Homo sapiens
  chr1:2168316-2168346
  hypo
ctgctggaacgtcggcggctgacttagaaa

SEQ ID NO: 134997 - DNA, 112 bp, Homo sapiens
  chr1:2170933-2171045
  hypo
cccatgtgggtgtagccgttggcggcacctttgtacggggacacaccctggacctgaatggagtcaggaagggtttcaacctggatggcccgcgtgccggggacccgcaagg

SEQ ID NO: 134998 - DNA, 30 bp, Homo sapiens
  chr1:2185718-2185748
  hypo
ccatgcgtggtgcccgttggagggggtggg

SEQ ID NO: 134999 - DNA, 30 bp, Homo sapiens; identical to SEQ ID NO: 58670
  chr1:2188357-2188387
  hypo

SEQ ID NO: 135000 - DNA, 4 bp, Homo sapiens
  chr1:2188825-2188829
  hypo
cgtg

SEQ ID NO: 135001 - DNA, 91 bp, Homo sapiens; identical to SEQ ID NO: 58672
  chr1:2188947-2189038
  hypo

SEQ ID NO: 135002 - DNA, 497 bp, Homo sapiens; identical to SEQ ID NO: 13830
  chr1:2190966-2191463
  hypo

SEQ ID NO: 135003 - DNA, 30 bp, Homo sapiens; identical to SEQ ID NO: 13831
  chr1:2193726-2193756
  hypo

SEQ ID NO: 135004 - DNA, 30 bp, Homo sapiens
  chr1:2203863-2203893
  hypo
ggggggttggggagacggccctggcccagc

SEQ ID NO: 135005 - DNA, 30 bp, Homo sapiens
  chr1:2204289-2204319
  hypo
agcctcgccctcccacgcccctcctgcccc

SEQ ID NO: 135006 - DNA, 132 bp, Homo sapiens; identical to SEQ ID NO: 58675
  chr1:2205381-2205513
  hypo

SEQ ID NO: 135007 - DNA, 30 bp, Homo sapiens; identical to SEQ ID NO: 58676
  chr1:2209125-2209155
  hypo

SEQ ID NO: 135008 - DNA, 126 bp, Homo sapiens; identical to SEQ ID NO: 58677
  chr1:2218534-2218660
  hypo

SEQ ID NO: 135009 - DNA, 30 bp, Homo sapiens; identical to SEQ ID NO: 58678
  chr1:2219321-2219351
  hypo

SEQ ID NO: 135010 - DNA, 30 bp, Homo sapiens; identical to SEQ ID NO: 58679
  chr1:2225092-2225122
  hypo

SEQ ID NO: 135011 - DNA, 30 bp, Homo sapiens; identical to SEQ ID NO: 13833
  chr1:2228304-2228334
  hypo

SEQ ID NO: 135012 - DNA, 473 bp, Homo sapiens
  chr1:2234638-2235111
  hypo
agggctggcacccggcgcagcctcagggacatgaagtggcttgtttttctcctggtcactcacacagacaactctttctcgacagagcctgggctgtgttcaccctcgccagcgcctctctgctttccgaccctggtcccccgcagtgtcagcgagtgagaaagagctctccccacacctcccggccctcatccgagacaggtgagtgggcgccattcacaggtgtttctgatcacgggggaggctccacgagggctgtgcatgcggacgcgcccatgtttctgcaggctgggtgcccagacctgccgccttttggtcagggcagtctcggtgttggttcctttggctggcatcagggagagcacacctagagcgttccctgtgttctgggtggagtcgtgggtggagccctgtctgctgggcgcagcttcttgatgtgttggcctgtgtctggccttcgcaagagacccagc

SEQ ID NO: 135013 - DNA, 30 bp, Homo sapiens; identical to SEQ ID NO: 58682
  chr1:2237170-2237200
  hypo

SEQ ID NO: 135014 - DNA, 30 bp, Homo sapiens
  chr1:2237528-2237558
  hypo
ggaaggagatcgagcgtctccgcgccgaga

SEQ ID NO: 135015 - DNA, 565 bp, Homo sapiens; identical to SEQ ID NO: 58683
  chr1:2237784-2238349
  hypo

SEQ ID NO: 135016 - DNA, 163 bp, Homo sapiens; identical to SEQ ID NO: 58684
  chr1:2238917-2239080
  hypo

SEQ ID NO: 135017 - DNA, 596 bp, Homo sapiens; identical to SEQ ID NO: 58685
  chr1:2239610-2240206
  hypo

SEQ ID NO: 135018 - DNA, 31 bp, Homo sapiens; identical to SEQ ID NO: 13839
  chr1:2241012-2241043
  hypo

SEQ ID NO: 135019 - DNA, 30 bp, Homo sapiens; identical to SEQ ID NO: 58687
  chr1:2241639-2241669
  hypo

SEQ ID NO: 135020 - DNA, 30 bp, Homo sapiens; identical to SEQ ID NO: 58688
  chr1:2249602-2249632
  hypo

SEQ ID NO: 135021 - DNA, 30 bp, Homo sapiens; identical to SEQ ID NO: 13840
  chr1:2251555-2251585
  hypo

SEQ ID NO: 135022 - DNA, 30 bp, Homo sapiens; identical to SEQ ID NO: 13841
  chr1:2252980-2253010
  hypo

SEQ ID NO: 135023 - DNA, 205 bp, Homo sapiens; identical to SEQ ID NO: 13842
  chr1:2254567-2254772
  hypo

SEQ ID NO: 135024 - DNA, 30 bp, Homo sapiens
  chr1:2255533-2255563
  hypo
acctaggtgtgctgccgcagcctgctcctc

SEQ ID NO: 135025 - DNA, 30 bp, Homo sapiens
  chr1:2255946-2255976
  hypo
gcccctgagagacggcgaggctggagcctg

SEQ ID NO: 135026 - DNA, 475 bp, Homo sapiens
  chr1:2257928-2258403
  hypo
tcggtgccccacagacggcgagcaggcccgaggccagtgtccacagggaccgcacatggggaggtggtgcaggagccctgggcggtggactgggggtgcgtctgggcacccactgcgtgcctgggactgcaccttcatgcgggtgctggtccctcactcctgtccctcacgcgctggccatgacggccctggcaccggctgccctctggaggccccagtaagtccgcaccaccccggcgccatctcctgccagttctgcctgaggcagcagctgccaccaccgcgcagacacatcctgctccctcctgactttcggaggcctggcctggcatcggcctggcagtctcggcctccccgtcggggttggtgtctggggatcagggtgaagacacagcgacccgggcctcacccagggtctgtgtgtggctgttctgcagcgctggacgtctgaggcctgtgtcgtccccacagacgc

SEQ ID NO: 135027 - DNA, 523 bp, Homo sapiens
  chr1:2259050-2259573
  hypo
ccagaggctgtggacggctgcgagtggcccgtgcggcttttagaagcacagacaggagatggggtggacgaggcggcacagggggagggccacgaggaggggcaggcgcggcgggcaggcggcaccacctctgcaaggctaacaaggtgctgcgcccggctccctcctcttgcctgtgcctctggcggtgaccagaatggcccattggccgaattggccgccctgacgggtgagggccgctttcccaaggccccgcatcgcgcctcggcgtccccgcatgagctcctggtcttggcaacccccttactgcatcttcccaggccagatgctccgagaagccaagaggcctcccgaggagcccgtcacaggcttctgtgtgcagacagcagcgagccaccgagcagagctccagggagcggcatcagagaggccttggccgagtgcaggccgagcaagggacctctggcagcctgtggcccttgaccctgtctacccggacccaccccttcgggcctaggctcgg

SEQ ID NO: 135028 - DNA, 354 bp, Homo sapiens
  chr1:2263173-2263527
  hypo
tgtaacaaaggcgcgcgtttctcccgcatgcgccgtccttcttatgtaaccactgccgctcctctcccgcggctgcgcctctcccgccgctgcgcctctccctcgtgcggctctcccgcccctgcgcctctccctcgtgcgcctctcccgcccctgcgcctctccctcgtgcgcctctcccgcccctgcgcctctccctcgtgcgcctctcccgcccctgcgcctctccctcgtgcgcctctcccgcccctgcgcctctcccgccgctgcgcctctcccgccgctgcgcctctcccgaaattacaggctggtgtgtcacttttcatctttgtcgatttttttttcagtcatttc

SEQ ID NO: 135029 - DNA, 30 bp, Homo sapiens; identical to SEQ ID NO: 58695
  chr1:2264591-2264621
  hypo

SEQ ID NO: 135030 - DNA, 421 bp, Homo sapiens
  chr1:2265942-2266363
  hypo
agctgcatggagaggcggggctcccttgggggagcaggcctggttttgggctgcctgtcccaacacgacgagagggccctggctgtgtggccgtggagccggcaggaggcaggggaagtggccgctggtcacagatgtgtgccccgaagagacgacatcatttgaacactgaacactccgactccgcggccaggtcgtcctgggattgaaacaatcctagtccaacgacacttaactcgaggacagtgcgagccctttggctgggaggcccaggctgggagcagacgccgacccctccgttctctcaggtggaaaagaacgaaagccttctttctgctgaaataagacgttccaacatcaccctcagcgcggaggttgccacggttctggagcgaagtggaggtgccgccctgggcgttcg

SEQ ID NO: 135031 - DNA, 30 bp, Homo sapiens; identical to SEQ ID NO: 58697
  chr1:2266834-2266864
  hypo

SEQ ID NO: 135032 - DNA, 840 bp, Homo sapiens
  chr1:2267137-2267977
  hypo
cgggtgggagcggggcgggtgctggtcactctgcgagcaacccagcagctcctccacagtgtgcggggccaggcgagggctggtgggacgggtccccagggcacatcagcgggggcctcctcgcctccatagcccagcccagcccagcgcgcagctgcccccaatttgtagacagagtcccgatttgaggtggcagctgttgctggactccgagccccgagccccagcttcctcctggtagaaccggccggttacggccctgcatgtgctgtgcccgtagcactgccaggcccaggatggtgagatgtgacggccacaaaccccccacggtgtccccgcctgcacgtgccgcggtgtgcacctggtcccactcctgtcctccagctcacagagtcccctcaagccactgccctgaaccctggccaccagccgtcttcctctgagaggccccgcacccctcctgcctctctgcttctgcatgcccacagcctggtccgcccggcgggtctgggagttgtggtgatcgaagcagatggaccggctccagctccacccacttcatgccagcccaggcaagtcgcagggcagctgttagccccgcgagaccctggctggcgggggggctctctggagcgaggcccgtgtaggctcactgtcttcccagaccaggcccttggctcccctgggccttccccgtcctcctggcccagctgatgaggaggccacagctgaccctccgaacacctgcaggtggggtgggctcatcctacctgctgcctccaggaggctcctgtgccgtgggtggtgtccccctggggtgcaggccgcctctggatctgc

SEQ ID NO: 135033 - DNA, 444 bp, Homo sapiens; identical to SEQ ID NO: 58699
  chr1:2268383-2268827
  hypo

SEQ ID NO: 135034 - DNA, 146 bp, Homo sapiens; identical to SEQ ID NO: 58700
  chr1:2269855-2270001
  hypo

SEQ ID NO: 135035 - DNA, 427 bp, Homo sapiens; identical to SEQ ID NO: 58701
  chr1:2270533-2270960
  hypo

SEQ ID NO: 135036 - DNA, 30 bp, Homo sapiens
  chr1:2271404-2271434
  hypo
aggcgcctccgccgcgcggcttctccgtgt

SEQ ID NO: 135037 - DNA, 30 bp, Homo sapiens
  chr1:2273259-2273289
  hypo
agatcctctcttccccgtctgagtggtgcc

SEQ ID NO: 135038 - DNA, 464 bp, Homo sapiens
  chr1:2273548-2274012
  hypo
gcaagataaaggtcaccgtacgacctcgggggcctcgggaaccgagaggctgagccagcccgggacgggatcgggcagcttgaccgctctggagggaaattccaattcattatctttttacggcggactcaattagactccctagtcacctgtgtagggcaccaggcagcaggcagggatgctgcccgaatcaacaaggctgctcgggccaggccagccccaagaatagccgcggcaggcgcaggacctggccagggggagggcaggccgaagcagaaacgttgacttcgtttaagtggattaaaaacataaaacgttattggccctaaggggacgagaacagtctcgtttggaggtgaccagacacagggcattagtctttaagagtccatcagtcagccgagaagcgcggctcattagagacgcagggtggggcctggagaagtcagcgggaacacgcgggg

SEQ ID NO: 135039 - DNA, 1261 bp, Homo sapiens
  chr1:2275774-2277035
  hypo
tccggtgagcacactcgacaaggtggtgcggcgagctggctccgagcgtcccccacagggccacattctcactattggggtggcaggaaggcccagcgaccaggagcatgtgtggggtctgggaaaggcctgggggacggggtgtggggtgcaggagccccaaggccgatgctgctgaggaggccaggagcggggaccgcacagacggcagttcctctggaggggggtcccgtgtgggccgggctgtgcaaaggacacactggtccctgctggcctctcagggcaagcgtgaggaccctggcctgctccggcctccttccctgggggcctcgtccctgcgctgcacagatggggcccggccgccccagtgggaagggaaagggggagcgctgtgccaactcacaggctctacgagccacaacagctgcctgcagagcctgggggcagggctgaagctggccatggaggaccttgggggccacctccaccttccagcagcaaatgccaagtccccgaatgcagaattctgccagagggagcatgaccgtctctctgttggcacaaagcgagagcatcaaagacagcgtcagcccccgcgagggtccacgcatgctcacactctgcgctcatggatggccacacacaccctgaaaacggcgtcagcctccgggagggtccacgcgtgctcacagcactcatagatgaccatatgtgccccgaagacagtgtcagcctccaggagggtccacgcgtgctcacgctctacgctcatggatggccacatgtgccccgaagacaacgtcagcccccgcgagggtccacgtgtgctcacctgcgctcatggatggccacatgtgcccgcaccctcgcacaggcatgggcggtccccaggctgccacactcagggtctgtctgtgccccggcacctccaagccattccttccaccaggccagggccaggcctggacacctgccacctaccacccgctggggcagcagccacgcactcccccactgctccctgttggcggccaggcatgggccggccttgttgggggacacaggacaattcggggcacttgtcttgcctccgtcctccttggagagcctcgggctcaccctacgtggctctgaacaacaagggccaggctctgcaccgggggaccccctgccctgccagccggaccctcaggccgctcagagggccagtcccagcacctgcccctcgccagtggacacaggctgccggcagcattgctac

SEQ ID NO: 135040 - DNA, 694 bp, Homo sapiens
  chr1:2279093-2279787
  hypo
ccgtggctgcccgtgcgatgctcccagtggcctcagggttaggttctgactgcgggacagggaggtggactgcacggctgctgcagccttgaggctcctgctcggcccccgctgcccccgtcacccccctgccaccctgcgtgccgggtgcacaggtattttacattttggggtaaatgtttaatcaaacatttacagaaaagtcacaggtagagtacaaagaatgttttcgctgggccatctgaaagtccgctgctgaatttgctcctcactccacatcctcgagtgcattttacaaaccgggaagtttttcgcctcacgtaacccagcacagccgtcccggggcagggcacgcctcggggtcagaccccagcctgggcttccccgtggcccagtgatgtccctcgcaggaaggagatcagcctgggaccacacattgcagcgagctctcattgtgtcttcagtctccgtcggtctggaacattcccgggcctttccctgactgccatggtcctggcgtcttcgaagcttccaggccaggcctttcagggaaggttcccccgtgtggccgtgtctgaggtctcatcacagagagacccgggttacgcatctttggcaggagaggcatggatgcgacgctcatgcctttcatggatggctctgctcagcccacgctgccaggtggggcaggatt

SEQ ID NO: 135041 - DNA, 30 bp, Homo sapiens
  chr1:2281360-2281390
  hypo
gtcctctcacggctgcggcctctctacgtt

SEQ ID NO: 135042 - DNA, 30 bp, Homo sapiens
  chr1:2282839-2282869
  hypo
ctcaggtccttgcccgccagccctctctgg

SEQ ID NO: 135043 - DNA, 38 bp, Homo sapiens; identical to SEQ ID NO: 13854
  chr1:2283081-2283119
  hypo

SEQ ID NO: 135044 - DNA, 30 bp, Homo sapiens; identical to SEQ ID NO: 13855
  chr1:2284164-2284194
  hypo

SEQ ID NO: 135045 - DNA, 325 bp, Homo sapiens; identical to SEQ ID NO: 58710
  chr1:2288152-2288477
  hypo

SEQ ID NO: 135046 - DNA, 30 bp, Homo sapiens
  chr1:2291485-2291515
  hypo
tggccgtggaggggtcgcctcagagcctgg

SEQ ID NO: 135047 - DNA, 36 bp, Homo sapiens
  chr1:2303586-2303622
  hypo
ggacactctgacacacgtgcacgcgtgcccccccac

SEQ ID NO: 135048 - DNA, 721 bp, Homo sapiens
  chr1:2303822-2304543
  hypo
ccacatgcaacatctcgtccgcatcttcactgcttaagaacctgctgcctgtttctcttttggaaacgttaggtcatctccccctggagatgcttactcttggcaatttccccgtggtcctgcagcagctgaacgttcaccgagaagggagacccttgggccacttccatcacctccggacccaagatcacgatcctcgtagcttgttctgggagaggacagagtgtggctttagcggtgactggcatggtcccccacccaccccatggctgagtcagcagtgggcaccccaggaaccgaccagagcccagtgtggcagctggaacacaagcacatgcgggggccgaccctccgcaaaccaccttgcagagcagcgacctgggcagtcgtccacactcagaccgtgaggctcggctctgctggcctggagcactgtggaatcgaaccaagtggaccaccggggccacggagcatgcaagagacacaagtgggcggtgtggggctgttgggttttcctgcccgtggaatgttcccgcacgtcttcccgctggtcgggatttaggccctgcattccctgcatctgagtcagcaccctgaggtgctggacctgggactagggcaaggcctggcaagggtgggtccaccggctggccagtgcctcctggcagccagggccgcccctgctccaccggggcctgcagggcatcgctgtgggtggtgt

SEQ ID NO: 135049 - DNA, 453 bp, Homo sapiens
  chr1:2307732-2308185
  hypo
ctcattcacgctggacggggagaggcgcgagtcagcgcacagctgagggctcttcagggcgtccggggcccccgtcaccgtcagtgatgagaatggcgatgtctggtctctgcccccttccacctgctcggcctctggaaggtgccccgggctttcaggaggagggaggtggagctgcggggcagggctgacaccagctgcaatatggcgtccagggtgagtacccagtgaggctgtggctgggcaggggaagccagacacactcgagtcatgagaaatgcagaggtgcagagcccgcctttggggtgagtggctcctcccatggttggtctggggctgcggctcacgtatgtggcacgagcctgcctggcatccccctccctgggtgcgcagcaatcaggtcagggcttggcatcctcggtacccaccgctggtgtccgggtgggagggctg

SEQ ID NO: 135050 - DNA, 30 bp, Homo sapiens; identical to SEQ ID NO: 58713
  chr1:2308483-2308513
  hypo

SEQ ID NO: 135051 - DNA, 483 bp, Homo sapiens
  chr1:2309923-2310406
  hypo
tgaggagaggaggctcggggactgcggcaggcaaagccgcccagaaggagccacctgctccgtgcagtgagcaggtgctcggcacccagcggcaactccgggaaagctggcgtgtgagacagccaacactcacggcgcagctgatacagccagggatgcccggagggccgcgctgctgccaacatgggtaggagacactctgatgtgcacacacacgtgtggcctctactctgtctgctccgtctcccaccgaggatgttctggaggacgtgtggggcctgcccaagccctcgggtcctgggaggtcgagcagtaagctgtaaactaggagtgtgggggacggagatggctgaggcgtcacaggctggtgggggtgctcgtggcccaggacctctgtggcttccgggaccggcctgagccgcgtggctcctgtccctgtggaagaggagccttctctgctttgggatccgctgttcttatttt

SEQ ID NO: 135052 - DNA, 77 bp, Homo sapiens
  chr1:2315088-2315165
  hypo
ctgtgacctgcgctgcgtttagagacctgcacgcgtggttcctatctgttagtgctgctggacgctcagggggcccc

SEQ ID NO: 135053 - DNA, 30 bp, Homo sapiens
  chr1:2315768-2315798
  hypo
ctgcactcacggggccgctgccccattcgc

SEQ ID NO: 135054 - DNA, 88 bp, Homo sapiens
  chr1:2316414-2316502
  hypo
accttgtaggtggagccgtcggcgcagcgcagcaccccgtgtccctgacgccggtcccggacccagtcgccgtcgtacttgtcaccgt

SEQ ID NO: 135055 - DNA, 30 bp, Homo sapiens; identical to SEQ ID NO: 58717
  chr1:2318780-2318810
  hypo

SEQ ID NO: 135056 - DNA, 30 bp, Homo sapiens; identical to SEQ ID NO: 58718
  chr1:2327632-2327662
  hypo

SEQ ID NO: 135057 - DNA, 620 bp, Homo sapiens
  chr1:2328570-2329190
  hypo
tagacaagtccacaccctacacggctgtgcgatgggtcgtgacactgggcctgagctttgtctacatgattcgagtttacctgctgcaggtaggtgtgggctgaagtgacgagacttggctctgtccacgttacctgggcgtgatgtttgtggggatgttgttgatccagtctgtcttgcaggaagtggtctctagtaatcaattttcagctaaacgccaaatgtcagaaagatctcagtgactgtctttaacgaacagggttgtttatgattcacccggagtcgcctcgccaggcttctcagtatacccaggccgtcctgagcccagcctggccctgccctgggcacgtccaggcctggacagtggagccgctggtgtccctccgaccctgctgcatgatgctcaggacaaggttgcgctctgtggctgcctcattccttgggtgaagagtccatgccttgggtgtcatgaatgactcggcgtccaaagggtttatgtagcttttcctgagctctcccttgtgtgaggccaaagcacagtgcaggttgagacgccgagtcaagtaagagagacagtgaccgaagggggtcttgagggtttccttcgtgtgttttcgggc

SEQ ID NO: 135058 - DNA, 202 bp, Homo sapiens
  chr1:2329574-2329776
  hypo
cgtgcctcatttggcgtctcttcaggtgtggccctgcagccgaggatggacacacagacatcagttagccctcacatccggcgttcagccgaggatggacacacagacatcagttagccctcacatccggcgttcagccagggatggacacacagacatcagttagccctcacatctggcgttcagccgtctgactggaaaa

SEQ ID NO: 135059 - DNA, 123 bp, Homo sapiens
  chr1:2330457-2330580
  hypo
ggctctgggccagcatcgctcaggtgcccgggccacccgagcctgtggtgtagcttgagcatgtgcttcttgagaaaagcctccttttctgctgcgctccttgtggggcgtctgtggcttcag

SEQ ID NO: 135060 - DNA, 317 bp, Homo sapiens; identical to SEQ ID NO: 58721
  chr1:2331317-2331634
  hypo

SEQ ID NO: 135061 - DNA, 58 bp, Homo sapiens
  chr1:2331901-2331959
  hypo
gtgggacaggcctggcgcccgggttccacggtcagcgcatcctcggccccgccctgtt

SEQ ID NO: 135062 - DNA, 219 bp, Homo sapiens; identical to SEQ ID NO: 13861
  chr1:2334770-2334989
  hypo

SEQ ID NO: 135063 - DNA, 30 bp, Homo sapiens
  chr1:2335333-2335363
  hypo
cactgcgggagaggcggaacccacttgcat

SEQ ID NO: 135064 - DNA, 736 bp, Homo sapiens
  chr1:2335999-2336735
  hypo
cagtctagagggtcacggcccccccgccctcctccgtctctggcaagctgaccttgactaacccaggaatacagggtcatcctcattcctaagtaagtcaaacagcaagacatggtttgcgcgggtctttgccggaagccggtcctgctggccaggtgttttacgtcagcagggaaatgtggcacacgccctcgaggcattttaacactgcgcttcaggaaatctcaagttccatcttgtgttagtaacgtacccacattttgctggagttagtttattaaagatgcctacggtgaactctctggcgcaggttaaatgcagttttgaaaacctggaaacatcaaatggaggcgggaaataggctggggccgagctgaggggctgaacacagcagtgaccgtgggtcagcaggtcgcctgcccagcaggccccccaggagagggctcgggcgcccctggcagcccccatacccccaggacctggctcgtgagtgcgtctgggtcaggaagagacctctctgtgcgtctcaggctgagatgcagatttctgttttctaaaactggaagcgaccttgacgtgtattgaaggtgtgtgtgccaaatgcttccgacggaggtgctggccttggttggtttctctctgccccgtgtggtcatcaagtcctgggggatgtgctctgcccagccgccctcggggagagcagcgccgcctcccatggggccgtggggctgctgtt

SEQ ID NO: 135065 - DNA, 30 bp, Homo sapiens; identical to SEQ ID NO: 13863
  chr1:2337319-2337349
  hypo

SEQ ID NO: 135066 - DNA, 391 bp, Homo sapiens; identical to SEQ ID NO: 58726
  chr1:2337853-2338244
  hypo

SEQ ID NO: 135067 - DNA, 193 bp, Homo sapiens; identical to SEQ ID NO: 58727
  chr1:2341159-2341352
  hypo

SEQ ID NO: 135068 - DNA, 31 bp, Homo sapiens; identical to SEQ ID NO: 58728
  chr1:2359187-2359218
  hypo

SEQ ID NO: 135069 - DNA, 499 bp, Homo sapiens
  chr1:2359879-2360378
  hypo
gactgggtgggcaagcgtggactgcatctgtcctgcatggggtcctgcgtctggctcgcccggtgccgtgctgtggggcccacgccaacggctgacctcatggtcctccgtggcctcgcctaggcttgcggcagccgacgtggcgttgttgcctaattaggttggactgtgccagccccagcggagcccacgcccggcccttgcgccggcagacgtgtcggggcacggctcctgcactcccactgccgcaggaactgctcaggaacctgccggtctccggctgggacggtggctggatcagctcaagcctccagggccctgaggctgaggggctgagtgctcattccagccgcctcggggaacccgggctgggagaccccatgcctgggggtgagcctggagccagggcagtgcggtgagaggctccggagagagggctgggcaccaccaggcttgggtgaggagggaggcctctggtcgagagcgagctgggagtcct

SEQ ID NO: 135070 - DNA, 824 bp, Homo sapiens; identical to SEQ ID NO: 102358
  chr1:2374845-2375669
  hypo

SEQ ID NO: 135071 - DNA, 224 bp, Homo sapiens
  chr1:2377212-2377436
  hypo
gcacacacggattgccgtaagccgcagcagccaggtctgacaatacgagttgtaattggattttaatttttaatgtccacaacacatgaagagcttcggaccaatttgtgtatcttctgttactctgcgcctaataggaccgcttcattagctgctgtcgcacccacagtgccgtctgtccgggaacggagggagcctggcccgagccccatgccagagcccca

SEQ ID NO: 135072 - DNA, 30 bp, Homo sapiens
  chr1:2382759-2382789
  hypo
atcatacgcagtagcgtctccgagggatgc

SEQ ID NO: 135073 - DNA, 269 bp, Homo sapiens; identical to SEQ ID NO: 58732
  chr1:2384534-2384803
  hypo

SEQ ID NO: 135074 - DNA, 162 bp, Homo sapiens; identical to SEQ ID NO: 58733
  chr1:2403082-2403244
  hypo

SEQ ID NO: 135075 - DNA, 55 bp, Homo sapiens; identical to SEQ ID NO: 58734
  chr1:2411363-2411418
  hypo

SEQ ID NO: 135076 - DNA, 276 bp, Homo sapiens
  chr1:2412167-2412443
  hypo
ttactttccccatgccgccctcgcccaaccaccctgatgttaggagttatgaaaatgcagccttcagctgagctgcggcctttattgtctgtaattggtttctgtttccggaaagcctgctgggccgggggagagaaactctgcccgtcagcaggtcctggttccgggtggtgctggctgagccagcaaaccaggccctggggccttgctgctttgctgcagcttggaaagcgggttctgtgggtgcaagtgccaggccctggggtctctgacacg

SEQ ID NO: 135077 - DNA, 36 bp, Homo sapiens; identical to SEQ ID NO: 13869
  chr1:2412562-2412598
  hypo

SEQ ID NO: 135078 - DNA, 239 bp, Homo sapiens
  chr1:2428211-2428450
  hypo
ggcgccgggcgaggtcgaggactggcagtctgatgcccggtcaccggcgccacagcggcgtccagctggcaggtgtcgtccttcagcgagaccaaggcccaccagattctgcagcagaagccggcgcagtacctacgcttcaaccagcagcagctctcccgcatctacccctcctcctaccgtgtggactccagcaactacaacccgcagcccttctggaacgccggctgccaaatggg

SEQ ID NO: 135079 - DNA, 30 bp, Homo sapiens; identical to SEQ ID NO: 13870
  chr1:2430042-2430072
  hypo

SEQ ID NO: 135080 - DNA, 115 bp, Homo sapiens; identical to SEQ ID NO: 58739
  chr1:2430549-2430664
  hypo

SEQ ID NO: 135081 - DNA, 30 bp, Homo sapiens; identical to SEQ ID NO: 58740
  chr1:2434472-2434502
  hypo

SEQ ID NO: 135082 - DNA, 176 bp, Homo sapiens
  chr1:2437268-2437444
  hypo
cttaccaggtgcccgtcggagcctgcgccaggcccagaagacaccccaagaaaagacctggcctgtcctcagagggctgagctggacaggctcccagggtaggctgcaaagcctgctcctcaggacgcaggccctaaccccgggccacaggccccccaacccgggggactgctctg

SEQ ID NO: 135083 - DNA, 150 bp, Homo sapiens; identical to SEQ ID NO: 58741
  chr1:2439886-2440036
  hypo

SEQ ID NO: 135084 - DNA, 30 bp, Homo sapiens; identical to SEQ ID NO: 58742
  chr1:2440276-2440306
  hypo

SEQ ID NO: 135085 - DNA, 201 bp, Homo sapiens
  chr1:2445341-2445542
  hypo
aggacaggatgccccgagccagcgggacagagacaggacacgcggtgccagcgggacggggacaagagcgagcggaaggccagggcacactgcacttactttggagtagggatccgggaagttgaactcgttcagacagtgctccctggtgtccagcaggctgcgcacggtcagggtcccataggcgctggggacagacac

SEQ ID NO: 135086 - DNA, 30 bp, Homo sapiens; identical to SEQ ID NO: 58743
  chr1:2445759-2445789
  hypo

SEQ ID NO: 135087 - DNA, 30 bp, Homo sapiens; identical to SEQ ID NO: 58744
  chr1:2448924-2448954
  hypo

SEQ ID NO: 135088 - DNA, 30 bp, Homo sapiens
  chr1:2450007-2450037
  hypo
tgcctcagaaacagcgcctgcacttccccc

SEQ ID NO: 135089 - DNA, 362 bp, Homo sapiens; identical to SEQ ID NO: 13872
  chr1:2450393-2450755
  hypo

SEQ ID NO: 135090 - DNA, 30 bp, Homo sapiens; identical to SEQ ID NO: 58746
  chr1:2451496-2451526
  hypo

SEQ ID NO: 135091 - DNA, 931 bp, Homo sapiens; identical to SEQ ID NO: 34907
  chr1:2460597-2461528
  hypo

SEQ ID NO: 135092 - DNA, 495 bp, Homo sapiens; identical to SEQ ID NO: 102361
  chr1:2461950-2462445
  hypo

SEQ ID NO: 135093 - DNA, 178 bp, Homo sapiens; identical to SEQ ID NO: 13875
  chr1:2463121-2463299
  hypo

SEQ ID NO: 135094 - DNA, 30 bp, Homo sapiens
  chr1:2467598-2467628
  hypo
gagcctgtctgacaccggtggcagagtcgg

SEQ ID NO: 135095 - DNA, 451 bp, Homo sapiens
  chr1:2468441-2468892
  hypo
gcctgtatgcatgtacttatgtgtgtgcacttgagtacgtgtgtgtgcctgtgtctgtacgagtgtgtgtgtgtgcctgtgtcccagtgtgtgtgtgcgctcatgtgtctgtgtaccagtgtgtgcgcttgtgtacgtgtgtgcccatgtgtctgtgtgtaccagtgtgtgtgtgtgtgcatgtgtgcccatgtgtgtctatgcatgcatctgcgtgcatgtgcccaggaatgctcacgcctgctcagatgtcctcagctgggccacccgtccccaccctgccccgctgccctaactcccagagtacccgcattggccgagcactgctctgtgccacgtgagccctgggccctggggtgactgtggggaaaaaccctgacaggagtgcctctgccctgccctgcccagtaggaacggtgctcaaccaggcccctggcggccctccgaggca

SEQ ID NO: 135096 - DNA, 30 bp, Homo sapiens; identical to SEQ ID NO: 13876
  chr1:2471717-2471747
  hypo

SEQ ID NO: 135097 - DNA, 72 bp, Homo sapiens; identical to SEQ ID NO: 102363
  chr1:2477790-2477862
  hypo

SEQ ID NO: 135098 - DNA, 177 bp, Homo sapiens; identical to SEQ ID NO: 13878
  chr1:2483771-2483948
  hypo

SEQ ID NO: 135099 - DNA, 233 bp, Homo sapiens
  chr1:2507039-2507272
  hypo
tcaaggctcacaggctcacagcgggtgtactttattggacgtcatacggaccctgaagcaggtgatgtttccaagtgggaattggtaccaggctgtcctatgtctgtccatcccttgggtccgtctgcacggaacagacccgtggcccacaaccccagtgtggctgcagcctgatgaatccaggagtcttggcccagccccgaagcccctgggaggtccggccccaccctggg

SEQ ID NO: 135100 - DNA, 18 bp, Homo sapiens
  chr1:2514346-2514364
  hypo
gaagtctcactctgtcgc

SEQ ID NO: 135101 - DNA, 31 bp, Homo sapiens; identical to SEQ ID NO: 102368
  chr1:2517090-2517121
  hypo

SEQ ID NO: 135102 - DNA, 30 bp, Homo sapiens; identical to SEQ ID NO: 58754
  chr1:2519905-2519935
  hypo

SEQ ID NO: 135103 - DNA, 297 bp, Homo sapiens; identical to SEQ ID NO: 58755
  chr1:2520299-2520596
  hypo

SEQ ID NO: 135104 - DNA, 194 bp, Homo sapiens; identical to SEQ ID NO: 58756
  chr1:2520929-2521123
  hypo

SEQ ID NO: 135105 - DNA, 30 bp, Homo sapiens
  chr1:2521827-2521857
  hypo
ctctctgggtcccccggtgccccagtgggg

SEQ ID NO: 135106 - DNA, 90 bp, Homo sapiens
  chr1:2522315-2522405
  hypo
ttggcatggttggccggggcgggacgtacactgggtcgccgctagctgcaccttcgcacagatgcctccgagcagcgggtgggcgtgggc

SEQ ID NO: 135107 - DNA, 215 bp, Homo sapiens; identical to SEQ ID NO: 58758
  chr1:2527320-2527535
  hypo

SEQ ID NO: 135108 - DNA, 30 bp, Homo sapiens; identical to SEQ ID NO: 58759
  chr1:2527957-2527987
  hypo

SEQ ID NO: 135109 - DNA, 31 bp, Homo sapiens; identical to SEQ ID NO: 58760
  chr1:2529454-2529485
  hypo

SEQ ID NO: 135110 - DNA, 193 bp, Homo sapiens
  chr1:2537659-2537852
  hypo
acccctgcccaccggcgcggctcgtacgtagatgatgtgccggctggagttctggtcgtcgttccagatgaagaggtcgatgaggacgcgcctgttgaactgtgagttcatcagcgccagctgccgctccagctcccactcgagtcctggggagacagtgccccgcactggagactggcgggccctggggccc

SEQ ID NO: 135111 - DNA, 30 bp, Homo sapiens; identical to SEQ ID NO: 58762
  chr1:2541058-2541088
  hypo

SEQ ID NO: 135112 - DNA, 954 bp, Homo sapiens; identical to SEQ ID NO: 102370
  chr1:2559941-2560895
  hypo

SEQ ID NO: 135113 - DNA, 31 bp, Homo sapiens
  chr1:2562645-2562676
  hypo
actttcagtcgtcacacgcaatcacacacct

SEQ ID NO: 135114 - DNA, 30 bp, Homo sapiens; identical to SEQ ID NO: 58765
  chr1:2572894-2572924
  hypo

SEQ ID NO: 135115 - DNA, 761 bp, Homo sapiens; identical to SEQ ID NO: 13881
  chr1:2716538-2717299
  hypo

SEQ ID NO: 135116 - DNA, 281 bp, Homo sapiens; identical to SEQ ID NO: 58767
  chr1:2719756-2720037
  hypo

SEQ ID NO: 135117 - DNA, 30 bp, Homo sapiens; identical to SEQ ID NO: 58768
  chr1:2724399-2724429
  hypo

SEQ ID NO: 135118 - DNA, 305 bp, Homo sapiens
  chr1:2725608-2725913
  hypo
ggtggcagccggcgccgcgtgtcgccacccacacaggaaaggcgagattggtggcagaggccgtgtccgcgtcatcatgggagctgcagctcttcccttagttccctgcacccacttattgaggggggctggtcctcctgggaaaggacctggcagcatccccgggcgtgggacacatgcctcgcagcagagttgggggacacggggctgtgcccgccctccctgcactagaaccagcagcagcaaacagcccccagctcggccgctgaccatgtcctgctcgggtctcccgggctggccctggc

SEQ ID NO: 135119 - DNA, 225 bp, Homo sapiens
  chr1:2726374-2726599
  hypo
catggcaggcgagtccgattccttggatccggcctggatctgcctgagcgagagcctcctgggagtccagagcagcaagtggagaactcgctctgagaagcgcgtggactccctggcgaggccgtggccccagctgaacctatggcctgggttccaccaccctcacctcccactgctccttggtcacagtgggcccagcaggccacagcacggcattacgggacg

SEQ ID NO: 135120 - DNA, 233 bp, Homo sapiens
  chr1:2726822-2727055
  hypo
gggggggggggtacacgtgctcctggactgaacgctgctaccgtaacttcatcagcaccctccaggcgaggaccacgtgtccagcccctgctgtgcacacgactgagggttgtcggttccccgagctcagctgaactccctcctgccagctagccgtccccatcgcccggactggggaacagtcctcctggggatgccgcactcctctccatcattctcggtgcccctgctag

SEQ ID NO: 135121 - DNA, 30 bp, Homo sapiens
  chr1:2728937-2728967
  hypo
ctgctggctcagctccgtgcagctgatttg

SEQ ID NO: 135122 - DNA, 30 bp, Homo sapiens
  chr1:2729532-2729562
  hypo
tggatctgacagggccgcacctcacctgtg

SEQ ID NO: 135123 - DNA, 152 bp, Homo sapiens
  chr1:2746954-2747106
  hypo
gtgctctgcagagcccggggaaacggaggggttggctgtgggtgccggggccatcctcggagctgcctgtgtggagacgtcctatgtccatgggccacgtgagtctactgagcacttgagacgtagttagtgtgactcgggaatggaatttt

SEQ ID NO: 135124 - DNA, 92 bp, Homo sapiens; identical to SEQ ID NO: 58770
  chr1:2752976-2753068
  hypo

SEQ ID NO: 135125 - DNA, 30 bp, Homo sapiens; identical to SEQ ID NO: 13882
  chr1:2789881-2789911
  hypo

SEQ ID NO: 135126 - DNA, 30 bp, Homo sapiens
  chr1:2793625-2793655
  hypo
tctacagctgtgggccgggcgccgctccac

SEQ ID NO: 135127 - DNA, 69 bp, Homo sapiens
  chr1:2798428-2798497
  hypo
ggtggcctcagtcagcgcggcttggagagcaccccccaggcttttttgccgtcacggtggtgtagacca

SEQ ID NO: 135128 - DNA, 191 bp, Homo sapiens
  chr1:2810935-2811126
  hypo
tgtatctcgggaccccggggccccagggttgttttcaggagatgcggcctcagtggaagggacctttttttctagagggggctcaggcctccccaggccaagggtcctcgcttggctggaggcgtctctgctgctttgcctggtggggagggccccagtctgagtgtgccaccctccggagggcgtctcct

SEQ ID NO: 135129 - DNA, 30 bp, Homo sapiens
  chr1:2811632-2811662
  hypo
ctgtgtggtacactccgcgctgctcctcgg

SEQ ID NO: 135130 - DNA, 30 bp, Homo sapiens
  chr1:2817780-2817810
  hypo
ccccaggaagcagatcggcacagagcctgc

SEQ ID NO: 135131 - DNA, 30 bp, Homo sapiens
  chr1:2818111-2818141
  hypo
cagccacaactaaagcgcatgtcgagctaa

SEQ ID NO: 135132 - DNA, 30 bp, Homo sapiens
  chr1:2818537-2818567
  hypo
tcttgaagaccggagcgaggcatccacaaa

SEQ ID NO: 135133 - DNA, 41 bp, Homo sapiens
  chr1:2823318-2823359
  hypo
cgcagtggtggatccacgccatcacacgcctgtccacaccc

SEQ ID NO: 135134 - DNA, 248 bp, Homo sapiens; identical to SEQ ID NO: 58772
  chr1:2823835-2824083
  hypo

SEQ ID NO: 135135 - DNA, 30 bp, Homo sapiens
  chr1:2825349-2825379
  hypo
tctggcctgaaaatccgtcttagcaagtcc

SEQ ID NO: 135136 - DNA, 30 bp, Homo sapiens
  chr1:2826195-2826225
  hypo
tggatcctgcggagccggaagccagctgta

SEQ ID NO: 135137 - DNA, 72 bp, Homo sapiens
  chr1:2827812-2827884
  hypo
ggcgtgggatgatggcgattcgtctcccatcttcaaggccaacacagataggcggtccactgtcccagtggg

SEQ ID NO: 135138 - DNA, 30 bp, Homo sapiens
  chr1:2829786-2829816
  hypo
attcaggggctcagacggggatcgccatcc

SEQ ID NO: 135139 - DNA, 30 bp, Homo sapiens
  chr1:2830021-2830051
  hypo
agaaaaaatgaccctcggcaatgtcccgtt

SEQ ID NO: 135140 - DNA, 291 bp, Homo sapiens
  chr1:2833831-2834122
  hypo
atcgacgtcgtgtgtcgtggttctcgtacctgcgtgaatatttaaaacatgcaaacatgtgggagatgcatttgctgggaacaaaaggaacacacatatttaacccctgaaataaataaataaggcgaaggtgcgcagctggagacagggcatggagacagggaaggcagaggccatgcatatttaacgtggcggctccacgaggctgcgtgtgagcggacgtgtgggcaaaccaccctgaagcatcgtggcgaggcgggcaggggtgcagggtcccggcagggcagccca

SEQ ID NO: 135141 - DNA, 30 bp, Homo sapiens
  chr1:2835782-2835812
  hypo
aaccagcgggagagccggcttccctgcagc

SEQ ID NO: 135142 - DNA, 30 bp, Homo sapiens
  chr1:2836578-2836608
  hypo
aagccctcgggacggcggcggcaccaggcc

SEQ ID NO: 135143 - DNA, 649 bp, Homo sapiens
  chr1:2846735-2847384
  hypo
acatgctcacacacacgtgcacacacatacatgcaaacacatgtgcacacacacacgtgcgcacacatgtgcacgcaggtcccagcatgtgggcttcttccgtgggcaggcacagaggtcgggtgtcggcccagaggttcatggaggcgctaatgagcggctccgggcccgcaggagatgcggctcacacaggtcagatttcggatggatgatgaaggaaatgagggccaggccagcctctggttacagtttaggaaaaacacgaggcgcccttctctagttcaaaaggcagagagaggcagacccaggagctaggggggccggacgggattccagtccggtttcatctccggatgccctgggaacccgcctggcgtagaccgggtgggggcggtgcagacaggaccctggagaacagggctgcggtgcgcagcagggggtggccccggtcacacagtgtcccccatggaggggcctcgatggccgggctgcgcatggcacgtgtcgtgtgtggatccacagcagggccgctgcccccacccagcgccagccgggaggttgggaagtgttagcgccaggagcagctttcagctgaaaaatccccagtttattaactttgctccagaagccagggcgtctgttatttatg

SEQ ID NO: 135144 - DNA, 547 bp, Homo sapiens; identical to SEQ ID NO: 13886
  chr1:2850531-2851078
  hypo

SEQ ID NO: 135145 - DNA, 259 bp, Homo sapiens
  chr1:2859550-2859809
  hypo
gcacaattccaacctcgggaaaaaatgtaatcaatgcgggagggcttaaggataaaatgcacatccgtgtgcacgcacacgcgcgtgaggccatgcacactacccacacgaagctacgagaaggacccagcggcttgccagggctcgtggtgtttgccgcatcctctccagcccatctaacccttacgatgcaatgtggcatctcttggctggtgctgggctgggcttctgggcaaagaccacccgctacacaggcacc

SEQ ID NO: 135146 - DNA, 30 bp, Homo sapiens
  chr1:2876587-2876617
  hypo
ctgggacctgccccacgactggagtgaagc

SEQ ID NO: 135147 - DNA, 277 bp, Homo sapiens
  chr1:2878439-2878716
  hypo
tgtctcctgagccggcgattcaggcctggtatggctgtcttcactcctggcccctccatcccggggaaccagcggcctctgctctgtgggacgctaagcctcgcctccactttctctcttcgatcacggccgtttcatctcaaattgccaccaaggactctctgagctgggaaggccaggcttctgtgcctcggtgtgcaggggtgtgtttattccttccaagtaactgcattggcaaaaaatggaaataatcaatggggaacgatgaccggcattt

SEQ ID NO: 135148 - DNA, 30 bp, Homo sapiens
  chr1:2895797-2895827
  hypo
cagcaagacgagccccgggcccgcactgtg

SEQ ID NO: 135149 - DNA, 30 bp, Homo sapiens
  chr1:2896050-2896080
  hypo
ccctgtgcgcacaaacgcttcacgccccat

SEQ ID NO: 135150 - DNA, 30 bp, Homo sapiens; identical to SEQ ID NO: 58777
  chr1:2897045-2897075
  hypo

SEQ ID NO: 135151 - DNA, 30 bp, Homo sapiens
  chr1:2898430-2898460
  hypo
atcaccattcctctgcggcaacacctcttc

SEQ ID NO: 135152 - DNA, 30 bp, Homo sapiens
  chr1:2899144-2899174
  hypo
tgccgaggggtcaggcgtgaccaggtccgt

SEQ ID NO: 135153 - DNA, 187 bp, Homo sapiens
  chr1:2908572-2908759
  hypo
ctcttttgtgcacgccgcatcttcgtgaggtgcattgcgtcactgcagggagaaatcgtgcttgttcctctgcagtatcccctcatttcaatgtctatgtatttatccattctaatatgcatggactttcaacaagtttccagttttagactattttgcttaaaagtcttaccgacattcttgtaaa

SEQ ID NO: 135154 - DNA, 216 bp, Homo sapiens; identical to SEQ ID NO: 13887
  chr1:2918442-2918658
  hypo

SEQ ID NO: 135155 - DNA, 30 bp, Homo sapiens
  chr1:2919056-2919086
  hypo
gtggttctttgtaaccggcttgccaccaaa

SEQ ID NO: 135156 - DNA, 30 bp, Homo sapiens; identical to SEQ ID NO: 13888
  chr1:2925725-2925755
  hypo

SEQ ID NO: 135157 - DNA, 30 bp, Homo sapiens
  chr1:2934696-2934726
  hypo
caaacccagatacgacggtgacggagccag

SEQ ID NO: 135158 - DNA, 30 bp, Homo sapiens
  chr1:2935483-2935513
  hypo
ctctcagctcagccccgagtattgggcgac

SEQ ID NO: 135159 - DNA, 241 bp, Homo sapiens
  chr1:2936251-2936492
  hypo
gcccgtgcacgctatcgaacaggagcggggttgggatggcgcctgcccctggaagatggcgttcaaggggggcaccctctgcccgtgcctgctatcgaacaggagcagggtcgggatggtgcctgcccctgccccgggacactctccgtgtcccccagcacaggcctcaggtgaccttcagcaggacctgcggggtgaccttgatgtgggcagggaggagctccagcgtctgggtcaacag

SEQ ID NO: 135160 - DNA, 744 bp, Homo sapiens
  chr1:2938630-2939374
  hypo
gttcgagaacttcggcgtgcccgctttctacctgtcggaccaggcggtgctggctctctacgcctctgcctgtgtcacgggcctggtggtggacagcggggatgcggtcacctgcactgtccccatctttgagggttactccctgccccacgcagtcaccaagctccacgtggcgggcagggacatcacggagctcctcatgcagctgctcctggccagcggccacaccttcccctgccagctggacaagggtctcgtggacgacatcaaaaagaagctgtgctacgtggccttggagcccgagaaggagctttcccggaggccggaggaggtcctgagggagtacaagctgcccgacgggaacatcatcagcctcggggacccgctgcaccaggcgcccgaggccctgttcgtgccccagcagctgggcagccagagccccgggctctcgaatatggtctccagcagcatcaccaagtgtgataccgacatccagaagatcctctttggggagattgtgctgtcggggggcactaccctgttccacgggctggatgaccggcttctcaaggagctggagcagctggcctccaaggacacccccatcaagatcacggctccccccgaccggtggttctccacctggattggagcctccatcgtcacctctctgagtagcttcaagcagatgtgggtcaccgccgcagacttcaaggagtttgggacctccgtggtgcagagaag

SEQ ID NO: 135161 - DNA, 1716 bp, Homo sapiens; identical to SEQ ID NO: 102375
  chr1:2984306-2986022
  hypo

SEQ ID NO: 135162 - DNA, 577 bp, Homo sapiens
  chr1:2997501-2998078
  hypo
gtgtagagggggtggcggggcggggggggtctgcacattccgccgagtgtcctcatgaacaaaaggcctaaaaaaaagcagagagtaagggagctcagagaatcggggggcagatagcgtagccacgaggggctctctggtttcatggctgggaatctgaaccgcagggcagaggccccggagtcttaactttccctccgtcgaaggtgttagtcttaccttcccgaggttagataaagccgctaaaagctgctgtttgttattgaatctcatctgctaattacggcggcgggacttgggttcgaggcccctcgcggctgtaccccgagtcccccgtgctggcacctgataaggggtcattctgtgctctttccagagggttttaggttgcgtccgctcctgacaggtgacccttgttcaaagggaacgaggggctggtggccacggtgggcgtgagaggcccattcctgcagcctggcccggccggcccctggagagccccctccttgtcccaccagaccgagctgtggccgtgtgaggagcagggctgaggtggggagaacgccgacttgcattt

SEQ ID NO: 135163 - DNA, 145 bp, Homo sapiens
  chr1:2999261-2999406
  hypo
aggcaccctgttgccgcagcaaggagaggtggggtgcgcttcatctcagctgccccagggctgagctcagctttgcccgctttgtgcggagtccaccgagggggcctgggggacaggcgagattggaaagcgatggggccggcgc

SEQ ID NO: 135164 - DNA, 180 bp, Homo sapiens
  chr1:2999776-2999956
  hypo
gcaatggctaggagacgcaggggtcgggtctcctggctgcgccccaccaagcagcaacctggcggctgggccccggaactgcacatccctccccatcatagccctgtcctggactgggcggcgcgctcatttcaaggcagtgcggccatctgggctgggcctggcgctggcggggcctgc

SEQ ID NO: 135165 - DNA, 611 bp, Homo sapiens
  chr1:3000538-3001149
  hypo
aggagaccctgttcgcgagagaagagaacaggacccttgttcggagagatgtccctgggtcttggcagacccacacgcttgtggagggagcgagaggagaggtggctggggacgaccgaatcccagcgctgctgtgggctccctggaggagaaagggccttggtgtctgctgggccagaatgcaggcctttcactcctctccttgcctgggactgcggtcctggcgggccctggggcgtctgggggcctgtacccctcgggtggggcaggttgggctggagccccctggatctggtgtcaggcagacccagaggcagggcacaggggccgcctctggccctttcaaagggacattcgatctgaagcatggggcccagtaagaagattccagggaacacagtgctgatggggccgaaagcgctcggcggccggagagagcctctccacagtctgtgctctggcacgaggccctttgtgggattatctgcccccctgggaggcacggaatgctgggggcgaggggccacagcaatattgagcttgcatgggcccccgataaagcggctgcttgctgcagttgctctgtcgccgaaattcgaggtgcagcccca

SEQ ID NO: 135166 - DNA, 154 bp, Homo sapiens
  chr1:3006836-3006990
  hypo
gagggctgtgactgccgctttcccgaagcgcttccatccacttccaagggagtccagctgggagactcaggcactggagctggtctcgtgagaagcgccacatggccctgaggctgggtggggattggtggccgccgttcggcaggcctggtgg

SEQ ID NO: 135167 - DNA, 515 bp, Homo sapiens
  chr1:3007586-3008101
  hypo
cccggagacctcagccgcaaactctccctaaccccgagctctagctctggacggggcttcttctctaaatgccaaggcgccatgaagagacacaaatggaaagacaggaatgaccgctaacagggagaccaaatcctgtcccaaggagccaccgaccaatagcagcttaaaccacacagagcgcttccatcagacgtgacctggccaagccagacaggctctctgaaacccagggtatgcggatggggaaactgaggcctagggagaggctggtttggagtggaggtcacctgggacgttaccagcactggacttgacttaagcgggtgcagccaggcccgcaccgagacgacagcatctctttcatcttccaaggcccatcttcctggcaaggcccaggttggcaacgctcagcttttcagcaggactcagatccagggggagttcgtgagaagggcaggggttgggccgaatccactcctcgtgccggctcctctccacgcctgccccgtgcc

SEQ ID NO: 135168 - DNA, 226 bp, Homo sapiens
  chr1:3008423-3008649
  hypo
agggcctccctctaacgggggtgatggacagttcgcaggtggtcagatgcgagagaattcacatcgcagaacctgccaggaaaatcaatgggaccgtgaggactgctaggtttgggaggcccgcgttagccccaggacggcttcatggggaggggacgcaggtccccatgtagaggataagatggagccagccgtgggtaagggtggaccacgcaggatcgcagga

SEQ ID NO: 135169 - DNA, 30 bp, Homo sapiens
  chr1:3008904-3008934
  hypo
aggggcaaaggcacccggtcctgccccact

SEQ ID NO: 135170 - DNA, 44 bp, Homo sapiens
  chr1:3013632-3013676
  hypo
gctggggtcagacagcgcttcacccaggccgggattctagggag

SEQ ID NO: 135171 - DNA, 30 bp, Homo sapiens
  chr1:3013976-3014006
  hypo
cagtggccaggctgccgccccgtgccctga

SEQ ID NO: 135172 - DNA, 30 bp, Homo sapiens
  chr1:3015617-3015647
  hypo
cagagcggtgggggccgtgtgggagcgctg

SEQ ID NO: 135173 - DNA, 101 bp, Homo sapiens
  chr1:3015908-3016009
  hypo
gggctgccaaggggccgggagagatgtgtgcccgctatgtggcttcagctacaccaataaccagcctcacggaggccccggagccccggatgctcagcacg

SEQ ID NO: 135174 - DNA, 30 bp, Homo sapiens
  chr1:3016338-3016368
  hypo
agaaaacactcccagcgtcccttatatggg

SEQ ID NO: 135175 - DNA, 530 bp, Homo sapiens
  chr1:3032636-3033166
  hypo
ccctcacacggcaggcgtcaggttgagtccttggggttcagggaggtcaaggtcaggcctagcgtgggtggtcatctcaggggcagcactggtggccgttgaattgttccttaccggggagaacaggtggcagggagggatggttccagaccccatggcacccgtgtctctgcagtgtgtccctctcatggggggacagtaggcagagctccccggctgccctgcgccggcgtgctcactccgcggtgcgtgcttaatacccacagtgtgagaaccgagagccagggccaatgacgggggggacgcgggttcacgggtggcctggagacgtggcaccgtacctccctgctcccttcctgtgagaattttgccctcaagatggcagcccagcctggatgcccagaccccattcccaagccgcaggtcctggtctgggctctgtcactcggggacgcgcctgcttgtctttccccggctggggcagtgcctggtctgctcagcccttcctctctccccgcccgggacagagg

SEQ ID NO: 135176 - DNA, 261 bp, Homo sapiens; identical to SEQ ID NO: 58786
  chr1:3034297-3034558
  hypo

SEQ ID NO: 135177 - DNA, 369 bp, Homo sapiens
  chr1:3035076-3035445
  hypo
cggcatgatggcatccgcccccagctcatggcccaggtctccatgaagatgaacaaaacaccaccaggagagggggaggcaaagccgggaaagaaccagggagtctgtgtggctttcaccacatgctcaggtgctctgtggcatatgaccatgtctccaggactggcagtcggggggtgtcagggacccccagagcggacttgatctcagcctgggggccacgtggatggagtccagggagaccccagctgctggcgtgctagggcgtgcgtgtacacgtttgtgtgcaagtgtgtgtgcacgtgcatgcgctgtgtgtgcacttgcaggtgtttggacacagggcccgaggcacctctgtgcccaagt

SEQ ID NO: 135178 - DNA, 127 bp, Homo sapiens
  chr1:3037184-3037311
  hypo
gcagccccctgggagcgggaggatgcctgcccttgcgtctctgcgctggagcttctgacacctttcgcagtgaaaggcagggtggatagtcggtgaggagagggtctggaagcggtgggcctcgtgg

SEQ ID NO: 135179 - DNA, 103 bp, Homo sapiens
  chr1:3037696-3037799
  hypo
agaggacagcttgcccgtcacggagcccgcaggtcacaggatcaggcctggcccccgagctgcgtaagatcagctggcctggtcaggacggagcctgccccag

SEQ ID NO: 135180 - DNA, 187 bp, Homo sapiens; identical to SEQ ID NO: 58788
  chr1:3050792-3050979
  hypo

SEQ ID NO: 135181 - DNA, 402 bp, Homo sapiens
  chr1:3052579-3052981
  hypo
ggagattgtttggctcgctttgtccgggagccacaggacaccaggctggggcggggctgggggcagaacgctcctccagcagcctaggagccacccctgggaagaaagggggtctcgggcagcctcgccatgggaccaccagctttgggccttcgttacaggggtgatgctgccccgctgatagggttgggggcctggggctgcagcgtagctgaagtggaacctgcccagcctgcacttcccagctggccagccccgcgcgatgctccggggtctcggcgaggcacgccaggcactgagtcctcagacccgctgtccggggacctctggtgtcgtccattttacagacgaggcagtggaggcccagaaagatggaccgacagtccccgccttagagtggct

SEQ ID NO: 135182 - DNA, 30 bp, Homo sapiens
  chr1:3059210-3059240
  hypo
ggtgcgcacaggcaacggaacgcctgggat

SEQ ID NO: 135183 - DNA, 330 bp, Homo sapiens
  chr1:3059515-3059845
  hypo
gcgatgctgatctctcggcaacagcttttccataagggaatccgatgcatttgctgggatgcaggattcgggctgtgttgctgatgagatcacataggggctggagaattcgtacccgcgggcacccatggaagcctgagctctgtcttttcagtcgcctgtcatttaaaatgaaagtaagaagggagaccttgtggcaaccgcagtgctgggccggggggagtcgctggtttgcagcccctcgggggccgagtgttccgggctctgatttttgctggctgagacacagggacccctgggtgtgcgggaccgtgccgggaagtgtggaca

SEQ ID NO: 135184 - DNA, 30 bp, Homo sapiens
  chr1:3063094-3063124
  hypo
gtgtgcacgtgtgttcggtgtggggtgtgt

SEQ ID NO: 135185 - DNA, 30 bp, Homo sapiens
  chr1:3063336-3063366
  hypo
gtgcacatgtgtgctcggtgtggggtgtgt

SEQ ID NO: 135186 - DNA, 190 bp, Homo sapiens
  chr1:3063569-3063759
  hypo
tggggggtatgcgcacgtgtgtgctcggtgtggggtgtgtgtgcacgtgtgtgctcagtgtggggtgtgtgtatgtgtgcgctcggtgtggggtgtgtgtacgcgtgtgctcggtatggagtgtgtgtgtgcatgtgtgtgctcggtgtgaggtgtgtgcacgcacgtgtgtgctcggtgtgggtgtgga

SEQ ID NO: 135187 - DNA, 30 bp, Homo sapiens
  chr1:3064200-3064230
  hypo
atcttggttctgcgtcgcacacagcaccgg

SEQ ID NO: 135188 - DNA, 30 bp, Homo sapiens; identical to SEQ ID NO: 58790
  chr1:3064620-3064650
  hypo

SEQ ID NO: 135189 - DNA, 501 bp, Homo sapiens
  chr1:3079871-3080372
  hypo
ggagaggggatgtccgcagaagcccctggcatgacccccttctagtgggtcagtcagcacaaccatcaagttccaagctcagattcaggtggaggacacagatctccaaggcgtgcacagccggaggcctgagtgagcacctctgacggtccagcccagagtaggtgttgagtaagagcggtcaagcagtgccagttggtaaaacccacgcggcgttagcttcctggggaggtcctaaccgggtaccccagcctgagtggctgaaacaacagatacttctcctcccacggtcctcagggccagaagtctgggatcagctgtgggcggggcggtcctttggaggctctgagaacccttgtcccggcctccttctggctccctggggctgccggcatctttggcgttccctagtttgtaggagcatcgcccagcctcagcctctgtgtgcatgtcatattctaccccgtgcgtgttcacgtccagagccgtgttttatcagga

SEQ ID NO: 135190 - DNA, 187 bp, Homo sapiens
  chr1:3086476-3086663
  hypo
ctaatgaccgcggcccgcgcgctccgagtaatcgggtgatgtatgtggactgtgcacacctcgtggcagaggtgaaaatcatttcgacaagtcaaatattgtcacagggaacaaatggctctccctgttaataaaaattaatgaattttttttttctttcttttttcctcgccgctggcctgctaaa

SEQ ID NO: 135191 - DNA, 30 bp, Homo sapiens
  chr1:3094553-3094583
  hypo
gacgccaggccgcggcgtcttgctgcctct

SEQ ID NO: 135192 - DNA, 232 bp, Homo sapiens
  chr1:3094870-3095102
  hypo
ttctgaaattcttggcgaatctcccctccctcccgcaggcttccgtctgcctccctcacctccgcacagccccaaacccagaaccgagctctgcggagaggtggttctttaacagccacgtcttcctgggaaggctttggatgggaaaagtgctttgcagcccagctgctgttctcccggaggccggggctcctggaggctgccgcttgcttttctccgcctgggtggcaaa

SEQ ID NO: 135193 - DNA, 30 bp, Homo sapiens; identical to SEQ ID NO: 13893
  chr1:3101761-3101791
  hypo

SEQ ID NO: 135194 - DNA, 30 bp, Homo sapiens
  chr1:3106045-3106075
  hypo
ctgggacaacccatgcgtgcgtgtcgtctc

SEQ ID NO: 135195 - DNA, 51 bp, Homo sapiens
  chr1:3106930-3106981
  hypo
gcctcagttgctggtcggaagcctgcattccttctacgctgaggctgacgc

SEQ ID NO: 135196 - DNA, 179 bp, Homo sapiens
  chr1:3107261-3107440
  hypo
ccaaataccacgccccgccggtcgccgccgaagcccacctgcctggaggaaatcacccgtgagcgcatttgctcgccgtggggtctgcaaaaacaatgattttcacatttgttgagtaaatcatgacatttatcatcatgctgtttattttgctaattaagaggcggctgcccggtgac

SEQ ID NO: 135197 - DNA, 146 bp, Homo sapiens; identical to SEQ ID NO: 58794
  chr1:3109585-3109731
  hypo

SEQ ID NO: 135198 - DNA, 168 bp, Homo sapiens; identical to SEQ ID NO: 58795
  chr1:3110662-3110830
  hypo

SEQ ID NO: 135199 - DNA, 706 bp, Homo sapiens
  chr1:3111097-3111803
  hypo
taatatcaaggctggactctgcggcaactggccactgtctccccaccacacgccaccgtctccccaccacacgccaccgtctccccaccacacgccaccgtctccccgccacacgccaccgtctccccgccacatgccaccgtctgatcgccacacgccatcgtctccccgccacacgccaccgtctccccgccacacgccaccgtctgatcgccacacattagggcttggtattctcagtcccacgttttatcatctaaacgccaaaactcgttcctggcctgccctttctctccaaggttcccagatgcacgctccactgcccacaccacccccacggttgagtgggctcggccccgggacgtggcctggctctgggcacctctgctgctccactctgcgtggagagttctgcgtgaggccaggaagctttgccgcgcttccccactcaggagcttctggatgtttctatggaggcctcacgtctaaaaccgtgagcgcaccggccagtggatgctctgaggagtgttcccgtggagccagcaccgggcagctcggcgaggcacacagcgtcgggatttggagagagacggggccctgtgggatggtgcggagcctgaggccaccgtggggacagggatgcagagaaacccatgggcctcggcgttgctccgggagaagccggcagtgccgtggaggagtcaca

SEQ ID NO: 135200 - DNA, 30 bp, Homo sapiens
  chr1:3114120-3114150
  hypo
gtaggcctacgagggcggcaggaagcaact

SEQ ID NO: 135201 - DNA, 693 bp, Homo sapiens
  chr1:3114419-3115112
  hypo
gtcaggggatgagcgcgtgaacctcgcactcctcagggggcagtggcaggtcccactgccctcccgccaggcctgctgctggtcagagcttctcctgtggcaggaattctcatgggccgggtcatcagctggggtaggaatgtgctctcagggtgctacgggccaccttggcctcaaccagagatgagggtgacgcaactgctcacaggcccgctgaggggcagcgacctgaggacaactcctgtgggctgcctgtctctgctgcctcctgcacgcgggtagaatctgctcgggtcaggggcgggcactccatgcgttctctggacccccgagctgcagtgtggctgggttgctgtggttgaaggcacctgccttaaggggccaggtcggcgcagggcagcgtctctctggggtgaggagtttatctgagtgccttagagaaggccctttggagaatggctgcaagccggcacccttgctgcatggagggtttgttctgcgtggccttggctgggcctttcctgtcgtttgggacatatgtgagtagaattgcctcaaagtgactattctcactcagctgccaggatgccgtgagtgtgtctgctgtgcaggggagcgtggtctcttcttgcttttgcagctccgggcccacctggagtgcttggcgtggcactgggccgtggccttctggga

SEQ ID NO: 135202 - DNA, 30 bp, Homo sapiens
  chr1:3121869-3121899
  hypo
ccccgccggggagaccgcccctcgtcagcc

SEQ ID NO: 135203 - DNA, 147 bp, Homo sapiens
  chr1:3122494-3122641
  hypo
cagggatctgaatgccgaaggagcccccagccccctgccctgactcagggagttgcagaaaacagcagcgcgccccagcgctgccctcccagctgtgtgtgagcgagaccggggctaacagccccctacctgcgttccccatgaccg

SEQ ID NO: 135204 - DNA, 415 bp, Homo sapiens; identical to SEQ ID NO: 58797
  chr1:3122847-3123262
  hypo

SEQ ID NO: 135205 - DNA, 165 bp, Homo sapiens; identical to SEQ ID NO: 13898
  chr1:3124781-3124946
  hypo

SEQ ID NO: 135206 - DNA, 200 bp, Homo sapiens
  chr1:3125907-3126107
  hypo
cagctccgacgtggccggtcccgactggcacacctgccccgagtcacctgggacggactgcagccagccagctctcccttcttcctggggaggcctgtgaaggtcgcgtgaatgcctgtgtcccccgggacagccagggaggcaggaggccaggcctgggtgtggaataggcctcgctgggaggccgtggttctgctcct

SEQ ID NO: 135207 - DNA, 872 bp, Homo sapiens
  chr1:3127860-3128732
  hypo
tttttctaagtagaccgattgaaaataagtgaaagtcatttccgggcagcagtgtccacctgaaagttgagatatgcacagtgttgaccgaacatctctcgtggtgtctggtccagcagtgtgaaaagccgtgggcttgatctagctggagatgcggccgtgggtggactcctaagaaaagactcaaggcagagtctcttggggcccgtcgggggctgcagcagattcgtgtcttgaaaacaggttgggtccagctccctctgctgtgaggtccctgcctcattgctgggacttttgtctcaaggccccggcctcgtccttggtcgtccagcccactggccgcagcagtgggggccggcgctggtggtcagtgctcgctcaccctgccctgcacagcccctaatgttggcacttcacggacaagccggcctgggtcctcagaggagaataaatgtgcacggaacagcacacggtggcccatggccttgcagcacgagcgtgtccatgcgtgtgcacgtgtgcatgcgtgtgcgtgcgcgtgcatccacgcctggcggcctgggcccggcgtgagtgtgtgggtgggagcgggtgtgtatccgcggctgctccattctgctgtaaaggctcgctgcagtgggcaacatggaggagacatgaaagaggggacaataaatagcttcctaccttgcctggataatgggcgagttctccgggtggattaatcctcgcgtcgtctttgggccgtcagtttgggagtgacagtaacaaggctcccggggaccctgctaatttgcactccattcaccggctcgtgaaaccgtcagggctgcggaaggactgcgcggcgcgggcctccattcactgggagc

SEQ ID NO: 135208 - DNA, 30 bp, Homo sapiens; identical to SEQ ID NO: 13900
  chr1:3129201-3129231
  hypo

SEQ ID NO: 135209 - DNA, 123 bp, Homo sapiens
  chr1:3130374-3130497
  hypo
ctcccgaggccaagccggtgccttcccaggaggccttgccaccccccattaatcctgcaattccagatcattatcaaggtcactgcctggtacattaactcagaagcacgcgggtgacagggt

SEQ ID NO: 135210 - DNA, 95 bp, Homo sapiens
  chr1:3147313-3147408
  hypo
gctgtgtggtgcctgcgcaccttccttccccacacctgcccggtgcgaccgcactgcagcctcgggcaccatgaggcattcgaagtgacaacctt

SEQ ID NO: 135211 - DNA, 30 bp, Homo sapiens
  chr1:3149989-3150019
  hypo
ggggtcccctcctgccgctgccactcacag

SEQ ID NO: 135212 - DNA, 30 bp, Homo sapiens
  chr1:3150644-3150674
  hypo
cgattgggtcggtcccggtgtcctgggagt

SEQ ID NO: 135213 - DNA, 31 bp, Homo sapiens; identical to SEQ ID NO: 58802
  chr1:3154696-3154727
  hypo

SEQ ID NO: 135214 - DNA, 31 bp, Homo sapiens; identical to SEQ ID NO: 58803
  chr1:3162049-3162080
  hypo

SEQ ID NO: 135215 - DNA, 30 bp, Homo sapiens; identical to SEQ ID NO: 58804
  chr1:3163032-3163062
  hypo

SEQ ID NO: 135216 - DNA, 30 bp, Homo sapiens
  chr1:3169551-3169581
  hypo
accaaacaccagccgcgtgtgcaggaaccc

SEQ ID NO: 135217 - DNA, 229 bp, Homo sapiens
  chr1:3172383-3172612
  hypo
acttgtgcccaaagccaatcccgtggccgcaccgacacccgaagccaaccccgtggccgcactgacacccgaagccaaccccgtggccgcaccgacacctgaagccaatcccgtggccacaccaacagtacagggtggaacgagctccgcctctcaggggagggacaggattacgtggcagagagcaggtatgtggcacagtgacagcgcctcacctgggactgggact

SEQ ID NO: 135218 - DNA, 30 bp, Homo sapiens
  chr1:3176338-3176368
  hypo
cgtgggcctgggatgcgcctctccactggg

SEQ ID NO: 135219 - DNA, 190 bp, Homo sapiens; identical to SEQ ID NO: 13901
  chr1:3179304-3179494
  hypo

SEQ ID NO: 135220 - DNA, 30 bp, Homo sapiens
  chr1:3179831-3179861
  hypo
tctccccgccccgcccggctttgtcaaagg

SEQ ID NO: 135221 - DNA, 922 bp, Homo sapiens
  chr1:3182321-3183243
  hypo
cattatccagctggcacctcacgctctgtcctcaccgcccagaccctaggagcccccagaccctgcctcagtgggtcgtgcccaggtccttcgctctctatgatccctttacggtcgtgcagtgctccccagggctccgcactgctccccagggttccttggtgcgtgtctcataaagcccaggagggcgaggccaggcccagcccccaactcaagggccgccctccagcctagcgacgccacctggcccctctttccattaagtctccgtcgtcttgagtccatccagggcggtgtgcggccggtcgcttagtcagcaagaaccctgtgagctgcagtcatcataaatgcatatttaataactattttcttcctggggaaaatgtgctgcttcagaagttcagaaatgggcttcgctcttcagctggtaatgagaagttaataaaagtgggattttgtgcaacgctggccctctgacatcttaatctttattaaagagacgtaaacttccacggatcgggcgggcctgcctggcacagccggacgccaggagagccgggcaggggtggcccaaggccggccgagcacccgtaatccaccagagaacaatgcgcgccggagccttttcgccccgagagcccctcgcacttacctcagtagacgcgaattaattctctccccctgagagccccagagagactggggaggaccgagcggttcgcatttgcaaagctcttaatcagtgaactgcgttggaggcattgctgctccgctcctccgacgaggagagggccccaggggcaggagccactccctggatctcagacccgcttgtctcgcaggcgggaggcacgggcctgcaccctccgccgctcccacgctccagcagaccacggtggggcatgcattttatttttattta

SEQ ID NO: 135222 - DNA, 22 bp, Homo sapiens
  chr1:3183542-3183564
  hypo
cgtgcattttagagccatctcc

SEQ ID NO: 135223 - DNA, 30 bp, Homo sapiens; identical to SEQ ID NO: 58808
  chr1:3183975-3184005
  hypo

SEQ ID NO: 135224 - DNA, 414 bp, Homo sapiens
  chr1:3184583-3184997
  hypo
ggtgcagacctcaggggcctgcggaccacggctccccggccctcaaaccatgacccccgaatctaacagggtgcccgtttgcacacacgtgggagcgtacggtgagcaggtcctagacttcggctggcccactggtctcaggagaagggcccgacgctcctgctgcggttgcagtcgcccccggctcggcgcgcgtcagaccaggtgcgcgtggaagtgtgtttgtctccgctaatccacgggggaaggagaagggcagagtctttgtcaggctccgagcaattaggataattaaaaaagaaggcttattgggtaaacatgctctgggattgtgaccccttaattaatggactacggggagaaattacagcagtggcaggataattaacgtgtgcacttcgcaaagccggtaga

SEQ ID NO: 135225 - DNA, 192 bp, Homo sapiens; identical to SEQ ID NO: 58810
  chr1:3193759-3193951
  hypo

SEQ ID NO: 135226 - DNA, 134 bp, Homo sapiens; identical to SEQ ID NO: 58811
  chr1:3194280-3194414
  hypo

SEQ ID NO: 135227 - DNA, 499 bp, Homo sapiens
  chr1:3195277-3195776
  hypo
agaaaactggccacccgagaacttttccagtgtgactgctggcctctctggcagacgtgtccaaactcagaaaacctctgctgctctgaccacagggaacgtcagaggggacggggcagcggaacaaagcacaaagcgtccctgcgtcctctcaacgtggcccagctcctgcagacactcagcgagccgtggcctctcccatcctcccacgcttccctccggccggccctggagatccgtggagccacacggtgccgagcgcggcgctggccgtgtgctccgtgtctgtcatcgtcagccctgtccacctttggggcaggggcagctgggctggctccagtttctctccatgtcaactttgcaaaggaaggaggtggatgcagaagctgccaccaatagccacgtgggcagctgtggccccgagtccggggatgcagttggtcatcaggagcctcgaagcgtcgctcaccatgcctggaaagaccggcggcctctcctg

SEQ ID NO: 135228 - DNA, 30 bp, Homo sapiens; identical to SEQ ID NO: 58813
  chr1:3203753-3203783
  hypo

SEQ ID NO: 135229 - DNA, 191 bp, Homo sapiens; identical to SEQ ID NO: 58814
  chr1:3204233-3204424
  hypo

SEQ ID NO: 135230 - DNA, 112 bp, Homo sapiens
  chr1:3213731-3213843
  hypo
ggcccctccaggtcccggcgtctccttggactcacattaccagcatttctgtccatttcgggtgagacccgaagcagcgagaccctatccaggtcaacgtctggtgagagga

SEQ ID NO: 135231 - DNA, 565 bp, Homo sapiens; identical to SEQ ID NO: 58815
  chr1:3228680-3229245
  hypo

SEQ ID NO: 135232 - DNA, 31 bp, Homo sapiens; identical to SEQ ID NO: 13906
  chr1:3233990-3234021
  hypo

SEQ ID NO: 135233 - DNA, 30 bp, Homo sapiens
  chr1:3248308-3248338
  hypo
gcgtcctgggctcaccgtggctctgctgtg

SEQ ID NO: 135234 - DNA, 197 bp, Homo sapiens
  chr1:3248785-3248982
  hypo
aatgagattctgccacgcgctgtgtactcgcttccgagaaaatcatctattaattgattccaattactcttaattgtttctcatacgtttcaattaggcagccctgttgttacagcgggagctggattaggcgagtaatccccaggcctctaatgtcggggtggtgtgggcagtggggggctcggggctgggggagg

SEQ ID NO: 135235 - DNA, 237 bp, Homo sapiens
  chr1:3258152-3258389
  hypo
tccctaacttacgatcgctcaacttaggaatgtttggctttacgacggtggagaagtgatcataataattcaatagaaaacatacgtcgggttttgagttttgatattttcccagctatcaatttgtggcccaacaccctcttgctgtgtggggcaacagcagcagctgccgctcccaggccagccacacagtcatgagggtgaaccgcccgcgctctgcagcgcactgtgtggcca

SEQ ID NO: 135236 - DNA, 30 bp, Homo sapiens; identical to SEQ ID NO: 58817
  chr1:3275037-3275067
  hypo

SEQ ID NO: 135237 - DNA, 30 bp, Homo sapiens
  chr1:3295173-3295203
  hypo
cccgcggcgatgagcgaggggcctcgacag

SEQ ID NO: 135238 - DNA, 30 bp, Homo sapiens; identical to SEQ ID NO: 58818
  chr1:3307162-3307192
  hypo

SEQ ID NO: 135239 - DNA, 30 bp, Homo sapiens
  chr1:3307677-3307707
  hypo
gcgtgagccaccgcccgagccatcctcaca

SEQ ID NO: 135240 - DNA, 30 bp, Homo sapiens
  chr1:3307949-3307979
  hypo
ctgtgccgtctgaaccgctacgcaaaccac

SEQ ID NO: 135241 - DNA, 30 bp, Homo sapiens
  chr1:3308505-3308535
  hypo
gctcagctcctgggccggcctcggggctcg

SEQ ID NO: 135242 - DNA, 202 bp, Homo sapiens
  chr1:3315169-3315371
  hypo
taattgtgaacccctcggctctccggggccattaggcactgatttatttttctgttacattcctgctctgccatgaagattgctgatggaacttcagataggcaagtgaggcgcagatatgacaaacaagatgtgaggtcaccacggcgttggcttagttggcgtaggtgacaggtggatgctgtaccgcggcccacgcacc

SEQ ID NO: 135243 - DNA, 30 bp, Homo sapiens
  chr1:3319401-3319431
  hypo
aagctggacctgcggcgccataagaagtac

SEQ ID NO: 135244 - DNA, 30 bp, Homo sapiens; identical to SEQ ID NO: 13907
  chr1:3320797-3320827
  hypo

SEQ ID NO: 135245 - DNA, 1256 bp, Homo sapiens
  chr1:3321123-3322379
  hypo
ctcacagcccggccacggcagagaggaggtgggcagggagacaccagcatgtgctctgatccctcggcagcgtggtgggggctccgaaggggcactgggaacaagctgtatggttggggtcccctcccgggcagagggcaggtagtcgggccccgcagtgagcctcgtcctctgcgcagcctggagcagcacatggtcatccacacggaggagcgcgagtacaaatgcgaccagtgtcccaaggccttcaactggaagtccaacctcatccgccaccagatgtcccacgacagcggcaaacgcttcgaatgtgaaaactgcgtgaaggtaacctgcggggcggccccgtctcagccccggggcagcaggaggctgcagacgggcgcccgcccccgtgctccctacaccccctggtccaaatgtagatggagtgcggcagagtgggtaggaggcccctgcggtggctcgggcccttccgtgtgactaggaaggaaaggaagtctcagggaagaccgtgtcccccaggtcagaaggatcagggccgagaccagaacccaggcccctccagagcgcggctcctgtcctcccgccggtgtggaaggaagaggctggcggggctgagccgagcctccaccccgagcccgccagggtctcagcaccacagctgaaaacgctttctgcagccctgtctcacgcagcctcagttcaggaattgttcttgaggaaagcagccggggaggctctgcggctcacttaaggccctgcagcgggtccttgctacacagagacctgtcccggcctgcttggtgcagactgcaacgtggcaagagagacaggcagggccctgccccccacagccggttggtccgccagccagaaccaggccaaggcgggtgtccaggcagggcacgcgccaacggcatccgtctccccaggtgttcacggaccccagcaaccttcagcggcacatccgctcgcagcacgtgggcgctcgggcccacgcctgccccgactgcgggaagaccttcgccacgtcctccggcctcaagcagcacaagcatatccacagcacggtgaagcctttcatatgtgagtggtcgcccagcctggccgcctgccctccgggtgcgcggatgccgtggcggtcgggccgaggtgggccatcccccaaggtctcccccgatccgaggggccccagtttgttcataaagcactcatggcaggttctgacatctctgccgcgtgcagcctggtcc

SEQ ID NO: 135246 - DNA, 229 bp, Homo sapiens
  chr1:3323790-3324019
  hypo
cacctgggctgtgcccgtcccacccacctcccaagccccagcgtccagccgtcctgctaggggtgactccgcccccagcctaacctgggccacatgcccccaccaactgaggaaccaaagggagatggagctctgcctgccggccgttccacaagtactgttttcccatttgctgaccaccgatctcccaggaggagcatgtgtgcagtgtgcccggctccggcacccc

SEQ ID NO: 135247 - DNA, 605 bp, Homo sapiens; identical to SEQ ID NO: 102383
  chr1:3325181-3325786
  hypo

SEQ ID NO: 135248 - DNA, 408 bp, Homo sapiens
  chr1:3327629-3328037
  hypo
ccacatgctcatgtgtgcacacgtgtgcacactcagacacgcacgcttgcagaatacacacacgcctgcccagacacggacacttacgcacacagacacacatgcacctgcctgtgtatttgtgtgtacgcacacacgcatgtatgcacagtacacacatatacacccatgcccacgcacatgcacccagacagactgcttccagccccagcctcgcccctccagcggctggctttcccagtaatttcatgtggcgttttcagcagggtttcccggtcatttcatgcgggtttgtcttggcttctgctgatgttttaggtgaggtctgccacaagtcctacacgcagttctccaacctgtgccggcacaagcggatgcacgccgactgccgcacgcagatcaagtgca

SEQ ID NO: 135249 - DNA, 948 bp, Homo sapiens
  chr1:3328318-3329266
  hypo
ccatccttgtacccccggccgcctctgctacctcccacatcgctgctcaagagccccctgaaccacacccaggacgccaagctccccagtcccctggggaacccagccctgcccctggtctccgccgtcagcaacagcagccagggcacgacggcagctgcggggcccgaggagaagttcgagagccgcctggaggactcctgtgtggagaagctgaagaccaggagcagcgacatgtcggacggcagtgactttgaggacgtcaacaccaccacggggaccgacctggacacgaccacggggacgggctcggacctggacagcgacgtggacagcgaccctgacaaggacaagggcaagggcaagtccgccgagggccagcccaagtttgggggcggcttggcgcccccgggggccccgaacagcgtggccgaggtgcctgtcttctattcccagcactcattcttcccgccacccgacgagcagctgctgactgcaacgggcgccgccggggactccatcaaggccatcgcatccattgccgagaagtactttggccccggcttcatggggatgcaggagaagaagctgggctcgctcccctaccactcggcgttccccttccagttcctgcccaacttcccccactccctttaccccttcacggaccgagccctcgcccacaacttgctggtcaaggccgagccaaagtcaccccgggacgccctcaaggtgggcggccccagtgccgagtgcccctttgatctcaccaccaagcccaaagacgtgaagcccatcctgcccatgcccaagggcccctcggcccccgcatccggcgaggagcagccgctggacctgagcatcggcagccgggcccgtgccagccaaaacggcggcgggcgggagccccgcaagaaccacgtctatggggaacgcaagctgggcgcc

SEQ ID NO: 135250 - DNA, 30 bp, Homo sapiens
  chr1:3330708-3330738
  hypo
tcatgcagggctgaccggccagttaggccg

SEQ ID NO: 135251 - DNA, 175 bp, Homo sapiens
  chr1:3331025-3331200
  hypo
aggtatatggtcaggcggggtgggcggctctgtggagcgggtggctcggcggggcgggcggctcggtggggtacgtaaccctctgtgctgttgtccagcagggtagaaaagcggaaggtcacagaccccgtgggagccctgaaggagaagtacctgcggccgtccccgctgctct

SEQ ID NO: 135252 - DNA, 788 bp, Homo sapiens
  chr1:3342031-3342819
  hypo
gctgtgcacggggcacggggcaggggcgcgggctcccttccccccaccctctgtggcccggcctgccatgcagagccggggcctgcactgaggagcgcgtgtgccccttccaggtgtaagtactgcgaccgctccttcagcatctcttcgaacctccagcggcacgtccggaacatccacaacaaggagaagcctttcaagtgccacctgtgcaaccgctgcttcgggcagcagaccaacctggaccggcacctcaagaagcacgagcacgagaacgcaccaggtgggccacgcggggtggggcagcccccagagcacccacacgggcaggccccacagagggggagggggaacagcaggggagtgggcgccgggcagggaagagggccacagactacccctcaggaagccaacaggcacccctcaaaccgtggtcattaaagagaacctcgtgctctccggtgtccctaagaaacctgcctccctaacagcaccccaggtgtaccccgttcgcggttggtttgccccacggagggaggggtccagcgagaggccgccccctgatgctcccgcccctccgcagtgagccagcaccccggggtcctcacgaaccacctggggaccagcgcgtcctctcccacctcagagtcggacaaccacgcacttttagacgagaaagaagactcttatttctcggaaatcagaaactttattgccaatagtgagatgaaccaagcatcaacgcgaacagagaaacggtaagaaaactatcgcgggctggggaaagt

SEQ ID NO: 135253 - DNA, 249 bp, Homo sapiens
  chr1:3343490-3343739
  hypo
gcactcatgcacacacgtgtacataacatgtgcgtgcataaacatgcctgcctagatctacacacacgcatatgcacacatgcaagtacatgcacatggacagtgtgtgcacatacacatgcgtgacggacagccgtgtgcgtacacctagagacacatgtacacgcatgggcgcacgtgcgtctagacacacagcagcagaacgatggtggaattcggatccaggaatgtcggcgcatgctctgtgca

SEQ ID NO: 135254 - DNA, 340 bp, Homo sapiens
  chr1:3344506-3344846
  hypo
tgtcagacccatgagcgccacaggccaggccttacctacgccccacagccccgtccccaggcacaatcccctaagctgcagctcccagagtaaggccaggcgaggaacaagtgaggattcatcaatggcatccttgccggggtgggcccaggaccaggagcgtgtgcggaggctgaaccacctggaggacagcaaggcccccctaccccgagctagggtgcagcccggccgcactgcaggagacccaccaggaccccgagctagggtgcagcccggccgcactgcaggagacccaccaggaccccgagctagggtgcagcccggccgcgctgcaggagac

SEQ ID NO: 135255 - DNA, 887 bp, Homo sapiens
  chr1:3349848-3350735
  hypo
tcctcttccaggctgcggggagaatccgggtcttagtccctcttgttccttctgccccctgtggcccagggcaaggttgagccaggccagggccacgggaggctgggaacggacgaggcttggccctgctggccggggatggcctgtcctgcccacacactcacctgcctgtccaggatggcctgccctgcccatctgctgcctgtctgggatggcccgccctgcccacgcgctcacctgcctgtctgggatggcccgccctgcccacgcgctcacctgcctgtctgggatggcccgccctgcccacgcgctcacctgcctgtctgggatggcccgccctgcccacgcgctcacctgcctgtcctgtgtgtgtgtcatcccctccccgccaggcatatgcaatgatgctgtccctttccgaagacactcctctccacaccccctcccagggttctctggacgcttggttgaaggtcactggagccacgtcggagtctggagcatttcaccccatcaaccacctctgacgggctgggcagccgggggccggtggccagagcgagggcaccagccacgaaggacggaggcgggcggggccccggagaaccctgtccctgcgtgtggccactcctcagcatcctccccacccaccatggttcattccgacttttccaatggaaactcagatcccaaaagtccctaaagcagtcgtagagtctcaccatctccaaggattggtcttgagaacactgttcagtgacggccatgcaggtggccgtccaaagacagccaacggagctgcctcgcagaatcagccagtgggcaggtggacgctctgctgagacagaagctggtggccactgccgggtgcccgcgtggggtcgcgg

SEQ ID NO: 135256 - DNA, 597 bp, Homo sapiens
  chr1:3351129-3351726
  hypo
aagtcttaggcagggcgccctgggctgcaggcctgcccgaggctgggatgggaagtgtgcctgccctcgtgtgacatggaattggtgtcaggaccgccacgtggccttcagaggaatccacaggtccccacccaagatccctcaattatatggggaagtcgagggcctgtggcttggatccgccatgcagagatgtggccgggcacccatcttccttccctcctctgtccctgcctcggccaccccacgcgggaacccagcgccgtcctctgaaggcagggccttggccacgtcctgggtctcccacctcccacctgaccccagcggctccggtgtcctccacgtggctgccctggggagcaatcccagcggatcgctccgggccaccaagccgcacctgtgcctgagactccggatggacgacacagtcgtcacgtcgctcttcctgcgggttcttggcgagacacagcttgagaacagaagggcgtcgggggaacctgccgcaaggagcagagacagcacagccccccgggcccagccgcctccctctcttgggacgcaacttcttccccactcggatgggctttaaattattcc

SEQ ID NO: 135257 - DNA, 30 bp, Homo sapiens; identical to SEQ ID NO: 13915
  chr1:3352327-3352357
  hypo

SEQ ID NO: 135258 - DNA, 188 bp, Homo sapiens
  chr1:3361092-3361280
  hypo
gatccacgttgggggcgcagacgcaggggactgactgcgatgggcacggcaagacttctaggggtgaccgacgcgtcctatatcacgaccgtggttacacaggtatacattcattaaaactcacctcgctgtatattttaaaaggatgattttattgcacgtaaactgtgcctcgattaacctcattt

SEQ ID NO: 135259 - DNA, 342 bp, Homo sapiens; identical to SEQ ID NO: 34930
  chr1:3370920-3371262
  hypo

SEQ ID NO: 135260 - DNA, 30 bp, Homo sapiens
  chr1:3372467-3372497
  hypo
tggaccctgctgtgcgatgcccacagccag

SEQ ID NO: 135261 - DNA, 78 bp, Homo sapiens; identical to SEQ ID NO: 58831
  chr1:3373240-3373318
  hypo

SEQ ID NO: 135262 - DNA, 43 bp, Homo sapiens; identical to SEQ ID NO: 58832
  chr1:3373605-3373648
  hypo

SEQ ID NO: 135263 - DNA, 64 bp, Homo sapiens; identical to SEQ ID NO: 58833
  chr1:3377101-3377165
  hypo

SEQ ID NO: 135264 - DNA, 129 bp, Homo sapiens
  chr1:3377827-3377956
  hypo
agcatgagcttgtctgtgattcggcaaggccttggtcactgcggcgcagacgcaggcctcacaccggccaggcctgttacacgctttgcacgctttacacttcccaccgtaccttcaggaggtgggcct

SEQ ID NO: 135265 - DNA, 111 bp, Homo sapiens; identical to SEQ ID NO: 58834
  chr1:3378248-3378359
  hypo

SEQ ID NO: 135266 - DNA, 366 bp, Homo sapiens; identical to SEQ ID NO: 58835
  chr1:3379760-3380126
  hypo

SEQ ID NO: 135267 - DNA, 31 bp, Homo sapiens; identical to SEQ ID NO: 58836
  chr1:3383744-3383775
  hypo

SEQ ID NO: 135268 - DNA, 153 bp, Homo sapiens; identical to SEQ ID NO: 58837
  chr1:3384391-3384544
  hypo

SEQ ID NO: 135269 - DNA, 379 bp, Homo sapiens; identical to SEQ ID NO: 58838
  chr1:3385464-3385843
  hypo

SEQ ID NO: 135270 - DNA, 276 bp, Homo sapiens
  chr1:3387192-3387468
  hypo
gcagggatgtctgtgtatctgcgtggtcagggatgtatgtgagtaggtgtgtgtgcgtgggcaagggtgtctgtgcatggctgtgtgtgcgtggtcaggggtgtgtgtgagtgggctggccccaaggcccggagggtggctcgggagcatccggcaccctggtgtgtatgcatgggtgtatgtgcatggatgtgtgtgtgggcaggggtgtgtgtgcgtggacaggtgtgtgtgcgtgggcaggggtgtatgtgcgtgggtgtgtgtgcctggcca

SEQ ID NO: 135271 - DNA, 425 bp, Homo sapiens
  chr1:3389565-3389990
  hypo
atgcatgtctgtgtgtgcacacgtggggcccgaccaccaggcccgtggcaccctcctcacccctccttgccttcaggttcttcgaggacctggagcagcggcacaaggcccaggtgctggtcgaggacatcagtgacatcctggaggagcacgctgagaagcacttccacccctacatcgcctactgctccaacgaggtctaccaacagcgcacgctgcagaagctgatgtgagtgggcggccccgaggcccgcagggtggctcaggagcatcctgcaccctggtctcccaaagcacattcctgctcccagcccagcttctgcaggtcctgcctgattttggtacaggctggccatgcagagcctggaaggacagccttgtcctcttgcagaagcagcaacgccgccttccgagaggccctgaga

SEQ ID NO: 135272 - DNA, 30 bp, Homo sapiens; identical to SEQ ID NO: 58841
  chr1:3393009-3393039
  hypo

SEQ ID NO: 135273 - DNA, 74 bp, Homo sapiens; identical to SEQ ID NO: 58842
  chr1:3393356-3393430
  hypo

SEQ ID NO: 135274 - DNA, 31 bp, Homo sapiens; identical to SEQ ID NO: 13922
  chr1:3393765-3393796
  hypo

SEQ ID NO: 135275 - DNA, 30 bp, Homo sapiens
  chr1:3406407-3406437
  hypo
caccgttatgctggccgggccccagggagg

SEQ ID NO: 135276 - DNA, 380 bp, Homo sapiens
  chr1:3406735-3407115
  hypo
ctgtgcctgcacctgcgcctgcacccacactggcgcccacacctgtcctcagtccaactcagagccgcggggagagcgggacttcctcagcccaggcccagagcgtgcccctgggttctgcagagccaggccaggaggcgcctctcttccagcggccatgcgaggcttccctcctcaaggccacaccagcctccaagagcgacaggttgctgggctgtccacagccctccacggccctcaaaggaagggcagtaccaggagctctgggcccgtgaagtgtccttctcagtggtcaccaaaggccagggtcccctctggctgggactggagaggcgggctccacgggactgcctctactagtgcctcgctggtccaccgct

SEQ ID NO: 135277 - DNA, 221 bp, Homo sapiens
  chr1:3408565-3408786
  hypo
acattcacacactgatgcacacgtaacacacaggcactggcacgcacaggtgcctgctgcctgtgcaggactgcgtgcgtggactggcacgcacaggtgcctgctgcccgtgcaggactgcgtgcgtggactggcacacactgggtgccacacacatgtactggcacacatgcacacacaccctgctgtacgcactgttgcacgtgcgtgcacagacacac

SEQ ID NO: 135278 - DNA, 30 bp, Homo sapiens
  chr1:3409398-3409428
  hypo
gggcctaggggcccgcggcagagcccaggt

SEQ ID NO: 135279 - DNA, 696 bp, Homo sapiens
  chr1:3410514-3411210
  hypo
gacggggccagggagcgggggttcagggaggcaccaagcactcacccctctcacagaagtggccgtggaagccggcagggcagaggcatcggccactgatggggtcgcagggggctccatgttgacaccagcacaacccctggcagccagccccgtggaagccagggggacaggctgaaggacgccggttaccacgagacaagggcacacggtggcagaaatgtccagtttgcccagagtgagtaaaacccgccaatccaggggcccgagaaaagccccctcctgcccgtcctcgtccctccccactgctgctggctccccacctccccaccacttcactgctgcctggatcacccacacgggaggagtggacagtggctcaaaggggccccagcccagctgcacaggcccccaactcacggtgctcgcaggcctggccatagaagccggggccgcagcggcaggtgcccgtggcaggctcacacgtgctgttgttgtggcaggagcactccagatggcaggcggctccgtagcgcccagggggacaggctggggacagggcagggtgggcagtccttcggcaccagccttgcccagccctatggcagcccagggcacctccctgaggggatgctggggtcccgctggccccgcacactcacccagctcgcagtgccgccccgtccagcccaggcc

SEQ ID NO: 135280 - DNA, 30 bp, Homo sapiens; identical to SEQ ID NO: 58846
  chr1:3411663-3411693
  hypo

SEQ ID NO: 135281 - DNA, 30 bp, Homo sapiens; identical to SEQ ID NO: 58847
  chr1:3413258-3413288
  hypo

SEQ ID NO: 135282 - DNA, 345 bp, Homo sapiens
  chr1:3413535-3413880
  hypo
cacgggcagcactcacgttgctggcagctggggccgtggtagccagcagcacatgagcaggtcccggtggcagggtggcaggccgggttctcaccgggacactggcacatctgcgcacagtcctccccaaagctgccgggtgggcaggctgggtggagacaggcagggtcggtcctggcccagccccgccaaggaacaggcagcctctctggattccccctgcccagccgctcctcggggtgggggcttgggagcacctaccctgctcgcagccggagccagtgaagccagggggacagcggcaggccccagtgacgtggtggcaggcagcgccaggcgggcagc

SEQ ID NO: 135283 - DNA, 30 bp, Homo sapiens
  chr1:3414276-3414306
  hypo
tcagcactgaggcgacgggagccagcgaca

SEQ ID NO: 135284 - DNA, 30 bp, Homo sapiens; identical to SEQ ID NO: 13924
  chr1:3416399-3416429
  hypo

SEQ ID NO: 135285 - DNA, 30 bp, Homo sapiens
  chr1:3417066-3417096
  hypo
gcggccaaaggcttcgtgtgtgtgcgtgca

SEQ ID NO: 135286 - DNA, 30 bp, Homo sapiens; identical to SEQ ID NO: 58850
  chr1:3421816-3421846
  hypo

SEQ ID NO: 135287 - DNA, 30 bp, Homo sapiens; identical to SEQ ID NO: 58851
  chr1:3422094-3422124
  hypo

SEQ ID NO: 135288 - DNA, 494 bp, Homo sapiens
  chr1:3422674-3423168
  hypo
ggtggcagaagcggccgtagagccctgggtcgcagaggcaggccccgtagaggcggtggcaccggccccggttggcacagttgcatttcttgcgacagtgcttgccatagtagcccttggggcagcctgggggcagcggggctccatgtgaaccttggtggcagccagcctaccacatgtggtccccccatgtggtaggatgcgcgggggcccagggcccagcacaggagctgggagcagcccccgccagggcactaggtgagccttccggatgtggccgtctgccctggctggtctgtcccctacatcccctgcccccagggtttgtggcaagggcgggtggaagagcacattcctcggcccacactggagagatgcacaaagctcacgccccactctccccaaagtctggcccccatcaggagccgcctgacttctgtcccctggtggtcactaagcttgatctcagagcctcaaagcgggaaggacacgtg

SEQ ID NO: 135289 - DNA, 264 bp, Homo sapiens
  chr1:3425527-3425791
  hypo
aggggtccttcctcacgtccccagcctctgattggatggcagcctagcccgaggggtcgctggctgctggccctgcgagcaggagcccccgggggctgggcccgcgctcaccaaacttctctgtgagcgtgtgttcgccccgcaactctgcctcttcctcatcggccccgacgtcgtcatcctggaagagttgcggcagctcgtcctggagcacggcaatgtggggcaggggccgcacgaaaggcagctcgccgtccaggtcca

SEQ ID NO: 135290 - DNA, 30 bp, Homo sapiens
  chr1:3426397-3426427
  hypo
cagaggccggtgctccgcggagggcgggag

SEQ ID NO: 135291 - DNA, 30 bp, Homo sapiens
  chr1:3431399-3431429
  hypo
agcccccaagacgccgagaagactctgcag

SEQ ID NO: 135292 - DNA, 647 bp, Homo sapiens; identical to SEQ ID NO: 58852
  chr1:3435616-3436263
  hypo

SEQ ID NO: 135293 - DNA, 188 bp, Homo sapiens
  chr1:3436852-3437040
  hypo
ccaggtacacagaggcggaggcctccagcgcagtgctagaccacatgggagctgctctcctctctgagtgttgcacgctggcactctgcagggtgtcacggaaaaccaagaatgatgcccccagacactcgggccagaccactgctccctacatcaccggggaaggcaagggcgggctcaggtttagg

SEQ ID NO: 135294 - DNA, 524 bp, Homo sapiens; identical to SEQ ID NO: 34932
  chr1:3447460-3447984
  hypo

SEQ ID NO: 135295 - DNA, 161 bp, Homo sapiens; identical to SEQ ID NO: 58855
  chr1:3448900-3449061
  hypo

SEQ ID NO: 135296 - DNA, 31 bp, Homo sapiens; identical to SEQ ID NO: 58856
  chr1:3458047-3458078
  hypo

SEQ ID NO: 135297 - DNA, 76 bp, Homo sapiens
  chr1:3463629-3463705
  hypo
acggtgtcccggcaccgacccgcacagcccccgttggcgttggcacactcacccacatctgcgaggggagaagcag

SEQ ID NO: 135298 - DNA, 30 bp, Homo sapiens; identical to SEQ ID NO: 58857
  chr1:3465366-3465396
  hypo

SEQ ID NO: 135299 - DNA, 253 bp, Homo sapiens
  chr1:3466089-3466342
  hypo
gcacatggtcatgctcgggtctgggctggctggcggcaggcaccccgttggttgactgcatgcagaagggtccatcaattcaccgaagacactggcatgggatatccagggcgacttggccccgctgctccccacagctcaccccgctctctggccccacaagggctccagctcgggctatgggcgtcacttatggcctggaatttacctaggcaacactgcagcccagggaaccacccggaggctgaccagc

SEQ ID NO: 135300 - DNA, 277 bp, Homo sapiens
  chr1:3466667-3466944
  hypo
atcagcagaaagtaacggctcccgacacaagacatacccagaggcgccacagacccagcagtcccacccctaagcacctgcccaagataaatagaaacagggactcaaaccacggtgtgtgcacacgctcacagcagacttgtccacagccatcagaaaggggaggccacccgggtgcccaccagcgggtgatgaagacagacatggaggacgacagcgaggaggaacctcaaacctcgtgctgtgtgaaaggagcccatctcgagaggtcacacag

SEQ ID NO: 135301 - DNA, 538 bp, Homo sapiens; identical to SEQ ID NO: 58858
  chr1:3467203-3467741
  hypo

SEQ ID NO: 135302 - DNA, 30 bp, Homo sapiens
  chr1:3468611-3468641
  hypo
cccctgctctggacacgccaaactgtggct

SEQ ID NO: 135303 - DNA, 37 bp, Homo sapiens
  chr1:3468968-3469005
  hypo
atcctggtaagaccacgcgtggcggctcacgcccgta

SEQ ID NO: 135304 - DNA, 30 bp, Homo sapiens
  chr1:3469857-3469887
  hypo
accctgtgagcctggcgcctccagcaggac

SEQ ID NO: 135305 - DNA, 196 bp, Homo sapiens; identical to SEQ ID NO: 58859
  chr1:3470762-3470958
  hypo

SEQ ID NO: 135306 - DNA, 30 bp, Homo sapiens
  chr1:3483685-3483715
  hypo
ctggcagatgggcaacgcctcacctaccct

SEQ ID NO: 135307 - DNA, 138 bp, Homo sapiens
  chr1:3484123-3484261
  hypo
tgccagccagcaccgcgcagccctgcaggctctgaccacaggtcccgtttgccggggacacggccagcctggcctagctccttggccatcacaccgtgggccctcggtccctaggagcacctgcgacccagagcgtca

SEQ ID NO: 135308 - DNA, 24 bp, Homo sapiens
  chr1:3500460-3500484
  hypo
agacaacgcgcagccaccagacaa

SEQ ID NO: 135309 - DNA, 30 bp, Homo sapiens; identical to SEQ ID NO: 58861
  chr1:3503465-3503495
  hypo

SEQ ID NO: 135310 - DNA, 213 bp, Homo sapiens
  chr1:3512768-3512981
  hypo
agatgggacgggctgcggctgtcactaaggctgagcagaaaatggtaaggccccccaggagacggcagtgtcctgctgggaatgggcagcccgatctggccagcctgagaaggtgcccacagccagagagaccccagctacccagaggacatgacgtccccctccccaagtccagacgctgcctcaggccaccagcaccgtgcagtccacaaa

SEQ ID NO: 135311 - DNA, 30 bp, Homo sapiens
  chr1:3523842-3523872
  hypo
ctcccggcccctgcccgcctggtgcgccct

SEQ ID NO: 135312 - DNA, 30 bp, Homo sapiens
  chr1:3524092-3524122
  hypo
agcaccgcacccgcacggccccggcggcct

SEQ ID NO: 135313 - DNA, 90 bp, Homo sapiens
  chr1:3524384-3524474
  hypo
gctcccgagcagagccggggctccacgggcaagagatgggcgggcatgctgcggggtccctccagggcaggcagcgacagtctgggccca

SEQ ID NO: 135314 - DNA, 30 bp, Homo sapiens
  chr1:3533229-3533259
  hypo
cagcctttgggtagccgactctgaattcat

SEQ ID NO: 135315 - DNA, 30 bp, Homo sapiens
  chr1:3548078-3548108
  hypo
gagcctgctgcctcccgtgcagatggccag

SEQ ID NO: 135316 - DNA, 695 bp, Homo sapiens; identical to SEQ ID NO: 58862
  chr1:3548479-3549174
  hypo

SEQ ID NO: 135317 - DNA, 445 bp, Homo sapiens; identical to SEQ ID NO: 13929
  chr1:3552660-3553105
  hypo

SEQ ID NO: 135318 - DNA, 30 bp, Homo sapiens; identical to SEQ ID NO: 58864
  chr1:3553613-3553643
  hypo

SEQ ID NO: 135319 - DNA, 31 bp, Homo sapiens; identical to SEQ ID NO: 13930
  chr1:3555533-3555564
  hypo

SEQ ID NO: 135320 - DNA, 252 bp, Homo sapiens; identical to SEQ ID NO: 58866
  chr1:3556468-3556720
  hypo

SEQ ID NO: 135321 - DNA, 30 bp, Homo sapiens; identical to SEQ ID NO: 13931
  chr1:3557185-3557215
  hypo

SEQ ID NO: 135322 - DNA, 366 bp, Homo sapiens; identical to SEQ ID NO: 58868
  chr1:3559615-3559981
  hypo

SEQ ID NO: 135323 - DNA, 30 bp, Homo sapiens; identical to SEQ ID NO: 58869
  chr1:3561809-3561839
  hypo

SEQ ID NO: 135324 - DNA, 30 bp, Homo sapiens; identical to SEQ ID NO: 58870
  chr1:3562107-3562137
  hypo

SEQ ID NO: 135325 - DNA, 105 bp, Homo sapiens
  chr1:3562355-3562460
  hypo
aacattcccctccgcgctgagctcagcacggaggctgttgtgcggtacctacagcaggtgaatgggcggctgccgaccgccccgagccacgcccccaggccaggc

SEQ ID NO: 135326 - DNA, 128 bp, Homo sapiens; identical to SEQ ID NO: 102396
  chr1:3567216-3567344
  hypo

SEQ ID NO: 135327 - DNA, 152 bp, Homo sapiens; identical to SEQ ID NO: 13934
  chr1:3576145-3576297
  hypo

SEQ ID NO: 135328 - DNA, 88 bp, Homo sapiens
  chr1:3601858-3601946
  hypo
tctggtccgagcccccgcctgctggaacgtgccactccccagccacagggtgacagtgggagcctcgaacctccgcaaacagcaaggt

SEQ ID NO: 135329 - DNA, 30 bp, Homo sapiens
  chr1:3602528-3602558
  hypo
aggcggttctagtgccggatgtttccgggg

SEQ ID NO: 135330 - DNA, 9 bp, Homo sapiens
  chr1:3606850-3606859
  hypo
gtcctggcg

SEQ ID NO: 135331 - DNA, 44 bp, Homo sapiens
  chr1:3607472-3607516
  hypo
ctgtacgtcggtgaccccgcacggcacctcgccacggtaggtgt

SEQ ID NO: 135332 - DNA, 31 bp, Homo sapiens; identical to SEQ ID NO: 58875
  chr1:3608741-3608772
  hypo

SEQ ID NO: 135333 - DNA, 675 bp, Homo sapiens
  chr1:3615175-3615850
  hypo
aggaggcggcggcaccgtgagtggactccggggcggttagcaggtggaaggcagtgagggttgaggagagggtggggcgaggcccttgcaccaggccacagtgggcggctcaaatgtgggtccgtggaggcccggggggcaccaggctaccctggagtcatctgaagtcacctgggcgtgtggagggacatgcatctgcaaggcccccatgtggcgctaagcacagagtgggtgctgcagacgggctcagccgctgcgggcaggtgcaggcaggatagcagcggtggccctgggcctcgcagtcctgcagacacacgtctggggactgctcctgggggcgcgtttctccggtgtgaggtgtggaaagttccacatggccctggcacgggattgggcaaggcctcgcctcagccccgggtgagagcagagggtgctgtgggtgagagcacagggtgctgtgggtgagagcagagggtgctgtggatgagagcagagggtgctgtgtgcacattgtcgggagagggaggcttccccccagccgcatgtcgaatcttgttggcatttccattcgtttaatcacgggctccgggagatgctgtgggaagtaccggcaggacggaggtcttgccctggtgggatgggctctcttcctccgaagcccaggctgcttgtcag

SEQ ID NO: 135334 - DNA, 31 bp, Homo sapiens; identical to SEQ ID NO: 58877
  chr1:3617449-3617480
  hypo

SEQ ID NO: 135335 - DNA, 31 bp, Homo sapiens; identical to SEQ ID NO: 58878
  chr1:3622263-3622294
  hypo

SEQ ID NO: 135336 - DNA, 38 bp, Homo sapiens; identical to SEQ ID NO: 13936
  chr1:3622992-3623030
  hypo

SEQ ID NO: 135337 - DNA, 248 bp, Homo sapiens; identical to SEQ ID NO: 58880
  chr1:3623372-3623620
  hypo

SEQ ID NO: 135338 - DNA, 31 bp, Homo sapiens; identical to SEQ ID NO: 58881
  chr1:3638487-3638518
  hypo

SEQ ID NO: 135339 - DNA, 421 bp, Homo sapiens
  chr1:3644395-3644816
  hypo
cacaatgtgagcccgcgtcccagggacagggccagtccctgaacggccccccacgcccagactcctccctgacggagcctgagagcagcccccatataagtcgcttgtcctgggccaagggcacctcagaggcctgggtggcaccgcaggtttgcccgtccctgtgggttgctcaccaccggacccacctggagaatcgattggccccaagggtggggcaggtctccctcctcccggaaggaggcctcaccctctggtcctgcctgctcaccccgcctgccctgcctggccttccagccttcaagcagagcccccctgccgtccccgcccttggtgccggtgtgaagaagcggcggcatggagacgaggacacgtactaccttcaggtgagtgtgtgctcctgcacggcagccgggagacc

SEQ ID NO: 135340 - DNA, 227 bp, Homo sapiens
  chr1:3646527-3646754
  hypo
tgcttcccacccatgcgagccgttgcttctgagcaggagtcacctacagcccccgtcctacgggccggtcctctcgcccatgaacaaggtgcacgggggcatgaacaagctgccctccgtcaaccagctggtgggccagcctcccccgcacagttcggcagctacacccaacctggggcccgtgggtgagtcccttgggcagtgcgggcccacgggcagggcgggga

SEQ ID NO: 135341 - DNA, 31 bp, Homo sapiens; identical to SEQ ID NO: 58883
  chr1:3650895-3650926
  hypo

SEQ ID NO: 135342 - DNA, 150 bp, Homo sapiens; identical to SEQ ID NO: 58884
  chr1:3651333-3651483
  hypo

SEQ ID NO: 135343 - DNA, 212 bp, Homo sapiens; identical to SEQ ID NO: 58885
  chr1:3655596-3655808
  hypo

SEQ ID NO: 135344 - DNA, 145 bp, Homo sapiens
  chr1:3659497-3659642
  hypo
tctggcttctggtctcgagggaagctactggcgagaagcattggagggttctgggtcacagggaaccacgtgacatggacacagatgccacaacgctgtgcattcccccaaaaacgcagatgcccacctgctctctttagggaag

SEQ ID NO: 135345 - DNA, 46 bp, Homo sapiens; identical to SEQ ID NO: 13941
  chr1:3659671-3659717
  hypo

SEQ ID NO: 135346 - DNA, 765 bp, Homo sapiens; identical to SEQ ID NO: 102399
  chr1:3663334-3664099
  hypo

SEQ ID NO: 135347 - DNA, 270 bp, Homo sapiens
  chr1:3664506-3664776
  hypo
cccaggttgcttttccgtgagtacaagaacacaacacctgtgggaggtgtgggcccaggggagggatgccgagctcacacgacccctaggtagcaaatagacgcacgtgtgcctttcacactccaccctcacttcacactggcccacccactccttgttctgggaaatgaggacgcagcaggagatacctgtagctaacacacacacaccttgccccccgcgatggccagacttccagggctgcctcgcttcccagatacattttctggt

SEQ ID NO: 135348 - DNA, 414 bp, Homo sapiens
  chr1:3680095-3680509
  hypo
gctgggacgcccagacgctgcctgctctggtcagtgagctggagcaggggcaggtgtcggcagcctcacccaggctggcagagccctcccagctgccgcagtggcccggccctctccttctgtccctcactgcccctgcttgctcctgctcaccgcctctgcctctgtgcccaggagtgattgcgtctttacaacaacaagtggatttccaagaaacccagctgcgaaagatcaatacggaaaatgagacgctgcagaaggagctccgagagcggaggcagcagctacaagccatgaccgacaaggtggccgtgcgctcagtaccggcctccgctccatgagcatgggccccaggcttcattaacccccggcagctcggggcaggcgctgcccgtcccatctactgatggagac

SEQ ID NO: 135349 - DNA, 96 bp, Homo sapiens
  chr1:3683722-3683818
  hypo
aagtggatgggtgccacacatactcaggttgggcgaaatgaccccacctcttttttctccccggctgtccccagcaagtgtcggaactggagagaa

SEQ ID NO: 135350 - DNA, 226 bp, Homo sapiens
  chr1:3684031-3684257
  hypo
agggtctgtcccagcagctggcggccgagcacccaggcctctgcccaccgcccaccgaggtagaaccggggtctgtgtacgctggggctcgggctggttctgccgtgtacaccagcatccacacagagttgacactcaagaaatgtgggtagaggacggagtgagagtgcaacagagtagcccggaaatgttcgtcaatggcagtggtgggcggagccccatgggc

SEQ ID NO: 135351 - DNA, 30 bp, Homo sapiens; identical to SEQ ID NO: 13945
  chr1:3686334-3686364
  hypo

SEQ ID NO: 135352 - DNA, 30 bp, Homo sapiens; identical to SEQ ID NO: 13946
  chr1:3687093-3687123
  hypo

SEQ ID NO: 135353 - DNA, 30 bp, Homo sapiens; identical to SEQ ID NO: 58893
  chr1:3695183-3695213
  hypo

SEQ ID NO: 135354 - DNA, 187 bp, Homo sapiens; identical to SEQ ID NO: 13947
  chr1:3695642-3695829
  hypo

SEQ ID NO: 135355 - DNA, 172 bp, Homo sapiens; identical to SEQ ID NO: 58895
  chr1:3696128-3696300
  hypo

SEQ ID NO: 135356 - DNA, 153 bp, Homo sapiens; identical to SEQ ID NO: 13948
  chr1:3697564-3697717
  hypo

SEQ ID NO: 135357 - DNA, 894 bp, Homo sapiens
  chr1:3700196-3701090
  hypo
gatgatacccaacagcgcacggtatggataaaatgctgtgggttgggctggcatttatgtctgtttcctaatggctagtttatatcctgtcctgtcccatcctgagggccacccgccccctgtggaatggccaatacctccgctcctaacaccttccacttccctcacgtcagggccatctagatgacagactggttccacaacgtctcctttggaaagagaatgctttctttgtaccctgttaagaagcttctgggttctggtagcattaggcggttcctgaggagcacagactaactcagctgaggccagcatgcggcactcccccgggcccggccccaccccaccaggcacgctgcccacctgtgcaggcccgacacactctgccgcttcttctgcttcctctgctcctcggcctccagctgcagctgccgcaccagctccttggccttggcttctttccgccccaaggggacaatctatcgggcagaaacccacaaactccactagggtcacagccacagaactcgcccatcgtgtcgattacggccttaagcctcaatgagccctcccgactcccgccctcattcatctctacagcaggcagggagcatcccacgggaccacgcagcaagaagctgcatgtgggctgccactgcagcgtcccggggagacctgacgcccaaacacaccgatcctactgaggcagggcttaaccttaaagccagctcatgcacaactgtttccagaggtctgccatcctcagaaggccaaaagaggagagaaaggctgagcagccgggacctcgtgcactccacagattcaacagcccaggacagcacgacacagcaactcaccctactgccaaccccacgcaaacggttttactatcgg

SEQ ID NO: 135358 - DNA, 336 bp, Homo sapiens
  chr1:3705389-3705725
  hypo
agaaataaaagggctcgcgtgccctctgggagagaatggggcagtctaagcagcagtgacgcctgctggggaagaacacaaggcaggggctgagaccaagcccagctgctgggcactacctgagccacgcgtccatcggatctaacagaactgccacaattctgtgcttctcagcacagggtgggctgggctgggatagacttgttggactggtggctccagcccagacctcccttccggccccacatgggacgagagccaatctactcctggaatccaggtggcctcacaaagtaccaggagccgtatcaccaatgctgtcgccagcctgcagca

SEQ ID NO: 135359 - DNA, 358 bp, Homo sapiens; identical to SEQ ID NO: 58898
  chr1:3731492-3731850
  hypo

SEQ ID NO: 135360 - DNA, 30 bp, Homo sapiens; identical to SEQ ID NO: 58899
  chr1:3732889-3732919
  hypo

SEQ ID NO: 135361 - DNA, 30 bp, Homo sapiens; identical to SEQ ID NO: 58900
  chr1:3733299-3733329
  hypo

SEQ ID NO: 135362 - DNA, 46 bp, Homo sapiens; identical to SEQ ID NO: 13950
  chr1:3746111-3746157
  hypo

SEQ ID NO: 135363 - DNA, 30 bp, Homo sapiens; identical to SEQ ID NO: 58902
  chr1:3746496-3746526
  hypo

SEQ ID NO: 135364 - DNA, 30 bp, Homo sapiens; identical to SEQ ID NO: 58903
  chr1:3772519-3772549
  hypo

SEQ ID NO: 135365 - DNA, 30 bp, Homo sapiens
  chr1:3780100-3780130
  hypo
gtccacaccaaaactcgtccgtgagcgttt

SEQ ID NO: 135366 - DNA, 65 bp, Homo sapiens
  chr1:3781805-3781870
  hypo
tctcatatggtggatcgcactgatcgatttgcaggtgtgaaccagccttgcgttcccacttggcc

SEQ ID NO: 135367 - DNA, 102 bp, Homo sapiens
  chr1:3786100-3786202
  hypo
gatcgagagccagtgcgggttttggggcgctgtgcaccaggctcaccgacgttccttggttcctccaggtgagctcctacccctccacggtgggtgcggagg

SEQ ID NO: 135368 - DNA, 186 bp, Homo sapiens
  chr1:3786684-3786870
  hypo
gctggaagctgagatcaggtccgcactcccccgctgccttcccaggtgtccctgctgcaccgtgctaggcgtggtctggcctttagtggtgatgcatctgtgtctctggcgagtcctgggcacacccctccccctcccatggtgtggggagcaacttgaggcgcctcttggcgtttgcacactgca

SEQ ID NO: 135369 - DNA, 30 bp, Homo sapiens
  chr1:3788196-3788226
  hypo
agggaccagcccccacggggtgcgtctctc

SEQ ID NO: 135370 - DNA, 30 bp, Homo sapiens; identical to SEQ ID NO: 58906
  chr1:3805943-3805973
  hypo

SEQ ID NO: 135371 - DNA, 305 bp, Homo sapiens; identical to SEQ ID NO: 102407
  chr1:3817789-3818094
  hypo

SEQ ID NO: 135372 - DNA, 209 bp, Homo sapiens
  chr1:3818732-3818941
  hypo
agccaccgcgctcggcacactgttctgttcttaagaatttcaacatagaaatgaaatccagccttgccttaaaccctccagccctcaagttctctgggctctaggatgtgtgtcttcagaaaagggcgcagggtggaagccacatcagaggccgaggacacctggcccctcccctctccgcccgcaggtggctgcgcagtccagggctg

SEQ ID NO: 135373 - DNA, 30 bp, Homo sapiens
  chr1:3823395-3823425
  hypo
gtctgcctcccactcgcagatgcccctgtg

SEQ ID NO: 135374 - DNA, 30 bp, Homo sapiens; identical to SEQ ID NO: 13953
  chr1:4004031-4004061
  hypo

SEQ ID NO: 135375 - DNA, 30 bp, Homo sapiens; identical to SEQ ID NO: 13954
  chr1:4004393-4004423
  hypo

SEQ ID NO: 135376 - DNA, 256 bp, Homo sapiens; identical to SEQ ID NO: 58911
  chr1:4037032-4037288
  hypo

SEQ ID NO: 135377 - DNA, 284 bp, Homo sapiens; identical to SEQ ID NO: 58912
  chr1:4057084-4057368
  hypo

SEQ ID NO: 135378 - DNA, 37 bp, Homo sapiens; identical to SEQ ID NO: 58913
  chr1:4212156-4212193
  hypo

SEQ ID NO: 135379 - DNA, 30 bp, Homo sapiens
  chr1:4275125-4275155
  hypo
gatgatgttctcgctcgtggctccggggaa

SEQ ID NO: 135380 - DNA, 203 bp, Homo sapiens; identical to SEQ ID NO: 58914
  chr1:4359784-4359987
  hypo

SEQ ID NO: 135381 - DNA, 36 bp, Homo sapiens
  chr1:4391726-4391762
  hypo
gtgatgcgcacgctgcgtagtgcacacacgtcacaa

SEQ ID NO: 135382 - DNA, 35 bp, Homo sapiens
  chr1:4392061-4392096
  hypo
cgtcacaactgcagcacacacgtcacaactacagc

SEQ ID NO: 135383 - DNA, 125 bp, Homo sapiens; identical to SEQ ID NO: 58915
  chr1:4460853-4460978
  hypo

SEQ ID NO: 135384 - DNA, 89 bp, Homo sapiens
  chr1:4468041-4468130
  hypo
taacaggaccgtagacggcagggattccaccgtgcgtagtgtggatgcgccaaaatcgggatgccgctggcgggcgtcagcaatgggtt

SEQ ID NO: 135385 - DNA, 31 bp, Homo sapiens; identical to SEQ ID NO: 58916
  chr1:4531276-4531307
  hypo

SEQ ID NO: 135386 - DNA, 379 bp, Homo sapiens
  chr1:4542623-4543002
  hypo
ctgtgtgaggacccccgtcagggaactggctgctgctgccgctgcttctccccaggaagcactccccgaacgctgtcctgcgtggccaccacgtgctcctccctgctgcagccctgccctcccgccgggcctgcatgtccaggaccgcccacgagatgctcgctgccctcccgcaaggctgggagtcgacacagtgggcacggaggggtatggggtgggtcggatcagagaactcaggaggtagctctgcccccatgccttcctctgaccttaggctagcacctctcctctctccgctcggcctctacacctttaaaacaggagcgaagtgttcgatcgaggcccctggagacccagtgcaacacggcagtaggtctcc

SEQ ID NO: 135387 - DNA, 85 bp, Homo sapiens; identical to SEQ ID NO: 58917
  chr1:4659112-4659197
  hypo

SEQ ID NO: 135388 - DNA, 24 bp, Homo sapiens
  chr1:4659496-4659520
  hypo
tccgtctcaaaaaaaaaagaaaaa

SEQ ID NO: 135389 - DNA, 374 bp, Homo sapiens
  chr1:4673891-4674265
  hypo
ctgcctcactccataagctcacgggcaagcctccccatgaagagacgatccaggtgcgacacaggaggtgcaaacacagcgacatgcattcccgcgtttaaaacacatgctccgccgggcatgcggacgagagcatctgcctggctcgggtgtggcagaggggcaggatctccaggagtgaccaggctctacggaggacggagggccctgagggcagctggggagggcaggcatgggggaaaagggacaatgtgagttaagccctctgagtgggaaacagtgactcgttgtaggagtgtgtccggtctgcagctgggactgaggacttcctaggctgcaggggagaggcggcgtgaccacggggactgagctca

SEQ ID NO: 135390 - DNA, 284 bp, Homo sapiens; identical to SEQ ID NO: 58920
  chr1:4675280-4675564
  hypo

SEQ ID NO: 135391 - DNA, 54 bp, Homo sapiens; identical to SEQ ID NO: 58921
  chr1:4696906-4696960
  hypo

SEQ ID NO: 135392 - DNA, 112 bp, Homo sapiens; identical to SEQ ID NO: 61
  chr1:4715427-4715539
  hypo

SEQ ID NO: 135393 - DNA, 1127 bp, Homo sapiens; identical to SEQ ID NO: 102413
  chr1:4715574-4716701
  hypo

SEQ ID NO: 135394 - DNA, 275 bp, Homo sapiens
  chr1:4726573-4726848
  hypo
gtgcggagaggggcccgtgaatcacgggaggggtgcggagaggggcccgtgaatcacgggaggggtgcggagaggggcccgtgaatcacgggaggggtgcggagaggtgcctgtgaatcatgggaggggtgcggagagcgggcctgtgattcaccagagggttgcagagagaggcccaagaatcgcgggaggggtgcggagaggggcctgtgaatcacgggaggggtgcggagaggggcccgtgaatcacgggagggatgcggagaggggcccgt

SEQ ID NO: 135395 - DNA, 30 bp, Homo sapiens
  chr1:4728779-4728809
  hypo
tgcatatcctggagccggggtcccctgcct

SEQ ID NO: 135396 - DNA, 30 bp, Homo sapiens
  chr1:4748218-4748248
  hypo
gggggtccctcggagcgccccgtagtcttg

SEQ ID NO: 135397 - DNA, 99 bp, Homo sapiens
  chr1:4794015-4794114
  hypo
gggagctgaatggagcggttcacgcgaggtgtgtgcgtcgcgagcagggcccttgccggagctccaattagcggcttttgtaagcgatcacgtaccgag

SEQ ID NO: 135398 - DNA, 30 bp, Homo sapiens
  chr1:5036583-5036613
  hypo
agcaaattgagagatcgaccagtaaatacg

SEQ ID NO: 135399 - DNA, 30 bp, Homo sapiens
  chr1:5037108-5037138
  hypo
caggaggaagacgcacgtggggcggcacga

SEQ ID NO: 135400 - DNA, 27 bp, Homo sapiens
  chr1:5162486-5162513
  hypo
aaggattaatataccacctcccgggtt

SEQ ID NO: 135401 - DNA, 62 bp, Homo sapiens
  chr1:5371594-5371656
  hypo
gtcagcgctgctgcccggagcccagatgacaataccttctggactaacgcacctgttcatta

SEQ ID NO: 135402 - DNA, 96 bp, Homo sapiens
  chr1:5587301-5587397
  hypo
ctcaccctccagcaccgtgcgtcacacacctactccaggcagtcgtccacgcttgcatgtattcattcaacaaacaagtggcggactcattccgtg

SEQ ID NO: 135403 - DNA, 358 bp, Homo sapiens; identical to SEQ ID NO: 34960
  chr1:5772042-5772400
  hypo

SEQ ID NO: 135404 - DNA, 30 bp, Homo sapiens; identical to SEQ ID NO: 102417
  chr1:5772452-5772482
  hypo

SEQ ID NO: 135405 - DNA, 290 bp, Homo sapiens
  chr1:5839921-5840211
  hypo
tctgcagcaacgaagcgcagcagctgagagtaacttagaaagcacccagctaatgctggcatcccagatcgaccccctcctcgctgaatgttggcatctctgtgcctcagtttcctcatctgtaaatgggggtgataagaaatgtgtacacacctcccgggcagtggggaggattaaactgtgctctgacacgatccgggcatgttcagggtggtatctgcagtaaaccgcgctcggaaaatggcggcgcatcagggccagcggtgggagctctccgtgcttggcttgac

SEQ ID NO: 135406 - DNA, 30 bp, Homo sapiens
  chr1:5904833-5904863
  hypo
cctgagatcagccgccgaagtggtggggct

SEQ ID NO: 135407 - DNA, 715 bp, Homo sapiens
  chr1:5918381-5919096
  hypo
aggcagccacggcatcgccgccccccacgaggactgggctccatgctgacggagggccgggatcagggccggagaactcacgggacatggcacctgtccactccagcccaccagctcctcccctggcccactcgaccccctgccctggcacagccctgcaggcccctcgccagcctcccctgccccgctgcccctttgcagggcccctgccactccattctctctcagctgcctcctacgcagagaggcccgatctccaaactaaagtccctcttcacaccatccccctgctcccctcagaccctcagcgccgcccgacagaccgtgacgggtccccatgtgatcatctgggcccccaagaaagccaggtactgggcgggcagcatccatctcccccggccagggggacctctgtctacactcgggttgaattgagggcgtgaggagcacgtggcaaatagagcttcgctggctgatggcgtctctcttgccaaaggccaggccgctttctcctcgtgggcttgagggatgcccctgtgtcctccagcccacaggctagcctggtcccgtccagaagggcacacgctgcctgctcctcgagcctgggcggcacctcctgcatctgatgctgtggttccctcctgtgccgtgggggtgacaacgcagacgtgagagcccggtaggctggggtggtggccacgttaccaaagcacct

SEQ ID NO: 135408 - DNA, 30 bp, Homo sapiens
  chr1:5920020-5920050
  hypo
cttctgtagcatgacggggtgcccggccca

SEQ ID NO: 135409 - DNA, 236 bp, Homo sapiens
  chr1:5922580-5922816
  hypo
ggaccaatggggccacgtgctctctgcaaccaccgctgggtgcagcccaccctccgctcaggggcacaggaccctccgcccctcgcacttctacccgactgctgccgtctcagagccggggtctcagcccccacccagggcaggcttgagcggcctctccatgaggacacatggcatgggctgcctgaccggcccccaccatgtctcctcaaggagaaaccgggcttgtgctgtag

SEQ ID NO: 135410 - DNA, 30 bp, Homo sapiens
  chr1:5923074-5923104
  hypo
ccagacccaccaccacggagttcgcgctca

SEQ ID NO: 135411 - DNA, 31 bp, Homo sapiens; identical to SEQ ID NO: 13959
  chr1:5923674-5923705
  hypo

SEQ ID NO: 135412 - DNA, 463 bp, Homo sapiens
  chr1:5924107-5924570
  hypo
gacagggagacgctgcggccactcacgggaacagccactggcccttcctccaagtattccctgagtctcctgtgcaccgtgcacggggacccccacagagataagacagacgctctctggagcttccatccgggagagacacagcacaggagcaaacactcatgcacccggccctgctgggtcagaacactgtatccagtggtccgagtcacagggccgaggtgggggtcctgcagtgccctggtattgagcccccatcccctcagcctgtgcctgccacacatacagaccttggagatgagcggctggcggcagcagaggcacacgagccaggaggccaccagctggtggcaatccacgtccaccaggttgagatggacaaagcggctgccggccctaaggggcctcacgccaacatgcaggtcctgcaccccacgaggcggcagcacgaagacacctttgg

SEQ ID NO: 135413 - DNA, 30 bp, Homo sapiens; identical to SEQ ID NO: 58930
  chr1:5927541-5927571
  hypo

SEQ ID NO: 135414 - DNA, 52 bp, Homo sapiens; identical to SEQ ID NO: 58931
  chr1:5927905-5927957
  hypo

SEQ ID NO: 135415 - DNA, 31 bp, Homo sapiens; identical to SEQ ID NO: 13961
  chr1:5928199-5928230
  hypo

SEQ ID NO: 135416 - DNA, 74 bp, Homo sapiens
  chr1:5931363-5931437
  hypo
agagggcagttccagcgtctaagagcggtgcctccatgggatgagaaatacaaatataacgcctcggtgtccat

SEQ ID NO: 135417 - DNA, 122 bp, Homo sapiens
  chr1:5931723-5931845
  hypo
atcagcacctgagcacggtgacagccagcatggcctctgtgggtggccttcatggacaacgtggtctgcccactgagcaactccagaggcggagcaccccaggacagcgggtcctgatccaa

SEQ ID NO: 135418 - DNA, 375 bp, Homo sapiens
  chr1:5932998-5933373
  hypo
ggctcaaggagtggccgcaggctgtggcagccaccacgggaactgcggcttcacacccggagagccctgggctgtgagaaggcggccaccaaggaggcatttccgaccagataccatgcaggctgtgccagcgcccagacggagctgccctgcccagcgaggacacggaaaaggccattcccaggcccacgccacccctgccctgacctggccccagccctcccctccaggaggggagagaaggacacaagggtcaggccctgggaatacccaggaagccccgagatcagtttgtcctccgttgcccctttaccttggcgtgtttagtgggcactgcgctggacttccaaggtgacacggcgtccatgcccttct

SEQ ID NO: 135419 - DNA, 30 bp, Homo sapiens
  chr1:5934926-5934956
  hypo
acctcacctgagctcggggttgtcgatctc

SEQ ID NO: 135420 - DNA, 70 bp, Homo sapiens; identical to SEQ ID NO: 13963
  chr1:5935553-5935623
  hypo

SEQ ID NO: 135421 - DNA, 30 bp, Homo sapiens
  chr1:5940212-5940242
  hypo
agcggctggctccatcgtttgagatgaccc

SEQ ID NO: 135422 - DNA, 530 bp, Homo sapiens; identical to SEQ ID NO: 58935
  chr1:5940498-5941028
  hypo

SEQ ID NO: 135423 - DNA, 200 bp, Homo sapiens; identical to SEQ ID NO: 58936
  chr1:5941340-5941540
  hypo

SEQ ID NO: 135424 - DNA, 710 bp, Homo sapiens
  chr1:5942072-5942782
  hypo
gctgtagggtcaagccgcctgctcacctgtgctgagaattcggccctcaaggccaggttctgacggccacgctcacagccgtcactgcgaaggatgggaaggctggctgcctcctcccacgccctaggtggcaaccagaaaggccagtggtgcacttacccagccatctctcagtggcgcgcttacccagccatctctcagtggcgcgcttacccagccatctctcagtggcgcgcttacccagccatctctcagtggcgcgcttacccagccatctctcagtggcgcgcttacccagccatctctcagtggcgcgcttacccagccatctctcagtgacgcgcttacccagccatctctcagtggtgcgcttacccagccatctctttccaggggaattaatttcgttcttgccaatgtcccagtagctgacaccccccgcctcttgttctttctccttgacctcgacgtcagcaccatgctgtgcagcaggacagccgtgctgacttccccctcggcccaggtccctgctacatccccataaagacgcagcctccatgtcgcccacatgccctacactgtgcttctgccttcgggctaccaaccgcctcctggcacctgcagcgtccactcagtcctcactccaagccagcttcctgggaacgagcacctagaacaagggctatttcggtcctctccctgttgctctc

SEQ ID NO: 135425 - DNA, 245 bp, Homo sapiens; identical to SEQ ID NO: 58938
  chr1:5943158-5943403
  hypo

SEQ ID NO: 135426 - DNA, 223 bp, Homo sapiens
  chr1:5944298-5944521
  hypo
cagctggaccaaagcccgccaccgccaaccgtgtgaccccacagcctggccatctgtcagaacccatcaccacccagttctcctaggatgtcctgtgagaacacagacgcttagcctgtggggccatctgtcctgacgcctgcctcccccaggaaaggtcacagaacacaagtaacacacaagctcccagccgaacccccgtcctactcgacaaccaagatca

SEQ ID NO: 135427 - DNA, 30 bp, Homo sapiens
  chr1:5945050-5945080
  hypo
gcccaagctcccagccgagcccatcctacg

SEQ ID NO: 135428 - DNA, 30 bp, Homo sapiens
  chr1:5945761-5945791
  hypo
aggttctgtcccgtgcggtaaccctgcagg

SEQ ID NO: 135429 - DNA, 86 bp, Homo sapiens
  chr1:5946365-5946451
  hypo
tccaagtcgacttaacgagctgtgcacttgagcccctccgccaggccccccaccaacctctgcgctgccagcgtcgggtggatgtg

SEQ ID NO: 135430 - DNA, 217 bp, Homo sapiens
  chr1:5946682-5946899
  hypo
ctctgccctgaggtgcgcacaggcaggcacccagccttgtgtcccttgacaccccatcagcagcccctatcccagcataggcctcagtcgaagcccctggaacgtcccaggtgggaccctcctgagccacccaacccacctgtcccacccaccacagtcctggacgtggagtgaagtccagggctttgctcaggccctctaacgagcaatcccgggg

SEQ ID NO: 135431 - DNA, 264 bp, Homo sapiens
  chr1:5947295-5947559
  hypo
gaggggttgggcggccgctggagaaatggcacaaggctggggactcttacccacgttggccaaagtcaggtgcagccggcccttcaccaccgagtggacgccgatgggcttgacgcggccaaaccccagcatgtctccactcaccaccatgttgtcctgctcgtattcagttgccacgacctcaagctcgtgggaggcctgcacagccggccggccttggcggaggagatgctgcagaagagaaaagcgcgttcagaggctgga

SEQ ID NO: 135432 - DNA, 30 bp, Homo sapiens
  chr1:5948862-5948892
  hypo
gcctggctgagccttcgggccaaaccccca

SEQ ID NO: 135433 - DNA, 30 bp, Homo sapiens
  chr1:5949491-5949521
  hypo
gtctatgtcaacaagcgtaacggcacttgt

SEQ ID NO: 135434 - DNA, 221 bp, Homo sapiens
  chr1:5950821-5951042
  hypo
gtgcgggatagcgcccgctccttccaagcagacagacgctggaagcgtgactcgtcccatgagggacgcagcacccactgtgcctgtccttccagagagccgctaccttcatctggacggcagcagatccgatgagcagcagggagtctccgtcccagacgtcaatctgcagggtctgcacggccaggtagcgggcaaagcagcgccgctcacctggcttc

SEQ ID NO: 135435 - DNA, 30 bp, Homo sapiens; identical to SEQ ID NO: 58942
  chr1:5958128-5958158
  hypo

SEQ ID NO: 135436 - DNA, 146 bp, Homo sapiens; identical to SEQ ID NO: 13970
  chr1:5958566-5958712
  hypo

SEQ ID NO: 135437 - DNA, 30 bp, Homo sapiens
  chr1:5965785-5965815
  hypo
aggtctggctcaggtcggcttccaggtggg

SEQ ID NO: 135438 - DNA, 30 bp, Homo sapiens; identical to SEQ ID NO: 58944
  chr1:5966288-5966318
  hypo

SEQ ID NO: 135439 - DNA, 79 bp, Homo sapiens
  chr1:5977996-5978075
  hypo
caatattcaagatggcgaacaccctctgggaccaggacgagcagagccaccaccaactgcaatgcgcacgcagcgagag

SEQ ID NO: 135440 - DNA, 130 bp, Homo sapiens
  chr1:5987703-5987833
  hypo
cttactcgaaggggacgtgggtggtttcctggaaggccgccgctccactttggggccactgacaggctccgtgggtgcatccaggtgttcttctgagcccagcgagaactggaaccggagtgtacccgac

SEQ ID NO: 135441 - DNA, 30 bp, Homo sapiens; identical to SEQ ID NO: 13971
  chr1:5994331-5994361
  hypo

SEQ ID NO: 135442 - DNA, 30 bp, Homo sapiens
  chr1:5999457-5999487
  hypo
cggtgtaaagctctccgccctctggagcaa

SEQ ID NO: 135443 - DNA, 31 bp, Homo sapiens; identical to SEQ ID NO: 13972
  chr1:6005139-6005170
  hypo

SEQ ID NO: 135444 - DNA, 92 bp, Homo sapiens
  chr1:6007180-6007272
  hypo
cagggctgctgaacacgtactccagctggaagatgaccgcaaatgcagggtggccgaccatctctgggaggcggaggcggcttctcaaaacc

SEQ ID NO: 135445 - DNA, 31 bp, Homo sapiens; identical to SEQ ID NO: 13973
  chr1:6013728-6013759
  hypo

SEQ ID NO: 135446 - DNA, 254 bp, Homo sapiens; identical to SEQ ID NO: 13974
  chr1:6046165-6046419
  hypo

SEQ ID NO: 135447 - DNA, 30 bp, Homo sapiens
  chr1:6047269-6047299
  hypo
cctgtccagccagaccgggatctaaatctt

SEQ ID NO: 135448 - DNA, 395 bp, Homo sapiens
  chr1:6047767-6048162
  hypo
ggcaacagtcatccccggggaagcctggctgtgactgggctgcatgctgaacacaccgcttttattattcaacaccattttcactaagaagaatgactgagagacaaacatgggtacttggcagacatcttctcaaacgtgaacaaagttagcatgtcacttccgggaaaacaactgcaacaaaaatggagtttccaagcaaaaatgagaattaagaacatttgtatcctctaccatgagcctactagcttcacacttcttcaagactttcctgatgagaggggcagtgatataacgtgatcttctaaggttacaccattaaatgtgtcaatagttggaaggtctgcatgactccgtgaaccaatattttctgaacaatgcgtaatggtacaaaa

SEQ ID NO: 135449 - DNA, 925 bp, Homo sapiens; identical to SEQ ID NO: 102422
  chr1:6052411-6053336
  hypo

SEQ ID NO: 135450 - DNA, 142 bp, Homo sapiens; identical to SEQ ID NO: 102423
  chr1:6053624-6053766
  hypo

SEQ ID NO: 135451 - DNA, 135 bp, Homo sapiens
  chr1:6056052-6056187
  hypo
actcctttgtcgtggcgtgggaagccccacactgctctttccttggtgacgggtgacccgccatgttcaggcccctcctggtctatcttcgggtgagtctattaagggatacaccatctccgctcagccagtccc

SEQ ID NO: 135452 - DNA, 298 bp, Homo sapiens
  chr1:6056507-6056805
  hypo
cccctgctggccagcgtctcaggaggctactccctgctctgcgcagtgaccacatggttagccccagagacccaggttctgcgtgtcttcagtgacagagcaaccccatgcccaccctgccggcttccccggcacctgtctccttgcaggcagcctcctccacttctccagcacacaggtacccacagagctaactgctttgacgccatgctggttgtagacaaaacaggattgggaaaaggggaaaagtggagaaatggtggggaccaccttcctggccgtccgcctttacctggac

SEQ ID NO: 135453 - DNA, 321 bp, Homo sapiens
  chr1:6059780-6060101
  hypo
acaggagccagtcctcgccaccctgttcctgaccatacagagtctgtcacctgcctgtgccctgattgtaccccatctgcaccgtgtctgcaccctgcctgcgccctgtctgtaccccatgtgcgccccatccgtaccctgcctgcgccatctgcgccctctccgcaccctgtctgtgtcgtctgtgccctgtctgtgccccgtccgcatcccgcctgcgccctgtctgtgccccgtccgcaccctgcctgcaccccatccatatcctgctctgctgtctgcaccctctctgcaccctgtctgcgccgtccgtgccccgtc

SEQ ID NO: 135454 - DNA, 300 bp, Homo sapiens; identical to SEQ ID NO: 58953
  chr1:6076557-6076857
  hypo

SEQ ID NO: 135455 - DNA, 69 bp, Homo sapiens; identical to SEQ ID NO: 58954
  chr1:6111617-6111686
  hypo

SEQ ID NO: 135456 - DNA, 149 bp, Homo sapiens; identical to SEQ ID NO: 13975
  chr1:6129707-6129856
  hypo

SEQ ID NO: 135457 - DNA, 188 bp, Homo sapiens; identical to SEQ ID NO: 58956
  chr1:6131661-6131849
  hypo

SEQ ID NO: 135458 - DNA, 30 bp, Homo sapiens; identical to SEQ ID NO: 58957
  chr1:6132170-6132200
  hypo

SEQ ID NO: 135459 - DNA, 244 bp, Homo sapiens
  chr1:6133883-6134127
  hypo
catggttaagtctgccgcgtggaccagtgagcacgtgctcccgggagccagcgcagcagcctccctccctctttctgttttgtgagggcgccctgccccaggggagagtagaaaggtgagccaggtggccatggccagaggggatgccgagtctggtgccatcacccagcagtggatgcctcgggcctcagcatgtcccttaagctccccaggactcagatttcccacacgcgtgacccccatt

SEQ ID NO: 135460 - DNA, 44 bp, Homo sapiens
  chr1:6134426-6134470
  hypo
cgcctctgggtctctcggaaggacagggacggcacacgcccaga

SEQ ID NO: 135461 - DNA, 23 bp, Homo sapiens
  chr1:6134725-6134748
  hypo
aagacactagctggccgggcgcg

SEQ ID NO: 135462 - DNA, 84 bp, Homo sapiens; identical to SEQ ID NO: 34968
  chr1:6137222-6137306
  hypo

SEQ ID NO: 135463 - DNA, 715 bp, Homo sapiens
  chr1:6148939-6149654
  hypo
gaatccgactccacacggcatttgctgaccctgtttttgcgtctaacattgcatcgtaaacgttttttgggaggggccagggtgccaaaaccgctggtgacatcacacgcggtcggcctgttttccagggcggagacggagcggggcctgtccaggaagcacataatcgaaggtgaggacgcgctcgggcacctcagggcccccatacctgtgggatcatcctcggaggccaaagtgatggcagcacagggcccgacccccccagttaacccactgagggcccaatcccggggcacccggtgctctggcctgaccttctccttccacccaggtagcacagcgggacgctgcagagaacgagggcagcccggtggctgagcacagaccacagaccagcctgggtttcaatccaggtttggccccacactggctgagtgggtcttcagcaggggcaccctgccccatgcctctgccacagtatctgtgcaatagggacagtaagagcgcacccggcgagggtggctgggatgcctgcagcgcccaggagaaggtgccacacagcccggggctcagcactcgcaggcaccggagcaaggcaccggggtgtctggctcttgctgtatctttattgtcttcatgcctttcctgtccgtgttcattttcttcgaggtaatagatcattccattgaaaatcacctggcggggcaagccaccc

SEQ ID NO: 135464 - DNA, 30 bp, Homo sapiens; identical to SEQ ID NO: 58961
  chr1:6153058-6153088
  hypo

SEQ ID NO: 135465 - DNA, 30 bp, Homo sapiens
  chr1:6154543-6154573
  hypo
tggtacggtggccgcgcagcatgtgtgtgt

SEQ ID NO: 135466 - DNA, 222 bp, Homo sapiens
  chr1:6155343-6155565
  hypo
acaggcaagggccctcggggtccctttctgccttcacaggaggcctactccgtggcccggcagttcaacctgaccccgcccatctgcgagcaggctgagtaccacatgttccagcgtgagaaagtggaggtgcagctgccggagctgttccacaagataggtgggcaccctcgggcccctcgccccgccccaccccacccctgctctcgggcccagggcttg

SEQ ID NO: 135467 - DNA, 137 bp, Homo sapiens
  chr1:6166321-6166458
  hypo
gggaagtctcgaggacggctagatatctgtcaaaaaaagaggagagccgggcttgcctgacgttggcagcagcaggcaggccgggcccggcgggcacccgtgtgcatgctgcccggagcggacgggcacctaccggt

SEQ ID NO: 135468 - DNA, 30 bp, Homo sapiens
  chr1:6166680-6166710
  hypo
ggatggtggggtccccggcgcggttggtca

SEQ ID NO: 135469 - DNA, 395 bp, Homo sapiens; identical to SEQ ID NO: 58962
  chr1:6171633-6172028
  hypo

SEQ ID NO: 135470 - DNA, 30 bp, Homo sapiens; identical to SEQ ID NO: 58963
  chr1:6188711-6188741
  hypo

SEQ ID NO: 135471 - DNA, 164 bp, Homo sapiens
  chr1:6188970-6189134
  hypo
ccccgacttggagccgaggccgggccgcaccaccaggtgggtgagcatcatcttgcgcttggccacctgcgtgatgcgctcctccaccgaggcccgagtcacgaagcggtagatcatcaccttcttgttctggccgatgcggtgggcgcggctgaaggcctggg

SEQ ID NO: 135472 - DNA, 31 bp, Homo sapiens; identical to SEQ ID NO: 58965
  chr1:6195513-6195544
  hypo

SEQ ID NO: 135473 - DNA, 417 bp, Homo sapiens
  chr1:6202200-6202617
  hypo
accttcttcccactccgaatggcgttgtcctcaaaggaaaactcgttctcccgaatcaccgagcggctctccttgtcccccgtgtaggtgaccacgtagaagtcgggcgcccacatctcaaactcgcgttcccagttgatgatggtggagaggggcgcgctaaccaggtagggccctttggagtggccctggagagagaggccgatgccgtgagaccacctgcccttggccaggaccagccacccctcctggccgcctgccccgcctgcccacctccttgtagagggagtaaaggaacacgatggtctgcaccgtcttgcccagacccatctcatcggccaggatggtgtcagtgccctgggcccaagagaagcgcagccagttgaggccctccagctggtacgggtgcagtgtgcc

SEQ ID NO: 135474 - DNA, 30 bp, Homo sapiens
  chr1:6213316-6213346
  hypo
agcagctcatggaatcgatagctcagcagc

SEQ ID NO: 135475 - DNA, 65 bp, Homo sapiens; identical to SEQ ID NO: 58966
  chr1:6243322-6243387
  hypo

SEQ ID NO: 135476 - DNA, 30 bp, Homo sapiens; identical to SEQ ID NO: 58967
  chr1:6260601-6260631
  hypo

SEQ ID NO: 135477 - DNA, 30 bp, Homo sapiens; identical to SEQ ID NO: 58968
  chr1:6262605-6262635
  hypo

SEQ ID NO: 135478 - DNA, 30 bp, Homo sapiens; identical to SEQ ID NO: 58969
  chr1:6270948-6270978
  hypo

SEQ ID NO: 135479 - DNA, 30 bp, Homo sapiens; identical to SEQ ID NO: 58970
  chr1:6272040-6272070
  hypo

SEQ ID NO: 135480 - DNA, 330 bp, Homo sapiens; identical to SEQ ID NO: 58971
  chr1:6278214-6278544
  hypo

SEQ ID NO: 135481 - DNA, 572 bp, Homo sapiens; identical to SEQ ID NO: 58972
  chr1:6280173-6280745
  hypo

SEQ ID NO: 135482 - DNA, 260 bp, Homo sapiens; identical to SEQ ID NO: 58973
  chr1:6281661-6281921
  hypo

SEQ ID NO: 135483 - DNA, 30 bp, Homo sapiens; identical to SEQ ID NO: 58974
  chr1:6284371-6284401
  hypo

SEQ ID NO: 135484 - DNA, 364 bp, Homo sapiens
  chr1:6284775-6285139
  hypo
gacagagtccatctctcccagcgagtcctggttatcctttacttacactctggcctcgggggcagtggcgtgtggcctcggtcctccccaggtaactctggagggcgctgtggaatattgctgtgatttgccccttactcgtctttcacccatgttccgccttgattcggcataaggacagactgctccagtggggccttgggtcctcaggccttctgaccgcttggtcttgagtgacattccagaagagtgactaatgacataaaacgattaagaaaatccatgtggcagcggccaaccggaaacagttttgtcccaggctgcacagggtcggaggccccaaggtcaccggggccactgcccg

SEQ ID NO: 135485 - DNA, 30 bp, Homo sapiens
  chr1:6293407-6293437
  hypo
aggatagaggtctgcggaaaatcgcttggg

SEQ ID NO: 135486 - DNA, 162 bp, Homo sapiens; identical to SEQ ID NO: 102434
  chr1:6296162-6296324
  hypo

SEQ ID NO: 135487 - DNA, 23 bp, Homo sapiens
  chr1:6296850-6296873
  hypo
tttttttttgagacggagtctcg

SEQ ID NO: 135488 - DNA, 83 bp, Homo sapiens
  chr1:6297112-6297195
  hypo
agacgtgagccaccgcgccctgcctatattaggtttttaaatagcaggaggcaaagcttttcggtgtgatcctgacttcactt

SEQ ID NO: 135489 - DNA, 203 bp, Homo sapiens; identical to SEQ ID NO: 58979
  chr1:6313882-6314085
  hypo

SEQ ID NO: 135490 - DNA, 22 bp, Homo sapiens
  chr1:6318473-6318495
  hypo
ccaccgcgcccagccttgtgct

SEQ ID NO: 135491 - DNA, 216 bp, Homo sapiens; identical to SEQ ID NO: 71
  chr1:6321177-6321393
  hypo

SEQ ID NO: 135492 - DNA, 30 bp, Homo sapiens; identical to SEQ ID NO: 13984
  chr1:6328812-6328842
  hypo

SEQ ID NO: 135493 - DNA, 102 bp, Homo sapiens
  chr1:6329523-6329625
  hypo
cggccaccaggccatcgagcattcccaatgccacaggccgagggctgtgactgcttctctcgaggtcagttaatacacagcctgaggcgggcacgagcccag

SEQ ID NO: 135494 - DNA, 30 bp, Homo sapiens
  chr1:6329900-6329930
  hypo
gcctcaacgtcactgcgtggagtgcccgcc

SEQ ID NO: 135495 - DNA, 535 bp, Homo sapiens
  chr1:6331650-6332185
  hypo
ttagcggagcctgtccgccatccgctgtggcctctccgccatccgctgtggcctctcccagcagctgcaggcctgggttaattacctcctcctccacacccacccaggactgcaccagcctccagcagaaagcagccggaagtctcaaataatgagatcattgtggagagtcataaacaccctcaccaggggctcccctcacccagcagcaccggctcagactccgaaagaactgcccccaagtggggccaagaaaggaggcgtaaaggccaacgggaggctgctggcggaggcagggagatcgtcaccacaaaggggagaaaaggcattgggacttgggcctgggtggtggcctctcaggagcccctcctgcaggcacggagtgccgtggtcccgggacgctcggctcacagctcttgtgccggagtgtggacatggcggtccccaccctacaacaccaataatgatcatagctgtcacctgctgagtgcccactgtgggctaggcctgggccagaagccgcgtgctcatggca

SEQ ID NO: 135496 - DNA, 256 bp, Homo sapiens; identical to SEQ ID NO: 58983
  chr1:6333298-6333554
  hypo

SEQ ID NO: 135497 - DNA, 404 bp, Homo sapiens; identical to SEQ ID NO: 13986
  chr1:6333774-6334178
  hypo

SEQ ID NO: 135498 - DNA, 179 bp, Homo sapiens; identical to SEQ ID NO: 58985
  chr1:6334535-6334714
  hypo

SEQ ID NO: 135499 - DNA, 248 bp, Homo sapiens; identical to SEQ ID NO: 58986
  chr1:6338579-6338827
  hypo

SEQ ID NO: 135500 - DNA, 86 bp, Homo sapiens; identical to SEQ ID NO: 58987
  chr1:6340039-6340125
  hypo

SEQ ID NO: 135501 - DNA, 31 bp, Homo sapiens; identical to SEQ ID NO: 13989
  chr1:6342819-6342850
  hypo

SEQ ID NO: 135502 - DNA, 331 bp, Homo sapiens; identical to SEQ ID NO: 58989
  chr1:6345507-6345838
  hypo

SEQ ID NO: 135503 - DNA, 154 bp, Homo sapiens
  chr1:6347155-6347309
  hypo
ttttcaagctgcctgagagccaggagttccggcacaagtgcacggggaccaggtgcagtcactccgcagtccagggcaggcctcaaaggtggctgtagccgcatgtaatcaatgagggtcaagcttcatcactcacactcgaggccctgacggg

SEQ ID NO: 135504 - DNA, 140 bp, Homo sapiens
  chr1:6360870-6361010
  hypo
gcgcggccggtccctctccacaaacacagaatgaccaacaccgggtctcactggacaacacccgatgaggcagcagcctccctgtctccattctacaagtcaggaaccagacacatggagagtcacgcttccaaagtcac

SEQ ID NO: 135505 - DNA, 112 bp, Homo sapiens
  chr1:6361453-6361565
  hypo
cgtgacagtcaaccccgaggggaagatgtgagcggctattgagtgcctggtgtgcgaataccctcttcaccacccccatgctcctgcaggctccacacggcacccccagacc

SEQ ID NO: 135506 - DNA, 255 bp, Homo sapiens; identical to SEQ ID NO: 58992
  chr1:6361804-6362059
  hypo

SEQ ID NO: 135507 - DNA, 36 bp, Homo sapiens; identical to SEQ ID NO: 58993
  chr1:6363865-6363901
  hypo

SEQ ID NO: 135508 - DNA, 30 bp, Homo sapiens; identical to SEQ ID NO: 58994
  chr1:6366575-6366605
  hypo

SEQ ID NO: 135509 - DNA, 31 bp, Homo sapiens; identical to SEQ ID NO: 58995
  chr1:6379971-6380002
  hypo

SEQ ID NO: 135510 - DNA, 139 bp, Homo sapiens; identical to SEQ ID NO: 13993
  chr1:6382125-6382264
  hypo

SEQ ID NO: 135511 - DNA, 25 bp, Homo sapiens
  chr1:6385168-6385193
  hypo
gatatctcagccgggcgcagtggct

SEQ ID NO: 135512 - DNA, 154 bp, Homo sapiens
  chr1:6385812-6385966
  hypo
aaagccatgctctcatctgtgcgcccactgggttttcaccagtcccctttggtgcttatgtggactaagcaagggaggtgagcggccataacaatgccccgagtccaggttagcaggggccagggcgcctctcggcagggctaggagcaggtgg

SEQ ID NO: 135513 - DNA, 296 bp, Homo sapiens
  chr1:6391353-6391649
  hypo
tgaggtcacagcagaatgggacgggccctgagcccagtgacccgtactccggtaagcaggccgtgcgaagatggaggcagaagcttcagtgacgcagcctcagccaagggacgcctggagccacccggcgctggagacgccaggagggatcctcgcctggggccaatggagggcgcagggccttgcccatacctttgcacttctggcctccagaactgtgacagaatcaacttctattgtttgagagctacccagtcagtggcactttgtcacagcagccccgggacactgtcagg

SEQ ID NO: 135514 - DNA, 66 bp, Homo sapiens; identical to SEQ ID NO: 58999
  chr1:6397254-6397320
  hypo

SEQ ID NO: 135515 - DNA, 30 bp, Homo sapiens
  chr1:6405013-6405043
  hypo
agccgggacccaggacggctctgatttgct

SEQ ID NO: 135516 - DNA, 283 bp, Homo sapiens
  chr1:6405496-6405779
  hypo
gacacaacctctccacgtctcagtctctgtaaacacagataataaatggtcccaacaggctgctgcagagattcgaggggataacgaatgggaagaactcggtgcttaggaaacgcccaggagaggcagggatagctgtctctctctgacatgcggggataaggcaattgacaaacgtcaagtgcgtggaccatgcccggcatccagtgagggcccagagagggtgcggtctcatcaccatgcccagccccggccgtcttctggctgacggcagctctgagga

SEQ ID NO: 135517 - DNA, 180 bp, Homo sapiens; identical to SEQ ID NO: 59001
  chr1:6409752-6409932
  hypo

SEQ ID NO: 135518 - DNA, 32 bp, Homo sapiens
  chr1:6410432-6410464
  hypo
agcgcctgcccactgcgcgctaagctcctctg

SEQ ID NO: 135519 - DNA, 241 bp, Homo sapiens
  chr1:6415192-6415433
  hypo
tacctgtcccagcaacgcctgacccaccctttgtgaaggacagggaaccattcacaaataggggagtgtaagcgaatacccactcacagagggcacccggcaccacccacccaaaccccagatgcacagggacaccctgacccaggattccactcgcagaaatttaccccacagctgtttccacacacggttaaacgaagcactgcaagggtactcactgcacagccgtgtataacgcagg

SEQ ID NO: 135520 - DNA, 200 bp, Homo sapiens
  chr1:6422665-6422865
  hypo
aggagaactccgcaacgacatgccctagaatgggaggccacatccctctccccaaccgaaactcactgcctcatgctagaggaagctggtagggtcagaaacttacatccaggctccagaaagatctctcagagctcaatgtgaaaaaaacaaatgacctttggctaggcgcggtcgtgcacgcctgtaatcccagcact

SEQ ID NO: 135521 - DNA, 142 bp, Homo sapiens; identical to SEQ ID NO: 59002
  chr1:6434928-6435070
  hypo

SEQ ID NO: 135522 - DNA, 53 bp, Homo sapiens; identical to SEQ ID NO: 59003
  chr1:6445424-6445477
  hypo

SEQ ID NO: 135523 - DNA, 205 bp, Homo sapiens; identical to SEQ ID NO: 59004
  chr1:6445510-6445715
  hypo

SEQ ID NO: 135524 - DNA, 230 bp, Homo sapiens; identical to SEQ ID NO: 59005
  chr1:6446078-6446308
  hypo

SEQ ID NO: 135525 - DNA, 675 bp, Homo sapiens; identical to SEQ ID NO: 102446
  chr1:6484601-6485276
  hypo

SEQ ID NO: 135526 - DNA, 329 bp, Homo sapiens; identical to SEQ ID NO: 59007
  chr1:6486767-6487096
  hypo

SEQ ID NO: 135527 - DNA, 56 bp, Homo sapiens; identical to SEQ ID NO: 59008
  chr1:6504648-6504704
  hypo

SEQ ID NO: 135528 - DNA, 1589 bp, Homo sapiens; identical to SEQ ID NO: 34991
  chr1:6507490-6509079
  hypo

SEQ ID NO: 135529 - DNA, 21 bp, Homo sapiens
  chr1:6513238-6513259
  hypo
ccaccacgcctggcccccgag

SEQ ID NO: 135530 - DNA, 138 bp, Homo sapiens; identical to SEQ ID NO: 102452
  chr1:6526181-6526319
  hypo

SEQ ID NO: 135531 - DNA, 23 bp, Homo sapiens
  chr1:6526567-6526590
  hypo
ccgcaaggggccaagcgcagtag

SEQ ID NO: 135532 - DNA, 30 bp, Homo sapiens
  chr1:6527474-6527504
  hypo
aaatcgggcccgggcgtaggcagggatcct

SEQ ID NO: 135533 - DNA, 116 bp, Homo sapiens; identical to SEQ ID NO: 59010
  chr1:6527794-6527910
  hypo

SEQ ID NO: 135534 - DNA, 243 bp, Homo sapiens; identical to SEQ ID NO: 14001
  chr1:6528246-6528489
  hypo

SEQ ID NO: 135535 - DNA, 31 bp, Homo sapiens; identical to SEQ ID NO: 14002
  chr1:6528938-6528969
  hypo

SEQ ID NO: 135536 - DNA, 369 bp, Homo sapiens; identical to SEQ ID NO: 59013
  chr1:6530600-6530969
  hypo

SEQ ID NO: 135537 - DNA, 71 bp, Homo sapiens
  chr1:6534097-6534168
  hypo
ctctgggcgtccacacgctccagggcggggggcccggtcccagctggccgcagaatcggcaaactcaggga

SEQ ID NO: 135538 - DNA, 373 bp, Homo sapiens
  chr1:6534592-6534965
  hypo
gtccactttgcccagcgcaatgcccttcctttcaaatacaggcagcagcacctccctgcccccaggacaggaggcatgtgtgttagaaccaggcggccagtcgcttcagcttgggccccgcccccacgagcccccgccccacccacagccccagctgcccccaccttcccaacggaaaagggaagcccgcatgggatcacacgcaggtccacagacacctgcccgcagaggtgctcacacaggcgcatctgcataccacggcagacctgtcacacgcctgcccacacgcaggcctggctcctgcatacatgattaaaatgcacaagtacacagaccccaccgcactccctcacactggcgtgcacaccagcac

SEQ ID NO: 135539 - DNA, 289 bp, Homo sapiens; identical to SEQ ID NO: 59016
  chr1:6537438-6537727
  hypo

SEQ ID NO: 135540 - DNA, 31 bp, Homo sapiens; identical to SEQ ID NO: 59017
  chr1:6540612-6540643
  hypo

SEQ ID NO: 135541 - DNA, 31 bp, Homo sapiens; identical to SEQ ID NO: 14004
  chr1:6547667-6547698
  hypo

SEQ ID NO: 135542 - DNA, 161 bp, Homo sapiens; identical to SEQ ID NO: 59019
  chr1:6562948-6563109
  hypo

SEQ ID NO: 135543 - DNA, 74 bp, Homo sapiens; identical to SEQ ID NO: 59020
  chr1:6565118-6565192
  hypo

SEQ ID NO: 135544 - DNA, 30 bp, Homo sapiens; identical to SEQ ID NO: 59021
  chr1:6566322-6566352
  hypo

SEQ ID NO: 135545 - DNA, 31 bp, Homo sapiens; identical to SEQ ID NO: 59022
  chr1:6569032-6569063
  hypo

SEQ ID NO: 135546 - DNA, 31 bp, Homo sapiens; identical to SEQ ID NO: 59023
  chr1:6572210-6572241
  hypo

SEQ ID NO: 135547 - DNA, 136 bp, Homo sapiens
  chr1:6623397-6623533
  hypo
tcagaccggtgccggcggccacagggccgtgaatgggcttgtcattacttgtatattgggtaaggctggagatataggagcgtaaaagttgtactatgcgccgtgtcagagtgttttctgtcgtatctatgataga

SEQ ID NO: 135548 - DNA, 33 bp, Homo sapiens; identical to SEQ ID NO: 59025
  chr1:6639451-6639484
  hypo

SEQ ID NO: 135549 - DNA, 349 bp, Homo sapiens
  chr1:6648177-6648526
  hypo
ctcaacatgcacctgcgcacacacacgggtgagaagcccttccagtgccacctctgtggcaagaccttccgaacccaaggtgaggtacgccctgcccctcccctcgcctccccatcctgaggccaaggccacaggctgagctcttgccttgtgcctgcagccagcctggacaagcacaaccgcacccacaccggggaaaggcccttcagttgcgagttctgtgaacagcgcttcactgagaaggggcccctcctgaggcacgtggccagccgccatcaggagggccggccccacttctgccagatatgcggcaagaccttcaaaggtacctgggcggccctgggagagc

SEQ ID NO: 135550 - DNA, 30 bp, Homo sapiens; identical to SEQ ID NO: 14006
  chr1:6648994-6649024
  hypo

SEQ ID NO: 135551 - DNA, 90 bp, Homo sapiens; identical to SEQ ID NO: 59027
  chr1:6653432-6653522
  hypo

SEQ ID NO: 135552 - DNA, 30 bp, Homo sapiens
  chr1:6653926-6653956
  hypo
gtgatgagggtgcccgctgcagcgccaggc

SEQ ID NO: 135553 - DNA, 30 bp, Homo sapiens; identical to SEQ ID NO: 59028
  chr1:6657044-6657074
  hypo

SEQ ID NO: 135554 - DNA, 195 bp, Homo sapiens; identical to SEQ ID NO: 102459
  chr1:6659236-6659431
  hypo

SEQ ID NO: 135555 - DNA, 26 bp, Homo sapiens
  chr1:6669384-6669410
  hypo
actccgtctcagaaaaacaaaaacaa

SEQ ID NO: 135556 - DNA, 23 bp, Homo sapiens
  chr1:6671745-6671768
  hypo
gcgacagagggagattctgtctc

SEQ ID NO: 135557 - DNA, 41 bp, Homo sapiens; identical to SEQ ID NO: 59030
  chr1:6672154-6672195
  hypo

SEQ ID NO: 135558 - DNA, 471 bp, Homo sapiens; identical to SEQ ID NO: 102464
  chr1:6675267-6675738
  hypo

SEQ ID NO: 135559 - DNA, 142 bp, Homo sapiens; identical to SEQ ID NO: 59031
  chr1:6675988-6676130
  hypo

SEQ ID NO: 135560 - DNA, 21 bp, Homo sapiens
  chr1:6676369-6676390
  hypo
agccaccgcgcccggcgagtg

SEQ ID NO: 135561 - DNA, 95 bp, Homo sapiens
  chr1:6688527-6688622
  hypo
tgggcctcacaccccgtgcctctgcccttaggtttccgttcagccgcccggagctgctgaaggaatgggtgctgaacatcggccggggcaacttc

SEQ ID NO: 135562 - DNA, 42 bp, Homo sapiens
  chr1:6707157-6707199
  hypo
tttttgacggagtttcgctcgtccaggctggagtgcagtagc

SEQ ID NO: 135563 - DNA, 353 bp, Homo sapiens; identical to SEQ ID NO: 59033
  chr1:6711962-6712315
  hypo

SEQ ID NO: 135564 - DNA, 577 bp, Homo sapiens; identical to SEQ ID NO: 14011
  chr1:6713808-6714385
  hypo

SEQ ID NO: 135565 - DNA, 156 bp, Homo sapiens; identical to SEQ ID NO: 59035
  chr1:6720535-6720691
  hypo

SEQ ID NO: 135566 - DNA, 135 bp, Homo sapiens; identical to SEQ ID NO: 14012
  chr1:6738111-6738246
  hypo

SEQ ID NO: 135567 - DNA, 30 bp, Homo sapiens
  chr1:6750088-6750118
  hypo
aaaaatcccgaggatcggaaagatcaagtg

SEQ ID NO: 135568 - DNA, 126 bp, Homo sapiens
  chr1:6750365-6750491
  hypo
cattcatttgacagtcgcatatccactgctatgtcaagcatttccatgcactcccacttcattcccacaaaagctctacgacagtaaaactgtctggattttctggatgaacgggctcagacaggt

SEQ ID NO: 135569 - DNA, 78 bp, Homo sapiens
  chr1:6776384-6776462
  hypo
ggagaggggataatccatgagttttaagctgtgcaccattctgggcagcgtgatgagatctctcgctgtaagcttgat

SEQ ID NO: 135570 - DNA, 30 bp, Homo sapiens
  chr1:6786084-6786114
  hypo
tgtctggcacatcagcgaatctcgttggca

SEQ ID NO: 135571 - DNA, 30 bp, Homo sapiens
  chr1:6790065-6790095
  hypo
caggctacttactgtcgcaggaccaagatt

SEQ ID NO: 135572 - DNA, 31 bp, Homo sapiens; identical to SEQ ID NO: 14013
  chr1:6845865-6845896
  hypo

SEQ ID NO: 135573 - DNA, 84 bp, Homo sapiens; identical to SEQ ID NO: 14014
  chr1:6871009-6871093
  hypo

SEQ ID NO: 135574 - DNA, 30 bp, Homo sapiens
  chr1:6959583-6959613
  hypo
attatatgtgtataacgcgcacgcgcgcgc

SEQ ID NO: 135575 - DNA, 84 bp, Homo sapiens
  chr1:6964966-6965050
  hypo
gtattgcacgctgaacactccgactcgctgtgtgtccaaagccaaacattctttctccaacaggttattcgtgtggtttgctgt

SEQ ID NO: 135576 - DNA, 30 bp, Homo sapiens; identical to SEQ ID NO: 59040
  chr1:7121431-7121461
  hypo

SEQ ID NO: 135577 - DNA, 31 bp, Homo sapiens; identical to SEQ ID NO: 14015
  chr1:7182591-7182622
  hypo

SEQ ID NO: 135578 - DNA, 31 bp, Homo sapiens
  chr1:7191276-7191307
  hypo
gccaggattacaggtgcgagccactgcgccc

SEQ ID NO: 135579 - DNA, 136 bp, Homo sapiens; identical to SEQ ID NO: 59042
  chr1:7279267-7279403
  hypo

SEQ ID NO: 135580 - DNA, 46 bp, Homo sapiens; identical to SEQ ID NO: 59043
  chr1:7407199-7407245
  hypo

SEQ ID NO: 135581 - DNA, 31 bp, Homo sapiens; identical to SEQ ID NO: 59044
  chr1:7434891-7434922
  hypo

SEQ ID NO: 135582 - DNA, 30 bp, Homo sapiens
  chr1:7484128-7484158
  hypo
agaaggataagcccacgtcagccttcctct

SEQ ID NO: 135583 - DNA, 85 bp, Homo sapiens; identical to SEQ ID NO: 14017
  chr1:7550322-7550407
  hypo

SEQ ID NO: 135584 - DNA, 145 bp, Homo sapiens; identical to SEQ ID NO: 59046
  chr1:7550706-7550851
  hypo

SEQ ID NO: 135585 - DNA, 524 bp, Homo sapiens
  chr1:7560632-7561156
  hypo
tcccctgggtgggcccgtgggtcctgcccgcttctgtagcagcagcagcctcctctcaagggccctctgttgctcaggccgtgttcctgcctgtggtcgcccagcttcaattaccacggctcaaagtcagaggcgtgggctggctccgtccagatggagggagggccggtgttcccttgcctcagagtctgcgggtggcttcagagagaagggagcagaacctctttcctttgctgccttaaagcagcaagtctcggtgacatcaggcagttccagggcagagcttgtggccgctgtcaagcccaggagacatcagggcttcatgctcaactggtcacacccaactggcaagaggggtcccaggcagaaactctgggaaccgtagcccaggccgagagccatccccaggggactgaggtagggtctgcaggaccaaagctgcctcacacagacctttcaggaaagcaagcacagatcctcggaagcggttaccacccacctgtgccacgcgccacccctcgtcc

SEQ ID NO: 135586 - DNA, 165 bp, Homo sapiens
  chr1:7562781-7562946
  hypo
agggggattcaatgccgacggagatgtgaagtcagcgcaagaatagaaatggcctcgctgggcttagtgggggatgtgtagtacgtttccagagatcacccctgtacttcattcgctcagcacacaagagctcccctacaagggctgaagcgaggcaggcagccc

SEQ ID NO: 135587 - DNA, 126 bp, Homo sapiens
  chr1:7567306-7567432
  hypo
acatatttgcacactcgcacacaccctgccttttgcacacggctgcacacacccctaccagctccagctctccggctctccctgcctcctggctgctctgatgtgaggagccgtctctgcacaggt

SEQ ID NO: 135588 - DNA, 30 bp, Homo sapiens
  chr1:7567918-7567948
  hypo
tcccagctgggcactcggtggcctccctgc

SEQ ID NO: 135589 - DNA, 30 bp, Homo sapiens
  chr1:7638571-7638601
  hypo
ccctaccgacagggtcgccggaaaggacac

SEQ ID NO: 135590 - DNA, 238 bp, Homo sapiens
  chr1:7700370-7700608
  hypo
ctctgcctgcacctgcggggttgggggcggccctgaccctggtgggctccatgccaccctcatgctgccagtctctgctctccccacagaaccccgacatcgtcctggtgcactacctgaacgtgccggccatcgaggactgcggcaagccttgcggccccatcctctgctccatcaacaccgacaagaaggagtgggcgaaatggacgaaagaagagctcatcgggcagctgaaacc

SEQ ID NO: 135591 - DNA, 140 bp, Homo sapiens
  chr1:7710593-7710733
  hypo
gccttttccagaggacgtgtgatgttgggacgaagcccatgccccctggcagagggaggactgtgatgccccaacagcgagcaccagaaatgacaggctcactggggacacggcagataggtccccgcatgtgcacacgg

SEQ ID NO: 135592 - DNA, 30 bp, Homo sapiens
  chr1:7716717-7716747
  hypo
aacccaagaggctctcggctggcagcctgc

SEQ ID NO: 135593 - DNA, 111 bp, Homo sapiens
  chr1:7717012-7717123
  hypo
ggccactcccagcctcggctctgcaagccgatcctcacacaggccgcgctgcaggcagccctgtccgcgagaatgcagtccccggcctgtgtttcacggggcagccgcagg

SEQ ID NO: 135594 - DNA, 1615 bp, Homo sapiens
  chr1:7723193-7724808
  hypo
tcaaaggggcgtgggacggcccccgggcttggggtacgtgtccaagggctgagagtctgtggcctgcctggggtaccgggcctggactttgccagggaccccagccgctgtggggcaggtccaccacggtcctagctctgactctcttttgtgtgtgcatgtgtgtgtgcacatgtgtgcctgcgtgtgcgtgcgcgtgttgtgttccgatctccgcaggagctggcggcagcgtgcatcacaagtgtaacagcgccaaacaccgcatcatctcgcccaaggtggagccacggacaggggggtacgggagccactcggaggtgcagcacaatgacgtgtcggagggcaagcacgagcacagccacagcaagggctccagccgtgagaagaggaacggcaaggtggccaagcccgtgctcctgcaccagagcagcaccgaggtctcctccaccaaccaggtggaagtccccgacaccacccagagctcccctgtgtccatcagcagcgggctcaacagcgacccggacatggtggacagcccggtggtcacaggtgtgtccggtatggcggtggcctctgtgatggggagcttgtcccagagcgccacggtgttcatgtcagaggtcaccaatgaggccgtgtacaccatgtcccccaccgctggccccaaccaccacctcctctcacctgacgcctctcagggcctcgtcctggccgtgagctctgatggccacaagttcgcctttcccaccacgggcagctcggagagcctgtccatgctgcccaccaacgtgtccgaagagctggtcctctccaccaccctcgacggtggccggaagattccagaaaccaccatgaactttgaccccgactgtttccttaataacccaaagcagggccagacgtacgggggtggaggcctgaaagccgagatggtcagctccaacatccggcactcgccacccggggagcggagcttcagctttaccaccgtcctcaccaaggagatcaagaccgaggacacctccttcgagcagcagatggccaaagaagcgtactcctcctccgcggcggctgtggcagccagctccctcaccctgaccgccggctccagcctcctgccgtcgggcggcggcctgagtcccagcaccaccctggagcagatggacttcagcgccatcgactccaacaaggactacacgtccagcttcagccagacgggccacagcccccacatccaccagaccccctccccgagcttcttcctgcaggacgccagcaaacccctccccgtcgagcagaacacccacagcagcctgagtgactctgggggcaccttcgtgatgcccacggtgaaaacggaggcctcgtcccaaaccagctcctgcagcggtcacgtggagacgcggatcgagtccacttcctccctccacctcatgcagttccaggccaacttccaggccatgacggcagaaggggaggtcaccatggagacctcgcaggcggcggaagggagcgaggtcctgctcaagtctggggagctgcaggcttgcagctctgagcactacctgcagccggagaccaacggggtaatccgaagcgccggcggcgtccc

SEQ ID NO: 135595 - DNA, 30 bp, Homo sapiens
  chr1:7727365-7727395
  hypo
tgggcttaagaaagcgatgcaaagggacag

SEQ ID NO: 135596 - DNA, 15 bp, Homo sapiens
  chr1:7728678-7728693
  hypo
ttacagcctcaggca

SEQ ID NO: 135597 - DNA, 80 bp, Homo sapiens
  chr1:7728716-7728796
  hypo
cagccaggcgggctgttgccatgggaaccatcccttgaatggatggatgctgagctgtcctgcggcggtttccatggaga

SEQ ID NO: 135598 - DNA, 163 bp, Homo sapiens
  chr1:7742817-7742980
  hypo
gtgggcctgggccggccgctcctaggctggctccctccctcagatccacccagcccacctccgagcaaccctcagctggcccatgaacacatcgcatgacatgggatgctgtaagagaacatacacagagttggctgggtgcggtggctcacgcctgtgatcc

SEQ ID NO: 135599 - DNA, 30 bp, Homo sapiens
  chr1:7745066-7745096
  hypo
gagttcacaggcaccgtcccgcggtcacag

SEQ ID NO: 135600 - DNA, 258 bp, Homo sapiens; identical to SEQ ID NO: 102473
  chr1:7764521-7764779
  hypo

SEQ ID NO: 135601 - DNA, 213 bp, Homo sapiens; identical to SEQ ID NO: 102474
  chr1:7764989-7765202
  hypo

SEQ ID NO: 135602 - DNA, 268 bp, Homo sapiens; identical to SEQ ID NO: 59052
  chr1:7777933-7778201
  hypo

SEQ ID NO: 135603 - DNA, 191 bp, Homo sapiens
  chr1:7842587-7842778
  hypo
gctttctcaataaaacgtcaactccctgggtggcagggactttgggccactgttctatccgctgggattccaagcgtccctacccagatctgcacgcaataaatgcttgctgaacgaatgcagtttgacaaaacccagcttcggaggagagcaagccaacctagagtatcgcttggaagatataaggtggt

SEQ ID NO: 135604 - DNA, 124 bp, Homo sapiens; identical to SEQ ID NO: 84
  chr1:7843508-7843632
  hypo

SEQ ID NO: 135605 - DNA, 41 bp, Homo sapiens; identical to SEQ ID NO: 85
  chr1:7843652-7843693
  hypo

SEQ ID NO: 135606 - DNA, 189 bp, Homo sapiens; identical to SEQ ID NO: 35003
  chr1:7844212-7844401
  hypo

SEQ ID NO: 135607 - DNA, 31 bp, Homo sapiens; identical to SEQ ID NO: 59057
  chr1:7926860-7926891
  hypo

SEQ ID NO: 135608 - DNA, 31 bp, Homo sapiens; identical to SEQ ID NO: 14024
  chr1:8005573-8005604
  hypo

SEQ ID NO: 135609 - DNA, 30 bp, Homo sapiens; identical to SEQ ID NO: 14025
  chr1:8035290-8035320
  hypo

SEQ ID NO: 135610 - DNA, 58 bp, Homo sapiens; identical to SEQ ID NO: 59060
  chr1:8044538-8044596
  hypo

SEQ ID NO: 135611 - DNA, 256 bp, Homo sapiens
  chr1:8044976-8045232
  hypo
cgtgtggaaaaagacggcctgattcttacaagccgggggcctgggaccagcttcgagtttgcgcttgcaattgttgaagccctgaatggcaaggaggtggcggctcaagtgaaggctccacttgttcttaaagactagagcagcgaactgcgacgatcacttagagaaacaggccgttaggaatccattctcactgtgttcgctctaaacaaaacagtggtaggttaatgtgttcagaagtcgctgtccttactac

SEQ ID NO: 135612 - DNA, 1246 bp, Homo sapiens; identical to SEQ ID NO: 102482
  chr1:8085554-8086800
  hypo

SEQ ID NO: 135613 - DNA, 35 bp, Homo sapiens
  chr1:8106656-8106691
  hypo
aagttttaggccgggcgtggtggcgcatgcctgta

SEQ ID NO: 135614 - DNA, 31 bp, Homo sapiens; identical to SEQ ID NO: 14029
  chr1:8135328-8135359
  hypo

SEQ ID NO: 135615 - DNA, 30 bp, Homo sapiens
  chr1:8136991-8137021
  hypo
ctgcacgagggaaggcggaggttgcagtga

SEQ ID NO: 135616 - DNA, 28 bp, Homo sapiens
  chr1:8141952-8141980
  hypo
aggcgtgagccaccgtgcccagctacaa

SEQ ID NO: 135617 - DNA, 19 bp, Homo sapiens
  chr1:8147825-8147844
  hypo
tccacgagcatttttatgg

SEQ ID NO: 135618 - DNA, 148 bp, Homo sapiens; identical to SEQ ID NO: 59066
  chr1:8148902-8149050
  hypo

SEQ ID NO: 135619 - DNA, 117 bp, Homo sapiens; identical to SEQ ID NO: 59067
  chr1:8152857-8152974
  hypo

SEQ ID NO: 135620 - DNA, 31 bp, Homo sapiens; identical to SEQ ID NO: 14031
  chr1:8204554-8204585
  hypo

SEQ ID NO: 135621 - DNA, 171 bp, Homo sapiens; identical to SEQ ID NO: 59069
  chr1:8212951-8213122
  hypo

SEQ ID NO: 135622 - DNA, 30 bp, Homo sapiens; identical to SEQ ID NO: 14032
  chr1:8213963-8213993
  hypo

SEQ ID NO: 135623 - DNA, 30 bp, Homo sapiens
  chr1:8298135-8298165
  hypo
gtgatggtgaacagccgcaggcaaagccac

SEQ ID NO: 135624 - DNA, 43 bp, Homo sapiens; identical to SEQ ID NO: 59071
  chr1:8385722-8385765
  hypo

SEQ ID NO: 135625 - DNA, 106 bp, Homo sapiens
  chr1:8385998-8386104
  hypo
ctttagcgccgactcggcggacaaccccagccacgcctacatgatggacgtgtgcagccccgcagaccaggaccgaggcctgaacatccacgccctcctggcaggt

SEQ ID NO: 135626 - DNA, 31 bp, Homo sapiens; identical to SEQ ID NO: 59073
  chr1:8389321-8389352
  hypo

SEQ ID NO: 135627 - DNA, 30 bp, Homo sapiens
  chr1:8390276-8390306
  hypo
ggaggctttggatacgtggtcggcggaatc

SEQ ID NO: 135628 - DNA, 31 bp, Homo sapiens; identical to SEQ ID NO: 59074
  chr1:8390773-8390804
  hypo

SEQ ID NO: 135629 - DNA, 31 bp, Homo sapiens; identical to SEQ ID NO: 14034
  chr1:8394042-8394073
  hypo

SEQ ID NO: 135630 - DNA, 70 bp, Homo sapiens; identical to SEQ ID NO: 59076
  chr1:8395502-8395572
  hypo

SEQ ID NO: 135631 - DNA, 214 bp, Homo sapiens
  chr1:8399489-8399703
  hypo
tggaagctgaatccccggaggctctggccgtgtggcactgctcaccctctctgtggcccgcagctatcctggagaagctggaggagttcctcagcgtccgcaccctctacttcatcgcctatctcgccttcggcctggggaccgggcttgccaccctctccaggaacctctacgtggtcctgtcgctctgcataacctacgggattttattttc

SEQ ID NO: 135632 - DNA, 30 bp, Homo sapiens; identical to SEQ ID NO: 59077
  chr1:8419781-8419811
  hypo

SEQ ID NO: 135633 - DNA, 30 bp, Homo sapiens
  chr1:8425243-8425273
  hypo
ccaacttcaccgagcgcccccaacccgtcc

SEQ ID NO: 135634 - DNA, 207 bp, Homo sapiens; identical to SEQ ID NO: 59078
  chr1:8427364-8427571
  hypo

SEQ ID NO: 135635 - DNA, 301 bp, Homo sapiens
  chr1:8437574-8437875
  hypo
agtgggatttcactgccgttggttctatcgccacctcacctttcttgatgttttctaccagcaaagggggaggagacgaaagaaaaaacgaaagccataaaactgttaaaactaccattctctatctcgtaaacatttttctatttattggcctttcattatatgtgcaatcttattatccctgcacagcatcaaagtgacatccgtcagggtcaccttataaaatatacatcggcaatgtaacgtttaatgacgggagcgggacgaacgatgaaggatgagagagcgaggcctgccgcag

SEQ ID NO: 135636 - DNA, 62 bp, Homo sapiens
  chr1:8442481-8442543
  hypo
gctttggctcagccacgtgcgcatgcgtgcgtgtgcatgagagagcgcgcatgctggggaag

SEQ ID NO: 135637 - DNA, 25 bp, Homo sapiens
  chr1:8474606-8474631
  hypo
ttccgtctctaaataaataaataac

SEQ ID NO: 135638 - DNA, 23 bp, Homo sapiens
  chr1:8476355-8476378
  hypo
tggctcacggtcaggcgcggtgg

SEQ ID NO: 135639 - DNA, 30 bp, Homo sapiens
  chr1:8487912-8487942
  hypo
aagagacttctgttgcggctgtctcctttc

SEQ ID NO: 135640 - DNA, 30 bp, Homo sapiens; identical to SEQ ID NO: 14037
  chr1:8524995-8525025
  hypo

SEQ ID NO: 135641 - DNA, 42 bp, Homo sapiens; identical to SEQ ID NO: 59083
  chr1:8540770-8540812
  hypo

SEQ ID NO: 135642 - DNA, 30 bp, Homo sapiens; identical to SEQ ID NO: 14039
  chr1:8541178-8541208
  hypo

SEQ ID NO: 135643 - DNA, 30 bp, Homo sapiens; identical to SEQ ID NO: 14040
  chr1:8541447-8541477
  hypo

SEQ ID NO: 135644 - DNA, 18 bp, Homo sapiens
  chr1:8549810-8549828
  hypo
ccactttagaaacctgta

SEQ ID NO: 135645 - DNA, 30 bp, Homo sapiens; identical to SEQ ID NO: 59087
  chr1:8550757-8550787
  hypo

SEQ ID NO: 135646 - DNA, 30 bp, Homo sapiens; identical to SEQ ID NO: 59088
  chr1:8613249-8613279
  hypo

SEQ ID NO: 135647 - DNA, 39 bp, Homo sapiens
  chr1:8627112-8627151
  hypo
gctgggatttctggtgtgaggcaccgcacccggccagaa

SEQ ID NO: 135648 - DNA, 121 bp, Homo sapiens
  chr1:8693557-8693678
  hypo
gttactagaaatcacaacaatcccgtgagtgatttttcttcttgagtgattactctttcatggaagaggaaacatccacacagctgtgtaagacatgcttaaagcagaaaaaagcatgcaa

SEQ ID NO: 135649 - DNA, 99 bp, Homo sapiens
  chr1:8694711-8694810
  hypo
gttgttgttttcattcgggtttttgttgtcattgctgttgtttgggcaggtcttacttcttctaattgaagtcaaagaataaagatttacttatttatt

SEQ ID NO: 135650 - DNA, 30 bp, Homo sapiens; identical to SEQ ID NO: 59089
  chr1:8716333-8716363
  hypo

SEQ ID NO: 135651 - DNA, 147 bp, Homo sapiens; identical to SEQ ID NO: 14041
  chr1:8746805-8746952
  hypo

SEQ ID NO: 135652 - DNA, 90 bp, Homo sapiens
  chr1:8748133-8748223
  hypo
aacaacagtccaaaagtgatacgcattcagtggaaaacatactctaggtaaccacacaactattccatttttcactttcagttcagggca

SEQ ID NO: 135653 - DNA, 30 bp, Homo sapiens; identical to SEQ ID NO: 102489
  chr1:8762933-8762963
  hypo

SEQ ID NO: 135654 - DNA, 70 bp, Homo sapiens; identical to SEQ ID NO: 102490
  chr1:8762991-8763061
  hypo

SEQ ID NO: 135655 - DNA, 22 bp, Homo sapiens
  chr1:8765897-8765919
  hypo
ggatgcggtggctcacgcctat

SEQ ID NO: 135656 - DNA, 241 bp, Homo sapiens; identical to SEQ ID NO: 14042
  chr1:8781129-8781370
  hypo

SEQ ID NO: 135657 - DNA, 36 bp, Homo sapiens; identical to SEQ ID NO: 59094
  chr1:8941148-8941184
  hypo

SEQ ID NO: 135658 - DNA, 33 bp, Homo sapiens; identical to SEQ ID NO: 59095
  chr1:8997091-8997124
  hypo

SEQ ID NO: 135659 - DNA, 124 bp, Homo sapiens; identical to SEQ ID NO: 59096
  chr1:9004946-9005070
  hypo

SEQ ID NO: 135660 - DNA, 153 bp, Homo sapiens
  chr1:9027897-9028050
  hypo
cgaagtcttcccattcgattgcctggttaacaagggttctccccagcatctcaacgaacgtcaacaactaaggggtcctacagtattttctgtgtgcagggctactgtgcctcgtctagccaaccttttttttttttttttttttgtgagaca

SEQ ID NO: 135661 - DNA, 31 bp, Homo sapiens; identical to SEQ ID NO: 59098
  chr1:9049402-9049433
  hypo

SEQ ID NO: 135662 - DNA, 31 bp, Homo sapiens; identical to SEQ ID NO: 59099
  chr1:9064759-9064790
  hypo

SEQ ID NO: 135663 - DNA, 30 bp, Homo sapiens; identical to SEQ ID NO: 59100
  chr1:9066000-9066030
  hypo

SEQ ID NO: 135664 - DNA, 31 bp, Homo sapiens; identical to SEQ ID NO: 59101
  chr1:9073881-9073912
  hypo

SEQ ID NO: 135665 - DNA, 151 bp, Homo sapiens; identical to SEQ ID NO: 14046
  chr1:9074711-9074862
  hypo

SEQ ID NO: 135666 - DNA, 31 bp, Homo sapiens; identical to SEQ ID NO: 59103
  chr1:9075351-9075382
  hypo

SEQ ID NO: 135667 - DNA, 30 bp, Homo sapiens
  chr1:9078259-9078289
  hypo
gacctctgcggctgccggttacctgccggg

SEQ ID NO: 135668 - DNA, 82 bp, Homo sapiens; identical to SEQ ID NO: 59104
  chr1:9084937-9085019
  hypo

SEQ ID NO: 135669 - DNA, 31 bp, Homo sapiens; identical to SEQ ID NO: 59105
  chr1:9097916-9097947
  hypo

SEQ ID NO: 135670 - DNA, 30 bp, Homo sapiens; identical to SEQ ID NO: 59106
  chr1:9109241-9109271
  hypo

SEQ ID NO: 135671 - DNA, 224 bp, Homo sapiens; identical to SEQ ID NO: 59107
  chr1:9165434-9165658
  hypo

SEQ ID NO: 135672 - DNA, 20 bp, Homo sapiens
  chr1:9172517-9172537
  hypo
ttttctttttttgagacgga

SEQ ID NO: 135673 - DNA, 279 bp, Homo sapiens; identical to SEQ ID NO: 35016
  chr1:9188943-9189222
  hypo

SEQ ID NO: 135674 - DNA, 53 bp, Homo sapiens; identical to SEQ ID NO: 14051
  chr1:9205247-9205300
  hypo

SEQ ID NO: 135675 - DNA, 30 bp, Homo sapiens
  chr1:9251540-9251570
  hypo
cagctgtggagcccccgtgggttcagaagg

SEQ ID NO: 135676 - DNA, 31 bp, Homo sapiens; identical to SEQ ID NO: 59111
  chr1:9265243-9265274
  hypo

SEQ ID NO: 135677 - DNA, 30 bp, Homo sapiens; identical to SEQ ID NO: 59112
  chr1:9307363-9307393
  hypo

SEQ ID NO: 135678 - DNA, 30 bp, Homo sapiens
  chr1:9323869-9323899
  hypo
ggcagccctctgtccgattactacgcctac

SEQ ID NO: 135679 - DNA, 78 bp, Homo sapiens; identical to SEQ ID NO: 59113
  chr1:9324849-9324927
  hypo

SEQ ID NO: 135680 - DNA, 49 bp, Homo sapiens; identical to SEQ ID NO: 59114
  chr1:9332432-9332481
  hypo

SEQ ID NO: 135681 - DNA, 31 bp, Homo sapiens; identical to SEQ ID NO: 94
  chr1:9352659-9352690
  hypo

SEQ ID NO: 135682 - DNA, 190 bp, Homo sapiens; identical to SEQ ID NO: 35019
  chr1:9352964-9353154
  hypo

SEQ ID NO: 135683 - DNA, 69 bp, Homo sapiens; identical to SEQ ID NO: 102505
  chr1:9353808-9353877
  hypo

SEQ ID NO: 135684 - DNA, 88 bp, Homo sapiens
  chr1:9357985-9358073
  hypo
atccctgaagagctccgtgatccagcccttacagtgggagccgcagtcactcaaatggaaaacttaaatgcaacgggagtaattgcat

SEQ ID NO: 135685 - DNA, 195 bp, Homo sapiens; identical to SEQ ID NO: 59118
  chr1:9361975-9362170
  hypo

SEQ ID NO: 135686 - DNA, 31 bp, Homo sapiens; identical to SEQ ID NO: 59119
  chr1:9365883-9365914
  hypo

SEQ ID NO: 135687 - DNA, 204 bp, Homo sapiens
  chr1:9384383-9384587
  hypo
gtggtgtgccatctgcggctctgctctggtgagttctgctgcgatcctgtggctcagcacgtggtaggtcctcagtgaggctgtgatgagcgtgggggcgtctggtgcctgggtgcacatccctggctgtcctccatggtgtctctctgtgcccagcctctggagggtcggctcggagggctgtgggcccgggactcggtgtgt

SEQ ID NO: 135688 - DNA, 369 bp, Homo sapiens
  chr1:9384862-9385231
  hypo
gccaacactgggccagacagtcgtgtttgcgacaagtctgttcgcctggccgtggagccagcacggtcttgtcggatccagaccagacaaatgctttcttggaaaagcgagtggggtgggggagcagggacacccggcctggcgggctggtggatcggaggcgcctgtgagcgggtcagtactgggtaggcagccccattgggagccacagccactcactggctgctgcctcctgaatgggcagccggtgtggatgcagtggctgcactcgctggaagctgggactccagagctcagcacgtggagttggatgaagcttcctgtgctctcactgtagactgggcttcccccagccggggcgctgggcat

SEQ ID NO: 135689 - DNA, 229 bp, Homo sapiens
  chr1:9396631-9396860
  hypo
aggagtgggggatcctctgcccgcgtgcgttcaaggaagagtctggggcagaggcaggggcaggaggccgctgcctgagttcacccgtggcgctgggctagtgaggacgcaactcctggccggctcgggcaggtccctcactctgagacaataaaagggcatagttgctgtgttcagggagccactgccctttgctgccttttcattcggtgatgaaactgcactgctc

SEQ ID NO: 135690 - DNA, 63 bp, Homo sapiens
  chr1:9399460-9399523
  hypo
caggtaattccggggcgagtctggaggcgacggagaggtgctctgagacggctgcagtggagg

SEQ ID NO: 135691 - DNA, 30 bp, Homo sapiens
  chr1:9400182-9400212
  hypo
accgggtgcagggcacgcagggtgaccagt

SEQ ID NO: 135692 - DNA, 225 bp, Homo sapiens
  chr1:9400676-9400901
  hypo
gctggggagggtccccgcagcacctgggtctgcggtctgagccgcctgtgctgtgatgtggccggccttccctgccaccgaggggcgtgggatgcacccgtcccctgctcgcccctctgcctgcaaaggtaacatgctgctgttttttattttatggaaagtccagcttgcagaggaaatacctttctcaacgcagcctgtctgatgtcgcggagcagctctgcc

SEQ ID NO: 135693 - DNA, 480 bp, Homo sapiens
  chr1:9402327-9402807
  hypo
gagtgacgatccctccgtgagaatgaagaaatgcaacccatgagaagaggtttgcgtagtgacaagtccagaaactgtgtgcatcagcctggggcacccctagctgtgggcagaagctccatggtgcagctcatagtggcagtcaggccccagcgtcaaccgtgggagagcacggaggatcccagtggcttgtcaattcgctgatagcagaaggtagggcctttgccagtttggagctgcctcagggtgttgacctgctcagtgagaaagtaggcgcctaggaatccaaacgtccctctcccgcctcatcctgccttgttcccagtgtagtgatcaccctgacatcggttctcccatgtcctcatcccccgccagcccgcggggtcatcccctccccagaccacagtttgggcccaggggtctggggcacacatccgagatgcaggcacacatcccggactcctccggagaaactccatc

SEQ ID NO: 135694 - DNA, 31 bp, Homo sapiens; identical to SEQ ID NO: 59123
  chr1:9420031-9420062
  hypo

SEQ ID NO: 135695 - DNA, 253 bp, Homo sapiens; identical to SEQ ID NO: 59124
  chr1:9420429-9420682
  hypo

SEQ ID NO: 135696 - DNA, 31 bp, Homo sapiens; identical to SEQ ID NO: 59125
  chr1:9426088-9426119
  hypo

SEQ ID NO: 135697 - DNA, 463 bp, Homo sapiens
  chr1:9427426-9427889
  hypo
taatattgctgctgtggttagcgctgtttgctgaacacccacccaagctgcgctgacctgcagtttctctgtctccccagccgagccgctgccgctcatggatttgtgccgtcgctcggtgcgcctggccctggggagggagcgcctgggggagatccacacgctgccgctgccggcttccctcaaggcctacctcctctaccagtgacgttcgccatcataccgccagcgcgacagccacctggtgccaactcactgagccgcctgccgctggggccgccgcaccctgcaccttggaccggcatccgtagccatggacagaggtccctggtcttccctcatcctccgtggctgcctccatgggacaaggaccgattccaacacaggctcctctttcccccttcccgacatcagcagaaggcagcatccctgcatgccgtccgtatacaacccctctttgaaa

SEQ ID NO: 135698 - DNA, 30 bp, Homo sapiens
  chr1:9428091-9428121
  hypo
cccagggtgcccagcggggccatgccatgg

SEQ ID NO: 135699 - DNA, 31 bp, Homo sapiens; identical to SEQ ID NO: 59127
  chr1:9447365-9447396
  hypo

SEQ ID NO: 135700 - DNA, 28 bp, Homo sapiens
  chr1:9488136-9488164
  hypo
ccggagtctcaccgtcggtcaggctgaa

SEQ ID NO: 135701 - DNA, 166 bp, Homo sapiens; identical to SEQ ID NO: 97
  chr1:9489049-9489215
  hypo

SEQ ID NO: 135702 - DNA, 30 bp, Homo sapiens
  chr1:9531824-9531854
  hypo
ttaaaagcgctccgtcgtaggaccacggga

SEQ ID NO: 135703 - DNA, 93 bp, Homo sapiens; identical to SEQ ID NO: 59130
  chr1:9539438-9539531
  hypo

SEQ ID NO: 135704 - DNA, 38 bp, Homo sapiens; identical to SEQ ID NO: 59131
  chr1:9549416-9549454
  hypo

SEQ ID NO: 135705 - DNA, 33 bp, Homo sapiens
  chr1:9579430-9579463
  hypo
ggacgcagtggctcacgcctgtaataccagcac

SEQ ID NO: 135706 - DNA, 153 bp, Homo sapiens
  chr1:9579702-9579855
  hypo
tctcaaaaaaaaaaaaaaagagggaggttggggagggcacaccttccacaatcctgttagctgttcatgttacacaggcggtgcaataaaaaccagagcaggagagacacagaaacaaatgcgtctccactgggacatcgctggggcattgag

SEQ ID NO: 135707 - DNA, 30 bp, Homo sapiens
  chr1:9592964-9592994
  hypo
actcgcaacaggcagcggcttttccttgtc

SEQ ID NO: 135708 - DNA, 81 bp, Homo sapiens; identical to SEQ ID NO: 59133
  chr1:9654068-9654149
  hypo

SEQ ID NO: 135709 - DNA, 219 bp, Homo sapiens; identical to SEQ ID NO: 14061
  chr1:9655905-9656124
  hypo

SEQ ID NO: 135710 - DNA, 30 bp, Homo sapiens; identical to SEQ ID NO: 14062
  chr1:9656969-9656999
  hypo

SEQ ID NO: 135711 - DNA, 31 bp, Homo sapiens; identical to SEQ ID NO: 14063
  chr1:9658419-9658450
  hypo

SEQ ID NO: 135712 - DNA, 30 bp, Homo sapiens
  chr1:9663494-9663524
  hypo
gagtggcccgaggccgtccctcaccgggca

SEQ ID NO: 135713 - DNA, 220 bp, Homo sapiens; identical to SEQ ID NO: 59137
  chr1:9664190-9664410
  hypo

SEQ ID NO: 135714 - DNA, 112 bp, Homo sapiens; identical to SEQ ID NO: 59138
  chr1:9664793-9664905
  hypo

SEQ ID NO: 135715 - DNA, 128 bp, Homo sapiens
  chr1:9666789-9666917
  hypo
cagaagcatggttgacgttctggcgtggggccatcaggtcctgttgtgtgatttgtaccatctcgagttaaagagacactgtcaccttccgtctttcgggcagccttgcggtcgtggatgggtctctt

SEQ ID NO: 135716 - DNA, 247 bp, Homo sapiens
  chr1:9667249-9667496
  hypo
attgagtgcctggcacggggctgggcatttttgcttcaaggcgaaagggttggcatgaggttggcaaaggcgacagtgtcactttaataccgagactcgtagtggagatagtttgctgtgagccgagggggtaggagggggcatgtggggagggccgggtcttgctggcacctcccagccacccgctcctaatggcgtgaatgtggtcggattgcttttctgctttaactaacgcacgcctcctctg

SEQ ID NO: 135717 - DNA, 133 bp, Homo sapiens; identical to SEQ ID NO: 14067
  chr1:9670773-9670906
  hypo

SEQ ID NO: 135718 - DNA, 30 bp, Homo sapiens
  chr1:9674733-9674763
  hypo
tctggctctgagggcgctccctcctctcag

SEQ ID NO: 135719 - DNA, 30 bp, Homo sapiens; identical to SEQ ID NO: 59141
  chr1:9683325-9683355
  hypo

SEQ ID NO: 135720 - DNA, 1376 bp, Homo sapiens; identical to SEQ ID NO: 35026
  chr1:9711638-9713014
  hypo

SEQ ID NO: 135721 - DNA, 111 bp, Homo sapiens
  chr1:9725447-9725558
  hypo
actacaggcgcacgccgccatgcccggctaattttttgtattttggtagagatggggagcgctcacaagctcttgccgtagctctggtttacattccgcacagggctgtgg

SEQ ID NO: 135722 - DNA, 30 bp, Homo sapiens; identical to SEQ ID NO: 14069
  chr1:9751338-9751368
  hypo

SEQ ID NO: 135723 - DNA, 429 bp, Homo sapiens
  chr1:9775700-9776129
  hypo
ctggaggacgagcaacggcgtctgtgtgacgtgcagcccttcctgcccgtcctgcgcctggtggcccgtgagggcgaccgcgtgaagaagctcatcaactcacagatcagcctcctcatcggcaaaggtagctctgccgagtgggccgtgtggccgggctggccctgcctgccccacccgctgacccagccctccccaccccgcaggcctccacgagtttgactccttgtgcgacccagaagtgaacgactttcgcgccaagatgtgccaattctgcgaggaggcggccgcccgccggcagcagctgggctgggaggcctggctgcagtacagtttccccctgcagctggagccctcggctcaaacctgggggcctggtaccctgcggctcccgaaccgggcccttctggtcaacgttaagtttgaggg

SEQ ID NO: 135724 - DNA, 30 bp, Homo sapiens; identical to SEQ ID NO: 59144
  chr1:9776669-9776699
  hypo

SEQ ID NO: 135725 - DNA, 30 bp, Homo sapiens; identical to SEQ ID NO: 59145
  chr1:9777076-9777106
  hypo

SEQ ID NO: 135726 - DNA, 30 bp, Homo sapiens; identical to SEQ ID NO: 59146
  chr1:9780382-9780412
  hypo

SEQ ID NO: 135727 - DNA, 178 bp, Homo sapiens; identical to SEQ ID NO: 59147
  chr1:9780743-9780921
  hypo

SEQ ID NO: 135728 - DNA, 150 bp, Homo sapiens
  chr1:9781133-9781283
  hypo
acctccaccctgaccccggccgcccccaagcctgacctcggctccccccagatgctctacctgctgtgctcctggccggagctgcccgtcctgagcgccctggagctgctagacttcagcttccccgattgccacgtaggctccttcgcc

SEQ ID NO: 135729 - DNA, 31 bp, Homo sapiens; identical to SEQ ID NO: 14072
  chr1:9785103-9785134
  hypo

SEQ ID NO: 135730 - DNA, 144 bp, Homo sapiens; identical to SEQ ID NO: 59150
  chr1:9787396-9787540
  hypo

SEQ ID NO: 135731 - DNA, 30 bp, Homo sapiens; identical to SEQ ID NO: 59151
  chr1:9790310-9790340
  hypo

SEQ ID NO: 135732 - DNA, 30 bp, Homo sapiens; identical to SEQ ID NO: 59152
  chr1:9795547-9795577
  hypo

SEQ ID NO: 135733 - DNA, 253 bp, Homo sapiens; identical to SEQ ID NO: 59153
  chr1:9795909-9796162
  hypo

SEQ ID NO: 135734 - DNA, 30 bp, Homo sapiens; identical to SEQ ID NO: 59154
  chr1:9804612-9804642
  hypo

SEQ ID NO: 135735 - DNA, 25 bp, Homo sapiens
  chr1:9818657-9818682
  hypo
caccgcacctggccatgacttgctt

SEQ ID NO: 135736 - DNA, 30 bp, Homo sapiens
  chr1:9822608-9822638
  hypo
ggctccgctccactcggccttggtgcccgc

SEQ ID NO: 135737 - DNA, 39 bp, Homo sapiens
  chr1:9841765-9841804
  hypo
gctgggactacaggagtgagtcaccgcgcccagcttatt

SEQ ID NO: 135738 - DNA, 18 bp, Homo sapiens
  chr1:9863566-9863584
  hypo
aaaatgttttacggccgg

SEQ ID NO: 135739 - DNA, 166 bp, Homo sapiens; identical to SEQ ID NO: 59156
  chr1:9867157-9867323
  hypo

SEQ ID NO: 135740 - DNA, 31 bp, Homo sapiens; identical to SEQ ID NO: 14075
  chr1:9892079-9892110
  hypo

SEQ ID NO: 135741 - DNA, 146 bp, Homo sapiens
  chr1:9897055-9897201
  hypo
aggtccaattatgtgcgattagtggatttgttctttgttctgtggcatattaattgcagatctggtattctggcaattaacacaattatggggtccgtttctcttccggcaggtcgtaagccacatgctttcggccagggagttcg

SEQ ID NO: 135742 - DNA, 17 bp, Homo sapiens
  chr1:9900902-9900919
  hypo
gaaagcaaggctgggcg

SEQ ID NO: 135743 - DNA, 348 bp, Homo sapiens
  chr1:9929960-9930308
  hypo
tggggcgggagccgacgccacatagaacaggctgccgcatgatccaggaggcacacctgggcagacacacccaggcaggttgtgcgtggtgagctgctgtcccagggagctgcctgagccactgcctggaaggtttctgctgagttgggtgcacaagccaggtcacacccagcatcggtgcttgggaacaggcccctgtgccaggacagagccctaagacatccaggagaacaagggctggctggtgatctaggtcaggccccgcatgccagcctcaaagcacagcaaacgcagccgtcagcactctgctttcgggggcccgctcgcgtctggacatgccacaggttg

SEQ ID NO: 135744 - DNA, 44 bp, Homo sapiens
  chr1:9938565-9938609
  hypo
acatgctagaaacacacgaaaagcacagtcgcagcttgttcaca

SEQ ID NO: 135745 - DNA, 121 bp, Homo sapiens
  chr1:9981141-9981262
  hypo
ttactctgaggctaccgattctacagtgggttccaaatgaaagaagagaaagtcatagcaggtactcaagtttatgatggatgggtctggcataatgctttgtactctcattaatgttggg

SEQ ID NO: 135746 - DNA, 30 bp, Homo sapiens
  chr1:10059922-10059952
  hypo
tggagtgcagtggcgcgatctcggtgtgag

SEQ ID NO: 135747 - DNA, 31 bp, Homo sapiens; identical to SEQ ID NO: 59160
  chr1:10068866-10068897
  hypo

SEQ ID NO: 135748 - DNA, 24 bp, Homo sapiens
  chr1:10091404-10091428
  hypo
gattacaggcgtgagccactgcgc

SEQ ID NO: 135749 - DNA, 146 bp, Homo sapiens; identical to SEQ ID NO: 59162
  chr1:10091838-10091984
  hypo

SEQ ID NO: 135750 - DNA, 26 bp, Homo sapiens
  chr1:10092223-10092249
  hypo
gcgtgagccaccgcgcccggccaaat

SEQ ID NO: 135751 - DNA, 17 bp, Homo sapiens
  chr1:10095062-10095079
  hypo
gtttgtttttttgagac

SEQ ID NO: 135752 - DNA, 17 bp, Homo sapiens
  chr1:10096098-10096115
  hypo
gccgaggtagtttttta

SEQ ID NO: 135753 - DNA, 87 bp, Homo sapiens; identical to SEQ ID NO: 59166
  chr1:10103746-10103833
  hypo

SEQ ID NO: 135754 - DNA, 30 bp, Homo sapiens; identical to SEQ ID NO: 14079
  chr1:10112529-10112559
  hypo

SEQ ID NO: 135755 - DNA, 44 bp, Homo sapiens
  chr1:10123668-10123712
  hypo
aaggtacatctgggccgggtgaggtggctaatgcctgtaattcc

SEQ ID NO: 135756 - DNA, 83 bp, Homo sapiens; identical to SEQ ID NO: 14080
  chr1:10150448-10150531
  hypo

SEQ ID NO: 135757 - DNA, 390 bp, Homo sapiens
  chr1:10166301-10166691
  hypo
ttcccgtgatgggcccgtctcttgcctcaccttcccgtgcagccagccagttggctgtgccttccactcccctcagtcctcacagtgcagcctctggaactgctgcgggaagccagccttcatccccgcggtatcgcccctacactgtcactcacccatgggcgtcctcaggcgtctccattctgtcgagctccccaagtccccctgccctcgccagtagcccccaagcagtgcccgccagcagttccagacagaggcccagcagcacgggtccacccctaccacccgcctcacccagtgccacgagcagacgcccctcctccctgaggatctctcctaggtatttatcccacaggagagttgcatgtgtgtttgcggtgcagggaaagg

SEQ ID NO: 135758 - DNA, 361 bp, Homo sapiens; identical to SEQ ID NO: 59170
  chr1:10174922-10175283
  hypo

SEQ ID NO: 135759 - DNA, 105 bp, Homo sapiens
  chr1:10189655-10189760
  hypo
catttttgttagacacgttatatcctgcattacagttgttcatttctatgatttttttcccttttttttctaagaatctcactctgtcacccaggctggatggag

SEQ ID NO: 135760 - DNA, 121 bp, Homo sapiens
  chr1:10189999-10190120
  hypo
gcaccgggcctgttttttttcccttgacaagtattgtacaactaaactaacaagaggtatggaaaagttattcgagtcctttggtggtataagaagagttcatttgaacttcatccaatag

SEQ ID NO: 135761 - DNA, 165 bp, Homo sapiens
  chr1:10190419-10190584
  hypo
tgagccaccatgcctggctgaaacataaaagttttaataatatcttgtgaaaatacagaggagctggagagttttcattacatttttaccccaccggcctgttcagcggcttgactggctcttccatcttctgcctaggttgcttctttgcggttgtggttgccg

SEQ ID NO: 135762 - DNA, 37 bp, Homo sapiens
  chr1:10232963-10233000
  hypo
tcaccattgtgttacaactgccgacaggattcagtac

SEQ ID NO: 135763 - DNA, 214 bp, Homo sapiens
  chr1:10238657-10238871
  hypo
cctgacgtacatttacgtctcacattgccattcctcctttgcagagatcctacagtaaggaattgtttgaagaagttatttcaaagatgcggaaggcagggatcaaatccacaatagcaatagaaaaatttaagctgctcgccgagaaagtggaggagatagtggccaagaacgcacgcgcagaaatcgactacagcgacgctcctgatgagtt

SEQ ID NO: 135764 - DNA, 17 bp, Homo sapiens
  chr1:10247333-10247350
  hypo
tatatacatatgttgca

SEQ ID NO: 135765 - DNA, 193 bp, Homo sapiens; identical to SEQ ID NO: 35034
  chr1:10271248-10271441
  hypo

SEQ ID NO: 135766 - DNA, 44 bp, Homo sapiens; identical to SEQ ID NO: 59173
  chr1:10310920-10310964
  hypo

SEQ ID NO: 135767 - DNA, 53 bp, Homo sapiens
  chr1:10355724-10355777
  hypo
caagcagatgctgagcggcgccaggacatagtgctgagcggggctcacattaa

SEQ ID NO: 135768 - DNA, 30 bp, Homo sapiens; identical to SEQ ID NO: 102528
  chr1:10459558-10459588
  hypo

SEQ ID NO: 135769 - DNA, 154 bp, Homo sapiens
  chr1:10459681-10459835
  hypo
ctagagctgacatcgcgctgatcggattggccgtcatgggccagaacttaattctgaacatgaatgaccacggctttgtggtaagcggcgtgggcgcgttgtcttctctctggttcccgggcgctttagccgaggccggcgataggtttgggag

SEQ ID NO: 135770 - DNA, 30 bp, Homo sapiens
  chr1:10462483-10462513
  hypo
aagtaggctgggtgcgttggcctcctgcca

SEQ ID NO: 135771 - DNA, 31 bp, Homo sapiens; identical to SEQ ID NO: 14085
  chr1:10470524-10470555
  hypo

SEQ ID NO: 135772 - DNA, 386 bp, Homo sapiens; identical to SEQ ID NO: 14086
  chr1:10495104-10495490
  hypo

SEQ ID NO: 135773 - DNA, 30 bp, Homo sapiens; identical to SEQ ID NO: 14087
  chr1:10508583-10508613
  hypo

SEQ ID NO: 135774 - DNA, 30 bp, Homo sapiens
  chr1:10521524-10521554
  hypo
cttggcacacttcccgctgctgctatgtgg

SEQ ID NO: 135775 - DNA, 30 bp, Homo sapiens
  chr1:10534149-10534179
  hypo
gtgtaaaataatgacgttttgtagaagcct

SEQ ID NO: 135776 - DNA, 30 bp, Homo sapiens
  chr1:10555708-10555738
  hypo
attgtttgaagtagccgccctctgctctgc

SEQ ID NO: 135777 - DNA, 114 bp, Homo sapiens
  chr1:10556159-10556273
  hypo
tccccttctggcagtcgcgggaggagatgacgtgagggacttagcgggtatgaacacgtctgaattccagtgtgtacgaaggctttcccaggctgagggcgagttggatccagt

SEQ ID NO: 135778 - DNA, 30 bp, Homo sapiens; identical to SEQ ID NO: 35038
  chr1:10566199-10566229
  hypo

SEQ ID NO: 135779 - DNA, 30 bp, Homo sapiens; identical to SEQ ID NO: 59178
  chr1:10569378-10569408
  hypo

SEQ ID NO: 135780 - DNA, 110 bp, Homo sapiens; identical to SEQ ID NO: 59179
  chr1:10591534-10591644
  hypo

SEQ ID NO: 135781 - DNA, 124 bp, Homo sapiens
  chr1:10597300-10597424
  hypo
cacaggcagctgcttcgcggcagccccaaggctgggtccctgcgacagagttggtaaggagcactgcacggctgctcactggctgcattgtgccagcaccccccccccccgccatcattaggag

SEQ ID NO: 135782 - DNA, 30 bp, Homo sapiens; identical to SEQ ID NO: 59180
  chr1:10601818-10601848
  hypo

SEQ ID NO: 135783 - DNA, 25 bp, Homo sapiens
  chr1:10645680-10645705
  hypo
aagtagaatcagaaggccaggcgtg

SEQ ID NO: 135784 - DNA, 24 bp, Homo sapiens
  chr1:10645944-10645968
  hypo
tccgtctcaaaacaaataaaaaaa

SEQ ID NO: 135785 - DNA, 200 bp, Homo sapiens
  chr1:10653907-10654107
  hypo
atatcaaggtgctgccgtcgtaatttcatgccccaatgagaagagcaaggtcgaagcaaatgcttccatcggcatctgctaacacactaactcataaacaaggcccggctggatcaggtggcacggaataatacaggctaatgaaatacagcacagctttccattactgttagtttttacagtgtcgtcattacgtgtaa

SEQ ID NO: 135786 - DNA, 91 bp, Homo sapiens; identical to SEQ ID NO: 59184
  chr1:10659097-10659188
  hypo

SEQ ID NO: 135787 - DNA, 30 bp, Homo sapiens
  chr1:10676119-10676149
  hypo
cacaccggggagtctcgcatggaatccgca

SEQ ID NO: 135788 - DNA, 366 bp, Homo sapiens
  chr1:10676483-10676849
  hypo
tcggccgtgttgtgacgttccttcccagagttcagaacgctgctgattttccctctccccctttctcccagatgagcagcacactgtgggggcgccttccggatagctctccactggtgctgtgatcgccttccccgctggtctgtgtcccacccacgcccctcctgatgacagatccttcggggggaggcagagcacccgccacgtggcctggagatggccgctccagaaaggtgttcgcagtggagacggggctctcccgcgtgccttggaggatcagatgaggttgtggacgtgggagcactttgtgaactgggcatgggaaagagtgaaggtggaaactctccccacgtcaagtagaattgc

SEQ ID NO: 135789 - DNA, 407 bp, Homo sapiens; identical to SEQ ID NO: 14092
  chr1:10680889-10681296
  hypo

SEQ ID NO: 135790 - DNA, 30 bp, Homo sapiens
  chr1:10683562-10683592
  hypo
attactgtggctcccgggaccccagccacc

SEQ ID NO: 135791 - DNA, 30 bp, Homo sapiens; identical to SEQ ID NO: 59187
  chr1:10684324-10684354
  hypo

SEQ ID NO: 135792 - DNA, 86 bp, Homo sapiens
  chr1:10692420-10692506
  hypo
gcgtggaggagaaacggacagaaacctgggcccggaggccttttgcccctgtgggtcctgagcaccgaattcggcttttgaggaca

SEQ ID NO: 135793 - DNA, 195 bp, Homo sapiens
  chr1:10692784-10692979
  hypo
ccatgcttggaggccgggggacagctgccctgacctcaccccggaccagctccctcggtccccggggtctgtcccggctcctccggtaactcgctggttctgccttgggcaggggcatctactttgggaaggacaggggacctcccttggtgtttgcgactcgcaggacaggccaggaggcgggggagttgcctt

SEQ ID NO: 135794 - DNA, 30 bp, Homo sapiens; identical to SEQ ID NO: 59190
  chr1:10694297-10694327
  hypo

SEQ ID NO: 135795 - DNA, 174 bp, Homo sapiens; identical to SEQ ID NO: 59191
  chr1:10699816-10699990
  hypo

SEQ ID NO: 135796 - DNA, 30 bp, Homo sapiens; identical to SEQ ID NO: 59192
  chr1:10701885-10701915
  hypo

SEQ ID NO: 135797 - DNA, 30 bp, Homo sapiens; identical to SEQ ID NO: 14096
  chr1:10703216-10703246
  hypo

SEQ ID NO: 135798 - DNA, 264 bp, Homo sapiens
  chr1:10703772-10704036
  hypo
gcacccacggggcctcgctctgggccgagaacaaacagagcaggcgggactgaaacagcatcatggggcaggtgagggcctgtccgctgccatggcgcccaggccggccaggtgtcttctgtcatcccccagctttgtttggccccaactatcgccaaaaacaccacaagttgagtaaataatagcaactgcagaataccctgacatctgtaaactgagcccagggacagcacaggccgcaagtgttgacgcttattggcatgg

SEQ ID NO: 135799 - DNA, 228 bp, Homo sapiens
  chr1:10706749-10706977
  hypo
tgaggccctggctggcgtggcatgggcgccaccgtggatgtggctgacagactgcagatgggtgctcggccccaccaggaagcgctgctgccacaggcccttagcaagcaggagcgcgtgcctggtgtcagctcctgggggctcacagctgctgggctccccaggatcaactcggggcccatggtgcccacccactcagacctcacttgccggcggagtgggagagct

SEQ ID NO: 135800 - DNA, 424 bp, Homo sapiens; identical to SEQ ID NO: 59196
  chr1:10707635-10708059
  hypo

SEQ ID NO: 135801 - DNA, 310 bp, Homo sapiens
  chr1:10708277-10708587
  hypo
ctagaccccggtgtccgtccctactcgtccccatcactcagctccagaagtcccctgtgaccccaccaggacagaaggactggagggcaaactgcagcgtcccctggttccgaacttggtctcctggcttgggcctaaccatgccttcctacttgtgcccttcctcggtccccagctcctccatatgtgtgacagcaggccctgccccaggaagcctcttccttccagaacctgctcggaggtcttaaaggtaggattctcagtattcacagcaggcttccccgcgggctacggccgagggtgcctacgc

SEQ ID NO: 135802 - DNA, 87 bp, Homo sapiens; identical to SEQ ID NO: 59198
  chr1:10713571-10713658
  hypo

SEQ ID NO: 135803 - DNA, 147 bp, Homo sapiens
  chr1:10713964-10714111
  hypo
gctccgtgtccttggcgcccagcagcgagggcggcagccccagcgcgcccgaggagcggatgtgccggcgctcatgcttgcgcttgtgagaggtcatctggctggtggaggtgaaggtgaagccgcagccggcgcggatgcagtgga

SEQ ID NO: 135804 - DNA, 187 bp, Homo sapiens
  chr1:10714452-10714639
  hypo
gcccccaccaggctcccgcttacctgcagtggaagtgcgtggtcttctgtccgtagaactggcagtcggctgtgccacagtcttcggtggctcggaagcgctggaagccgtcgttaatgagctgggtattcttcttgtggaagttctcgtgggtcatcacgtcagacgtgctcgtgtacaccttgtt

SEQ ID NO: 135805 - DNA, 225 bp, Homo sapiens
  chr1:10715675-10715900
  hypo
ctgcccagtgggcccgggtgcgggaggcacctgcatgcagtgatagtgggtgctcttcccattgaggtggcagccgtggtagtagacgctgcagtcgtccagcgggctgaaacgcatgaagccgtgctgcagggagttgtcgcgcttcttgtgcatgttgtagtggcggatcacgtcctgcttactcgtgaacctctgccaggagacagcgccacgtgggcagga

SEQ ID NO: 135806 - DNA, 150 bp, Homo sapiens; identical to SEQ ID NO: 59201
  chr1:10716606-10716756
  hypo

SEQ ID NO: 135807 - DNA, 30 bp, Homo sapiens; identical to SEQ ID NO: 59202
  chr1:10718206-10718236
  hypo

SEQ ID NO: 135808 - DNA, 31 bp, Homo sapiens; identical to SEQ ID NO: 14103
  chr1:10718958-10718989
  hypo

SEQ ID NO: 135809 - DNA, 1350 bp, Homo sapiens
  chr1:10719284-10720634
  hypo
tccccagccagggtggcgccttctcagccaaccacaggcctgcattcagcacccatggcagcaggtagagaaagcctgtcatgggcagatggggtgtgctgtcatgggcagtcccggtgtgcatgctagcaaaaggcagagcacacttgtgcctgggagtgtgggcgtgtgtgggtggcgtgtgtggggggcgtgtgcgaggtgcacgcgcaggtccaggagcgggggggcgctgcaggagggctcacgcatggttctgtaggtgcaagagtgaatgtgagtgcggcgcgcacctgtgtgtgtggaagcgcatggatgggagcctgagtgtgcacgcgcctggatgcacagtggatgtgtataaggtgtgagcggcaggtgtgtcctcaagcacgggcaaccctggtgaggaaggaggcctcctgtctagtctggctcctggctctgggcattgtggggtggggagcgccttacttgacagtggagacggtccccgtggtgatggagtctgttttggagaaggttgacttcaggtactcgggagtgttgaaggacagggaggcaggaggctctggccctggcccgggggcgctgggggcactgggcacgctggcgaggggtgcgggagccaggctgggggtgggcggaaccttggcggggcctggcttctggatgccccggacgtcgtacttggaagggcgccccaccttgcctgtcttgaaggcgatggccccgcccatgtcggggctgccctccccgggtttgaagaggtgcaggtacttgacattctccaggtcgtacttggatggcttcttgtaggtgctcccgttctggggccgcagattctcgccggtcttcagtttttggatgaagaagtcgtacttggaggcccgggctaccaggttctgcatctggacactgctgtgcgacggcaggggcaggatggtggccttggtctccaggtgggccgtgctgctgggcagccgcaggccgggcagggtgcccaccacctccttgcccacccgctcctcggtcttggtgctgggggccggccaggagagctgctcgccagccttgagcttgcggatgtactcctcatacttagagaaccgcgcccgcttgctgagggtatcctcggaggtgggcagcatggaggaggtggctgcctccggggtggagcccgcgtgcagcttctcaaagctgatcttcctggccagctcgtcccgcgtgttctggtcatcatagccaaacatgccgaggaactcggtcatggtggaggccgcgtagtcccgcagcgaggaggcctctcctgcagaggaggatgggggcgcatcacctctgggagggagt

SEQ ID NO: 135810 - DNA, 30 bp, Homo sapiens; identical to SEQ ID NO: 59206
  chr1:10720978-10721008
  hypo

SEQ ID NO: 135811 - DNA, 47 bp, Homo sapiens; identical to SEQ ID NO: 59207
  chr1:10725221-10725268
  hypo

SEQ ID NO: 135812 - DNA, 108 bp, Homo sapiens; identical to SEQ ID NO: 59208
  chr1:10725477-10725585
  hypo

SEQ ID NO: 135813 - DNA, 184 bp, Homo sapiens; identical to SEQ ID NO: 59209
  chr1:10729046-10729230
  hypo

SEQ ID NO: 135814 - DNA, 251 bp, Homo sapiens
  chr1:10741778-10742029
  hypo
agctcgttagggtggcgctgggccccagggacgtggcctggcttctggactgaccccctcggggctccaggaacctttcctggaggggtggggtggggactccctgggtgggactgagctgaagccccttctcttgggtctctggccctcttgagccccaggctcacctccaaacgcccttcacagggctctacccagagaacaaaagaggccccagttgttcgaacatttctcggcgagaggaacaactg

SEQ ID NO: 135815 - DNA, 366 bp, Homo sapiens
  chr1:10757886-10758252
  hypo
gactgcgtgtgcctgcgaacaagcatgttcgcacctgcgagggagtccgtgtgtttgcgtgtgagcccgctccggggccgatggagggagggtgtcgggaaagctgtgagccagcgaagtggacgggaagcatgggggccgagggagggcagagccaaggcaccacggcatggccacgggcacgggaggtcgtgggccacagacaggtgggtgttggggcagggggtcaacaggatgagaaggaaacaaaggggagaaaggagccacagagtgggtggcggagcgagggccgcgccgagtgtaaggcagacgcagggattgcattatggcaggagaggggctggcacagccgcacgctcggccccg

SEQ ID NO: 135816 - DNA, 30 bp, Homo sapiens; identical to SEQ ID NO: 14108
  chr1:10758980-10759010
  hypo

SEQ ID NO: 135817 - DNA, 30 bp, Homo sapiens
  chr1:10761313-10761343
  hypo
gcccaccgtggcagccgggttcccgtgcgc

SEQ ID NO: 135818 - DNA, 30 bp, Homo sapiens
  chr1:10762108-10762138
  hypo
gggaaatagagactccgagacgtcccctac

SEQ ID NO: 135819 - DNA, 217 bp, Homo sapiens; identical to SEQ ID NO: 59211
  chr1:10765348-10765565
  hypo

SEQ ID NO: 135820 - DNA, 317 bp, Homo sapiens; identical to SEQ ID NO: 59212
  chr1:10765942-10766259
  hypo

SEQ ID NO: 135821 - DNA, 30 bp, Homo sapiens; identical to SEQ ID NO: 59213
  chr1:10770896-10770926
  hypo

SEQ ID NO: 135822 - DNA, 106 bp, Homo sapiens
  chr1:10775032-10775138
  hypo
ctgccgccgctcagccgcgggcctaaccttggtccaggttcccttccttccattagctgactttagggagcacacgggctccacctttcctcggctccagggacta

SEQ ID NO: 135823 - DNA, 30 bp, Homo sapiens
  chr1:10775364-10775394
  hypo
cttggtgactgtctacgatggtagaagcag

SEQ ID NO: 135824 - DNA, 51 bp, Homo sapiens; identical to SEQ ID NO: 59214
  chr1:10775891-10775942
  hypo

SEQ ID NO: 135825 - DNA, 27 bp, Homo sapiens
  chr1:10779263-10779290
  hypo
cgcacccggccccgtgcccctttcttg

SEQ ID NO: 135826 - DNA, 103 bp, Homo sapiens; identical to SEQ ID NO: 59216
  chr1:10779503-10779606
  hypo

SEQ ID NO: 135827 - DNA, 77 bp, Homo sapiens; identical to SEQ ID NO: 59217
  chr1:10780356-10780433
  hypo

SEQ ID NO: 135828 - DNA, 241 bp, Homo sapiens; identical to SEQ ID NO: 59218
  chr1:10782909-10783150
  hypo

SEQ ID NO: 135829 - DNA, 30 bp, Homo sapiens; identical to SEQ ID NO: 59219
  chr1:10799723-10799753
  hypo

SEQ ID NO: 135830 - DNA, 31 bp, Homo sapiens; identical to SEQ ID NO: 59220
  chr1:10807496-10807527
  hypo

SEQ ID NO: 135831 - DNA, 42 bp, Homo sapiens; identical to SEQ ID NO: 59221
  chr1:10810300-10810342
  hypo

SEQ ID NO: 135832 - DNA, 115 bp, Homo sapiens; identical to SEQ ID NO: 59222
  chr1:10815560-10815675
  hypo

SEQ ID NO: 135833 - DNA, 52 bp, Homo sapiens; identical to SEQ ID NO: 59223
  chr1:10819915-10819967
  hypo

SEQ ID NO: 135834 - DNA, 205 bp, Homo sapiens; identical to SEQ ID NO: 59224
  chr1:10823335-10823540
  hypo

SEQ ID NO: 135835 - DNA, 30 bp, Homo sapiens; identical to SEQ ID NO: 59225
  chr1:10826491-10826521
  hypo

SEQ ID NO: 135836 - DNA, 30 bp, Homo sapiens; identical to SEQ ID NO: 14114
  chr1:10833594-10833624
  hypo

SEQ ID NO: 135837 - DNA, 169 bp, Homo sapiens; identical to SEQ ID NO: 14115
  chr1:10838656-10838825
  hypo

SEQ ID NO: 135838 - DNA, 31 bp, Homo sapiens; identical to SEQ ID NO: 59228
  chr1:10839639-10839670
  hypo

SEQ ID NO: 135839 - DNA, 1643 bp, Homo sapiens; identical to SEQ ID NO: 35040
  chr1:10854234-10855877
  hypo

SEQ ID NO: 135840 - DNA, 636 bp, Homo sapiens; identical to SEQ ID NO: 102539
  chr1:10856314-10856950
  hypo

SEQ ID NO: 135841 - DNA, 30 bp, Homo sapiens; identical to SEQ ID NO: 110
  chr1:10890877-10890907
  hypo

SEQ ID NO: 135842 - DNA, 255 bp, Homo sapiens
  chr1:10901207-10901462
  hypo
ggtacatgtgtgccccgggctgtatctgcacacgtgtgtgagtgcagggggtgtgcgtgactgtgcgcagtaggtgtgtgtacagtacagcatgtgtttgcatatcgggagttggggatgtttagtaattaaatcccttttcatccttctgcacctgtctcctgaaagctgagagaacagacgtcaaacgggacaagggctggattgaatacagccaattctgaaatatttattagcttgcgactccgctcaatg

SEQ ID NO: 135843 - DNA, 212 bp, Homo sapiens; identical to SEQ ID NO: 14119
  chr1:10997238-10997450
  hypo

SEQ ID NO: 135844 - DNA, 364 bp, Homo sapiens
  chr1:11018647-11019011
  hypo
atccacgacactctccggaggacaagcaaactcaaaagctgcctcagagcatcctgagcacccaccagtcctagcagaaacttccagagagttgctcctgctacttcaatggggcccgcttacctgtctattgtccctccacaggggcaggggccgggagacctgcagagacaaagaggaagcaatgtctcctgcaagcggtgagcaaaggtgagcaaacatccctgcctgtgcccatcagcaccggcaattaccccagcaggaggccggtgagagagctgtgccgcagggttgtttgctcattaagacaagaaaatcatttatgttctgggactcgagtgtcaacagacgcagggaaatgtca

SEQ ID NO: 135845 - DNA, 281 bp, Homo sapiens
  chr1:11020520-11020801
  hypo
ccgtgccctttaagtcgccaggaggaggctatatttagggcccgtggacattccgcaggagctcgggcagccttcactgggagcaatcgctaatcactgcattgagtttacgggtgcccctgggcacacttaacccagggcaatgaatagttattgcgcggcctcccgctcggggcctgtgggcacacttaagcgagctcgcagatcgctgcgagcagggcacggctcgggtacacccttgggcaccctgcgccatcagcggggagaggcagagtattaaa

SEQ ID NO: 135846 - DNA, 21 bp, Homo sapiens
  chr1:11036679-11036700
  hypo
tagaagcgtgagccaccgcgt

SEQ ID NO: 135847 - DNA, 31 bp, Homo sapiens; identical to SEQ ID NO: 14120
  chr1:11046049-11046080
  hypo

SEQ ID NO: 135848 - DNA, 39 bp, Homo sapiens; identical to SEQ ID NO: 59235
  chr1:11070723-11070762
  hypo

SEQ ID NO: 135849 - DNA, 30 bp, Homo sapiens; identical to SEQ ID NO: 59236
  chr1:11086862-11086892
  hypo

SEQ ID NO: 135850 - DNA, 144 bp, Homo sapiens; identical to SEQ ID NO: 59237
  chr1:11091174-11091318
  hypo

SEQ ID NO: 135851 - DNA, 181 bp, Homo sapiens
  chr1:11092942-11093123
  hypo
gtgacagaacaagactccgtctcaaaaaataaataaatattaaaaagtaatgattatacttgcatatggtggtattacaggtattaagatgttcataattttctgtattttccatcttctaccatgaatattgttgctttcatacttagaaaaatattgtcggccgggcgcggtggctcat

SEQ ID NO: 135852 - DNA, 70 bp, Homo sapiens; identical to SEQ ID NO: 59238
  chr1:11115036-11115106
  hypo

SEQ ID NO: 135853 - DNA, 44 bp, Homo sapiens
  chr1:11118319-11118363
  hypo
aaaaatcagcttagtcggctgggcgtggtggctcacgcctgtaa

SEQ ID NO: 135854 - DNA, 20 bp, Homo sapiens
  chr1:11124906-11124926
  hypo
aactccgtctcaggaaaaaa

SEQ ID NO: 135855 - DNA, 30 bp, Homo sapiens
  chr1:11126746-11126776
  hypo
gtccacaggcgccacgtgtcttccaggact

SEQ ID NO: 135856 - DNA, 31 bp, Homo sapiens; identical to SEQ ID NO: 14122
  chr1:11129009-11129040
  hypo

SEQ ID NO: 135857 - DNA, 377 bp, Homo sapiens
  chr1:11130958-11131335
  hypo
cgacctgctgtcggacggagatggcctgttctgctgcagctttgcacgcctcctttgcctgttcccgggcagctgcaagggagagaacttgtctctggagttggtgaatccagcaaccaccctcccctccatctccatccccctccgacttggcctagccacaggggttgtcacggctgattcctcctccctctcaggtccccggtcccccatctctgcaggacaggctgcctcagagctcaggctcaggtgctctgcccaccttcagctacacgtgagctgatcctccccagccctgcctgctcctcttctgtgaacctaaatgctcagtggcctgtggacctgagggcgtttaacaggatcgtcaccatcaccat

SEQ ID NO: 135858 - DNA, 252 bp, Homo sapiens
  chr1:11131823-11132075
  hypo
cagggcctctgggctcgctgtgctgtggctccagaactcttctctaggtcactgcaggtctcgtcaatgtcgcattcattagactgccttctccaaccaccaacgagacagctacagcacctccagcactccccaccaatctctctgcacagcacctgctgccatctgccaggatagatactgattgcccaccatccctcagcagaagggaagccccacaggggcttcattcatcgccgtatctggcacttg

SEQ ID NO: 135859 - DNA, 30 bp, Homo sapiens
  chr1:11132621-11132651
  hypo
ctttatgacaccccacggacctatggcgtt

SEQ ID NO: 135860 - DNA, 100 bp, Homo sapiens
  chr1:11139754-11139854
  hypo
aaaagcttcttaccttgagcaggggcatctctcgggcctgctggattaaaaggtgcatttcgttgatctgctgccgcacaaggggcggtactgggttgca

SEQ ID NO: 135861 - DNA, 30 bp, Homo sapiens
  chr1:11140137-11140167
  hypo
gtggattctcaattccgcagggggcaacca

SEQ ID NO: 135862 - DNA, 297 bp, Homo sapiens
  chr1:11140984-11141281
  hypo
gaacattcaaaatcaacgggaatcaaaattgtgccctgggctctggaaaatgtttggctcttttcatgaatgtaaggagcaaacctaagaactagaacctggccagacacagagcccaagtgtcgcggtctgtgtgactgcggctgaggtgtaccttgaggcagatgtccctgctccgttgccacaccacctgcagctgcaccggctgcccgttgccgcgctcccacatctccagcctcattttgtcatagatatatagcaggtaatgggtgtcatcccgggcgtagctgagcatct

SEQ ID NO: 135863 - DNA, 39 bp, Homo sapiens
  chr1:11141851-11141890
  hypo
attctgggccaggcgcggtggctcacgcctgtaatccca

SEQ ID NO: 135864 - DNA, 30 bp, Homo sapiens; identical to SEQ ID NO: 14125
  chr1:11166874-11166904
  hypo

SEQ ID NO: 135865 - DNA, 30 bp, Homo sapiens
  chr1:11169759-11169789
  hypo
ctccaagttccacaccgtccaaaatttcta

SEQ ID NO: 135866 - DNA, 34 bp, Homo sapiens
  chr1:11178561-11178595
  hypo
gattacaggcgtgaaccaccgtgcctggtcttgt

SEQ ID NO: 135867 - DNA, 30 bp, Homo sapiens; identical to SEQ ID NO: 59245
  chr1:11182138-11182168
  hypo

SEQ ID NO: 135868 - DNA, 30 bp, Homo sapiens
  chr1:11189257-11189287
  hypo
caaacatcaaacagacgagccaggataacc

SEQ ID NO: 135869 - DNA, 30 bp, Homo sapiens
  chr1:11234772-11234802
  hypo
caaaagcccccttagcgaggaactcttgtt

SEQ ID NO: 135870 - DNA, 91 bp, Homo sapiens; identical to SEQ ID NO: 59246
  chr1:11236359-11236450
  hypo

SEQ ID NO: 135871 - DNA, 30 bp, Homo sapiens; identical to SEQ ID NO: 59247
  chr1:11242947-11242977
  hypo

SEQ ID NO: 135872 - DNA, 77 bp, Homo sapiens; identical to SEQ ID NO: 14126
  chr1:11264688-11264765
  hypo

SEQ ID NO: 135873 - DNA, 30 bp, Homo sapiens
  chr1:11307698-11307728
  hypo
cggaatgcagccaagcggggcaacaaatta

SEQ ID NO: 135874 - DNA, 205 bp, Homo sapiens; identical to SEQ ID NO: 14127
  chr1:11308056-11308261
  hypo

SEQ ID NO: 135875 - DNA, 30 bp, Homo sapiens
  chr1:11313128-11313158
  hypo
ggcttgaggaccccgcggtggccctgcaga

SEQ ID NO: 135876 - DNA, 568 bp, Homo sapiens
  chr1:11313403-11313971
  hypo
tgacatcacattattcgcctgtgtgcatacttccaatgtttacccctgtgaaagctcgtgtttactgtgaaccgtgggcctattaatttggcccctccttccctctcccttgctcccggtacaccagccatacttccctttcttctgtttcatcaatgtctcacactcttccacctcaaagcctcagcctggaacacagtcccccggcctgctgcaaggtagctccttcgtgtcatgtggacccccgtcaaataacaccacctcagggagggccttccttgaccctccactcaccccctccccatcactctctattctattctggtttgactttcttcatagaacttgctgctatctgaaattatcttatttacttatttattatgtttcctgccacaaaatgtcagctccatgaggacatggatctcgccttgcctcgctcacagaatggtacacggggagcctggactcccctctgccgtggcttctcacctctccctccatgctgctgattcggaccagctcgttaaggatcaacaaggctccatggatccgatcatcccgattc

SEQ ID NO: 135877 - DNA, 263 bp, Homo sapiens; identical to SEQ ID NO: 14129
  chr1:11315987-11316250
  hypo

SEQ ID NO: 135878 - DNA, 45 bp, Homo sapiens; identical to SEQ ID NO: 14130
  chr1:11323831-11323876
  hypo

SEQ ID NO: 135879 - DNA, 30 bp, Homo sapiens; identical to SEQ ID NO: 59253
  chr1:11396952-11396982
  hypo

SEQ ID NO: 135880 - DNA, 30 bp, Homo sapiens; identical to SEQ ID NO: 59254
  chr1:11412550-11412580
  hypo

SEQ ID NO: 135881 - DNA, 30 bp, Homo sapiens
  chr1:11421799-11421829
  hypo
aagcctgatcttgtgcgttcagctactgcc

SEQ ID NO: 135882 - DNA, 1290 bp, Homo sapiens; identical to SEQ ID NO: 35051
  chr1:11538705-11539995
  hypo

SEQ ID NO: 135883 - DNA, 139 bp, Homo sapiens; identical to SEQ ID NO: 114
  chr1:11540039-11540178
  hypo

SEQ ID NO: 135884 - DNA, 30 bp, Homo sapiens
  chr1:11594530-11594560
  hypo
ggctcagtcctgcgccggggcttccagacc

SEQ ID NO: 135885 - DNA, 604 bp, Homo sapiens; identical to SEQ ID NO: 59257
  chr1:11596361-11596965
  hypo

SEQ ID NO: 135886 - DNA, 30 bp, Homo sapiens; identical to SEQ ID NO: 14134
  chr1:11721234-11721264
  hypo

SEQ ID NO: 135887 - DNA, 30 bp, Homo sapiens; identical to SEQ ID NO: 59259
  chr1:11732190-11732220
  hypo

SEQ ID NO: 135888 - DNA, 30 bp, Homo sapiens; identical to SEQ ID NO: 35062
  chr1:11761922-11761952
  hypo

SEQ ID NO: 135889 - DNA, 30 bp, Homo sapiens
  chr1:11772415-11772445
  hypo
ctccagtgatggtaacgaaacatcaccagc

SEQ ID NO: 135890 - DNA, 30 bp, Homo sapiens; identical to SEQ ID NO: 59261
  chr1:11776469-11776499
  hypo

SEQ ID NO: 135891 - DNA, 30 bp, Homo sapiens; identical to SEQ ID NO: 59262
  chr1:11808215-11808245
  hypo

SEQ ID NO: 135892 - DNA, 74 bp, Homo sapiens; identical to SEQ ID NO: 59263
  chr1:11809702-11809776
  hypo

SEQ ID NO: 135893 - DNA, 31 bp, Homo sapiens; identical to SEQ ID NO: 14136
  chr1:11810251-11810282
  hypo

SEQ ID NO: 135894 - DNA, 149 bp, Homo sapiens; identical to SEQ ID NO: 59265
  chr1:11825793-11825942
  hypo

SEQ ID NO: 135895 - DNA, 30 bp, Homo sapiens; identical to SEQ ID NO: 59266
  chr1:11840016-11840046
  hypo

SEQ ID NO: 135896 - DNA, 77 bp, Homo sapiens
  chr1:11848613-11848690
  hypo
tctggtgcagcagtgtcgggggagaaaggcagaagggctggggactgcgggggagcgtgagcacaagaggccttctc

SEQ ID NO: 135897 - DNA, 137 bp, Homo sapiens
  chr1:11852474-11852611
  hypo
tgccagacgccctttcgcagacacctaaggtatcaggactactggcagccatgtgggcggaataatgaactgtggcgttggcacgtccataagcaaagggtgaggggagtggggacgtgagtttctcagtctggaca

SEQ ID NO: 135898 - DNA, 245 bp, Homo sapiens
  chr1:11856145-11856390
  hypo
ggagatctgggaagaactcagcgaactcagcactccacccagagcccccagcctgtgcgaggacggtgcggtgagagtggggtggagggagcttatgggctctcctgggcccctcacctggatgggaaagatcccggggacgatggggcaagtgatgcccatgtcggtgcatgccttcacaaagcggaagaatgtgtcagcctcaaagaaaagctgcgtgatgatgaaatcggctcccgcagaca

SEQ ID NO: 135899 - DNA, 284 bp, Homo sapiens; identical to SEQ ID NO: 59270
  chr1:11861093-11861377
  hypo

SEQ ID NO: 135900 - DNA, 30 bp, Homo sapiens
  chr1:11894155-11894185
  hypo
tgtgcgtgtgcgtgcgttgatgtgtctgtg

SEQ ID NO: 135901 - DNA, 30 bp, Homo sapiens; identical to SEQ ID NO: 59271
  chr1:11897616-11897646
  hypo

SEQ ID NO: 135902 - DNA, 30 bp, Homo sapiens; identical to SEQ ID NO: 59272
  chr1:11907309-11907339
  hypo

SEQ ID NO: 135903 - DNA, 30 bp, Homo sapiens
  chr1:11923476-11923506
  hypo
gtgagtcaccgtgcccggcctgttccgaag

SEQ ID NO: 135904 - DNA, 32 bp, Homo sapiens; identical to SEQ ID NO: 59273
  chr1:11936742-11936774
  hypo

SEQ ID NO: 135905 - DNA, 334 bp, Homo sapiens
  chr1:11940051-11940385
  hypo
cctcagcctggacagcgaccagagtagtggctcgaccgcttctggctcctgccaggctgcccgccacagcaccagcaccctgtgcagccagttccagagagctgagagtgagaacgggtccaacgagggcactctgtagaagaaggaggccttcatgaagccttggaaggcccgctggttcatgttggacaagaccagcaccagctgtgctactgcaaccactgtgtggacacagagtgcaagggtgtcatcgactggcggaggtggaggctgtggcaggggcacgccctaagaccatggatgagaaggctttctttgacgtgaagacaacact

SEQ ID NO: 135906 - DNA, 21 bp, Homo sapiens
  chr1:11945505-11945526
  hypo
gtctgagtgtttaacaagcct

SEQ ID NO: 135907 - DNA, 30 bp, Homo sapiens
  chr1:11945749-11945779
  hypo
tgtcggctttggtctcggagaggtgccacg

SEQ ID NO: 135908 - DNA, 138 bp, Homo sapiens
  chr1:11982507-11982645
  hypo
ctttcccttcctcgtcgtctcctctcaaaacacttgtgcgcgctctctggtgtcaagggctgagggcatcaggacacccattcctgcccaggcctcaccccccctcgccaggctagccccttccgagacacagggctg

SEQ ID NO: 135909 - DNA, 30 bp, Homo sapiens
  chr1:11997245-11997275
  hypo
tgcccaaggccccacgtctcccagtggtaa

SEQ ID NO: 135910 - DNA, 343 bp, Homo sapiens
  chr1:12004451-12004794
  hypo
aagaatcctgaattgcgcatgcacgcgtacacacacacacacacacacacacacacacactcactcacatgctctcacgctggctttttccatccatgaaatgtgacactcttcctgtccccagcagccccctgttgccaagagggcctcagagctggtggctctggttctcttcacctggggagagacttcaccgtcctggcaggagctcgggggagcccttccccaagtgtgagcagcatccctcgtttctggatcccaggttcaggtagtgaggcctctccttcccacacctgcctggtgtatccaccccctcctcccccagcaccgcagctaatccctg

SEQ ID NO: 135911 - DNA, 30 bp, Homo sapiens
  chr1:12018607-12018637
  hypo
catcgaacagcccacgccgtttgtgtccct

SEQ ID NO: 135912 - DNA, 158 bp, Homo sapiens
  chr1:12030698-12030856
  hypo
cctaaacattcacctcggtcacctccaggacaaccgcatccagggtggctacgagaacgtgccgactattgacatccacatgaaccagatcggctttgagcgggagtggcacaaattcctgctggagtacattgcgcccatgacggagaagctctacc

SEQ ID NO: 135913 - DNA, 144 bp, Homo sapiens; identical to SEQ ID NO: 14140
  chr1:12041764-12041908
  hypo

SEQ ID NO: 135914 - DNA, 24 bp, Homo sapiens
  chr1:12069286-12069310
  hypo
agcgggagagggagagggccatct

SEQ ID NO: 135915 - DNA, 43 bp, Homo sapiens; identical to SEQ ID NO: 59278
  chr1:12075717-12075760
  hypo

SEQ ID NO: 135916 - DNA, 181 bp, Homo sapiens; identical to SEQ ID NO: 59279
  chr1:12078705-12078886
  hypo

SEQ ID NO: 135917 - DNA, 30 bp, Homo sapiens; identical to SEQ ID NO: 59280
  chr1:12082076-12082106
  hypo

SEQ ID NO: 135918 - DNA, 31 bp, Homo sapiens; identical to SEQ ID NO: 14142
  chr1:12089141-12089172
  hypo

SEQ ID NO: 135919 - DNA, 30 bp, Homo sapiens; identical to SEQ ID NO: 59282
  chr1:12089859-12089889
  hypo

SEQ ID NO: 135920 - DNA, 336 bp, Homo sapiens; identical to SEQ ID NO: 122
  chr1:12123217-12123553
  hypo

SEQ ID NO: 135921 - DNA, 229 bp, Homo sapiens; identical to SEQ ID NO: 102582
  chr1:12123787-12124016
  hypo

SEQ ID NO: 135922 - DNA, 34 bp, Homo sapiens; identical to SEQ ID NO: 59285
  chr1:12183827-12183861
  hypo

SEQ ID NO: 135923 - DNA, 43 bp, Homo sapiens; identical to SEQ ID NO: 59286
  chr1:12188608-12188651
  hypo

SEQ ID NO: 135924 - DNA, 175 bp, Homo sapiens; identical to SEQ ID NO: 59287
  chr1:12194138-12194313
  hypo

SEQ ID NO: 135925 - DNA, 31 bp, Homo sapiens; identical to SEQ ID NO: 59288
  chr1:12202224-12202255
  hypo

SEQ ID NO: 135926 - DNA, 19 bp, Homo sapiens
  chr1:12204581-12204600
  hypo
aatcccagcacactgggag

SEQ ID NO: 135927 - DNA, 18 bp, Homo sapiens
  chr1:12204839-12204857
  hypo
tcaaaaaaaaaaaaaaaa

SEQ ID NO: 135928 - DNA, 76 bp, Homo sapiens; identical to SEQ ID NO: 59291
  chr1:12205427-12205503
  hypo

SEQ ID NO: 135929 - DNA, 31 bp, Homo sapiens; identical to SEQ ID NO: 14146
  chr1:12215980-12216011
  hypo

SEQ ID NO: 135930 - DNA, 143 bp, Homo sapiens
  chr1:12218909-12219052
  hypo
caggcaccgggcaggcgcagcaccgagtagcagcagcagcaggtagaaacaataagcggatctgaactcatcaatatggaaagttctcagaaacacagccgaggggaaaaaagcaaggggcaggacggcgcacctggtgtttc

SEQ ID NO: 135931 - DNA, 29 bp, Homo sapiens
  chr1:12219287-12219316
  hypo
aatatctaattgaaggccgggcgaggtgg

SEQ ID NO: 135932 - DNA, 30 bp, Homo sapiens; identical to SEQ ID NO: 59294
  chr1:12226338-12226368
  hypo

SEQ ID NO: 135933 - DNA, 1059 bp, Homo sapiens; identical to SEQ ID NO: 102583
  chr1:12226889-12227948
  hypo

SEQ ID NO: 135934 - DNA, 171 bp, Homo sapiens
  chr1:12241594-12241765
  hypo
accctgacctcctggcggtgcacagagcatgccacgcacctctccatatgcacatagaccctctaacctaagtcagcgccccttctacaaggccggtgtccagcacacctgggaaaggggacatttctggccctttcctctcagaagtcgcctgctcgagctgccctccct

SEQ ID NO: 135935 - DNA, 759 bp, Homo sapiens; identical to SEQ ID NO: 14150
  chr1:12251313-12252072
  hypo

SEQ ID NO: 135936 - DNA, 30 bp, Homo sapiens
  chr1:12252529-12252559
  hypo
ggacgttctccaacacgacttcatccacgg

SEQ ID NO: 135937 - DNA, 216 bp, Homo sapiens
  chr1:12252960-12253176
  hypo
cagtctgcacgtccacgtcccccacccggagtatggccccaggggcagtacacttaccccagccagtgtccacacgatcccaacacacgcagccaactccagaacccagcactgctccaagcacctccttcctgctcccaatgggccccagccccccagctgaagggagcactggcgacttcgctcttccagttggtaagtcgcaagaagtctcat

SEQ ID NO: 135938 - DNA, 31 bp, Homo sapiens; identical to SEQ ID NO: 59299
  chr1:12259772-12259803
  hypo

SEQ ID NO: 135939 - DNA, 30 bp, Homo sapiens; identical to SEQ ID NO: 59300
  chr1:12260052-12260082
  hypo

SEQ ID NO: 135940 - DNA, 374 bp, Homo sapiens; identical to SEQ ID NO: 59301
  chr1:12260316-12260690
  hypo

SEQ ID NO: 135941 - DNA, 38 bp, Homo sapiens; identical to SEQ ID NO: 59302
  chr1:12267962-12268000
  hypo

SEQ ID NO: 135942 - DNA, 30 bp, Homo sapiens
  chr1:12272831-12272861
  hypo
gatacagtgtgacagcgactcaaaacatgg

SEQ ID NO: 135943 - DNA, 219 bp, Homo sapiens
  chr1:12285721-12285940
  hypo
tgggcatgattgactgaataattggccattggtgattgaactcaatctccaatcctccccgcaggtcggaggcggtcaaagagtgtgtgtttttgcgtgagataggcccaccctctctctaataacatggttgctccctctggaaaccagccccattctgaagctgtctagggactttcagccaccagtcgtctcaggaacctacgaaaagacactctt

SEQ ID NO: 135944 - DNA, 340 bp, Homo sapiens; identical to SEQ ID NO: 59304
  chr1:12304437-12304777
  hypo

SEQ ID NO: 135945 - DNA, 91 bp, Homo sapiens
  chr1:12333007-12333098
  hypo
taaagctgttgggtttcggcagttatggttaatgactgttttatttgtacaggaggagagtaaacgatggaccgtgcggctggatatttct

SEQ ID NO: 135946 - DNA, 28 bp, Homo sapiens
  chr1:12338616-12338644
  hypo
cagccgcgcccaggcaggaatttatttt

SEQ ID NO: 135947 - DNA, 72 bp, Homo sapiens
  chr1:12368221-12368293
  hypo
accgtagaactgtgacgcggtctgtgcttggagtggaggcgggtgggcagggtgtgtcgagcacatggagct

SEQ ID NO: 135948 - DNA, 213 bp, Homo sapiens; identical to SEQ ID NO: 59307
  chr1:12368503-12368716
  hypo

SEQ ID NO: 135949 - DNA, 32 bp, Homo sapiens; identical to SEQ ID NO: 59308
  chr1:12440113-12440145
  hypo

SEQ ID NO: 135950 - DNA, 203 bp, Homo sapiens; identical to SEQ ID NO: 14153
  chr1:12460132-12460335
  hypo

SEQ ID NO: 135951 - DNA, 30 bp, Homo sapiens
  chr1:12464220-12464250
  hypo
aaaaaaaaaaaaaaacgaaacttaaatacg

SEQ ID NO: 135952 - DNA, 30 bp, Homo sapiens
  chr1:12472578-12472608
  hypo
atttatgccatactgcggtagtggaacgga

SEQ ID NO: 135953 - DNA, 47 bp, Homo sapiens; identical to SEQ ID NO: 59310
  chr1:12510815-12510862
  hypo

SEQ ID NO: 135954 - DNA, 30 bp, Homo sapiens
  chr1:12536516-12536546
  hypo
gactggattcatttacgtgtattaatgtaa

SEQ ID NO: 135955 - DNA, 30 bp, Homo sapiens
  chr1:12551958-12551988
  hypo
agcaattaaatataccgcagacctttggcc

SEQ ID NO: 135956 - DNA, 107 bp, Homo sapiens; identical to SEQ ID NO: 59311
  chr1:12565968-12566075
  hypo

SEQ ID NO: 135957 - DNA, 30 bp, Homo sapiens; identical to SEQ ID NO: 59312
  chr1:12566550-12566580
  hypo

SEQ ID NO: 135958 - DNA, 66 bp, Homo sapiens
  chr1:12567167-12567233
  hypo
aggctcctgaggggcggggccagggcctcgatgcctctgccctgcttccccgtcctcagcaggaac

SEQ ID NO: 135959 - DNA, 216 bp, Homo sapiens; identical to SEQ ID NO: 59314
  chr1:12573214-12573430
  hypo

SEQ ID NO: 135960 - DNA, 30 bp, Homo sapiens; identical to SEQ ID NO: 59315
  chr1:12573660-12573690
  hypo

SEQ ID NO: 135961 - DNA, 166 bp, Homo sapiens; identical to SEQ ID NO: 59316
  chr1:12607961-12608127
  hypo

SEQ ID NO: 135962 - DNA, 84 bp, Homo sapiens; identical to SEQ ID NO: 59317
  chr1:12628465-12628549
  hypo

SEQ ID NO: 135963 - DNA, 36 bp, Homo sapiens; identical to SEQ ID NO: 14156
  chr1:12629953-12629989
  hypo

SEQ ID NO: 135964 - DNA, 215 bp, Homo sapiens; identical to SEQ ID NO: 59319
  chr1:12630199-12630414
  hypo

SEQ ID NO: 135965 - DNA, 30 bp, Homo sapiens; identical to SEQ ID NO: 59320
  chr1:12630917-12630947
  hypo

SEQ ID NO: 135966 - DNA, 31 bp, Homo sapiens; identical to SEQ ID NO: 14158
  chr1:12632581-12632612
  hypo

SEQ ID NO: 135967 - DNA, 31 bp, Homo sapiens; identical to SEQ ID NO: 14159
  chr1:12635041-12635072
  hypo

SEQ ID NO: 135968 - DNA, 30 bp, Homo sapiens
  chr1:12638188-12638218
  hypo
cctttagacacatcccgctgcatgcctgta

SEQ ID NO: 135969 - DNA, 344 bp, Homo sapiens; identical to SEQ ID NO: 59323
  chr1:12638788-12639132
  hypo

SEQ ID NO: 135970 - DNA, 30 bp, Homo sapiens; identical to SEQ ID NO: 59324
  chr1:12639391-12639421
  hypo

SEQ ID NO: 135971 - DNA, 36 bp, Homo sapiens; identical to SEQ ID NO: 59325
  chr1:12639821-12639857
  hypo

SEQ ID NO: 135972 - DNA, 174 bp, Homo sapiens; identical to SEQ ID NO: 14160
  chr1:12663578-12663752
  hypo

SEQ ID NO: 135973 - DNA, 30 bp, Homo sapiens
  chr1:12690206-12690236
  hypo
ctaacactgtaatgacggcagcggcaggcc

SEQ ID NO: 135974 - DNA, 192 bp, Homo sapiens; identical to SEQ ID NO: 14161
  chr1:12711250-12711442
  hypo

SEQ ID NO: 135975 - DNA, 30 bp, Homo sapiens; identical to SEQ ID NO: 59328
  chr1:13785629-13785659
  hypo

SEQ ID NO: 135976 - DNA, 226 bp, Homo sapiens; identical to SEQ ID NO: 35083
  chr1:13839542-13839768
  hypo

SEQ ID NO: 135977 - DNA, 432 bp, Homo sapiens; identical to SEQ ID NO: 102589
  chr1:13840257-13840689
  hypo

SEQ ID NO: 135978 - DNA, 20 bp, Homo sapiens
  chr1:13852299-13852319
  hypo
tttgttttttttttttggag

SEQ ID NO: 135979 - DNA, 79 bp, Homo sapiens; identical to SEQ ID NO: 59331
  chr1:13852558-13852637
  hypo

SEQ ID NO: 135980 - DNA, 225 bp, Homo sapiens; identical to SEQ ID NO: 59332
  chr1:13881446-13881671
  hypo

SEQ ID NO: 135981 - DNA, 39 bp, Homo sapiens; identical to SEQ ID NO: 59333
  chr1:13937413-13937452
  hypo

SEQ ID NO: 135982 - DNA, 33 bp, Homo sapiens; identical to SEQ ID NO: 59334
  chr1:13952168-13952201
  hypo

SEQ ID NO: 135983 - DNA, 32 bp, Homo sapiens; identical to SEQ ID NO: 59335
  chr1:13952440-13952472
  hypo

SEQ ID NO: 135984 - DNA, 22 bp, Homo sapiens
  chr1:13975787-13975809
  hypo
ttacaggcgtgagccaccgcgc

SEQ ID NO: 135985 - DNA, 28 bp, Homo sapiens
  chr1:13983870-13983898
  hypo
ctctccctctccctctccccacggtctc

SEQ ID NO: 135986 - DNA, 116 bp, Homo sapiens
  chr1:14021889-14022005
  hypo
aaagtgcctatgacgcggtaagatgtatctttagcccccagagttgctatgtctggacttcatgcgtgaagagcgcaagtttcagatcttttagtggctggcgtgcttgcttggat

SEQ ID NO: 135987 - DNA, 121 bp, Homo sapiens
  chr1:14025408-14025529
  hypo
attacaggctgagccaccgcgcccggcctagcctcattcttttacaataagataacatgatatatgttgatacaacacgttttctttcttttttgagatggagtctgtctctgtcgcccag

SEQ ID NO: 135988 - DNA, 21 bp, Homo sapiens
  chr1:14025768-14025789
  hypo
ccactgcgcccggccaacacg

SEQ ID NO: 135989 - DNA, 715 bp, Homo sapiens; identical to SEQ ID NO: 136
  chr1:14026481-14027196
  hypo

SEQ ID NO: 135990 - DNA, 31 bp, Homo sapiens; identical to SEQ ID NO: 14165
  chr1:14057683-14057714
  hypo

SEQ ID NO: 135991 - DNA, 30 bp, Homo sapiens; identical to SEQ ID NO: 59339
  chr1:14078729-14078759
  hypo

SEQ ID NO: 135992 - DNA, 19 bp, Homo sapiens
  chr1:14084632-14084651
  hypo
gattgttaagacttagtaa

SEQ ID NO: 135993 - DNA, 224 bp, Homo sapiens
  chr1:14087919-14088143
  hypo
acgataccagttttccgggaagaaatgtcccgatgatctgtgcagcatcttgactgggctttctgaggagttggagttctttttcagcagtcgcacaggtacattccttctgttgatacacaatgcttgtacaaactcacagcttaactttgtaataacacaggagtccctgacccccagtgttgtctaccaaatgttgtgtttacgtccgtttgtgactgggg

SEQ ID NO: 135994 - DNA, 30 bp, Homo sapiens
  chr1:14088509-14088539
  hypo
tgaaggaacatatgccgacaatttagattt

SEQ ID NO: 135995 - DNA, 131 bp, Homo sapiens
  chr1:14105491-14105622
  hypo
cacagattaaccggcggcgacatgagcggcgccatgaagcagggttaaagcggaaacccagccaaacactacagccgtcagaggatctggctgatggcaaagcatctggagaaaacgttgcttcaaaagat

SEQ ID NO: 135996 - DNA, 30 bp, Homo sapiens; identical to SEQ ID NO: 59341
  chr1:14113188-14113218
  hypo

SEQ ID NO: 135997 - DNA, 30 bp, Homo sapiens; identical to SEQ ID NO: 59342
  chr1:14114200-14114230
  hypo

SEQ ID NO: 135998 - DNA, 150 bp, Homo sapiens; identical to SEQ ID NO: 59343
  chr1:14114661-14114811
  hypo

SEQ ID NO: 135999 - DNA, 195 bp, Homo sapiens; identical to SEQ ID NO: 14167
  chr1:14121944-14122139
  hypo

SEQ ID NO: 136000 - DNA, 30 bp, Homo sapiens
  chr1:14124560-14124590
  hypo
acatttctgagtgtcgtaggtaagagggaa

SEQ ID NO: 136001 - DNA, 202 bp, Homo sapiens
  chr1:14125476-14125678
  hypo
gagatttctccttcaccgtggtgagtcagagctgctgggtaatgtgacttagtcagctggatcaaagggtaacaaacacaagcactccaggcaaacacagaggtctccgccacttacttcgtcactaagtccggcatgttcaccattgcctaaggaagaacagagaattaagaattgtgaggccgggcgcggtggctcacgc

SEQ ID NO: 136002 - DNA, 31 bp, Homo sapiens
  chr1:14128557-14128588
  hypo
aggactttggggatcacgagcagaaaggtag

SEQ ID NO: 136003 - DNA, 30 bp, Homo sapiens; identical to SEQ ID NO: 59346
  chr1:14138851-14138881
  hypo

SEQ ID NO: 136004 - DNA, 100 bp, Homo sapiens
  chr1:14139500-14139600
  hypo
cccccaggtctccagcggccatactgcatcctcctggggtgatgacttctccatatgagtccaccaaccgcaactgctgcagtcacgacactgtgctgat

SEQ ID NO: 136005 - DNA, 26 bp, Homo sapiens
  chr1:14144189-14144215
  hypo
ccccattaaaaaatcccgagttcagc

SEQ ID NO: 136006 - DNA, 118 bp, Homo sapiens
  chr1:14149749-14149867
  hypo
aagggagtgcatgtgcgcgcgtgcatgtgtgcgtgcgtgtgtgttcacgtgttctcgtgcgggcgcgtgagtggtcttcaaacgagggtcccgatccccggggcggcaggaagggggc

SEQ ID NO: 136007 - DNA, 30 bp, Homo sapiens
  chr1:14556455-14556485
  hypo
cttcctccagacccacgttctccgagagaa

SEQ ID NO: 136008 - DNA, 121 bp, Homo sapiens; identical to SEQ ID NO: 14170
  chr1:14746303-14746424
  hypo

SEQ ID NO: 136009 - DNA, 1868 bp, Homo sapiens; identical to SEQ ID NO: 35093
  chr1:14924520-14926388
  hypo

SEQ ID NO: 136010 - DNA, 300 bp, Homo sapiens
  chr1:15042012-15042312
  hypo
cctccaaaacctcagcgctccgaaaacaggctgcgtgtgtagcttgatgttcgggggctggcagatgagccagtaatggatgtttcctatcctgagagcacatttttctccgaggaccatatcacctcttagggcctaatacaggttgatatttttcctttaccctgaaagtctctgcagcaaatgtgcagtcagaaccatttttctgattgaactaaaagtatcgcagcttcattttcttttccctttgggttaagtcggtatttaaaaggcctctccgaagagtgaaactatctctaa

SEQ ID NO: 136011 - DNA, 26 bp, Homo sapiens
  chr1:15061570-15061596
  hypo
tttgagacggagtctcgctctttcgc

SEQ ID NO: 136012 - DNA, 26 bp, Homo sapiens
  chr1:15061835-15061861
  hypo
gtgagccaccgcgcccggcccgtgct

SEQ ID NO: 136013 - DNA, 32 bp, Homo sapiens; identical to SEQ ID NO: 59352
  chr1:15095850-15095882
  hypo

SEQ ID NO: 136014 - DNA, 155 bp, Homo sapiens
  chr1:15102331-15102486
  hypo
cctaaagggagggtccgggccaccgggtccagtctttacacttgaaggcgtcacaggccctttcctacagcggtcgacacccaggtctcttccacatggaaccaccatagtgagtgtggtcctgcgtgatcactgcgaccctctcctggacttcc

SEQ ID NO: 136015 - DNA, 30 bp, Homo sapiens
  chr1:15103092-15103122
  hypo
ctgctaaggacatcacggatatctcattta

SEQ ID NO: 136016 - DNA, 91 bp, Homo sapiens; identical to SEQ ID NO: 14172
  chr1:15107454-15107545
  hypo

SEQ ID NO: 136017 - DNA, 109 bp, Homo sapiens; identical to SEQ ID NO: 59354
  chr1:15110197-15110306
  hypo

SEQ ID NO: 136018 - DNA, 36 bp, Homo sapiens
  chr1:15127829-15127865
  hypo
actggcgctcactgtcggtttcgtgacgaggggtgg

SEQ ID NO: 136019 - DNA, 105 bp, Homo sapiens
  chr1:15128487-15128592
  hypo
aaactttttctctgcgctgaagagagctgtcctctgagcccttcctctgtcatgccctgctttttagaatgatctcgtccagaaagctttcgtcgactctctcca

SEQ ID NO: 136020 - DNA, 211 bp, Homo sapiens; identical to SEQ ID NO: 59356
  chr1:15129597-15129808
  hypo

SEQ ID NO: 136021 - DNA, 117 bp, Homo sapiens
  chr1:15149164-15149281
  hypo
cacagcgggtcctgacgtaggatgccccagtggccttctctggaggctccgtcgtgttccggcatctggtctatcccgtctttccttcccactcacctccatcgctggctctgtggc

SEQ ID NO: 136022 - DNA, 161 bp, Homo sapiens
  chr1:15149509-15149670
  hypo
aatggaggttctcttcgaaagcaggaaggggtgcctgggagtgtttgctggggagacaactcggcttccccctgcaaccagccccgttctcctccctctgtagagcagccttctgggcatgtggcaccacacctgggaaggcccgtcgcctcggccacaca

SEQ ID NO: 136023 - DNA, 188 bp, Homo sapiens; identical to SEQ ID NO: 14175
  chr1:15151514-15151702
  hypo

SEQ ID NO: 136024 - DNA, 209 bp, Homo sapiens; identical to SEQ ID NO: 59358
  chr1:15178285-15178494
  hypo

SEQ ID NO: 136025 - DNA, 338 bp, Homo sapiens; identical to SEQ ID NO: 14176
  chr1:15194447-15194785
  hypo

SEQ ID NO: 136026 - DNA, 245 bp, Homo sapiens
  chr1:15262963-15263208
  hypo
tggtctcaggcaaaccgggctggttgatcactgggtgccctgctccactgtgccagccatactcggctacttttgccatatagaaagggatccctccaccctcccagcagttaaggcctcacctacctgctccgcccccttttagattccctgatcactttgatccttcctcatcccataagtacttaccaggcccccactgggcgcctggaactgacagctgagcaggacgaaccctactttca

SEQ ID NO: 136027 - DNA, 262 bp, Homo sapiens; identical to SEQ ID NO: 14177
  chr1:15283869-15284131
  hypo

SEQ ID NO: 136028 - DNA, 27 bp, Homo sapiens
  chr1:15299297-15299324
  hypo
gctgtgcctggccgtgagctctttttg

SEQ ID NO: 136029 - DNA, 31 bp, Homo sapiens; identical to SEQ ID NO: 14178
  chr1:15304580-15304611
  hypo

SEQ ID NO: 136030 - DNA, 27 bp, Homo sapiens
  chr1:15343506-15343533
  hypo
tgtctggttgggcgccgtggcttatgc

SEQ ID NO: 136031 - DNA, 36 bp, Homo sapiens
  chr1:15344011-15344047
  hypo
cattctggccaggcgcggtggctcacgcctgtaatc

SEQ ID NO: 136032 - DNA, 30 bp, Homo sapiens; identical to SEQ ID NO: 59362
  chr1:15349086-15349116
  hypo

SEQ ID NO: 136033 - DNA, 138 bp, Homo sapiens
  chr1:15356674-15356812
  hypo
tttcccattcatcagcgacagcggggccccggctcttccttaaggagccttctgaccgggatgcatctttatttttattttgatttttatgtattactttattttttgagacagagtctcactctgtctcccaggtgg

SEQ ID NO: 136034 - DNA, 18 bp, Homo sapiens
  chr1:15357051-15357069
  hypo
tggtcatacatctttaga

SEQ ID NO: 136035 - DNA, 31 bp, Homo sapiens; identical to SEQ ID NO: 59364
  chr1:15372344-15372375
  hypo

SEQ ID NO: 136036 - DNA, 404 bp, Homo sapiens; identical to SEQ ID NO: 59365
  chr1:15374954-15375358
  hypo

SEQ ID NO: 136037 - DNA, 30 bp, Homo sapiens; identical to SEQ ID NO: 14181
  chr1:15375572-15375602
  hypo

SEQ ID NO: 136038 - DNA, 31 bp, Homo sapiens; identical to SEQ ID NO: 59367
  chr1:15395208-15395239
  hypo

SEQ ID NO: 136039 - DNA, 153 bp, Homo sapiens
  chr1:15397054-15397207
  hypo
cgcacctgtgacaaacggtatcgtgcccgtcactcaacctgggctcctggggaatccaggcagagtgagcctgaaccgtgggggacatcagtcgtttgacaaaatgatttttaaaatacctctgggccaaaagttagccaagtgtggtggcac

SEQ ID NO: 136040 - DNA, 31 bp, Homo sapiens; identical to SEQ ID NO: 14182
  chr1:15403423-15403454
  hypo

SEQ ID NO: 136041 - DNA, 31 bp, Homo sapiens; identical to SEQ ID NO: 14183
  chr1:15421285-15421316
  hypo

SEQ ID NO: 136042 - DNA, 30 bp, Homo sapiens
  chr1:15424633-15424663
  hypo
cagcttcccgttttccgtgctgcgccgtga

SEQ ID NO: 136043 - DNA, 30 bp, Homo sapiens
  chr1:15429866-15429896
  hypo
cgccgggcccgctgcgagacgcagaacatt

SEQ ID NO: 136044 - DNA, 31 bp, Homo sapiens; identical to SEQ ID NO: 59370
  chr1:15488500-15488531
  hypo

SEQ ID NO: 136045 - DNA, 31 bp, Homo sapiens; identical to SEQ ID NO: 59371
  chr1:15493529-15493560
  hypo

SEQ ID NO: 136046 - DNA, 43 bp, Homo sapiens; identical to SEQ ID NO: 59372
  chr1:15524064-15524107
  hypo

SEQ ID NO: 136047 - DNA, 495 bp, Homo sapiens
  chr1:15541160-15541655
  hypo
cttttccttttcagggagtagcgggctgggcagaccggcctcccttctcgcagcctcgcacaaggagcctgagcacgtaagacatctggaatgcatcaaaggcgaggcccagccagagccggcgtgctcggtgctgctgcctaactccttcaagagcagagccgccacattcacaaagcgtctggaatcggaactgatcgtcctctctgctctttctgctttccttccaggcccttccaccgcagccatccgcacgggaggcctcgcgattgctcggaaccatcccgcaggagttcagctgatattttctagtgtggggcgagagattttgtggagcgcatttaaggggtttttgttgtgactgctgccttgtatacatttattttctttcttggaactgggcctcgccctcctcccactgacatgatggcccagtccaaggccaatggctcgcactatgcgctgaccgccatcggcctggggatgctggtcctt

SEQ ID NO: 136048 - DNA, 30 bp, Homo sapiens
  chr1:15546357-15546387
  hypo
tggatggcggcgggcggggggggattctct

SEQ ID NO: 136049 - DNA, 237 bp, Homo sapiens; identical to SEQ ID NO: 59374
  chr1:15556610-15556847
  hypo

SEQ ID NO: 136050 - DNA, 30 bp, Homo sapiens
  chr1:15676650-15676680
  hypo
cattcatccacccaccgtgggccaggcccg

SEQ ID NO: 136051 - DNA, 31 bp, Homo sapiens; identical to SEQ ID NO: 59375
  chr1:15721403-15721434
  hypo

SEQ ID NO: 136052 - DNA, 36 bp, Homo sapiens; identical to SEQ ID NO: 59376
  chr1:15751732-15751768
  hypo

SEQ ID NO: 136053 - DNA, 119 bp, Homo sapiens
  chr1:15755171-15755290
  hypo
gaagcagcggaaagcggccttcaaggagctgcagtccacctttaagtagcgggggctgcagccgaccgccctgctccggccccagtgtggtgggcgagggtggcgcatgggaggccgag

SEQ ID NO: 136054 - DNA, 31 bp, Homo sapiens; identical to SEQ ID NO: 59378
  chr1:15771334-15771365
  hypo

SEQ ID NO: 136055 - DNA, 30 bp, Homo sapiens
  chr1:15790053-15790083
  hypo
aagggaggtgattcacgtcacccctgtctg

SEQ ID NO: 136056 - DNA, 30 bp, Homo sapiens
  chr1:15833431-15833461
  hypo
gcagcgaggagaagcgacgccgcaacttct

SEQ ID NO: 136057 - DNA, 301 bp, Homo sapiens
  chr1:15836138-15836439
  hypo
aaaaaagaaagaaaacgtgctgcgtgaaaaaagccagacaccagagagtatagaaatagtgtggtctcattgagaagaaattccagagcagaaagaggtgagagaagctcaggagagcggatgctcactgtctgcgagtccacaggggcccagcacacagcaggtcctcaggaaatacttgcagaatgaataaatgaataaagatgattattttccatcaacatcaaaagagttttcatttccgttagcaagaagttgactggccaccagcctaaaaggttatgagatgttttttcttttt

SEQ ID NO: 136058 - DNA, 26 bp, Homo sapiens
  chr1:15839672-15839698
  hypo
cgaacggctcattctctttcttgtct

SEQ ID NO: 136059 - DNA, 243 bp, Homo sapiens; identical to SEQ ID NO: 59381
  chr1:15844704-15844947
  hypo

SEQ ID NO: 136060 - DNA, 93 bp, Homo sapiens
  chr1:15885333-15885426
  hypo
ttttaattgcccagttcgctacaaatcctgaatggaaataattttgcctaaaattcaaaatgattgacttttcgttttgggtttttgttttgt

SEQ ID NO: 136061 - DNA, 156 bp, Homo sapiens; identical to SEQ ID NO: 14185
  chr1:15892451-15892607
  hypo

SEQ ID NO: 136062 - DNA, 89 bp, Homo sapiens; identical to SEQ ID NO: 59384
  chr1:15904688-15904777
  hypo

SEQ ID NO: 136063 - DNA, 152 bp, Homo sapiens; identical to SEQ ID NO: 35101
  chr1:15905372-15905524
  hypo

SEQ ID NO: 136064 - DNA, 214 bp, Homo sapiens
  chr1:15919083-15919297
  hypo
cagaaatgatcctgccgcaactccagcctccccaggctgcctggctgggggctttctgtgacactcattcgccttgctacaacctcaacactcatcttcaccttctttgtcccctagccctaaataaaaatatattgtttagcatgttcagaatgctttcatctgttaaaggaaaaaatttcctggccgggcgcggtggctcacgcctgtaatc

SEQ ID NO: 136065 - DNA, 314 bp, Homo sapiens; identical to SEQ ID NO: 102609
  chr1:15928913-15929227
  hypo

SEQ ID NO: 136066 - DNA, 105 bp, Homo sapiens; identical to SEQ ID NO: 14186
  chr1:15930725-15930830
  hypo

SEQ ID NO: 136067 - DNA, 30 bp, Homo sapiens; identical to SEQ ID NO: 59387
  chr1:15931040-15931070
  hypo

SEQ ID NO: 136068 - DNA, 30 bp, Homo sapiens
  chr1:16007614-16007644
  hypo
gccctgtgtttgacacgcagaacggattcc

SEQ ID NO: 136069 - DNA, 30 bp, Homo sapiens; identical to SEQ ID NO: 14187
  chr1:16042821-16042851
  hypo

SEQ ID NO: 136070 - DNA, 30 bp, Homo sapiens
  chr1:16044400-16044430
  hypo
gtacctggccctcaacgagaactccttgga

SEQ ID NO: 136071 - DNA, 111 bp, Homo sapiens
  chr1:16049773-16049884
  hypo
ggcaggagcctgctttgggaccgagagacgcggttttctgtatcttagaacttaggctctgagatccccggaaatctggaaaaagtccccgatgttgctggtcttttctgg

SEQ ID NO: 136072 - DNA, 157 bp, Homo sapiens; identical to SEQ ID NO: 59389
  chr1:16053710-16053867
  hypo

SEQ ID NO: 136073 - DNA, 30 bp, Homo sapiens; identical to SEQ ID NO: 59390
  chr1:16054831-16054861
  hypo

SEQ ID NO: 136074 - DNA, 30 bp, Homo sapiens; identical to SEQ ID NO: 14189
  chr1:16057148-16057178
  hypo

SEQ ID NO: 136075 - DNA, 97 bp, Homo sapiens
  chr1:16058407-16058504
  hypo
gagagccaacaccacggatcggccccacgccttccaggtcattctctccgaccggccctgcctggagctaagtgccgagagcgaggccgagatggcc

SEQ ID NO: 136076 - DNA, 208 bp, Homo sapiens
  chr1:16058892-16059100
  hypo
gtcctcacggatgaccgcctctttacgtgccatgaggattgccagaccagcttcttccgctctttgggcacagccaagctgggcgacatcagcgccgtctccaccgagccgggcaaggagtactgcgtcttggtgagctttgagtgggggcggggctgcaaggcctgcagaaggaaagctctggctgctcacccgggggcctggctct

SEQ ID NO: 136077 - DNA, 105 bp, Homo sapiens
  chr1:16059341-16059446
  hypo
agccatgtaccagggcgctcctgcctcagccccgggggtgagtgcctgctgctcttaaaacaaacccagaagagtcctcactgtccttgccgtctcttgctgcgc

SEQ ID NO: 136078 - DNA, 30 bp, Homo sapiens; identical to SEQ ID NO: 59393
  chr1:16060465-16060495
  hypo

SEQ ID NO: 136079 - DNA, 30 bp, Homo sapiens; identical to SEQ ID NO: 59394
  chr1:16073400-16073430
  hypo

SEQ ID NO: 136080 - DNA, 31 bp, Homo sapiens; identical to SEQ ID NO: 14190
  chr1:16077928-16077959
  hypo

SEQ ID NO: 136081 - DNA, 125 bp, Homo sapiens; identical to SEQ ID NO: 59396
  chr1:16092325-16092450
  hypo

SEQ ID NO: 136082 - DNA, 31 bp, Homo sapiens; identical to SEQ ID NO: 59397
  chr1:16098311-16098342
  hypo

SEQ ID NO: 136083 - DNA, 121 bp, Homo sapiens; identical to SEQ ID NO: 59398
  chr1:16101035-16101156
  hypo

SEQ ID NO: 136084 - DNA, 31 bp, Homo sapiens; identical to SEQ ID NO: 59399
  chr1:16109724-16109755
  hypo

SEQ ID NO: 136085 - DNA, 31 bp, Homo sapiens; identical to SEQ ID NO: 59400
  chr1:16124725-16124756
  hypo

SEQ ID NO: 136086 - DNA, 35 bp, Homo sapiens; identical to SEQ ID NO: 59401
  chr1:16138130-16138165
  hypo

SEQ ID NO: 136087 - DNA, 27 bp, Homo sapiens
  chr1:16158191-16158218
  hypo
acaggcgttgagccactgcacccagcc

SEQ ID NO: 136088 - DNA, 27 bp, Homo sapiens
  chr1:16164912-16164939
  hypo
aatcagaagtcttggccggttttggtg

SEQ ID NO: 136089 - DNA, 86 bp, Homo sapiens; identical to SEQ ID NO: 59404
  chr1:16165178-16165264
  hypo

SEQ ID NO: 136090 - DNA, 30 bp, Homo sapiens; identical to SEQ ID NO: 59405
  chr1:16199477-16199507
  hypo

SEQ ID NO: 136091 - DNA, 41 bp, Homo sapiens
  chr1:16250431-16250472
  hypo
ggattacaggcgtgagccaccgcacccggcctacctggtgt

SEQ ID NO: 136092 - DNA, 426 bp, Homo sapiens
  chr1:16254607-16255033
  hypo
gactataaccaagatcgtacatattatgagagtgttcgaactccaggcacttatcctgaggattccaggcgggactatccagctcgagggagagagttttattcagaatgggaaacttaccaaggagactactatgaatcacgatactacgatgatcctcgggaatacagggattacaggaatgatccttatgaacaagatattagggaatatagttacaggcaaagggaacgagaaagagaacgtgaaagatttgagtctgaccgggacagagaccatgagaggaggccgattgaacgaagtcaaagtcctgttcacttgcgacgtccacagagtcctggagcgtctccctctcaggcagagaggttgccgagtgattctgagaggaggctttacagccgatcctcagaccggagtggaagctgt

SEQ ID NO: 136093 - DNA, 30 bp, Homo sapiens; identical to SEQ ID NO: 14195
  chr1:16258265-16258295
  hypo

SEQ ID NO: 136094 - DNA, 30 bp, Homo sapiens
  chr1:16258565-16258595
  hypo
ttcccaccacccctcggaggggaaggcctc

SEQ ID NO: 136095 - DNA, 224 bp, Homo sapiens
  chr1:16259176-16259400
  hypo
ccagagaaagaagacgtgtctgcctctgggccgtccccagaagccacccagttagccaagcagatggagctggagcaggccgtggaacacatcgcaaagctcgctgaggcctctgcctctgctgcctataaggcagatgcaccagagggccttgccccagaggacagggacaagcctgcacaccaagcaagtgaaacagagctggctgcggccatcggctccat

SEQ ID NO: 136096 - DNA, 30 bp, Homo sapiens; identical to SEQ ID NO: 14196
  chr1:16260996-16261026
  hypo

SEQ ID NO: 136097 - DNA, 43 bp, Homo sapiens; identical to SEQ ID NO: 59409
  chr1:16264531-16264574
  hypo

SEQ ID NO: 136098 - DNA, 132 bp, Homo sapiens; identical to SEQ ID NO: 59410
  chr1:16270112-16270244
  hypo

SEQ ID NO: 136099 - DNA, 30 bp, Homo sapiens; identical to SEQ ID NO: 14197
  chr1:16271161-16271191
  hypo

SEQ ID NO: 136100 - DNA, 30 bp, Homo sapiens; identical to SEQ ID NO: 14198
  chr1:16271747-16271777
  hypo

SEQ ID NO: 136101 - DNA, 207 bp, Homo sapiens
  chr1:16272641-16272848
  hypo
gactcaccgctggccgcactctgggcctgaccgccgcgctcctccttgaggtccctgctggggcctatgggtgtgctgcgtcctgcctgctccagcctgctcagcgtgctggtggccaccttctcctctttggctctcttgtcccctcctggagatggaacagggcagacctgccgtttcccatcaagtgcccgccatctggaggtg

SEQ ID NO: 136102 - DNA, 699 bp, Homo sapiens
  chr1:16273063-16273762
  hypo
ctaggaaagggaggaacgcagcctctggaagtctacagcaaggcacctggcccatagtgggcatctgagggcttttatcttagcagctaagggaagtggaaggaggggctcaggagaacagacccgcaggagggtttaggagcctgcccgtgtgcaaaggcactgaaccaggcacggctcccgggtgctctgtaggggaaaggcaggcagagaggccaccctcagacctgaggctaacccttgccagcacccacaaccgaggcagggccagatgaggaaactgagacccagaaagtcagaggcagagcccacatcaaaagccaaggtctctggccatctgcttgggagcagctgccaataacctaccttctgtggccaaggcctccgcatttcccccagggctggtagccggctcagcaagtgacttgagggcatggcaggccgtgatgatgtcctgcatttggaggaaagtggccacggccagcacatcatccacgttctcagggctcaggctcagcttggccgtgtacataaactccagcacctgccccaggcctaccaaggacaggacagctgtcacagacccacctcaagatccggcaccggcagcctgccccaccactccactcagcagcaggacgcagggatttaggaacagctgagtggcaagcctgcatcgccccatctcctctgtggaga

SEQ ID NO: 136103 - DNA, 379 bp, Homo sapiens; identical to SEQ ID NO: 59415
  chr1:16274646-16275025
  hypo

SEQ ID NO: 136104 - DNA, 64 bp, Homo sapiens; identical to SEQ ID NO: 59416
  chr1:16276736-16276800
  hypo

SEQ ID NO: 136105 - DNA, 220 bp, Homo sapiens; identical to SEQ ID NO: 14202
  chr1:16283815-16284035
  hypo

SEQ ID NO: 136106 - DNA, 157 bp, Homo sapiens
  chr1:16314582-16314739
  hypo
caacgatccacacattctgtacgtacctgttttcccagggcttgggtaccccagctaaaggagtgtggttctgatctatctcctttattataggtataatccagttactgagaatgtgactatcaagagcgaaggcgctattcagttcaacttcacg

SEQ ID NO: 136107 - DNA, 30 bp, Homo sapiens
  chr1:16318979-16319009
  hypo
cagtttgtgtgtaccggacgtgctgtgcaa

SEQ ID NO: 136108 - DNA, 31 bp, Homo sapiens; identical to SEQ ID NO: 59419
  chr1:16320505-16320536
  hypo

SEQ ID NO: 136109 - DNA, 31 bp, Homo sapiens; identical to SEQ ID NO: 14203
  chr1:16363231-16363262
  hypo

SEQ ID NO: 136110 - DNA, 30 bp, Homo sapiens; identical to SEQ ID NO: 59421
  chr1:16391208-16391238
  hypo

SEQ ID NO: 136111 - DNA, 30 bp, Homo sapiens; identical to SEQ ID NO: 59422
  chr1:16391886-16391916
  hypo

SEQ ID NO: 136112 - DNA, 30 bp, Homo sapiens
  chr1:16451422-16451452
  hypo
tccgaaggctgtggcggggctcctgctcca

SEQ ID NO: 136113 - DNA, 149 bp, Homo sapiens; identical to SEQ ID NO: 14204
  chr1:16457639-16457788
  hypo

SEQ ID NO: 136114 - DNA, 31 bp, Homo sapiens; identical to SEQ ID NO: 59424
  chr1:16458420-16458451
  hypo

SEQ ID NO: 136115 - DNA, 57 bp, Homo sapiens; identical to SEQ ID NO: 14205
  chr1:16458831-16458888
  hypo

SEQ ID NO: 136116 - DNA, 31 bp, Homo sapiens; identical to SEQ ID NO: 59426
  chr1:16461544-16461575
  hypo

SEQ ID NO: 136117 - DNA, 515 bp, Homo sapiens
  chr1:16464268-16464783
  hypo
ccgagccccagatggccgtcctccttaagccccacctgggcaggccccatagggcacagctgccacccctggacctcacctgtctggttgatgctgacactggcagtacggaagctgcggctggttaccaggcctgagacgccattgcgggcctccacggtgaaggtgtagttcatgtggggctccaggtcgctcactgtcacactggtgcgggtcagtccgtgaggaggctccgagtagcgcacactggcctcacacggcccgcattccccagactcgggccagcactgttcgcaggtgacgctgtagacaatgtcctcgcggcccccgctgtcctgagggggcgtccagcgcagctccaccttggcacccatgcccacggctgtgaggtagtgtggggcggaggggggtcctgcacagacaggaggagtcagtgctgtgctggacccaggcggacacgtcaccctcagtcacgccaccctgacccactgcaagactcacgtgtgcaaggcatc

SEQ ID NO: 136118 - DNA, 103 bp, Homo sapiens; identical to SEQ ID NO: 59428
  chr1:16466890-16466993
  hypo

SEQ ID NO: 136119 - DNA, 687 bp, Homo sapiens; identical to SEQ ID NO: 59429
  chr1:16474841-16475528
  hypo

SEQ ID NO: 136120 - DNA, 1538 bp, Homo sapiens; identical to SEQ ID NO: 102629
  chr1:16481257-16482795
  hypo

SEQ ID NO: 136121 - DNA, 40 bp, Homo sapiens; identical to SEQ ID NO: 59431
  chr1:16485263-16485303
  hypo

SEQ ID NO: 136122 - DNA, 30 bp, Homo sapiens; identical to SEQ ID NO: 14211
  chr1:16498071-16498101
  hypo

SEQ ID NO: 136123 - DNA, 80 bp, Homo sapiens; identical to SEQ ID NO: 59433
  chr1:16509213-16509293
  hypo

SEQ ID NO: 136124 - DNA, 30 bp, Homo sapiens
  chr1:16528969-16528999
  hypo
gaggaacacgtggccggggatgccctgcag

SEQ ID NO: 136125 - DNA, 30 bp, Homo sapiens
  chr1:16531481-16531511
  hypo
gagggtgtgggcagcgattaactggcctga

SEQ ID NO: 136126 - DNA, 454 bp, Homo sapiens; identical to SEQ ID NO: 59434
  chr1:16534316-16534770
  hypo

SEQ ID NO: 136127 - DNA, 140 bp, Homo sapiens
  chr1:16535157-16535297
  hypo
ccgtggctggcccggcgctgtggctgtgtgtgtcggggactccagggtccctccagagctgggggctgggcaccaggacagtgtggccagctgccagccctgctgggccgcatccccccgctggtgatctctgtatctga

SEQ ID NO: 136128 - DNA, 30 bp, Homo sapiens
  chr1:16538588-16538618
  hypo
aggatgggcaggggccgaggaaagtaccct

SEQ ID NO: 136129 - DNA, 24 bp, Homo sapiens
  chr1:16557529-16557553
  hypo
gaaaggcattgcaggccgggcgca

SEQ ID NO: 136130 - DNA, 30 bp, Homo sapiens; identical to SEQ ID NO: 59437
  chr1:16557847-16557877
  hypo

SEQ ID NO: 136131 - DNA, 128 bp, Homo sapiens; identical to SEQ ID NO: 102634
  chr1:16558625-16558753
  hypo

SEQ ID NO: 136132 - DNA, 55 bp, Homo sapiens; identical to SEQ ID NO: 14212
  chr1:16567829-16567884
  hypo

SEQ ID NO: 136133 - DNA, 30 bp, Homo sapiens; identical to SEQ ID NO: 14213
  chr1:16574656-16574686
  hypo

SEQ ID NO: 136134 - DNA, 275 bp, Homo sapiens; identical to SEQ ID NO: 59441
  chr1:16577953-16578228
  hypo

SEQ ID NO: 136135 - DNA, 31 bp, Homo sapiens; identical to SEQ ID NO: 14214
  chr1:16598342-16598373
  hypo

SEQ ID NO: 136136 - DNA, 31 bp, Homo sapiens; identical to SEQ ID NO: 14215
  chr1:16598718-16598749
  hypo

SEQ ID NO: 136137 - DNA, 33 bp, Homo sapiens; identical to SEQ ID NO: 14216
  chr1:16624056-16624089
  hypo

SEQ ID NO: 136138 - DNA, 361 bp, Homo sapiens
  chr1:16640765-16641126
  hypo
aaaagatgtatatagggtctttgctgtttagagataaaatcaagtgacaaatgttttcaagaaagcagttgctaaaagtagctactcagagacaatctgtagccttaataagagcatggactttaaagccagatcgcctgaacgtgaatctttaatcctgcatttactatccgtgtaaataagttaactgtgtttcactcagttctgtcatctataaaatgcaggatcttctagtcagagtttgctgtgagaatgtaaagcagttacaatagtgcttgacacgtgataaaagctatgttcacattggctattactattatcccatatccatttctattttgcccattcaagaacaatacaa

SEQ ID NO: 136139 - DNA, 38 bp, Homo sapiens
  chr1:16676065-16676103
  hypo
taattcagggccgggcgcagtggctcaagcctgtaatc

SEQ ID NO: 136140 - DNA, 34 bp, Homo sapiens; identical to SEQ ID NO: 59445
  chr1:16689683-16689717
  hypo

SEQ ID NO: 136141 - DNA, 21 bp, Homo sapiens
  chr1:16705889-16705910
  hypo
gccctgccttagggttcagtt

SEQ ID NO: 136142 - DNA, 31 bp, Homo sapiens; identical to SEQ ID NO: 14218
  chr1:16724423-16724454
  hypo

SEQ ID NO: 136143 - DNA, 30 bp, Homo sapiens
  chr1:16733682-16733712
  hypo
cacgtggtgacctgtcgtgcgcaggcacac

SEQ ID NO: 136144 - DNA, 87 bp, Homo sapiens
  chr1:16782819-16782906
  hypo
tgatttggatgttttcaagctagccagaggacagagccccagcgtgcctgctttgggtggcacacgtctttccgtggaggttttgct

SEQ ID NO: 136145 - DNA, 136 bp, Homo sapiens
  chr1:16810655-16810791
  hypo
ccctacccggagggcgccagacgctccctccaggcctctggctgagcccagaacgctcaagccccttcctacctggacctgcagctcgtgcttgtgtaaggtggagtggatcagggcgagcgtggaggagtctgag

SEQ ID NO: 136146 - DNA, 31 bp, Homo sapiens; identical to SEQ ID NO: 59449
  chr1:16817289-16817320
  hypo

SEQ ID NO: 136147 - DNA, 31 bp, Homo sapiens; identical to SEQ ID NO: 14220
  chr1:16828209-16828240
  hypo

SEQ ID NO: 136148 - DNA, 31 bp, Homo sapiens; identical to SEQ ID NO: 59451
  chr1:16929974-16930005
  hypo

SEQ ID NO: 136149 - DNA, 330 bp, Homo sapiens; identical to SEQ ID NO: 59452
  chr1:16943748-16944078
  hypo

SEQ ID NO: 136150 - DNA, 30 bp, Homo sapiens; identical to SEQ ID NO: 59453
  chr1:16955148-16955178
  hypo

SEQ ID NO: 136151 - DNA, 36 bp, Homo sapiens; identical to SEQ ID NO: 14221
  chr1:16957468-16957504
  hypo

SEQ ID NO: 136152 - DNA, 138 bp, Homo sapiens
  chr1:17256388-17256526
  hypo
cccagggggctggtacggcagagcgtggagttgcggaggcagctgcaggaggagcaggcctcctaccggcgcaagctgcaggcctaccaggagggccagcagcggcaggcccagcttgtgcagcggctgcagggcaag

SEQ ID NO: 136153 - DNA, 153 bp, Homo sapiens
  chr1:17256873-17257026
  hypo
caggatggccccctgcgcgagcgcctactgatcccctgtgccccattcaggagtgccagcctggcccaggtgaatgccatgctccgagaacagctggaccaggcaggctcggccaaccaggctctgagtgaggacatacgaaaggtgaccaat

SEQ ID NO: 136154 - DNA, 45 bp, Homo sapiens; identical to SEQ ID NO: 59455
  chr1:17270868-17270913
  hypo

SEQ ID NO: 136155 - DNA, 139 bp, Homo sapiens; identical to SEQ ID NO: 59456
  chr1:17280803-17280942
  hypo

SEQ ID NO: 136156 - DNA, 31 bp, Homo sapiens; identical to SEQ ID NO: 14223
  chr1:17292159-17292190
  hypo

SEQ ID NO: 136157 - DNA, 216 bp, Homo sapiens
  chr1:17292893-17293109
  hypo
tggctacagcccggcgcagtgtggatgggcggctgagcggggtccaggcggagctggcgctgcaggaggagagtgtgcggcgcagtgagcgggagcgccgggccacgctggaccaggtggccacactggagaggagcctgcaggccaccgagagcgagctccgggccagccaggtgggcaggagctgagggccagcggggcgacggggaatctgtg

SEQ ID NO: 136158 - DNA, 50 bp, Homo sapiens
  chr1:17294737-17294787
  hypo
agggcgacaagcggcgcctgaaggaggttctggacgcctccgagagccgc

SEQ ID NO: 136159 - DNA, 30 bp, Homo sapiens
  chr1:17304419-17304449
  hypo
ctgcacctgcacatcggctcccagagaggc

SEQ ID NO: 136160 - DNA, 30 bp, Homo sapiens; identical to SEQ ID NO: 14224
  chr1:17312786-17312816
  hypo

SEQ ID NO: 136161 - DNA, 30 bp, Homo sapiens; identical to SEQ ID NO: 14225
  chr1:17313569-17313599
  hypo

SEQ ID NO: 136162 - DNA, 31 bp, Homo sapiens; identical to SEQ ID NO: 59461
  chr1:17316303-17316334
  hypo

SEQ ID NO: 136163 - DNA, 38 bp, Homo sapiens
  chr1:17330878-17330916
  hypo
ggaagaggtaataccgcagcacccgcttctgggtggga

SEQ ID NO: 136164 - DNA, 147 bp, Homo sapiens
  chr1:17331871-17332018
  hypo
tttgtctcttatttcgataacgagtgtttcggcgtgggccaggttgcagggccggagccgcagccgcaccccccacaggggcttccaacggaagagcagcaaagggatcccagccatcatccagaccacgacgtgatagccgatgac

SEQ ID NO: 136165 - DNA, 30 bp, Homo sapiens
  chr1:17347523-17347553
  hypo
cccacagtctttgctcggagggcagccgtg

SEQ ID NO: 136166 - DNA, 30 bp, Homo sapiens; identical to SEQ ID NO: 14227
  chr1:17381965-17381995
  hypo

SEQ ID NO: 136167 - DNA, 82 bp, Homo sapiens
  chr1:17384526-17384608
  hypo
atgagccactgcgcccagccaaaatttaggattttatttgcctttggccagtgggcttcgtcctttccgtctccctggctgt

SEQ ID NO: 136168 - DNA, 30 bp, Homo sapiens
  chr1:17384808-17384838
  hypo
gctccccggctcccccgcgggcccttccag

SEQ ID NO: 136169 - DNA, 30 bp, Homo sapiens; identical to SEQ ID NO: 59465
  chr1:17420806-17420836
  hypo

SEQ ID NO: 136170 - DNA, 20 bp, Homo sapiens
  chr1:17427170-17427190
  hypo
ttttgagacaaagtctcgct

SEQ ID NO: 136171 - DNA, 342 bp, Homo sapiens
  chr1:17431215-17431557
  hypo
ctgcgcccggcctctttttgccttttcaatgtggttactgcagaactgaaaatgacacatggcccacgtgcagtttctatgggacagggctggtccaccctgcctctatcctggcatggtcccgggcccgcagaggctggacttcccgccgtggtaccttgtcactgctggcctcggtgctcgcctggctcatggtgacccgcagggtggtgctgggcgagagaagccagcgctgcttgccattggtggccacctcctcagcctccccatcacgcaccacctccacccacacgtgttccgagtgcttcaggctgaaggtttgggccccggctggggccgcgc

SEQ ID NO: 136172 - DNA, 31 bp, Homo sapiens; identical to SEQ ID NO: 14228
  chr1:17546141-17546172
  hypo

SEQ ID NO: 136173 - DNA, 96 bp, Homo sapiens
  chr1:17574314-17574410
  hypo
ccagagctctaccaacgctggcccctgaggcctcacagcaaccatttttcagacgagaaaagtgaggcacgaacaattaagaaagttgcccggccg

SEQ ID NO: 136174 - DNA, 146 bp, Homo sapiens; identical to SEQ ID NO: 59468
  chr1:17575585-17575731
  hypo

SEQ ID NO: 136175 - DNA, 209 bp, Homo sapiens; identical to SEQ ID NO: 158
  chr1:17591035-17591244
  hypo

SEQ ID NO: 136176 - DNA, 61 bp, Homo sapiens
  chr1:17631993-17632054
  hypo
accatgcccaccccccgcccttccctcagccttccctgcccagctgcgggcagccccatcc

SEQ ID NO: 136177 - DNA, 30 bp, Homo sapiens
  chr1:17632366-17632396
  hypo
actccaggctccccacgttacttggagcag

SEQ ID NO: 136178 - DNA, 115 bp, Homo sapiens
  chr1:17674434-17674549
  hypo
ggatgaaatggagatcggctacatccaagccccacacaaaacgctgcccgtggtcttcgactctccaaggaacagaggcctgaaggagtttcccatcaaacgcgtgatggtacct

SEQ ID NO: 136179 - DNA, 30 bp, Homo sapiens
  chr1:17690251-17690281
  hypo
cccatcttccctggcgtcctctccctcctg

SEQ ID NO: 136180 - DNA, 201 bp, Homo sapiens; identical to SEQ ID NO: 59470
  chr1:17702233-17702434
  hypo

SEQ ID NO: 136181 - DNA, 30 bp, Homo sapiens
  chr1:17732409-17732439
  hypo
tgtgtcagcagggacgctgcccccagcagt

SEQ ID NO: 136182 - DNA, 325 bp, Homo sapiens
  chr1:17733439-17733764
  hypo
tgcccgcagggtcagcgccaagcacattcccaaccgggcaactgtgtacctttctctaggagtgcacgacacccttcccccacaactccttgttttaaaggatttaacccattaggaagcccatttttcaatctaagccagaaggagctgcgggacaaggcagtcttcactttgaaggtccctttcctgctccagtccctgggctagggttctagaagaggctggctgccacgtttacatgaggccaccgaagatctaagtccagctaagcccagggaggctcctgcaaaggctgggacctcgggtgctgcgtcctcaaccctct

SEQ ID NO: 136183 - DNA, 45 bp, Homo sapiens; identical to SEQ ID NO: 14230
  chr1:17734377-17734422
  hypo

SEQ ID NO: 136184 - DNA, 506 bp, Homo sapiens; identical to SEQ ID NO: 14231
  chr1:17736188-17736694
  hypo

SEQ ID NO: 136185 - DNA, 253 bp, Homo sapiens
  chr1:17738622-17738875
  hypo
ccccaaaggtcggtgacggaccccagctgatggtgctctcatcggcggccacaatgatgctgctcttcctgcaaacaggcaggctgtcactgcagggccagcagccccagacctgcacccacgcagctatggctcaagggcatgagtgtgagctgccacttttcccttggcgtactcattccaagtagcaaacacaataacagggccaacaggtttctcctcaatcctaagattgttccgtgcaggccactca

SEQ ID NO: 136186 - DNA, 30 bp, Homo sapiens
  chr1:17739237-17739267
  hypo
actcaagtcctgctacgtttccaactacgt

SEQ ID NO: 136187 - DNA, 31 bp, Homo sapiens
  chr1:17787444-17787475
  hypo
tttctgggcggggcgcggtggctcacgccgg

SEQ ID NO: 136188 - DNA, 455 bp, Homo sapiens; identical to SEQ ID NO: 59474
  chr1:17813198-17813653
  hypo

SEQ ID NO: 136189 - DNA, 788 bp, Homo sapiens; identical to SEQ ID NO: 35131
  chr1:17865913-17866701
  hypo

SEQ ID NO: 136190 - DNA, 131 bp, Homo sapiens
  chr1:17897818-17897949
  hypo
ggccgcaggtgacctcgtgagctggctggcaaagcggtgggcacacacttggttgggaataggtagctcagcacagaataggagacagggacaggagacggagcatgggcactcctcggggaagtcttgta

SEQ ID NO: 136191 - DNA, 231 bp, Homo sapiens
  chr1:17898657-17898888
  hypo
gggggtcagtccacccgatgtgggagggtgcggcctgggagagaccaccagggcaccggcagaggagaacgccttgtactgggtccattttgggagcccgggacgccctcctcagccccctgctccatggggccttgtgggaatatcagggtagaaaactctgcaggcatggagagtttagctgtgggttagctcccacctgtgaccgatggagagcgtggtgcgggcccc

SEQ ID NO: 136192 - DNA, 30 bp, Homo sapiens
  chr1:17902077-17902107
  hypo
tgagatccgagaggtcggtggagggggcga

SEQ ID NO: 136193 - DNA, 31 bp, Homo sapiens; identical to SEQ ID NO: 160
  chr1:17908286-17908317
  hypo

SEQ ID NO: 136194 - DNA, 214 bp, Homo sapiens; identical to SEQ ID NO: 59478
  chr1:17919149-17919363
  hypo

SEQ ID NO: 136195 - DNA, 122 bp, Homo sapiens
  chr1:17925972-17926094
  hypo
cctcttctaagctcacgtctgttccagccggaagagtttggttctgtctgagcaattccgagcaactgatgtggcgccttcaggatgtttctgtgttgaggaggtggcggctcagcgaagca

SEQ ID NO: 136196 - DNA, 42 bp, Homo sapiens; identical to SEQ ID NO: 59479
  chr1:17933051-17933093
  hypo

SEQ ID NO: 136197 - DNA, 52 bp, Homo sapiens; identical to SEQ ID NO: 59480
  chr1:17934560-17934612
  hypo

SEQ ID NO: 136198 - DNA, 31 bp, Homo sapiens; identical to SEQ ID NO: 59481
  chr1:17939405-17939436
  hypo

SEQ ID NO: 136199 - DNA, 30 bp, Homo sapiens
  chr1:17949196-17949226
  hypo
gcttcgccctcaggccggcctccaaggagc

SEQ ID NO: 136200 - DNA, 226 bp, Homo sapiens
  chr1:17949437-17949663
  hypo
tagggagagaggctgcggcctggcctgcggcctcaccccgccctccccggcaggactaccgcaaccccctgatggagatggagcccaaggcgctgagcgcccgcaagtgccaggtggtgttcttccgcgtgaaggagatcctgcactgccactccatgttccagatcgccctgtcctcccgcgtggctgagtgggattccaccgagaagatcggggacctcttcgt

SEQ ID NO: 136201 - DNA, 30 bp, Homo sapiens
  chr1:17971733-17971763
  hypo
ttctaatttggtctccgccactctggtttt

SEQ ID NO: 136202 - DNA, 170 bp, Homo sapiens
  chr1:17972153-17972323
  hypo
aggcagcatggcgagcgctggcacactagcagaggctaggagagccgtgctgccccgggacaaggtgcgtcgcaggcaccgtgcaaggcgcccccgtgggttagttccttggcatctggatcttcccctgctttcccctttcctctgctggccagcgtggagtgcggata

SEQ ID NO: 136203 - DNA, 31 bp, Homo sapiens; identical to SEQ ID NO: 59483
  chr1:17973810-17973841
  hypo

SEQ ID NO: 136204 - DNA, 31 bp, Homo sapiens; identical to SEQ ID NO: 59484
  chr1:17992215-17992246
  hypo

SEQ ID NO: 136205 - DNA, 226 bp, Homo sapiens
  chr1:17994584-17994810
  hypo
ccgagaacattcaagcgaaagggccgtttcacacggtcttggcacgtggcgagggcagggtgaacattatttgctgtcattgtaataatttacctatcttaaatccgcattgctgtatatgtcgtttatttggaaaatcaagctgctcccggggtcggtgttgtcagtgggtgtggggcatcgagcccacactgcaggtctgccatcctctcgcctcactggaaga

SEQ ID NO: 136206 - DNA, 68 bp, Homo sapiens; identical to SEQ ID NO: 59485
  chr1:17996866-17996934
  hypo

SEQ ID NO: 136207 - DNA, 36 bp, Homo sapiens; identical to SEQ ID NO: 59486
  chr1:17997212-17997248
  hypo

SEQ ID NO: 136208 - DNA, 263 bp, Homo sapiens; identical to SEQ ID NO: 59487
  chr1:18006380-18006643
  hypo

SEQ ID NO: 136209 - DNA, 57 bp, Homo sapiens; identical to SEQ ID NO: 14240
  chr1:18021387-18021444
  hypo

SEQ ID NO: 136210 - DNA, 381 bp, Homo sapiens; identical to SEQ ID NO: 59489
  chr1:18023465-18023846
  hypo

SEQ ID NO: 136211 - DNA, 262 bp, Homo sapiens
  chr1:18026182-18026444
  hypo
agatcgaatggagcccgttaaatcacgtcacggagaaaacgactgactttgctacttcagtgaaattatcacatcagtcaccagctcatctcccatgcctccgacaacagagcgagggagggtcgggggcgccgcgaatggctcctgagacccactgaggacgtgcatcacatgtgagtggaggcctggccttagatattgataagagtaataatacccagagcgctccgggtgcctgagctcctttcgtcggtacaactgc

SEQ ID NO: 136212 - DNA, 36 bp, Homo sapiens
  chr1:18044919-18044955
  hypo
tgcgaccacacacaccgctcacgcctgtgagtgttc

SEQ ID NO: 136213 - DNA, 30 bp, Homo sapiens
  chr1:18060483-18060513
  hypo
acgcgagtggcccagcgcaggcgacttcac

SEQ ID NO: 136214 - DNA, 30 bp, Homo sapiens
  chr1:18152238-18152268
  hypo
gagtgaattctccctcgttgcagatcctgt

SEQ ID NO: 136215 - DNA, 30 bp, Homo sapiens
  chr1:18351304-18351334
  hypo
gtgacttgcagtacgcggtgtgtgtttcta

SEQ ID NO: 136216 - DNA, 30 bp, Homo sapiens
  chr1:18387110-18387140
  hypo
cggcgacgcatcactcgtacgtgttaaata

SEQ ID NO: 136217 - DNA, 31 bp, Homo sapiens
  chr1:18398153-18398184
  hypo
taaaacctccagtgacggctgggcgcggtgg

SEQ ID NO: 136218 - DNA, 219 bp, Homo sapiens; identical to SEQ ID NO: 35135
  chr1:18434091-18434310
  hypo

SEQ ID NO: 136219 - DNA, 99 bp, Homo sapiens; identical to SEQ ID NO: 102670
  chr1:18434751-18434850
  hypo

SEQ ID NO: 136220 - DNA, 548 bp, Homo sapiens; identical to SEQ ID NO: 102672
  chr1:18436450-18436998
  hypo

SEQ ID NO: 136221 - DNA, 708 bp, Homo sapiens; identical to SEQ ID NO: 35139
  chr1:18437043-18437751
  hypo

SEQ ID NO: 136222 - DNA, 30 bp, Homo sapiens
  chr1:18469732-18469762
  hypo
cctgggctcaggatgcggagcttcaggact

SEQ ID NO: 136223 - DNA, 92 bp, Homo sapiens
  chr1:18606299-18606391
  hypo
gtttgccggtgcacccgcccctcgtttagcaggtgggcaggctggcgcaggccactgatctgccacgggtctgccggcggccgatcatgctg

SEQ ID NO: 136224 - DNA, 30 bp, Homo sapiens
  chr1:18686727-18686757
  hypo
ctcggaattcctatccggcttaccatctgt

SEQ ID NO: 136225 - DNA, 30 bp, Homo sapiens; identical to SEQ ID NO: 14244
  chr1:18703389-18703419
  hypo

SEQ ID NO: 136226 - DNA, 1193 bp, Homo sapiens; identical to SEQ ID NO: 102687
  chr1:18967249-18968442
  hypo

SEQ ID NO: 136227 - DNA, 628 bp, Homo sapiens; identical to SEQ ID NO: 102695
  chr1:19043114-19043742
  hypo

SEQ ID NO: 136228 - DNA, 92 bp, Homo sapiens; identical to SEQ ID NO: 35162
  chr1:19043756-19043848
  hypo

SEQ ID NO: 136229 - DNA, 30 bp, Homo sapiens
  chr1:19125325-19125355
  hypo
cagcccacaagaccccgaaagaccccgcta

SEQ ID NO: 136230 - DNA, 30 bp, Homo sapiens; identical to SEQ ID NO: 59501
  chr1:19166653-19166683
  hypo

SEQ ID NO: 136231 - DNA, 30 bp, Homo sapiens
  chr1:19187786-19187816
  hypo
ccttacaccgttaaccggatcctgctgcgt

SEQ ID NO: 136232 - DNA, 31 bp, Homo sapiens; identical to SEQ ID NO: 59502
  chr1:19202745-19202776
  hypo

SEQ ID NO: 136233 - DNA, 132 bp, Homo sapiens; identical to SEQ ID NO: 59503
  chr1:19203882-19204014
  hypo

SEQ ID NO: 136234 - DNA, 30 bp, Homo sapiens; identical to SEQ ID NO: 14247
  chr1:19204218-19204248
  hypo

SEQ ID NO: 136235 - DNA, 30 bp, Homo sapiens; identical to SEQ ID NO: 14248
  chr1:19205975-19206005
  hypo

SEQ ID NO: 136236 - DNA, 380 bp, Homo sapiens
  chr1:19208519-19208899
  hypo
cccactcctccaaggcgtctggccctatctccaaaagtccctgccaaggaggccacggcacagcccaatctgccccacgctctggccaaggctccctttccccagaagcctgcaccaaccggtcctgccatcacctaggcaggtctgttcttactgctagagtcactgagtgctcaccgggcgcggcggggcaagtacacacgggctctctcagcacatgtcctgggtcaggcatgtgcagcagccaggcacgtgggcgcctggccatgcaccgtgtttgtctgtgcacagatgcatgaggacgtccccatccatgtccctagtacacactccggcatcagcatccagtgcccctgtctggggctcggggttcccgacaa

SEQ ID NO: 136237 - DNA, 30 bp, Homo sapiens; identical to SEQ ID NO: 59507
  chr1:19211972-19212002
  hypo

SEQ ID NO: 136238 - DNA, 138 bp, Homo sapiens
  chr1:19217050-19217188
  hypo
aacaaaaacccaccttgggggtccacaacccaaggttcaagtcccagtcccacggttgtgtgtccttgagcctgtgagttgcctcctgtgaacgtggttctacgtctatcaagtaagaataatcgcaccgaactcacg

SEQ ID NO: 136239 - DNA, 144 bp, Homo sapiens; identical to SEQ ID NO: 14250
  chr1:19245954-19246098
  hypo

SEQ ID NO: 136240 - DNA, 108 bp, Homo sapiens; identical to SEQ ID NO: 59509
  chr1:19246818-19246926
  hypo

SEQ ID NO: 136241 - DNA, 362 bp, Homo sapiens
  chr1:19258522-19258884
  hypo
gcaacgagctggggccggcacgtggtgagcaagaaaggcaccaagctctggagctggacggaacaaggctcaaatcccagtggtaccaaccacacgctcccgggcaagtgatttccaatccctaagcctccccatttggtcatcataaagatcccccctgcctctggaggctgctacagtttgtgaaaaggagggtatacacaggctccgaataaacggaggctctcgtcccttctccgccttccctgtcactggctccagggtctgagagagcagcaaccttgtttctctggtctgtaaaatggtctgtttctttctggctccactgcgctatggaaatcgtggggttgcggggaggctgc

SEQ ID NO: 136242 - DNA, 30 bp, Homo sapiens
  chr1:19360605-19360635
  hypo
gcggggggtgggggccgccctcctaggagg

SEQ ID NO: 136243 - DNA, 30 bp, Homo sapiens
  chr1:19360885-19360915
  hypo
tgacaccatccctggcgtgagccaaaacac

SEQ ID NO: 136244 - DNA, 30 bp, Homo sapiens
  chr1:19388951-19388981
  hypo
ggtggctcacaataacggtcgtgtggtggt

SEQ ID NO: 136245 - DNA, 58 bp, Homo sapiens; identical to SEQ ID NO: 59511
  chr1:19403631-19403689
  hypo

SEQ ID NO: 136246 - DNA, 30 bp, Homo sapiens; identical to SEQ ID NO: 14251
  chr1:19419512-19419542
  hypo

SEQ ID NO: 136247 - DNA, 195 bp, Homo sapiens
  chr1:19426354-19426549
  hypo
ttcaggggctgctaacgtccctaacccacacacaggctccagcttagacacacccaccggggaccttctcctgcaggctcagcaccagaaaaggcttttcactatgtaaaaatgtcagaccctcaacggtctgccagaaagtaactgacacggggacataaacctgcacagggggtaaaacgccaatatttaggg

SEQ ID NO: 136248 - DNA, 153 bp, Homo sapiens; identical to SEQ ID NO: 59513
  chr1:19436863-19437016
  hypo

SEQ ID NO: 136249 - DNA, 30 bp, Homo sapiens
  chr1:19448720-19448750
  hypo
tctaccccatccccacgcaaggcgctgttt

SEQ ID NO: 136250 - DNA, 55 bp, Homo sapiens; identical to SEQ ID NO: 59514
  chr1:19449489-19449544
  hypo

SEQ ID NO: 136251 - DNA, 233 bp, Homo sapiens; identical to SEQ ID NO: 59515
  chr1:19491253-19491486
  hypo

SEQ ID NO: 136252 - DNA, 55 bp, Homo sapiens
  chr1:19517993-19518048
  hypo
gactctccggcccctcgctctgacatctttttcttcacaacgtttatatatgatt

SEQ ID NO: 136253 - DNA, 30 bp, Homo sapiens; identical to SEQ ID NO: 14252
  chr1:19526914-19526944
  hypo

SEQ ID NO: 136254 - DNA, 456 bp, Homo sapiens; identical to SEQ ID NO: 102707
  chr1:19639056-19639512
  hypo

SEQ ID NO: 136255 - DNA, 242 bp, Homo sapiens
  chr1:19659424-19659666
  hypo
acccccagaggtccccgccttggcaggttctgttttacctgttgaacgagacactgtatggggaagtgacatgcgcagtgcctggcccagtgctgtgcacacacgctgcttcgcttcctcaggttccggggatgggatgggacagaaaagctggttgcttagctggtggcgttctccagcaaagcagaagggatggtcctggcagccctgtgccgagcactggaccccgcgccctccctggc

SEQ ID NO: 136256 - DNA, 30 bp, Homo sapiens
  chr1:19660085-19660115
  hypo
ggaccccagaggtgccgggtgacagccagg

SEQ ID NO: 136257 - DNA, 31 bp, Homo sapiens; identical to SEQ ID NO: 14254
  chr1:19664319-19664350
  hypo

SEQ ID NO: 136258 - DNA, 30 bp, Homo sapiens
  chr1:19669144-19669174
  hypo
ggtttaaatggccgcggagcagcagccgga

SEQ ID NO: 136259 - DNA, 518 bp, Homo sapiens; identical to SEQ ID NO: 59519
  chr1:19676376-19676894
  hypo

SEQ ID NO: 136260 - DNA, 32 bp, Homo sapiens
  chr1:19680338-19680370
  hypo
ctggggagccttgacgccgtgtgcggctctgc

SEQ ID NO: 136261 - DNA, 58 bp, Homo sapiens
  chr1:19683185-19683243
  hypo
cagccacagcatcaccgtggaggtcaacttgtaatgggcggtgcgaccgctggatttc

SEQ ID NO: 136262 - DNA, 342 bp, Homo sapiens
  chr1:19687680-19688022
  hypo
ttaataaagaaacaacggcgacagagttagaggcggcgtggtcaatctctcacttcgaatctgttccctctctgaatcggggtgttccaactgaggtgagtcagacgtgctgagacctggcctctgcaggtacagctcaaacactacaataattcaagaatggacttgcattccattcaccaaaagggatctccagggactggagcagccacaagtctcaacctgacattccgagacaaagggagcagaggactgcatggttagaaaggcctgtttcagaattgcccagaagcaccagcctctcctgcgagtgccatcagggcgctccggcaccttcaggag

SEQ ID NO: 136263 - DNA, 31 bp, Homo sapiens
  chr1:19692344-19692375
  hypo
aaagaaaagatggaaacgcccacagccttga

SEQ ID NO: 136264 - DNA, 30 bp, Homo sapiens
  chr1:19693593-19693623
  hypo
tgtccaatggatgggcgtgggtgctgccca

SEQ ID NO: 136265 - DNA, 358 bp, Homo sapiens
  chr1:19705018-19705376
  hypo
gagaaaatgactcacaggtctcgatactggtcaaaggcattgttggcttccacctccagctttctcagccgagctgacggcatggccccatcctccaagggagggtcatacttgttactccatggtgacctggagggaaggaaggaaaagtatataccatgaatcgttccatgaagacacggccagcgagcagggagcctgagccctggctatctgaaatctcggaggcaaagccgctaactccagcaaagatttttctgggtcctggcaacaaacagggctttctggaggtttggagaacaagggctctgatgcgggcagactggggcacacgcccgtgctccacctctcactggct

SEQ ID NO: 136266 - DNA, 31 bp, Homo sapiens; identical to SEQ ID NO: 14257
  chr1:19708690-19708721
  hypo

SEQ ID NO: 136267 - DNA, 305 bp, Homo sapiens; identical to SEQ ID NO: 59524
  chr1:19711505-19711810
  hypo

SEQ ID NO: 136268 - DNA, 147 bp, Homo sapiens
  chr1:19720384-19720531
  hypo
cctagtgagaaactggccccccgcctgccagggccacacacaagaggacacttccaggtccagcctctctcctctttaagaagtcacttggcgctgagggccatatttttttgttttgttttgtttttgagacgaagtctcgctctg

SEQ ID NO: 136269 - DNA, 73 bp, Homo sapiens; identical to SEQ ID NO: 14258
  chr1:19721242-19721315
  hypo

SEQ ID NO: 136270 - DNA, 30 bp, Homo sapiens; identical to SEQ ID NO: 59526
  chr1:19722984-19723014
  hypo

SEQ ID NO: 136271 - DNA, 30 bp, Homo sapiens
  chr1:19746189-19746219
  hypo
gctggggaggcaggcgcctcattaggtcca

SEQ ID NO: 136272 - DNA, 30 bp, Homo sapiens; identical to SEQ ID NO: 14259
  chr1:19746549-19746579
  hypo

SEQ ID NO: 136273 - DNA, 140 bp, Homo sapiens
  chr1:19767161-19767301
  hypo
attagtgtctggataggcatccgtgcacccaacgctactgacttactccagttcatcctgaagacagactattacagtaaaagccatgttttaaaaaagttatagctgctaggccgggcgcggtggctcacgcctgtaat

SEQ ID NO: 136274 - DNA, 30 bp, Homo sapiens; identical to SEQ ID NO: 59528
  chr1:19768081-19768111
  hypo

SEQ ID NO: 136275 - DNA, 107 bp, Homo sapiens; identical to SEQ ID NO: 59529
  chr1:19774208-19774315
  hypo

SEQ ID NO: 136276 - DNA, 30 bp, Homo sapiens; identical to SEQ ID NO: 14260
  chr1:19794320-19794350
  hypo

SEQ ID NO: 136277 - DNA, 19 bp, Homo sapiens
  chr1:19949422-19949441
  hypo
ttttttttttttgaaacgg

SEQ ID NO: 136278 - DNA, 37 bp, Homo sapiens
  chr1:19950664-19950701
  hypo
agcttcaccatgttggccaggccgtggttctgctttt

SEQ ID NO: 136279 - DNA, 25 bp, Homo sapiens
  chr1:19980864-19980889
  hypo
cagcgtgggtgaccgagtgagatct

SEQ ID NO: 136280 - DNA, 88 bp, Homo sapiens; identical to SEQ ID NO: 59534
  chr1:19981387-19981475
  hypo

SEQ ID NO: 136281 - DNA, 30 bp, Homo sapiens; identical to SEQ ID NO: 14263
  chr1:19983460-19983490
  hypo

SEQ ID NO: 136282 - DNA, 31 bp, Homo sapiens; identical to SEQ ID NO: 59536
  chr1:19984081-19984112
  hypo

SEQ ID NO: 136283 - DNA, 31 bp, Homo sapiens; identical to SEQ ID NO: 14264
  chr1:19984406-19984437
  hypo

SEQ ID NO: 136284 - DNA, 32 bp, Homo sapiens; identical to SEQ ID NO: 59538
  chr1:19984767-19984799
  hypo

SEQ ID NO: 136285 - DNA, 285 bp, Homo sapiens; identical to SEQ ID NO: 102713
  chr1:19991371-19991656
  hypo

SEQ ID NO: 136286 - DNA, 30 bp, Homo sapiens; identical to SEQ ID NO: 59539
  chr1:20005496-20005526
  hypo

SEQ ID NO: 136287 - DNA, 30 bp, Homo sapiens; identical to SEQ ID NO: 59540
  chr1:20005729-20005759
  hypo

SEQ ID NO: 136288 - DNA, 389 bp, Homo sapiens
  chr1:20060807-20061196
  hypo
gcccttggggtctgccgagttgctgccgtgtgagtgtgtgcagatgcgtgtatgaatgtgtgcaggtgtgtgtgtgagtgtgcatatgtgcgcatgtgtgtgaactgtagggtgcccagcaccagtgcccccgggtcctccttggcaggatccactcagttactcattcactccacagtttaaagacctcaatctttccccagcgttgaaccagttgtttccaactccttagcctggcacagtgccaggctcccaccctgacctattagcatttcccaccaacccacctggggggcctcttacgtgggctgcagagacaccagatgccaccgtttctagacacccctgagagccccgcctttgcccatgctggccgaccctctggaatg

SEQ ID NO: 136289 - DNA, 225 bp, Homo sapiens
  chr1:20070440-20070665
  hypo
gaggcgctcactgaacgctagtgacctctgtgcatgggtggtgcccggcggtcacacaccaataagaccctggcgcctggtgacacctctaaatgtttctcactggctttcttctgtgtggtttggcagatctgtgacttctgcccttaggtcagagacttgggaacccaggaggctctgggcaggcgtgcctgagtggtcaggttgggacgtttaggattcccg

SEQ ID NO: 136290 - DNA, 157 bp, Homo sapiens
  chr1:20090953-20091110
  hypo
tctcagtgcctcacacggggccgggcatacacagcaggtgtcagttcttatttgcggaatagatggaccaggctgtttggatacggattataaactgtatgagtctcaaggatgttgggctgggcgtggtggtggctcacgcctgtaatcccagcac

SEQ ID NO: 136291 - DNA, 30 bp, Homo sapiens
  chr1:20096417-20096447
  hypo
aagccacaaagcacacgtgcttagggagct

SEQ ID NO: 136292 - DNA, 32 bp, Homo sapiens
  chr1:20097097-20097129
  hypo
tgatatacgatacagcgcgctcatttgacaaa

SEQ ID NO: 136293 - DNA, 40 bp, Homo sapiens; identical to SEQ ID NO: 59542
  chr1:20110730-20110770
  hypo

SEQ ID NO: 136294 - DNA, 84 bp, Homo sapiens; identical to SEQ ID NO: 14267
  chr1:20127455-20127539
  hypo

SEQ ID NO: 136295 - DNA, 30 bp, Homo sapiens; identical to SEQ ID NO: 59544
  chr1:20141054-20141084
  hypo

SEQ ID NO: 136296 - DNA, 16 bp, Homo sapiens
  chr1:20190957-20190973
  hypo
tcggcatgagccaccg

SEQ ID NO: 136297 - DNA, 206 bp, Homo sapiens
  chr1:20204368-20204574
  hypo
gaccctgtctcaaaaaaacaaaaaagtaaaaaacacacccctaggtggttttatatgctaaggatacacgttatgcgtgttagagcacgtcgatgctaagcgcatgtgccaactgcaggtctgtctttgcatgtttgacctcagcagtatttcatgaatatgcatgtacagctcccataaagggaattccccgtaaggtactaggg

SEQ ID NO: 136298 - DNA, 99 bp, Homo sapiens
  chr1:20205019-20205118
  hypo
ttgaacatgtctagtcggtagttccctgtggcatttacccgtgcaagctcccagcttgtttgtgtctgcagctccactttacaggctactctgttagaa

SEQ ID NO: 136299 - DNA, 421 bp, Homo sapiens
  chr1:20205177-20205598
  hypo
tactatctgcctacgcgatttcttcttaactcctgtatcacttttgctttgcaataaacttctttgcctgctctttggagtactttggactcactctcaaattcttttacgtggctaagtcaagaacctgaacgggccaactgccaacacttggacataccttctagtgcacgtgcatgtaatttgctttaggactatctgcgtctgagagtgtacttttgaaggagctacattgtccggagtatataccctggggttcatcgtcttgcacgaggaaaatttagaatacggatacacacgaggagtttaggaggagatgtaatatttctatttttaggatagatcacgagatgtagacactagacatttaaaatgttaccagatacaggccaggtgcagtggttcatgcctctaatcccag

SEQ ID NO: 136300 - DNA, 45 bp, Homo sapiens
  chr1:20210239-20210284
  hypo
cctagattacaggcatgagctaccacccccggccaggaattgcct

SEQ ID NO: 136301 - DNA, 153 bp, Homo sapiens; identical to SEQ ID NO: 59547
  chr1:20214380-20214533
  hypo

SEQ ID NO: 136302 - DNA, 30 bp, Homo sapiens
  chr1:20221075-20221105
  hypo
gagtaacttggtctacgagcctaaccaaag

SEQ ID NO: 136303 - DNA, 290 bp, Homo sapiens
  chr1:20230246-20230536
  hypo
atgagtcatgctcatccgtgactgtccagctgggacgggagcttcagtacctctaagcgtgctgatgatcaaataaggcttgggaaccagagggaagttgtatgtaggtttcttcaagaccagcaccgtttttgtgcaaaagttcaccaggtgcgagtatagaggatcgttttctgttaagctcacggctctgaaaatcagctgaggtgactgtgtgctgtcagaggcagcagtcatttgccagtgttggcatttagacatgggagtgcgaatgcctttcttactgagca

SEQ ID NO: 136304 - DNA, 119 bp, Homo sapiens; identical to SEQ ID NO: 59549
  chr1:20247672-20247791
  hypo

SEQ ID NO: 136305 - DNA, 30 bp, Homo sapiens; identical to SEQ ID NO: 14269
  chr1:20397059-20397089
  hypo

SEQ ID NO: 136306 - DNA, 29 bp, Homo sapiens
  chr1:20498543-20498572
  hypo
ccgcgcccggccaagaagccacttcttta

SEQ ID NO: 136307 - DNA, 30 bp, Homo sapiens; identical to SEQ ID NO: 59552
  chr1:20517545-20517575
  hypo

SEQ ID NO: 136308 - DNA, 200 bp, Homo sapiens; identical to SEQ ID NO: 14271
  chr1:20554749-20554949
  hypo

SEQ ID NO: 136309 - DNA, 35 bp, Homo sapiens; identical to SEQ ID NO: 59554
  chr1:20680359-20680394
  hypo

SEQ ID NO: 136310 - DNA, 31 bp, Homo sapiens; identical to SEQ ID NO: 14273
  chr1:20802147-20802178
  hypo

SEQ ID NO: 136311 - DNA, 141 bp, Homo sapiens; identical to SEQ ID NO: 35187
  chr1:20812695-20812836
  hypo

SEQ ID NO: 136312 - DNA, 30 bp, Homo sapiens
  chr1:20827421-20827451
  hypo
gcttgaggcgcaggcgctcctgccgctgca

SEQ ID NO: 136313 - DNA, 502 bp, Homo sapiens; identical to SEQ ID NO: 102734
  chr1:20878726-20879228
  hypo

SEQ ID NO: 136314 - DNA, 181 bp, Homo sapiens; identical to SEQ ID NO: 196
  chr1:20879255-20879436
  hypo

SEQ ID NO: 136315 - DNA, 1252 bp, Homo sapiens; identical to SEQ ID NO: 197
  chr1:20879462-20880714
  hypo

SEQ ID NO: 136316 - DNA, 35 bp, Homo sapiens; identical to SEQ ID NO: 14278
  chr1:20920112-20920147
  hypo

SEQ ID NO: 136317 - DNA, 93 bp, Homo sapiens; identical to SEQ ID NO: 102738
  chr1:20959848-20959941
  hypo

SEQ ID NO: 136318 - DNA, 157 bp, Homo sapiens; identical to SEQ ID NO: 59562
  chr1:20977498-20977655
  hypo

SEQ ID NO: 136319 - DNA, 30 bp, Homo sapiens; identical to SEQ ID NO: 59563
  chr1:20978823-20978853
  hypo

SEQ ID NO: 136320 - DNA, 137 bp, Homo sapiens; identical to SEQ ID NO: 14281
  chr1:20983633-20983770
  hypo

SEQ ID NO: 136321 - DNA, 21 bp, Homo sapiens
  chr1:21020041-21020062
  hypo
agccaccgcacccagcctcca

SEQ ID NO: 136322 - DNA, 31 bp, Homo sapiens; identical to SEQ ID NO: 14282
  chr1:21027557-21027588
  hypo

SEQ ID NO: 136323 - DNA, 30 bp, Homo sapiens; identical to SEQ ID NO: 59567
  chr1:21030994-21031024
  hypo

SEQ ID NO: 136324 - DNA, 30 bp, Homo sapiens; identical to SEQ ID NO: 14283
  chr1:21031297-21031327
  hypo

SEQ ID NO: 136325 - DNA, 257 bp, Homo sapiens
  chr1:21037713-21037970
  hypo
caaagaggatgaggtcgccatctcgggcctgagcaaccccaggagacaacacctcacccgaggggtctcccgccacgatattttccagcctaggaaggctctctgctcccacacttgtgatggcctcaggggtccccctccaccgcgctcccaaccccactccacccccgacgcctggggaggcgctgagtgacagccctcagccgcgcaccaggttccttggtaactgctcatctctgctgcggagaggccagagc

SEQ ID NO: 136326 - DNA, 31 bp, Homo sapiens; identical to SEQ ID NO: 14284
  chr1:21048390-21048421
  hypo

SEQ ID NO: 136327 - DNA, 30 bp, Homo sapiens; identical to SEQ ID NO: 14285
  chr1:21050511-21050541
  hypo

SEQ ID NO: 136328 - DNA, 1143 bp, Homo sapiens; identical to SEQ ID NO: 102743
  chr1:21058206-21059349
  hypo

SEQ ID NO: 136329 - DNA, 30 bp, Homo sapiens; identical to SEQ ID NO: 14286
  chr1:21062074-21062104
  hypo

SEQ ID NO: 136330 - DNA, 158 bp, Homo sapiens; identical to SEQ ID NO: 14287
  chr1:21062547-21062705
  hypo

SEQ ID NO: 136331 - DNA, 42 bp, Homo sapiens; identical to SEQ ID NO: 59574
  chr1:21122638-21122680
  hypo

SEQ ID NO: 136332 - DNA, 80 bp, Homo sapiens; identical to SEQ ID NO: 59575
  chr1:21339356-21339436
  hypo

SEQ ID NO: 136333 - DNA, 30 bp, Homo sapiens; identical to SEQ ID NO: 59576
  chr1:21546262-21546292
  hypo

SEQ ID NO: 136334 - DNA, 30 bp, Homo sapiens
  chr1:21551560-21551590
  hypo
tgggggagcctccacggtcggcatcgcgat

SEQ ID NO: 136335 - DNA, 371 bp, Homo sapiens; identical to SEQ ID NO: 102747
  chr1:21563146-21563517
  hypo

SEQ ID NO: 136336 - DNA, 160 bp, Homo sapiens; identical to SEQ ID NO: 59578
  chr1:21568225-21568385
  hypo

SEQ ID NO: 136337 - DNA, 823 bp, Homo sapiens; identical to SEQ ID NO: 59579
  chr1:21573387-21574210
  hypo

SEQ ID NO: 136338 - DNA, 314 bp, Homo sapiens
  chr1:21585134-21585448
  hypo
ggaagaggtcgtgcccgccccctcgaccgctgcaggttcaagctagctcacctggatcacgttgctgttggagttcttggaatcggcactgacatagacagagaagaagggtgaggtgcggtagtgggcggtgaccacctgcagggtgtcctggaagttgtccttggcccagggacctgtgatgttccagcccccgagctgtggggagggagagcaggcagggaggtgatgaggtggcggggagacccagatgtgaattctggttctgccgctgacttgctctgtgaccctggagcagtcgcctgacctctctg

SEQ ID NO: 136339 - DNA, 30 bp, Homo sapiens; identical to SEQ ID NO: 14291
  chr1:21586816-21586846
  hypo

SEQ ID NO: 136340 - DNA, 221 bp, Homo sapiens; identical to SEQ ID NO: 59581
  chr1:21610540-21610761
  hypo

SEQ ID NO: 136341 - DNA, 179 bp, Homo sapiens
  chr1:21635872-21636051
  hypo
ggtgaatcacagtacccgtcccaccaagttgttgggaggatgcagttagttacccagaaagtgtttggagtagtgcctggtatgcagtgagcgctggcttggttgggtgaatgaatgggtgcatgaaggaatgagtcaatgcgtcggagctctgctctgtggcacgaggcccttcagga

SEQ ID NO: 136342 - DNA, 21 bp, Homo sapiens
  chr1:21636560-21636581
  hypo
tacaggcgtgagccactgtgc

SEQ ID NO: 136343 - DNA, 30 bp, Homo sapiens
  chr1:21637282-21637312
  hypo
actacttttgacgaacgaagaaaacgaagg

SEQ ID NO: 136344 - DNA, 21 bp, Homo sapiens
  chr1:21637866-21637887
  hypo
tgagaaaagagcatgcgggcc

SEQ ID NO: 136345 - DNA, 30 bp, Homo sapiens
  chr1:21682446-21682476
  hypo
ttcaatcccggtctgcgctccgcaattgca

SEQ ID NO: 136346 - DNA, 111 bp, Homo sapiens
  chr1:21690438-21690549
  hypo
gattgttggatcatacgttaagagtatgtttgttttgtaagagactatcatactgtattccaaagaggctgtaccgtttcgcattcccatcagcaacgaatgagcattccc

SEQ ID NO: 136347 - DNA, 43 bp, Homo sapiens; identical to SEQ ID NO: 59584
  chr1:21786547-21786590
  hypo

SEQ ID NO: 136348 - DNA, 30 bp, Homo sapiens
  chr1:21815816-21815846
  hypo
tccgggacttccagccggggaacgggggtg

SEQ ID NO: 136349 - DNA, 115 bp, Homo sapiens; identical to SEQ ID NO: 59585
  chr1:21848419-21848534
  hypo

SEQ ID NO: 136350 - DNA, 31 bp, Homo sapiens; identical to SEQ ID NO: 59586
  chr1:21882578-21882609
  hypo

SEQ ID NO: 136351 - DNA, 125 bp, Homo sapiens; identical to SEQ ID NO: 59587
  chr1:21889587-21889712
  hypo

SEQ ID NO: 136352 - DNA, 30 bp, Homo sapiens
  chr1:21890436-21890466
  hypo
ggggcctgtctttagcggggagggggaagg

SEQ ID NO: 136353 - DNA, 30 bp, Homo sapiens
  chr1:21890693-21890723
  hypo
catcagggacattgacgtgagtgctcgggg

SEQ ID NO: 136354 - DNA, 31 bp, Homo sapiens; identical to SEQ ID NO: 59588
  chr1:21897870-21897901
  hypo

SEQ ID NO: 136355 - DNA, 253 bp, Homo sapiens
  chr1:21902092-21902345
  hypo
cagagtggtgcccggcgaaggttcctgtccttccctagctaacaaaggttaatccagcagcagtgttgtggggctggggagcagatcttcctcccctcctccctcaccgaggcctttgccttggtgtcccaaggaggcagaattgaccacgggcaccatgaaggaaaagccaagcaggccctgcatgaggcggtggagatggaccgggccatcgggcaggcaggcagcttgacctcctcggaagacactctga

SEQ ID NO: 136356 - DNA, 30 bp, Homo sapiens; identical to SEQ ID NO: 59589
  chr1:21904469-21904499
  hypo

SEQ ID NO: 136357 - DNA, 31 bp, Homo sapiens; identical to SEQ ID NO: 14294
  chr1:21924747-21924778
  hypo

SEQ ID NO: 136358 - DNA, 30 bp, Homo sapiens
  chr1:21926064-21926094
  hypo
ggagaagtccttgagcgcctctgctctctg

SEQ ID NO: 136359 - DNA, 30 bp, Homo sapiens
  chr1:21926420-21926450
  hypo
cgacactaacatcatcgggtgcacgttcac

SEQ ID NO: 136360 - DNA, 167 bp, Homo sapiens; identical to SEQ ID NO: 14295
  chr1:21944016-21944183
  hypo

SEQ ID NO: 136361 - DNA, 410 bp, Homo sapiens
  chr1:21953295-21953705
  hypo
gggctaccgctattacgaatgacagtgaccgtgaccataactgacgctcattgggcctaccacatgccaggccctgtgctgagccctcgttctaggcccgagggcatggcctcctcaccacactggtattcccactttacagacaggacccagctgtgcacagaggtcacacggctggccggcagcaaagctagcatctgcatgagacctgcctgagtctaagcccggactctctgcccacaccacacccttccctgaggaaagaaagcaggtctggcgagggtgaagtcagctcctatcaccctaaaaagcctgccgaggccacctctggggcagggagaggaaatgcccagtggttcccgggatcctggggctgggcaagcaggcctggcttccgctgctgcctaggg

SEQ ID NO: 136362 - DNA, 134 bp, Homo sapiens
  chr1:22001537-22001671
  hypo
ttgcttcccagtgcccgcagagccatgcctcggcagctcgagacatctgttcctgatgttcttagcaatgacaatcaaaacaactgaagctgcccctttggggcagaaactgcccatcacggagacataaatct

SEQ ID NO: 136363 - DNA, 212 bp, Homo sapiens; identical to SEQ ID NO: 14297
  chr1:22003570-22003782
  hypo

SEQ ID NO: 136364 - DNA, 67 bp, Homo sapiens
  chr1:22023364-22023431
  hypo
ggtggtggtggtggccggtgggggcggtgggggatggggggtgagtgagaggcgcaggggagattct

SEQ ID NO: 136365 - DNA, 224 bp, Homo sapiens; identical to SEQ ID NO: 14299
  chr1:22023678-22023902
  hypo

SEQ ID NO: 136366 - DNA, 194 bp, Homo sapiens; identical to SEQ ID NO: 14300
  chr1:22032530-22032724
  hypo

SEQ ID NO: 136367 - DNA, 121 bp, Homo sapiens; identical to SEQ ID NO: 59598
  chr1:22092120-22092241
  hypo

SEQ ID NO: 136368 - DNA, 30 bp, Homo sapiens
  chr1:22130283-22130313
  hypo
agccctcgcgcccagcggaaaaagccaaag

SEQ ID NO: 136369 - DNA, 30 bp, Homo sapiens
  chr1:22155429-22155459
  hypo
gccctggctcttgccgggcgaggagcgcag

SEQ ID NO: 136370 - DNA, 30 bp, Homo sapiens; identical to SEQ ID NO: 59599
  chr1:22157784-22157814
  hypo

SEQ ID NO: 136371 - DNA, 50 bp, Homo sapiens; identical to SEQ ID NO: 59600
  chr1:22166017-22166067
  hypo

SEQ ID NO: 136372 - DNA, 85 bp, Homo sapiens; identical to SEQ ID NO: 14301
  chr1:22179017-22179102
  hypo

SEQ ID NO: 136373 - DNA, 30 bp, Homo sapiens; identical to SEQ ID NO: 59602
  chr1:22182128-22182158
  hypo

SEQ ID NO: 136374 - DNA, 30 bp, Homo sapiens; identical to SEQ ID NO: 59603
  chr1:22188516-22188546
  hypo

SEQ ID NO: 136375 - DNA, 258 bp, Homo sapiens; identical to SEQ ID NO: 59604
  chr1:22191348-22191606
  hypo

SEQ ID NO: 136376 - DNA, 43 bp, Homo sapiens; identical to SEQ ID NO: 59605
  chr1:22192125-22192168
  hypo

SEQ ID NO: 136377 - DNA, 30 bp, Homo sapiens; identical to SEQ ID NO: 59606
  chr1:22195618-22195648
  hypo

SEQ ID NO: 136378 - DNA, 163 bp, Homo sapiens
  chr1:22196200-22196363
  hypo
gacagaaaggacgtccgtgaggcttcacctccccacgggcccagccagccacccgctctgcactgtctgctcacaagtgctgatacctggcactctggcccttgtacccactgccctcttgttcctcctgagctaggcggggatatcccgggatgggtttggc

SEQ ID NO: 136379 - DNA, 710 bp, Homo sapiens
  chr1:22198752-22199462
  hypo
agagctgggcaccctcgggcacgggttccacagtgaattctcctgtcaggcggctgtttcgctgtgggttcaccagggcaaagccttggaagtccccaggggcaaagtgggtggagatctggcaggggaaaaaggagggggcgtcagcctgagcaccggggtgccttggtgggggatggggcacgggagggtgttaaggtgcggaatggggtcctgttgagatcaggactgcgagagaaataatgggggcatgtgagggtactgaggcggggatgagggtcgctgggctcagtgctcagatggacagtaacaggcagcaggtggcaacaccgcctggggctgggcagcacaggctctcaccaggtggcgtgtgtaggcagagctggcgcactgctgggtgatgcccatacagaagcagggcaggcagccgtctgggttgctggcactcaggtggaagtggtggggccggcagtggctgcaagtgaggccttccacctgggcctgggtagacggatggaaggaggcaggcaggggactcagtgggtctcctgcacccccagcagcctgaggccagcctccctggccacttccagcagccccgggcagcccctgccctgtcccccatgccctgccccccatgcccaggtctcggcttccaccagatgctgcctgatttccccgcagggtctgggcagcggggcagagcaggc

SEQ ID NO: 136380 - DNA, 514 bp, Homo sapiens
  chr1:22200940-22201454
  hypo
tcctgtggtgtcccccgctgggcgtccccgtagtatcctggctggcactgctcacaccgagggccctccgtgtgatgctggcagccctggaggagcaggatgtgagttgaggctgggcctccagaggccacagattgctggggtgggcggaaggagggcgggacttacctggcaggcacctgtttctggctcgcaggcctctgagtggccatggcagctgcagcgttcacaggtacccaggtagaggccactgggcgtgcgtgtgtagcctgtgtcacagtcctgggggcagaaagatggcagtgggagggacttccgaacacggcccattcaggtaggggcactggatggccagggctggggaggtgtggagggctcatggagaaggagcgggaagcaccatggagggggctggctgggctggcgtggggcccaggactcacctggcaggacggcccacggtacccgggtgggcaggagcactgttccacttccagcgcggggtcctggccgg

SEQ ID NO: 136381 - DNA, 30 bp, Homo sapiens
  chr1:22201768-22201798
  hypo
acgggcctgaaagaacgatcactctccggc

SEQ ID NO: 136382 - DNA, 195 bp, Homo sapiens; identical to SEQ ID NO: 14303
  chr1:22202046-22202241
  hypo

SEQ ID NO: 136383 - DNA, 273 bp, Homo sapiens
  chr1:22211059-22211332
  hypo
ggtcccggaagcggcgggtgctctggcacacgctggtgatgccaaagcagaagcagggcaggcaggcggcgctgtgctccaggtagaagtggccgtcagggcaggggcctgctgggcggcatgggcgggggctgcagccggctgtggtgggcagcccggctctgcccccacacccggtgacacctgccctccggcagtacctcgttgtgggacgagctcaaggacaccgtcaggaatgccaaacaccatgccccgggcgttcatggcctcaca

SEQ ID NO: 136384 - DNA, 56 bp, Homo sapiens; identical to SEQ ID NO: 59610
  chr1:22213893-22213949
  hypo

SEQ ID NO: 136385 - DNA, 30 bp, Homo sapiens
  chr1:22222730-22222760
  hypo
tttggcttgctgtgacggtctctatgtcct

SEQ ID NO: 136386 - DNA, 30 bp, Homo sapiens; identical to SEQ ID NO: 14304
  chr1:22247934-22247964
  hypo

SEQ ID NO: 136387 - DNA, 30 bp, Homo sapiens
  chr1:22273427-22273457
  hypo
tgagtgctcaatgagcgacgtacttctgca

SEQ ID NO: 136388 - DNA, 30 bp, Homo sapiens; identical to SEQ ID NO: 14305
  chr1:22282669-22282699
  hypo

SEQ ID NO: 136389 - DNA, 30 bp, Homo sapiens
  chr1:22292240-22292270
  hypo
ccaccgtcccagcatcgtgattagcgtttt

SEQ ID NO: 136390 - DNA, 36 bp, Homo sapiens
  chr1:22335484-22335520
  hypo
ccctttgggaggccccggcaggtggatcacctgagg

SEQ ID NO: 136391 - DNA, 23 bp, Homo sapiens
  chr1:22378615-22378638
  hypo
gtagtgggccgggcgcggtggtt

SEQ ID NO: 136392 - DNA, 42 bp, Homo sapiens; identical to SEQ ID NO: 59613
  chr1:22422719-22422761
  hypo

SEQ ID NO: 136393 - DNA, 30 bp, Homo sapiens
  chr1:22432500-22432530
  hypo
actgtgcgccaaattcgataatcttgcttc

SEQ ID NO: 136394 - DNA, 30 bp, Homo sapiens
  chr1:22434923-22434953
  hypo
actccatggcctcggcgcgattccaggtcc

SEQ ID NO: 136395 - DNA, 30 bp, Homo sapiens
  chr1:22446382-22446412
  hypo
tgcctgcctggtttcggcaataaataacat

SEQ ID NO: 136396 - DNA, 30 bp, Homo sapiens; identical to SEQ ID NO: 59614
  chr1:22446839-22446869
  hypo

SEQ ID NO: 136397 - DNA, 30 bp, Homo sapiens
  chr1:22447139-22447169
  hypo
tcctcttaggaattacgcggtactgggctg

SEQ ID NO: 136398 - DNA, 158 bp, Homo sapiens; identical to SEQ ID NO: 14306
  chr1:22465798-22465956
  hypo

SEQ ID NO: 136399 - DNA, 80 bp, Homo sapiens
  chr1:22498373-22498453
  hypo
ccctgacctcgtgatcctcccgccttggcctcccaaagtgggaatcttatttttaaacgttgcctcgacttttaaaagag

SEQ ID NO: 136400 - DNA, 180 bp, Homo sapiens
  chr1:22498767-22498947
  hypo
ggagctatggacagaacggagagagtgggggccagcggcgctgctgccttcagacaccggttgatgaaccgtcccatgtggtcctgcccagggagtggagcccagcgcacaaggcctggcaggttcagacttgggttttcaccaaatgccctactggccctggggcgctggcttggccga

SEQ ID NO: 136401 - DNA, 30 bp, Homo sapiens
  chr1:22565546-22565576
  hypo
gatgacagacccactcgcatgctcactagg

SEQ ID NO: 136402 - DNA, 188 bp, Homo sapiens
  chr1:22566064-22566252
  hypo
tgccagcacagtggccgctccctctaccctccagcctatcggagggcagcctatgccaggctggggatgccagcctcacattctgggagtgtcagagaagcccgaggaggggcacggtgggcaggcccgggccaggcccttctctctgatttcgaatctcagcatcccagctgcgtgacctcaggcga

SEQ ID NO: 136403 - DNA, 31 bp, Homo sapiens
  chr1:22580524-22580555
  hypo
ggggacaggctcagtgcgcggaattcacagc

SEQ ID NO: 136404 - DNA, 219 bp, Homo sapiens; identical to SEQ ID NO: 59617
  chr1:22584477-22584696
  hypo

SEQ ID NO: 136405 - DNA, 30 bp, Homo sapiens; identical to SEQ ID NO: 35216
  chr1:22587712-22587742
  hypo

SEQ ID NO: 136406 - DNA, 665 bp, Homo sapiens
  chr1:22777189-22777854
  hypo
gtaaatatgatcgaccgggagacagcaacaatgcaagtgacagttctgcccagtagattgaatttgtgatgtaaaacggtgatggggtgagtcagtcagccagagacagctctcagaacgactgaatattgacattgcagatggaaaaggtataaccacagaggaagctggacattgcactaagatggctggatttgggcacgtaactgtcagggacagaaaaagtggctgcatgtcagtgacagggtgactgtgttcagtgggccagcgcggaggtgactcagtttgttactgctggatctgatttaaatgtttgtgtaaggaagggtggcaaggggacgcttcaacagggaacgcatagtgtgtgagaaggaaaatgagcaaaagaaaagctaggactaaatcccaaagcccctaaatcccaaaattgggaggtgcgagaggcaggatcaggatgcctccaggatgccttcagcccactgcgccccaccagcgccaagcctgtcccacaaagagtgcgggctggggacgcggctcaggtcgcctctccgcctcgcacgtgaatgtgttgttttggaaaaacgaagccttttgtgttcacttccttgccctcctttgaaacaaaatcctaatcctagagctgccggagcgagactgcggagctc

SEQ ID NO: 136407 - DNA, 28 bp, Homo sapiens
  chr1:22796318-22796346
  hypo
tgtgcccggccccaccttatagttctag

SEQ ID NO: 136408 - DNA, 30 bp, Homo sapiens
  chr1:22799666-22799696
  hypo
ctaggtcacccggagcgtattaaaaatgaa

SEQ ID NO: 136409 - DNA, 30 bp, Homo sapiens
  chr1:22817246-22817276
  hypo
attcagtgcagtaccgtactgggccattct

SEQ ID NO: 136410 - DNA, 39 bp, Homo sapiens; identical to SEQ ID NO: 59622
  chr1:22823350-22823389
  hypo

SEQ ID NO: 136411 - DNA, 30 bp, Homo sapiens
  chr1:22835202-22835232
  hypo
gccgatgctttcttccgggcaggtaagtta

SEQ ID NO: 136412 - DNA, 30 bp, Homo sapiens
  chr1:22837082-22837112
  hypo
cattctgaaagaggacgacggctttgaaat

SEQ ID NO: 136413 - DNA, 30 bp, Homo sapiens; identical to SEQ ID NO: 14309
  chr1:22838399-22838429
  hypo

SEQ ID NO: 136414 - DNA, 135 bp, Homo sapiens
  chr1:22852707-22852842
  hypo
cagagccggtggccccgacagagcaggtgatcactttggaggagacccagcttgccgggtcgcaggtgtttgtgacgttgccagattctcaggcatctcaggccagctctgagctcgtggcggtgactgtggagg

SEQ ID NO: 136415 - DNA, 30 bp, Homo sapiens
  chr1:22853820-22853850
  hypo
ccgtggctctgctgccgcccactccctgcc

SEQ ID NO: 136416 - DNA, 79 bp, Homo sapiens
  chr1:22854344-22854423
  hypo
ctgactggcatctgccggctttgtgcaggcagccccgacggtttccacagcgagcgccagctccggccagcctgggaca

SEQ ID NO: 136417 - DNA, 176 bp, Homo sapiens; identical to SEQ ID NO: 59625
  chr1:22902926-22903102
  hypo

SEQ ID NO: 136418 - DNA, 30 bp, Homo sapiens; identical to SEQ ID NO: 14310
  chr1:22903391-22903421
  hypo

SEQ ID NO: 136419 - DNA, 198 bp, Homo sapiens; identical to SEQ ID NO: 59627
  chr1:22927345-22927543
  hypo

SEQ ID NO: 136420 - DNA, 57 bp, Homo sapiens; identical to SEQ ID NO: 59628
  chr1:22927883-22927940
  hypo

SEQ ID NO: 136421 - DNA, 30 bp, Homo sapiens; identical to SEQ ID NO: 35220
  chr1:22953268-22953298
  hypo

SEQ ID NO: 136422 - DNA, 30 bp, Homo sapiens; identical to SEQ ID NO: 35221
  chr1:22999431-22999461
  hypo

SEQ ID NO: 136423 - DNA, 107 bp, Homo sapiens; identical to SEQ ID NO: 59631
  chr1:23021934-23022041
  hypo

SEQ ID NO: 136424 - DNA, 575 bp, Homo sapiens; identical to SEQ ID NO: 102778
  chr1:23036965-23037540
  hypo

SEQ ID NO: 136425 - DNA, 763 bp, Homo sapiens; identical to SEQ ID NO: 102779
  chr1:23037595-23038358
  hypo

SEQ ID NO: 136426 - DNA, 99 bp, Homo sapiens; identical to SEQ ID NO: 59634
  chr1:23058328-23058427
  hypo

SEQ ID NO: 136427 - DNA, 134 bp, Homo sapiens; identical to SEQ ID NO: 59635
  chr1:23063030-23063164
  hypo

SEQ ID NO: 136428 - DNA, 34 bp, Homo sapiens; identical to SEQ ID NO: 59636
  chr1:23063498-23063532
  hypo

SEQ ID NO: 136429 - DNA, 86 bp, Homo sapiens; identical to SEQ ID NO: 14316
  chr1:23091395-23091481
  hypo

SEQ ID NO: 136430 - DNA, 387 bp, Homo sapiens
  chr1:23110980-23111367
  hypo
accaagtttatccggcgccgtggcgcccaccgcatccacgtggagatgaagttttcggtgcgtgactgcagcagcatccccagcgtgcctggctcctgcaaggagaccttcaacctctattactatgaggctgactttgactcggccaccaagaccttccccaactggatggagaatccatgggtgaaggtggataccattgcagccgacgagagcttctcccaggtggacctgggtggccgcgtcatgaaaatcaacaccgaggtgcggagcttcggacctgtgtcccgcagcggcttctacctggccttccaggactatggcggctgcatgtccctcatcgccgtgcgtgtcttctaccgcaagtgcccccgcatcatccagaat

SEQ ID NO: 136431 - DNA, 215 bp, Homo sapiens; identical to SEQ ID NO: 59639
  chr1:23162008-23162223
  hypo

SEQ ID NO: 136432 - DNA, 133 bp, Homo sapiens
  chr1:23168729-23168862
  hypo
ccagctcactgattgcgagtccttgcagagaggcggtgctgaaatcatgaaatattccaaaggaaatacgtttattcctttgcagaaggataacacagcatctcactcgtcactacctcgcattcgcgtgggg

SEQ ID NO: 136433 - DNA, 31 bp, Homo sapiens; identical to SEQ ID NO: 14318
  chr1:23189581-23189612
  hypo

SEQ ID NO: 136434 - DNA, 344 bp, Homo sapiens; identical to SEQ ID NO: 59641
  chr1:23191505-23191849
  hypo

SEQ ID NO: 136435 - DNA, 212 bp, Homo sapiens; identical to SEQ ID NO: 14320
  chr1:23201491-23201703
  hypo

SEQ ID NO: 136436 - DNA, 98 bp, Homo sapiens
  chr1:23205284-23205382
  hypo
gggactggatgggagcgtcttgacctgggcactgtgcgggtctaggcatgaagcagtaggtgagcgagcacacctggcagcagcgcaatccaaatact

SEQ ID NO: 136437 - DNA, 180 bp, Homo sapiens; identical to SEQ ID NO: 59643
  chr1:23208895-23209075
  hypo

SEQ ID NO: 136438 - DNA, 80 bp, Homo sapiens; identical to SEQ ID NO: 59644
  chr1:23270401-23270481
  hypo

SEQ ID NO: 136439 - DNA, 30 bp, Homo sapiens; identical to SEQ ID NO: 102780
  chr1:23279892-23279922
  hypo

SEQ ID NO: 136440 - DNA, 48 bp, Homo sapiens; identical to SEQ ID NO: 102781
  chr1:23280131-23280179
  hypo

SEQ ID NO: 136441 - DNA, 169 bp, Homo sapiens; identical to SEQ ID NO: 102782
  chr1:23280211-23280380
  hypo

SEQ ID NO: 136442 - DNA, 182 bp, Homo sapiens; identical to SEQ ID NO: 102784
  chr1:23346188-23346370
  hypo

SEQ ID NO: 136443 - DNA, 30 bp, Homo sapiens; identical to SEQ ID NO: 35227
  chr1:23347437-23347467
  hypo

SEQ ID NO: 136444 - DNA, 189 bp, Homo sapiens; identical to SEQ ID NO: 14322
  chr1:23411431-23411620
  hypo

SEQ ID NO: 136445 - DNA, 30 bp, Homo sapiens; identical to SEQ ID NO: 14323
  chr1:23418390-23418420
  hypo

SEQ ID NO: 136446 - DNA, 37 bp, Homo sapiens; identical to SEQ ID NO: 14324
  chr1:23440074-23440111
  hypo

SEQ ID NO: 136447 - DNA, 31 bp, Homo sapiens; identical to SEQ ID NO: 59650
  chr1:23449686-23449717
  hypo

SEQ ID NO: 136448 - DNA, 31 bp, Homo sapiens; identical to SEQ ID NO: 59651
  chr1:23479365-23479396
  hypo

SEQ ID NO: 136449 - DNA, 30 bp, Homo sapiens; identical to SEQ ID NO: 59652
  chr1:23501978-23502008
  hypo

SEQ ID NO: 136450 - DNA, 30 bp, Homo sapiens; identical to SEQ ID NO: 59653
  chr1:23520068-23520098
  hypo

SEQ ID NO: 136451 - DNA, 149 bp, Homo sapiens; identical to SEQ ID NO: 35230
  chr1:23543644-23543793
  hypo

SEQ ID NO: 136452 - DNA, 83 bp, Homo sapiens
  chr1:23566832-23566915
  hypo
ataaatttttctttatggcaacgacactgttaacaaagccaaaataatagattagggacaaatttttccacataaaacaaagg

SEQ ID NO: 136453 - DNA, 121 bp, Homo sapiens; identical to SEQ ID NO: 59656
  chr1:23567754-23567875
  hypo

SEQ ID NO: 136454 - DNA, 21 bp, Homo sapiens
  chr1:23596387-23596408
  hypo
ttttttttttaagcaaagtct

SEQ ID NO: 136455 - DNA, 215 bp, Homo sapiens; identical to SEQ ID NO: 59658
  chr1:23693472-23693687
  hypo

SEQ ID NO: 136456 - DNA, 202 bp, Homo sapiens
  chr1:23693909-23694111
  hypo
tatctggcacttgcatcgctccatacctttactcataatgttcctcttttcctggaatattcttctcacactagagaaattctactactctttaaggtcccgctgcagtactaactgttcttcaatgccccctacccctctgcacggctccactccccttggatgccccagatagacttaatcacgccgacttcttgggagt

SEQ ID NO: 136457 - DNA, 138 bp, Homo sapiens
  chr1:23698582-23698720
  hypo
aggggggaggcttcacggaggaggtgacgtctgagctggtaagactgtaggagtttggaggtggagaaggtgggagggaaagcattccagtcttcaagaacagcatgtgcgaaggcacggaggcgtgaaaggccagag

SEQ ID NO: 136458 - DNA, 29 bp, Homo sapiens
  chr1:23701190-23701219
  hypo
tctcttcagacggacgcgcgtgacagggc

SEQ ID NO: 136459 - DNA, 31 bp, Homo sapiens; identical to SEQ ID NO: 14326
  chr1:23705731-23705762
  hypo

SEQ ID NO: 136460 - DNA, 20 bp, Homo sapiens
  chr1:23714649-23714669
  hypo
aaggagggtggctgacgcga

SEQ ID NO: 136461 - DNA, 139 bp, Homo sapiens
  chr1:23762543-23762682
  hypo
ctcagagcatggaccgtgtctgcccagctgatccctggggccctcccacaggagatacagctctctttttctccagaaccatgtcctgaagacgtctagatctgaggctcccctctccccaggctttttttttagacag

SEQ ID NO: 136462 - DNA, 79 bp, Homo sapiens
  chr1:23762921-23763000
  hypo
ctgggattacaggcgtgagccactgcgcccagcctccccagacttctgatccaagacttttctacgaccctggacactg

SEQ ID NO: 136463 - DNA, 30 bp, Homo sapiens
  chr1:23763944-23763974
  hypo
gaaagtggtacgtccggttgtctgtcggga

SEQ ID NO: 136464 - DNA, 204 bp, Homo sapiens; identical to SEQ ID NO: 59662
  chr1:23768672-23768876
  hypo

SEQ ID NO: 136465 - DNA, 198 bp, Homo sapiens; identical to SEQ ID NO: 102802
  chr1:23857852-23858050
  hypo

SEQ ID NO: 136466 - DNA, 30 bp, Homo sapiens; identical to SEQ ID NO: 217
  chr1:23865146-23865176
  hypo

SEQ ID NO: 136467 - DNA, 26 bp, Homo sapiens
  chr1:23927427-23927453
  hypo
caagccaggcacagtggctcacgcct

SEQ ID NO: 136468 - DNA, 102 bp, Homo sapiens; identical to SEQ ID NO: 14331
  chr1:23954417-23954519
  hypo

SEQ ID NO: 136469 - DNA, 144 bp, Homo sapiens; identical to SEQ ID NO: 14332
  chr1:23963132-23963276
  hypo

SEQ ID NO: 136470 - DNA, 35 bp, Homo sapiens
  chr1:24016635-24016670
  hypo
cctggcctggttggcggggccggggtcgggtgtgg

SEQ ID NO: 136471 - DNA, 89 bp, Homo sapiens
  chr1:24017559-24017648
  hypo
tgcctgtcttcaagctcgggactcttaaaccaccactcctttccgtttgtataaattctatttgtgcccggagtggtggctcacgcctg

SEQ ID NO: 136472 - DNA, 29 bp, Homo sapiens
  chr1:24017887-24017916
  hypo
acacagcgaggctccgtctcaaaaaataa

SEQ ID NO: 136473 - DNA, 30 bp, Homo sapiens; identical to SEQ ID NO: 14333
  chr1:24086205-24086235
  hypo

SEQ ID NO: 136474 - DNA, 106 bp, Homo sapiens; identical to SEQ ID NO: 59670
  chr1:24110631-24110737
  hypo

SEQ ID NO: 136475 - DNA, 46 bp, Homo sapiens; identical to SEQ ID NO: 14335
  chr1:24111036-24111082
  hypo

SEQ ID NO: 136476 - DNA, 214 bp, Homo sapiens
  chr1:24119110-24119324
  hypo
tggttttgctcttgaccgccgccccgatgtatgcaggcccccgccgtggagccgtgtggtgtatgtgtggtaacaccatgtctgtgcccctgctcaccgatgctgccaccgtgtctggagctgagcgggaaacggccgcggtaagggtcccctttcacccacggccagacactgtgggagcagctggaggaccggctggagggggtgtgggaaa

SEQ ID NO: 136477 - DNA, 381 bp, Homo sapiens; identical to SEQ ID NO: 219
  chr1:24126328-24126709
  hypo

SEQ ID NO: 136478 - DNA, 39 bp, Homo sapiens
  chr1:24153111-24153150
  hypo
gctgggattacaggcgagagccaccgcccccggccagag

SEQ ID NO: 136479 - DNA, 30 bp, Homo sapiens; identical to SEQ ID NO: 59674
  chr1:24201756-24201786
  hypo

SEQ ID NO: 136480 - DNA, 31 bp, Homo sapiens; identical to SEQ ID NO: 59675
  chr1:24228243-24228274
  hypo

SEQ ID NO: 136481 - DNA, 268 bp, Homo sapiens; identical to SEQ ID NO: 102819
  chr1:24229166-24229434
  hypo

SEQ ID NO: 136482 - DNA, 18 bp, Homo sapiens
  chr1:24246048-24246066
  hypo
tatttattttttaagacg

SEQ ID NO: 136483 - DNA, 30 bp, Homo sapiens; identical to SEQ ID NO: 220
  chr1:24377790-24377820
  hypo

SEQ ID NO: 136484 - DNA, 269 bp, Homo sapiens; identical to SEQ ID NO: 59677
  chr1:24424242-24424511
  hypo

SEQ ID NO: 136485 - DNA, 206 bp, Homo sapiens; identical to SEQ ID NO: 59678
  chr1:24426173-24426379
  hypo

SEQ ID NO: 136486 - DNA, 262 bp, Homo sapiens; identical to SEQ ID NO: 59679
  chr1:24434923-24435185
  hypo

SEQ ID NO: 136487 - DNA, 195 bp, Homo sapiens
  chr1:24611878-24612073
  hypo
tgtctccggagcacacgcaggctgctacatgcctaaggagatgtggcagctgctccccaaacgcagctacaccccgacctccatcttgagagagaggagagcctgtggtgtacagcgtggccccagcaggcacctgtgctgatgggaaaacacacagacaggccaacgaatacacgtacgcgcacgcacgtacag

SEQ ID NO: 136488 - DNA, 53 bp, Homo sapiens
  chr1:24612362-24612415
  hypo
ctgtgctccaggcaccgtgtaaggcttttgggatacagcgatgcacagaggag

SEQ ID NO: 136489 - DNA, 106 bp, Homo sapiens
  chr1:24620324-24620430
  hypo
tgtggaaatggcaaacgctgctttctgcggctcctctaagggccctgctggggccctccccaaaccctcccacctgggtgcccccagaagccggcactcccagtcc

SEQ ID NO: 136490 - DNA, 30 bp, Homo sapiens; identical to SEQ ID NO: 14340
  chr1:24627473-24627503
  hypo

SEQ ID NO: 136491 - DNA, 30 bp, Homo sapiens; identical to SEQ ID NO: 59683
  chr1:24681517-24681547
  hypo

SEQ ID NO: 136492 - DNA, 33 bp, Homo sapiens; identical to SEQ ID NO: 14341
  chr1:24683005-24683038
  hypo

SEQ ID NO: 136493 - DNA, 143 bp, Homo sapiens
  chr1:24701523-24701666
  hypo
gggcacacaagaaagtcgtatcatttaagattgtgatcacatttgcaagcattcccttgtctcaactttcctgaactgaccagaaattaagaattctggccaactcacgaaatacatttgagagtgcgcgatgtgttcagaac

SEQ ID NO: 136494 - DNA, 59 bp, Homo sapiens
  chr1:24702010-24702069
  hypo
gttaattactggacacggagagttggggagaggagccaggttgccggagagaaggtaat

SEQ ID NO: 136495 - DNA, 30 bp, Homo sapiens; identical to SEQ ID NO: 59687
  chr1:24705672-24705702
  hypo

SEQ ID NO: 136496 - DNA, 89 bp, Homo sapiens; identical to SEQ ID NO: 59688
  chr1:24706235-24706324
  hypo

SEQ ID NO: 136497 - DNA, 30 bp, Homo sapiens
  chr1:24708380-24708410
  hypo
gggaatgaggtaaaacgcagagatctccta

SEQ ID NO: 136498 - DNA, 34 bp, Homo sapiens
  chr1:24708665-24708699
  hypo
catttggaaagttaccgcacgcaaagccttgtag

SEQ ID NO: 136499 - DNA, 400 bp, Homo sapiens
  chr1:24712878-24713278
  hypo
aaaagagagtcctccaggcagcggcagctggagctggccagcggcagcttgtgaggacaactgttaaaaattccaaaatgttgctgctggtggcttgaagttggccacggtggcagtatttatgtcacaaaaacgggcagatgctacatctcagcacttttcttcgaggagggtaaatggtggttgaccagcacaccaccgccttcgtgcaacgcccaagtaggtctctgggagggaaatgtcaagcgttctcctgtgacttctagaggtgggcggatgccaccctcagagaggcctttcgcctgtgcaaaaacagttcctgcgactgacattctgtgacttggatgaatttagcctctcagagcaaatcccagagaacgagaatccaagttgtgactgg

SEQ ID NO: 136500 - DNA, 31 bp, Homo sapiens
  chr1:24810170-24810201
  hypo
aatgtctaatttggccgggcacggtggctta

SEQ ID NO: 136501 - DNA, 30 bp, Homo sapiens
  chr1:24831635-24831665
  hypo
gggcttcgtgatagccgttcagaacttcgc

SEQ ID NO: 136502 - DNA, 31 bp, Homo sapiens; identical to SEQ ID NO: 59690
  chr1:24877032-24877063
  hypo

SEQ ID NO: 136503 - DNA, 44 bp, Homo sapiens
  chr1:24945573-24945617
  hypo
cgctctgcaggagagaaaagcttcggtttcgcagaagcccaaag

SEQ ID NO: 136504 - DNA, 30 bp, Homo sapiens; identical to SEQ ID NO: 59691
  chr1:24975449-24975479
  hypo

SEQ ID NO: 136505 - DNA, 36 bp, Homo sapiens; identical to SEQ ID NO: 59692
  chr1:24976034-24976070
  hypo

SEQ ID NO: 136506 - DNA, 288 bp, Homo sapiens; identical to SEQ ID NO: 59693
  chr1:24976290-24976578
  hypo

SEQ ID NO: 136507 - DNA, 136 bp, Homo sapiens
  chr1:25055530-25055666
  hypo
attacaggcgtgagccaccgtgcctggcaagttatctttcttacagaatgttcttcaactcaggtgaatctgacgtctcctcatgaacacattcagctttgcattctcagctggaacattacgaaagtgatatagt

SEQ ID NO: 136508 - DNA, 258 bp, Homo sapiens; identical to SEQ ID NO: 14344
  chr1:25070656-25070914
  hypo

SEQ ID NO: 136509 - DNA, 151 bp, Homo sapiens
  chr1:25072623-25072774
  hypo
ggaaactttaattttcgatgcaatcttaaacaaatttaccaaagagcaggtgctcttggaccttcggaaaagaccgagattcccaacttgtgtttttctgtcttgggcatttactggctttctcgtttctcaagcgcggagtgttctgtat

SEQ ID NO: 136510 - DNA, 40 bp, Homo sapiens; identical to SEQ ID NO: 14345
  chr1:25115717-25115757
  hypo

SEQ ID NO: 136511 - DNA, 30 bp, Homo sapiens; identical to SEQ ID NO: 59696
  chr1:25152959-25152989
  hypo

SEQ ID NO: 136512 - DNA, 43 bp, Homo sapiens; identical to SEQ ID NO: 59697
  chr1:25200670-25200713
  hypo

SEQ ID NO: 136513 - DNA, 640 bp, Homo sapiens
  chr1:25228567-25229207
  hypo
gttgttagggtccccgcctccagcgggaggagtccaccagggcggtcagtagggccgccacacggcctcatccatgcggcctggcgtgctcagggccgtgggtgagttgctgtggctgccgtcggcctccacgccatcactctggccgcccaggctggggttcatgaggttgccggcggcgacagaggcagcgctgctggtgcaagaggccagcatgcgggtaggtgagcggtcgcccccactgctgctgccggccaccatggagaactggtaggagccagaggatgtcccgtagtagaggtggtagggggacgggttggcctggaagggcccgctctggttctgcggggcccccgggtagggtggcgggaggtaggtatggtggaagcggctggtggccggcatgcccgccacgctgaggctgctgatgctcgtgcccgagggcgtggcgctgtaggggaaggcagctgacatggccccgggataatgcatcctggggtctgggaagcggctctccgtgagggttggcagcgtggggaaggagcggtcaaactggcgggggtcggagaatgggttcagttccgaggtgcctggaggacagcagggaagaggtcagttccagctcgagacaaccccagga

SEQ ID NO: 136514 - DNA, 32 bp, Homo sapiens; identical to SEQ ID NO: 14347
  chr1:25230201-25230233
  hypo

SEQ ID NO: 136515 - DNA, 30 bp, Homo sapiens
  chr1:25232347-25232377
  hypo
tgggcgtgagcacagcgtgcagggctcctt

SEQ ID NO: 136516 - DNA, 43 bp, Homo sapiens; identical to SEQ ID NO: 59701
  chr1:25247523-25247566
  hypo

SEQ ID NO: 136517 - DNA, 334 bp, Homo sapiens; identical to SEQ ID NO: 35258
  chr1:25255276-25255610
  hypo

SEQ ID NO: 136518 - DNA, 903 bp, Homo sapiens; identical to SEQ ID NO: 226
  chr1:25255920-25256823
  hypo

SEQ ID NO: 136519 - DNA, 118 bp, Homo sapiens; identical to SEQ ID NO: 102838
  chr1:25257156-25257274
  hypo

SEQ ID NO: 136520 - DNA, 231 bp, Homo sapiens
  chr1:25269412-25269643
  hypo
actgtggagccagcccgtgggcaccgctcctgagaggtcacaggctggaaatgtgggcagctgggtagggtctaggagggggcagcggctcaggactgggcgggggtccggagcggaaggcgcccagccctgattggaacaaggtggcagcaccgggagccgagccgggtgtcattgatcttgcccggtgttccagccaccaggcgggaccagcgccgggcagactgccgg

SEQ ID NO: 136521 - DNA, 134 bp, Homo sapiens; identical to SEQ ID NO: 14352
  chr1:25396319-25396453
  hypo

SEQ ID NO: 136522 - DNA, 192 bp, Homo sapiens; identical to SEQ ID NO: 59706
  chr1:25397930-25398122
  hypo

SEQ ID NO: 136523 - DNA, 30 bp, Homo sapiens
  chr1:25509159-25509189
  hypo
ctccgaggcgaggtgcgagtcatctatagg

SEQ ID NO: 136524 - DNA, 30 bp, Homo sapiens
  chr1:25509425-25509455
  hypo
acctggtgtaaaatacggtcgtctgccaac

SEQ ID NO: 136525 - DNA, 193 bp, Homo sapiens; identical to SEQ ID NO: 59707
  chr1:25510192-25510385
  hypo

SEQ ID NO: 136526 - DNA, 44 bp, Homo sapiens; identical to SEQ ID NO: 59708
  chr1:25565899-25565943
  hypo

SEQ ID NO: 136527 - DNA, 30 bp, Homo sapiens
  chr1:25698676-25698706
  hypo
tctcagcagcccaagcgttttgtgttcttg

SEQ ID NO: 136528 - DNA, 186 bp, Homo sapiens; identical to SEQ ID NO: 59709
  chr1:25718493-25718679
  hypo

SEQ ID NO: 136529 - DNA, 30 bp, Homo sapiens
  chr1:25770140-25770170
  hypo
aattattaaaaagtacgtattcaacaggct

SEQ ID NO: 136530 - DNA, 62 bp, Homo sapiens
  chr1:25825874-25825936
  hypo
ggcagtgtttgtggacgagagactgtaacgatggctaataaaagctgcgggtctaggttttt

SEQ ID NO: 136531 - DNA, 30 bp, Homo sapiens; identical to SEQ ID NO: 14353
  chr1:25828413-25828443
  hypo

SEQ ID NO: 136532 - DNA, 53 bp, Homo sapiens
  chr1:25853936-25853989
  hypo
actcactcctgtgcacgatggctgtgtgggaccctgcccgccgagggccaggc

SEQ ID NO: 136533 - DNA, 180 bp, Homo sapiens
  chr1:25854469-25854649
  hypo
ccaagcactgccagccgcccactagagtttttgtgttgtcacttcttgtggactggtctgtctccccggccttggaaccctttgagggcagggcgaagccgggctacctctgctcctctctgcagccccaggccctggcgggcaggcagcatcaggtgtccagcccgtgcgctcttgccg

SEQ ID NO: 136534 - DNA, 202 bp, Homo sapiens
  chr1:25856753-25856955
  hypo
ggtggaggctgcacccgtgatcaggttggatcccgggactgcagggttcagacgatctcatgtgaagcgcctctgaacacctctgtcacgagagccgctgctcacttgagacggggggacaaggctgaggctgggggagtgctcaggtcccagccattcccagagccagcggtctcccctccccagccgcaaaaggtagttc

SEQ ID NO: 136535 - DNA, 30 bp, Homo sapiens; identical to SEQ ID NO: 14354
  chr1:25857404-25857434
  hypo

SEQ ID NO: 136536 - DNA, 111 bp, Homo sapiens; identical to SEQ ID NO: 59713
  chr1:25862318-25862429
  hypo

SEQ ID NO: 136537 - DNA, 91 bp, Homo sapiens
  chr1:25869053-25869144
  hypo
cagcctgggagctacgaggatgagtaaagtgcctggctggacttgctaaaggcaaatttttatataccgaccctgcgcctaacaagggtct

SEQ ID NO: 136538 - DNA, 169 bp, Homo sapiens; identical to SEQ ID NO: 35271
  chr1:25870617-25870786
  hypo

SEQ ID NO: 136539 - DNA, 30 bp, Homo sapiens
  chr1:25882719-25882749
  hypo
cacctctgggctaccggcccctccccgatt

SEQ ID NO: 136540 - DNA, 264 bp, Homo sapiens
  chr1:25889406-25889670
  hypo
ggattaactgacatccgaaaggtttctttcctcccggctggaaacctgaaactgccccttgaggttggccaccgctaatcacccctgcccggtgattgctggggacagagtgctggggtctgaggctccaacatgttgtgccttggtcctgcagagaaagagaagagggacaaagccagccaagagggaggggacgtcctgggggcccgccaagactgcaccccctccttgaagagctgtgagtcctgacggggaagggggatt

SEQ ID NO: 136541 - DNA, 159 bp, Homo sapiens; identical to SEQ ID NO: 14356
  chr1:25890393-25890552
  hypo

SEQ ID NO: 136542 - DNA, 30 bp, Homo sapiens
  chr1:25895396-25895426
  hypo
gtagactggcggcagcgtccggcggctcct

SEQ ID NO: 136543 - DNA, 77 bp, Homo sapiens
  chr1:25895703-25895780
  hypo
acgtgtccacgtgggcgttttccacagagaggatgtccattatttccatcactttttggatccgcaacactttatca

SEQ ID NO: 136544 - DNA, 88 bp, Homo sapiens
  chr1:25896263-25896351
  hypo
gatggcattagctcccgttactgctgaggacactgggctgggagaggaaggcagctgtgcttcaagtgctgggcggggccacagctga

SEQ ID NO: 136545 - DNA, 30 bp, Homo sapiens; identical to SEQ ID NO: 14357
  chr1:25912955-25912985
  hypo

SEQ ID NO: 136546 - DNA, 272 bp, Homo sapiens
  chr1:25919182-25919454
  hypo
ataaataagtttgtcctgtttaccgctctatatccagcacctagaacagcgcctggcacctaagcaggcatttggtaaaactgtgccaaatgagtgagtgcggacagcgtcctagtccttcaccagccccctctcagcagcgcaggcaactggcccagctgtgtctcccgcacgggccggcgggcgctgtgatggaggcagtgcaggatgccgtgtgagcccgaggaaggacttgcagccctgctgaggggacgaggcgaggcttcttggat

SEQ ID NO: 136547 - DNA, 203 bp, Homo sapiens; identical to SEQ ID NO: 59722
  chr1:25942578-25942781
  hypo

SEQ ID NO: 136548 - DNA, 30 bp, Homo sapiens
  chr1:26073987-26074017
  hypo
agaccgggaggggccgcatccaagcacaca

SEQ ID NO: 136549 - DNA, 77 bp, Homo sapiens
  chr1:26084117-26084194
  hypo
ttacggatgcaggcacggaggcatgcgaggattaagtggtttgcccgagggctccagctgagcgacacttgaacctg

SEQ ID NO: 136550 - DNA, 232 bp, Homo sapiens
  chr1:26086990-26087222
  hypo
aattggcccaaattctagaagcgcccgcaccctccaggggagctaatttggcctgcttcactgctcaccaccaggacagtcgagagtaacgcaggtacaagcacattcctgtccccgtaatggacttcgttaacataaatggatatgaaatctgacgtggcaaagccaagtgctgtcacctggaaaggaaggtctgcctgcagaaaggtggctctcccgcactcccggcccc

SEQ ID NO: 136551 - DNA, 31 bp, Homo sapiens; identical to SEQ ID NO: 59724
  chr1:26104541-26104572
  hypo

SEQ ID NO: 136552 - DNA, 30 bp, Homo sapiens; identical to SEQ ID NO: 14359
  chr1:26107502-26107532
  hypo

SEQ ID NO: 136553 - DNA, 215 bp, Homo sapiens; identical to SEQ ID NO: 14360
  chr1:26121477-26121692
  hypo

SEQ ID NO: 136554 - DNA, 30 bp, Homo sapiens; identical to SEQ ID NO: 35273
  chr1:26125946-26125976
  hypo

SEQ ID NO: 136555 - DNA, 31 bp, Homo sapiens; identical to SEQ ID NO: 14361
  chr1:26141989-26142020
  hypo

SEQ ID NO: 136556 - DNA, 30 bp, Homo sapiens
  chr1:26183246-26183276
  hypo
aatattccctttctcgctctcctgaactct

SEQ ID NO: 136557 - DNA, 22 bp, Homo sapiens
  chr1:26214470-26214492
  hypo
cggcccttgttgttgttgttgt

SEQ ID NO: 136558 - DNA, 30 bp, Homo sapiens; identical to SEQ ID NO: 59730
  chr1:26218488-26218518
  hypo

SEQ ID NO: 136559 - DNA, 30 bp, Homo sapiens; identical to SEQ ID NO: 14362
  chr1:26226634-26226664
  hypo

SEQ ID NO: 136560 - DNA, 33 bp, Homo sapiens
  chr1:26336890-26336923
  hypo
tttttattttttgagtcggagtctcgttctgtt

SEQ ID NO: 136561 - DNA, 93 bp, Homo sapiens
  chr1:26337162-26337255
  hypo
aggcgtgagccaccgtgcccggcagtggcgactttctttgtttggctaaagccttggcgttagcggggatggtgtcagcgaggtaatggtatg

SEQ ID NO: 136562 - DNA, 30 bp, Homo sapiens; identical to SEQ ID NO: 14363
  chr1:26376142-26376172
  hypo

SEQ ID NO: 136563 - DNA, 30 bp, Homo sapiens
  chr1:26443994-26444024
  hypo
acctataatcctagccgaggcaggcagatt

SEQ ID NO: 136564 - DNA, 30 bp, Homo sapiens
  chr1:26467268-26467298
  hypo
tgttcagcttttctgcgctgtaatatacag

SEQ ID NO: 136565 - DNA, 30 bp, Homo sapiens; identical to SEQ ID NO: 14364
  chr1:26467517-26467547
  hypo

SEQ ID NO: 136566 - DNA, 30 bp, Homo sapiens; identical to SEQ ID NO: 59735
  chr1:26467786-26467816
  hypo

SEQ ID NO: 136567 - DNA, 30 bp, Homo sapiens
  chr1:26491268-26491298
  hypo
gagggacgctggaggcgtgcgcaggtctgg

SEQ ID NO: 136568 - DNA, 31 bp, Homo sapiens; identical to SEQ ID NO: 14366
  chr1:26502463-26502494
  hypo

SEQ ID NO: 136569 - DNA, 29 bp, Homo sapiens
  chr1:26504429-26504458
  hypo
tctggacgacagagcgagattcagctcaa

SEQ ID NO: 136570 - DNA, 121 bp, Homo sapiens
  chr1:26634349-26634470
  hypo
tcaagccatccgcccatctctgcctcccaaagtggacagcattctttatatgcaaattggaagctaaagagagctactactactgagtgccaagtaccagatggtaacatgaaatttacag

SEQ ID NO: 136571 - DNA, 30 bp, Homo sapiens; identical to SEQ ID NO: 14368
  chr1:26661671-26661701
  hypo

SEQ ID NO: 136572 - DNA, 842 bp, Homo sapiens; identical to SEQ ID NO: 35292
  chr1:26662517-26663359
  hypo

SEQ ID NO: 136573 - DNA, 195 bp, Homo sapiens; identical to SEQ ID NO: 59740
  chr1:26670608-26670803
  hypo

SEQ ID NO: 136574 - DNA, 143 bp, Homo sapiens; identical to SEQ ID NO: 59741
  chr1:26678028-26678171
  hypo

SEQ ID NO: 136575 - DNA, 208 bp, Homo sapiens
  chr1:26680625-26680833
  hypo
ttcctgaggcggggccgtccggcaccctgtgatggggcgtggcccctggggaggctcccaccagccctcagattcctcagggccgcagaggtgtggagctggttgggccggttcttcaccctcctcccctggtgcttgcctgtgccccagcagggtgacagtgatgtagtagcgggtcctcctggaagagggacgcgtgtgtagggtc

SEQ ID NO: 136576 - DNA, 55 bp, Homo sapiens
  chr1:26683591-26683646
  hypo
cagaggcccctgcctcggtaccgggttcccattcccagggcgggtgagatcggag

SEQ ID NO: 136577 - DNA, 30 bp, Homo sapiens
  chr1:26684109-26684139
  hypo
gagctgtggggctctcggattctcaatact

SEQ ID NO: 136578 - DNA, 866 bp, Homo sapiens; identical to SEQ ID NO: 102877
  chr1:26735162-26736028
  hypo

SEQ ID NO: 136579 - DNA, 781 bp, Homo sapiens; identical to SEQ ID NO: 102879
  chr1:26737101-26737882
  hypo

SEQ ID NO: 136580 - DNA, 343 bp, Homo sapiens; identical to SEQ ID NO: 102880
  chr1:26737907-26738250
  hypo

SEQ ID NO: 136581 - DNA, 45 bp, Homo sapiens; identical to SEQ ID NO: 59745
  chr1:26796228-26796273
  hypo

SEQ ID NO: 136582 - DNA, 98 bp, Homo sapiens; identical to SEQ ID NO: 59746
  chr1:26807957-26808055
  hypo

SEQ ID NO: 136583 - DNA, 31 bp, Homo sapiens; identical to SEQ ID NO: 14374
  chr1:26828980-26829011
  hypo

SEQ ID NO: 136584 - DNA, 30 bp, Homo sapiens
  chr1:26848387-26848417
  hypo
gtggcaggagagcggcgaacgagggacaga

SEQ ID NO: 136585 - DNA, 107 bp, Homo sapiens; identical to SEQ ID NO: 244
  chr1:26855979-26856086
  hypo

SEQ ID NO: 136586 - DNA, 44 bp, Homo sapiens
  chr1:26874360-26874404
  hypo
tctctttaaataagtcaaggccgggcgcggtggctcacacctgt

SEQ ID NO: 136587 - DNA, 69 bp, Homo sapiens; identical to SEQ ID NO: 59749
  chr1:26885363-26885432
  hypo

SEQ ID NO: 136588 - DNA, 40 bp, Homo sapiens; identical to SEQ ID NO: 59750
  chr1:26969658-26969698
  hypo

SEQ ID NO: 136589 - DNA, 22 bp, Homo sapiens
  chr1:27016539-27016561
  hypo
ggcctcccgtattgtttttaaa

SEQ ID NO: 136590 - DNA, 51 bp, Homo sapiens; identical to SEQ ID NO: 14377
  chr1:27056296-27056347
  hypo

SEQ ID NO: 136591 - DNA, 118 bp, Homo sapiens; identical to SEQ ID NO: 14378
  chr1:27057987-27058105
  hypo

SEQ ID NO: 136592 - DNA, 24 bp, Homo sapiens
  chr1:27062068-27062092
  hypo
cacctcacccggcctgaaatccag

SEQ ID NO: 136593 - DNA, 19 bp, Homo sapiens
  chr1:27171709-27171728
  hypo
ccagccctttacatattct

SEQ ID NO: 136594 - DNA, 191 bp, Homo sapiens
  chr1:27179350-27179541
  hypo
tcccaggtaagtgagcggggtgcggaagaggggtaacagggccatgcctggccagtgatcaaagtgttcctggatatcagccgacctccccctacaccctagatgccctccgtccactaccccctggagggcatttgtcatgtgacggaattccatggagaattgttatttaatcacgtgctcattgtaga

SEQ ID NO: 136595 - DNA, 30 bp, Homo sapiens; identical to SEQ ID NO: 59756
  chr1:27180474-27180504
  hypo

SEQ ID NO: 136596 - DNA, 276 bp, Homo sapiens
  chr1:27183355-27183631
  hypo
ggacctcctgaggaccgctgctctctgcctctccaggaatggcctggggggagccaggcacccggcacctccacctgcctaacctgtggcccatctgccaccatctgtgcctacagggtctgccccccagcctgcccggcctgtgtgctctctaggacccccatagggggcaggggctggcctctttgccccattcccgctccatgccggccagagtgtagaaagccataacgcagccatcagcacaataatgtgactctacgctgatatgctccc

SEQ ID NO: 136597 - DNA, 30 bp, Homo sapiens
  chr1:27184529-27184559
  hypo
tcagcaagggcttgccgagtcccgggccca

SEQ ID NO: 136598 - DNA, 611 bp, Homo sapiens; identical to SEQ ID NO: 59758
  chr1:27189667-27190278
  hypo

SEQ ID NO: 136599 - DNA, 26 bp, Homo sapiens
  chr1:27205371-27205397
  hypo
ccaccgcacccagccttgaagtaaac

SEQ ID NO: 136600 - DNA, 30 bp, Homo sapiens; identical to SEQ ID NO: 59760
  chr1:27217550-27217580
  hypo

SEQ ID NO: 136601 - DNA, 273 bp, Homo sapiens
  chr1:27220857-27221130
  hypo
tgcagcgcttcatgccgttcccattcctcaccccggtcatcgtcctaaaaggcagggagaggtgatttgcctgagcttcctgacctcatgccccgagggagggaagctcagggcacaggaggcatgtgtggctagcctcagcgccattccttcagatttctccaagaagcagcacatatttggcccctgaccaacacgtctccagcccgataattctcaacagtttgctcctgtccccacaagcctgactcacctctgcgcgtttggccatgt

SEQ ID NO: 136602 - DNA, 30 bp, Homo sapiens; identical to SEQ ID NO: 59762
  chr1:27278277-27278307
  hypo

SEQ ID NO: 136603 - DNA, 30 bp, Homo sapiens; identical to SEQ ID NO: 59763
  chr1:27278555-27278585
  hypo

SEQ ID NO: 136604 - DNA, 126 bp, Homo sapiens; identical to SEQ ID NO: 102903
  chr1:27286496-27286622
  hypo

SEQ ID NO: 136605 - DNA, 508 bp, Homo sapiens; identical to SEQ ID NO: 102909
  chr1:27332478-27332986
  hypo

SEQ ID NO: 136606 - DNA, 18 bp, Homo sapiens
  chr1:27357747-27357765
  hypo
caccgcgtctttttaaac

SEQ ID NO: 136607 - DNA, 142 bp, Homo sapiens; identical to SEQ ID NO: 59767
  chr1:27426937-27427079
  hypo

SEQ ID NO: 136608 - DNA, 80 bp, Homo sapiens; identical to SEQ ID NO: 59768
  chr1:27427839-27427919
  hypo

SEQ ID NO: 136609 - DNA, 31 bp, Homo sapiens; identical to SEQ ID NO: 59769
  chr1:27428622-27428653
  hypo

SEQ ID NO: 136610 - DNA, 30 bp, Homo sapiens
  chr1:27440447-27440477
  hypo
ggttgtccaggaggccgatgttgttgatct

SEQ ID NO: 136611 - DNA, 17 bp, Homo sapiens
  chr1:27450472-27450489
  hypo
cccggctaattttgtat

SEQ ID NO: 136612 - DNA, 30 bp, Homo sapiens
  chr1:27470943-27470973
  hypo
ttaaacactggctggcgcctaaggcatcat

SEQ ID NO: 136613 - DNA, 169 bp, Homo sapiens
  chr1:27480388-27480557
  hypo
cctggacagcctcaaatggtgcgagatgaggcaagaagctcaccagtctggtggcggccgcagcatcggagcaaacgggacttacctatcttcatgaggcaggccagaaggatccagagggagatctcgaagggggtgcgcacgtgtgtgtagtcgatgcccaggactg

SEQ ID NO: 136614 - DNA, 20 bp, Homo sapiens
  chr1:27489634-27489654
  hypo
caccgcgcccggcctattac

SEQ ID NO: 136615 - DNA, 21 bp, Homo sapiens
  chr1:27494045-27494066
  hypo
agccaccgtgcccggctgtac

SEQ ID NO: 136616 - DNA, 30 bp, Homo sapiens
  chr1:27618825-27618855
  hypo
ggcagttggggccagcgggcccttcgtgag

SEQ ID NO: 136617 - DNA, 45 bp, Homo sapiens; identical to SEQ ID NO: 59772
  chr1:27621917-27621962
  hypo

SEQ ID NO: 136618 - DNA, 30 bp, Homo sapiens
  chr1:27626160-27626190
  hypo
gcttggaatgcagagcggtgacgttggcct

SEQ ID NO: 136619 - DNA, 69 bp, Homo sapiens
  chr1:27627839-27627908
  hypo
cctggagtgcctggacgacttcaaagggaaatttccggagcaggcccacagcagcgcttgtgatgcatt

SEQ ID NO: 136620 - DNA, 226 bp, Homo sapiens
  chr1:27628357-27628583
  hypo
cagcagagacaatagcgcagagcagtagaaatgcctcaggcttggaatgtggggcctcggttccaaatgcagctccaccacctgactgtgtggccttgaagaaagcacagcctctctacctacctgcacaaagagcacgaagccctgcccagctcccctcagtgtgctggagaatgaactgggccatcggagtgtggtctgtaaacgtgaacggtgagctcatagg

SEQ ID NO: 136621 - DNA, 31 bp, Homo sapiens; identical to SEQ ID NO: 59774
  chr1:27632598-27632629
  hypo

SEQ ID NO: 136622 - DNA, 88 bp, Homo sapiens
  chr1:27647872-27647960
  hypo
tgctaccactacctcgtgagagggccacagaatgaaaagggcaagggaggtataagacttgggtttgggccaggcgcggtggctcacg

SEQ ID NO: 136623 - DNA, 28 bp, Homo sapiens
  chr1:27648199-27648227
  hypo
agagaaaaaattccgcctcagaaaaaaa

SEQ ID NO: 136624 - DNA, 30 bp, Homo sapiens; identical to SEQ ID NO: 59777
  chr1:27679946-27679976
  hypo

SEQ ID NO: 136625 - DNA, 31 bp, Homo sapiens; identical to SEQ ID NO: 59778
  chr1:27684980-27685011
  hypo

SEQ ID NO: 136626 - DNA, 30 bp, Homo sapiens
  chr1:27688447-27688477
  hypo
ggcatggggtgccacgggcactggtctaaa

SEQ ID NO: 136627 - DNA, 103 bp, Homo sapiens; identical to SEQ ID NO: 59779
  chr1:27694478-27694581
  hypo

SEQ ID NO: 136628 - DNA, 96 bp, Homo sapiens
  chr1:27704687-27704783
  hypo
aaaagttataaaactcgcagctacatgcctggctcctggcaagcgcccatccatgggcgatgttaccgtcagggaagacttcggtgcctggggaca

SEQ ID NO: 136629 - DNA, 30 bp, Homo sapiens
  chr1:27706119-27706149
  hypo
gccccacagcacacacggcacacagagggc

SEQ ID NO: 136630 - DNA, 373 bp, Homo sapiens; identical to SEQ ID NO: 102920
  chr1:27718843-27719216
  hypo

SEQ ID NO: 136631 - DNA, 30 bp, Homo sapiens
  chr1:27742047-27742077
  hypo
tagccccgcccagcccgtagcgaaggcatt

SEQ ID NO: 136632 - DNA, 53 bp, Homo sapiens
  chr1:27750892-27750945
  hypo
tgtgcatcaatagcacggaatagtgggaaatatataggcgtgaattattcgac

SEQ ID NO: 136633 - DNA, 30 bp, Homo sapiens
  chr1:27774149-27774179
  hypo
aacactaatggattccgaacagtcacgaaa

SEQ ID NO: 136634 - DNA, 19 bp, Homo sapiens
  chr1:27782814-27782833
  hypo
agagcgagactctaaaaaa

SEQ ID NO: 136635 - DNA, 45 bp, Homo sapiens; identical to SEQ ID NO: 14389
  chr1:27798547-27798592
  hypo

SEQ ID NO: 136636 - DNA, 17 bp, Homo sapiens
  chr1:27819646-27819663
  hypo
ttttttttttggagaca

SEQ ID NO: 136637 - DNA, 77 bp, Homo sapiens
  chr1:27844442-27844519
  hypo
agccacggtgcctggccttattgcgcctattttagaaaggtgattctagccgcagtgtggagcgtgagctgtacgag

SEQ ID NO: 136638 - DNA, 209 bp, Homo sapiens
  chr1:27844780-27844989
  hypo
cacctgcctgcctcgtcgactggactctggccaagggcagggactgtgtggcactgctcactgctgtatccacaaggccctaaggcataatgcctggagcctcaatccatgatcggtagggaacgaatgaatggctaagcctgttggggcaggtgtgatagtttgagtgaaagtgacagggtctgcggtggcagcgaggagagaagaga

SEQ ID NO: 136639 - DNA, 30 bp, Homo sapiens
  chr1:27847292-27847322
  hypo
ggcctgctggggaggcggcttttggctctc

SEQ ID NO: 136640 - DNA, 27 bp, Homo sapiens
  chr1:27852857-27852884
  hypo
ggggggacggagtctcgctctgacacc

SEQ ID NO: 136641 - DNA, 77 bp, Homo sapiens; identical to SEQ ID NO: 59784
  chr1:27862695-27862772
  hypo

SEQ ID NO: 136642 - DNA, 228 bp, Homo sapiens
  chr1:27863984-27864212
  hypo
tggggccaagacgtacgctgactgagtgacagagcggggactgacctgagtctggtcagcatgtcaaggtccagctccggccttgcacaccttcagaacacctccttagaccaccctgttaccatagctacggtacccttgtcatcccgacctggctcctccagggcaggaacctatatgtggtactgctgcacacccagggctagcacgcaccggcccccagcacac

SEQ ID NO: 136643 - DNA, 35 bp, Homo sapiens; identical to SEQ ID NO: 59785
  chr1:27868418-27868453
  hypo

SEQ ID NO: 136644 - DNA, 30 bp, Homo sapiens
  chr1:27875190-27875220
  hypo
agatgtccaggatcacgttgggctcgctga

SEQ ID NO: 136645 - DNA, 915 bp, Homo sapiens; identical to SEQ ID NO: 59786
  chr1:27875529-27876444
  hypo

SEQ ID NO: 136646 - DNA, 30 bp, Homo sapiens
  chr1:27877003-27877033
  hypo
aatgggcatctcaccgggtgggaagaccac

SEQ ID NO: 136647 - DNA, 30 bp, Homo sapiens; identical to SEQ ID NO: 59787
  chr1:27878394-27878424
  hypo

SEQ ID NO: 136648 - DNA, 30 bp, Homo sapiens; identical to SEQ ID NO: 102928
  chr1:27901673-27901703
  hypo

SEQ ID NO: 136649 - DNA, 706 bp, Homo sapiens; identical to SEQ ID NO: 35331
  chr1:27901985-27902691
  hypo

SEQ ID NO: 136650 - DNA, 231 bp, Homo sapiens
  chr1:27921334-27921565
  hypo
tatgtgacagggtgccgtggggtgcaggcggagcacagaatgggtgcagggttgtgactagctgaggctgtctttgtgtacaggtgtggtatcggggtgtttggagaggtgtaggggtgtccctgggcccttaggtggctgaggaaaagtaccggagctgagactgtctgggaagcggtggggccgggccattaggactgcctgtcgaggaggtgccgggatccaggaggc

SEQ ID NO: 136651 - DNA, 96 bp, Homo sapiens; identical to SEQ ID NO: 35333
  chr1:27928760-27928856
  hypo

SEQ ID NO: 136652 - DNA, 361 bp, Homo sapiens; identical to SEQ ID NO: 102932
  chr1:27929077-27929438
  hypo

SEQ ID NO: 136653 - DNA, 129 bp, Homo sapiens; identical to SEQ ID NO: 14394
  chr1:27942072-27942201
  hypo

SEQ ID NO: 136654 - DNA, 229 bp, Homo sapiens; identical to SEQ ID NO: 59792
  chr1:27994764-27994993
  hypo

SEQ ID NO: 136655 - DNA, 24 bp, Homo sapiens
  chr1:28109852-28109876
  hypo
tttgtttttttgagatggagtcgc

SEQ ID NO: 136656 - DNA, 18 bp, Homo sapiens
  chr1:28148223-28148241
  hypo
aactttgaaacctatact

SEQ ID NO: 136657 - DNA, 34 bp, Homo sapiens; identical to SEQ ID NO: 59795
  chr1:28148832-28148866
  hypo

SEQ ID NO: 136658 - DNA, 30 bp, Homo sapiens; identical to SEQ ID NO: 59796
  chr1:28198436-28198466
  hypo

SEQ ID NO: 136659 - DNA, 350 bp, Homo sapiens; identical to SEQ ID NO: 59797
  chr1:28293259-28293609
  hypo

SEQ ID NO: 136660 - DNA, 38 bp, Homo sapiens
  chr1:28364953-28364991
  hypo
aaaaaaaaaaaaaaaaaaaaaaccgaacacagattgga

SEQ ID NO: 136661 - DNA, 18 bp, Homo sapiens
  chr1:28417246-28417264
  hypo
gcccggcccccacaatct

SEQ ID NO: 136662 - DNA, 186 bp, Homo sapiens; identical to SEQ ID NO: 59800
  chr1:28447725-28447911
  hypo

SEQ ID NO: 136663 - DNA, 22 bp, Homo sapiens
  chr1:28450779-28450801
  hypo
ttacaggcgtgagccaccgcgc

SEQ ID NO: 136664 - DNA, 37 bp, Homo sapiens
  chr1:28560004-28560041
  hypo
aggaattacaggcatgagccaccgcgccggaccggct

SEQ ID NO: 136665 - DNA, 30 bp, Homo sapiens; identical to SEQ ID NO: 59801
  chr1:28560528-28560558
  hypo

SEQ ID NO: 136666 - DNA, 216 bp, Homo sapiens; identical to SEQ ID NO: 102956
  chr1:28586718-28586934
  hypo

SEQ ID NO: 136667 - DNA, 280 bp, Homo sapiens; identical to SEQ ID NO: 102957
  chr1:28586972-28587252
  hypo

SEQ ID NO: 136668 - DNA, 30 bp, Homo sapiens; identical to SEQ ID NO: 14399
  chr1:28599959-28599989
  hypo

SEQ ID NO: 136669 - DNA, 35 bp, Homo sapiens
  chr1:28626664-28626699
  hypo
ggcggcggtggctcacgcctgtaatcccagcactt

SEQ ID NO: 136670 - DNA, 92 bp, Homo sapiens; identical to SEQ ID NO: 14400
  chr1:28663348-28663440
  hypo

SEQ ID NO: 136671 - DNA, 28 bp, Homo sapiens
  chr1:28678501-28678529
  hypo
ttttttttttgagtctcgcactctagcc

SEQ ID NO: 136672 - DNA, 28 bp, Homo sapiens
  chr1:28678768-28678796
  hypo
gagccaccgtgcccggctgatgttaatg

SEQ ID NO: 136673 - DNA, 79 bp, Homo sapiens; identical to SEQ ID NO: 14402
  chr1:28727741-28727820
  hypo

SEQ ID NO: 136674 - DNA, 45 bp, Homo sapiens
  chr1:28807197-28807242
  hypo
gtgtgtgttttgtttcgttttctgagacagggtcttgctctgtca

SEQ ID NO: 136675 - DNA, 121 bp, Homo sapiens
  chr1:28827218-28827339
  hypo
aacaagagcaaaactccgtctcaaaaaaaaaaaaaaaagaatttatattaaccacatataattggacccccaagatgacattacaaaaggacacttagtactttttctttttttttttttt

SEQ ID NO: 136676 - DNA, 31 bp, Homo sapiens; identical to SEQ ID NO: 14403
  chr1:28852334-28852365
  hypo

SEQ ID NO: 136677 - DNA, 34 bp, Homo sapiens; identical to SEQ ID NO: 59810
  chr1:28853111-28853145
  hypo

SEQ ID NO: 136678 - DNA, 147 bp, Homo sapiens; identical to SEQ ID NO: 59811
  chr1:28853675-28853822
  hypo

SEQ ID NO: 136679 - DNA, 26 bp, Homo sapiens
  chr1:28854001-28854027
  hypo
gcctcgacttcccaaagtgctaggat

SEQ ID NO: 136680 - DNA, 44 bp, Homo sapiens; identical to SEQ ID NO: 14406
  chr1:28854228-28854272
  hypo

SEQ ID NO: 136681 - DNA, 324 bp, Homo sapiens
  chr1:28857206-28857530
  hypo
ggcgccattggctgcccggggctgcgggttggggggccgcctttggcccacagagagccccgggcgcgcacctcccgcaaatgccgctgtccgctcttcctcccgcccctcctgcctctccactggatggtggagggaagagtccgtttctgcagtggatttgcccgggagctgaacttattcactggcggacggcttgggcatggaggagggcttggatggagactggggattgttctctgacccacgtagtctcccttgctttcggtgcagattctgctattataattagctttctgcggggcaaggtggctcacgcctgtc

SEQ ID NO: 136682 - DNA, 30 bp, Homo sapiens
  chr1:28865175-28865205
  hypo
tcgtacccatccattcggcttcacctgcag

SEQ ID NO: 136683 - DNA, 39 bp, Homo sapiens; identical to SEQ ID NO: 59815
  chr1:28867210-28867249
  hypo

SEQ ID NO: 136684 - DNA, 341 bp, Homo sapiens; identical to SEQ ID NO: 102966
  chr1:28879650-28879991
  hypo

SEQ ID NO: 136685 - DNA, 29 bp, Homo sapiens
  chr1:28881053-28881082
  hypo
tgaagagttacaataaatagccgggcgca

SEQ ID NO: 136686 - DNA, 121 bp, Homo sapiens; identical to SEQ ID NO: 59818
  chr1:28881381-28881502
  hypo

SEQ ID NO: 136687 - DNA, 160 bp, Homo sapiens
  chr1:28887874-28888034
  hypo
gaactatgccacttacgggaaacaaccagataacaggtaggtacaaagtcatgtctagacagacataagatgtgtcactgtgcctgtcactgccatataggaggaggggagccggtttggctgcacttggttccctcctgaaggacgacgctcttctccc

SEQ ID NO: 136688 - DNA, 30 bp, Homo sapiens
  chr1:28891268-28891298
  hypo
gctgtatgaattcttcgtcaaagtctaccc

SEQ ID NO: 136689 - DNA, 35 bp, Homo sapiens; identical to SEQ ID NO: 14409
  chr1:28891700-28891735
  hypo

SEQ ID NO: 136690 - DNA, 315 bp, Homo sapiens; identical to SEQ ID NO: 102970
  chr1:28919086-28919401
  hypo

SEQ ID NO: 136691 - DNA, 23 bp, Homo sapiens
  chr1:28925986-28926009
  hypo
ggataataggccgggcgcggtgg

SEQ ID NO: 136692 - DNA, 23 bp, Homo sapiens
  chr1:28926128-28926151
  hypo
tagccgggcgtgatggcacgcgc

SEQ ID NO: 136693 - DNA, 35 bp, Homo sapiens; identical to SEQ ID NO: 59820
  chr1:28986971-28987006
  hypo

SEQ ID NO: 136694 - DNA, 83 bp, Homo sapiens
  chr1:28997958-28998041
  hypo
atttatgcctgtaatgccagcactgtgggaggccgagacaggcggcctcccaaagtgagcggcctcctcggcctctctttagc

SEQ ID NO: 136695 - DNA, 36 bp, Homo sapiens
  chr1:29007852-29007888
  hypo
ctgggcaacggagcgagaccgcgtctcaaaaaaaag

SEQ ID NO: 136696 - DNA, 30 bp, Homo sapiens
  chr1:29009431-29009461
  hypo
gtttacgcccagcatcgctgatttcaagct

SEQ ID NO: 136697 - DNA, 36 bp, Homo sapiens; identical to SEQ ID NO: 14410
  chr1:29047653-29047689
  hypo

SEQ ID NO: 136698 - DNA, 30 bp, Homo sapiens; identical to SEQ ID NO: 59823
  chr1:29061398-29061428
  hypo

SEQ ID NO: 136699 - DNA, 313 bp, Homo sapiens; identical to SEQ ID NO: 102975
  chr1:29062770-29063083
  hypo

SEQ ID NO: 136700 - DNA, 36 bp, Homo sapiens; identical to SEQ ID NO: 59825
  chr1:29074337-29074373
  hypo

SEQ ID NO: 136701 - DNA, 25 bp, Homo sapiens
  chr1:29101056-29101081
  hypo
tgctcttgtaataaaagttttcggc

SEQ ID NO: 136702 - DNA, 18 bp, Homo sapiens
  chr1:29115684-29115702
  hypo
aaataaaatccaagcccg

SEQ ID NO: 136703 - DNA, 47 bp, Homo sapiens; identical to SEQ ID NO: 14411
  chr1:29116012-29116059
  hypo

SEQ ID NO: 136704 - DNA, 603 bp, Homo sapiens; identical to SEQ ID NO: 102977
  chr1:29138557-29139160
  hypo

SEQ ID NO: 136705 - DNA, 31 bp, Homo sapiens; identical to SEQ ID NO: 59830
  chr1:29152170-29152201
  hypo

SEQ ID NO: 136706 - DNA, 30 bp, Homo sapiens; identical to SEQ ID NO: 59831
  chr1:29242847-29242877
  hypo

SEQ ID NO: 136707 - DNA, 98 bp, Homo sapiens
  chr1:29273975-29274073
  hypo
cttgagggcaaatggctttctttttattagatgcaaccagggaagtctagtgtttggatgccgttaaaaatacagttattcagcggggtgtggtggct

SEQ ID NO: 136708 - DNA, 29 bp, Homo sapiens
  chr1:29292404-29292433
  hypo
attttgtaagccgggcgtggtggctcatg

SEQ ID NO: 136709 - DNA, 30 bp, Homo sapiens; identical to SEQ ID NO: 59832
  chr1:29376656-29376686
  hypo

SEQ ID NO: 136710 - DNA, 67 bp, Homo sapiens
  chr1:29422742-29422809
  hypo
agggtcccaagcattcggtagttcctagtaaaagccagatgaccacctcgtcggagtctctgcaaag

SEQ ID NO: 136711 - DNA, 30 bp, Homo sapiens
  chr1:29439355-29439385
  hypo
agctattgttattccgaaggtaaaggtacc

SEQ ID NO: 136712 - DNA, 30 bp, Homo sapiens; identical to SEQ ID NO: 14414
  chr1:29446070-29446100
  hypo

SEQ ID NO: 136713 - DNA, 1107 bp, Homo sapiens; identical to SEQ ID NO: 35362
  chr1:29448270-29449377
  hypo

SEQ ID NO: 136714 - DNA, 30 bp, Homo sapiens; identical to SEQ ID NO: 14415
  chr1:29462384-29462414
  hypo

SEQ ID NO: 136715 - DNA, 149 bp, Homo sapiens
  chr1:29463292-29463441
  hypo
tgtaacgcgataccgcggggttgtcctaatttgcatttccttaggactatcccagagttcttcatagactctctaagaaacatcagggtttcctggaaagtgtgaattaaggacaaatattctatctgataaaaaaaaaaaaaaagggc

SEQ ID NO: 136716 - DNA, 121 bp, Homo sapiens
  chr1:29463500-29463621
  hypo
gatcctcctgtctcagtctcctgtgttgttctgactacaggaatgcaccactgtaccccactttggaaccctttttattgtgaatataatacacctccaggaaattacataaaacttgaat

SEQ ID NO: 136717 - DNA, 19 bp, Homo sapiens
  chr1:29465623-29465642
  hypo
gaggcactgcacccagccc

SEQ ID NO: 136718 - DNA, 80 bp, Homo sapiens; identical to SEQ ID NO: 59838
  chr1:29473802-29473882
  hypo

SEQ ID NO: 136719 - DNA, 30 bp, Homo sapiens; identical to SEQ ID NO: 59839
  chr1:29505368-29505398
  hypo

SEQ ID NO: 136720 - DNA, 32 bp, Homo sapiens; identical to SEQ ID NO: 14417
  chr1:29513700-29513732
  hypo

SEQ ID NO: 136721 - DNA, 31 bp, Homo sapiens
  chr1:29516492-29516523
  hypo
gcttgaataaaacagacgcttatttctcatg

SEQ ID NO: 136722 - DNA, 55 bp, Homo sapiens; identical to SEQ ID NO: 59841
  chr1:29605968-29606023
  hypo

SEQ ID NO: 136723 - DNA, 31 bp, Homo sapiens; identical to SEQ ID NO: 14419
  chr1:29644272-29644303
  hypo

SEQ ID NO: 136724 - DNA, 31 bp, Homo sapiens; identical to SEQ ID NO: 59843
  chr1:29645535-29645566
  hypo

SEQ ID NO: 136725 - DNA, 178 bp, Homo sapiens
  chr1:29647167-29647345
  hypo
ggccctgctgagttccggtttccctgcagagctacacacggagtgcggccttcatcgtgaccctgcacccgctgcagagcaccacgcccgacttctggcggctggtctacgattacgggtgcacctccatcgtcatgctcaaccagctgaaccagtccaactccgcctgggtgaggcc

SEQ ID NO: 136726 - DNA, 31 bp, Homo sapiens; identical to SEQ ID NO: 14420
  chr1:29851221-29851252
  hypo

SEQ ID NO: 136727 - DNA, 30 bp, Homo sapiens; identical to SEQ ID NO: 59845
  chr1:30092556-30092586
  hypo

SEQ ID NO: 136728 - DNA, 87 bp, Homo sapiens; identical to SEQ ID NO: 59846
  chr1:30180748-30180835
  hypo

SEQ ID NO: 136729 - DNA, 31 bp, Homo sapiens; identical to SEQ ID NO: 14421
  chr1:30338581-30338612
  hypo

SEQ ID NO: 136730 - DNA, 30 bp, Homo sapiens; identical to SEQ ID NO: 59848
  chr1:30351569-30351599
  hypo

SEQ ID NO: 136731 - DNA, 31 bp, Homo sapiens; identical to SEQ ID NO: 14422
  chr1:31189130-31189161
  hypo

SEQ ID NO: 136732 - DNA, 621 bp, Homo sapiens; identical to SEQ ID NO: 102999
  chr1:31191731-31192352
  hypo

SEQ ID NO: 136733 - DNA, 30 bp, Homo sapiens; identical to SEQ ID NO: 59851
  chr1:31193975-31194005
  hypo

SEQ ID NO: 136734 - DNA, 158 bp, Homo sapiens; identical to SEQ ID NO: 14424
  chr1:31194411-31194569
  hypo

SEQ ID NO: 136735 - DNA, 30 bp, Homo sapiens; identical to SEQ ID NO: 59853
  chr1:31215272-31215302
  hypo

SEQ ID NO: 136736 - DNA, 30 bp, Homo sapiens
  chr1:31222084-31222114
  hypo
tcacaaaagaacacgcgctgcagaatttca

SEQ ID NO: 136737 - DNA, 31 bp, Homo sapiens; identical to SEQ ID NO: 59854
  chr1:31237673-31237704
  hypo

SEQ ID NO: 136738 - DNA, 35 bp, Homo sapiens; identical to SEQ ID NO: 59855
  chr1:31239978-31240013
  hypo

SEQ ID NO: 136739 - DNA, 88 bp, Homo sapiens; identical to SEQ ID NO: 59856
  chr1:31240594-31240682
  hypo

SEQ ID NO: 136740 - DNA, 146 bp, Homo sapiens
  chr1:31249865-31250011
  hypo
tctgctcttgcccgccgcatgccagcatttcatttaatggtccaaacatcccatgaggacatatggccatcattcccgctttactcatgaggggactgacacgcagaggttaagcaatttgcccaaggtcacgcagctattccgtg

SEQ ID NO: 136741 - DNA, 89 bp, Homo sapiens; identical to SEQ ID NO: 14425
  chr1:31260792-31260881
  hypo

SEQ ID NO: 136742 - DNA, 285 bp, Homo sapiens; identical to SEQ ID NO: 59858
  chr1:31347130-31347415
  hypo

SEQ ID NO: 136743 - DNA, 76 bp, Homo sapiens
  chr1:31401180-31401256
  hypo
ttgtaaagatttctttagacaggctttttttttttaagtcattctgtctttgggaagcttccgtgtaccatcgaac

SEQ ID NO: 136744 - DNA, 34 bp, Homo sapiens
  chr1:31406883-31406917
  hypo
tgtgctctcaaggcacgcccgccacaccagcctc

SEQ ID NO: 136745 - DNA, 179 bp, Homo sapiens; identical to SEQ ID NO: 59859
  chr1:31407297-31407476
  hypo

SEQ ID NO: 136746 - DNA, 30 bp, Homo sapiens
  chr1:31409862-31409892
  hypo
ctgtggcatccaatcgtaggaaagggggaa

SEQ ID NO: 136747 - DNA, 30 bp, Homo sapiens
  chr1:31423041-31423071
  hypo
gtgccaatgacaggacgtggcctcgaatcc

SEQ ID NO: 136748 - DNA, 31 bp, Homo sapiens; identical to SEQ ID NO: 14427
  chr1:31439890-31439921
  hypo

SEQ ID NO: 136749 - DNA, 101 bp, Homo sapiens
  chr1:31474692-31474793
  hypo
ttttctgagataacgcgtatgatagcagtgcttatcaaactttaatgtgcatacaaatcatctgggtagtcttgtcaaaatgcagattttgattcattcgc

SEQ ID NO: 136750 - DNA, 65 bp, Homo sapiens; identical to SEQ ID NO: 14428
  chr1:31478715-31478780
  hypo

SEQ ID NO: 136751 - DNA, 29 bp, Homo sapiens
  chr1:31498679-31498708
  hypo
ggcgtgagccaccacgcccggccagtaaa

SEQ ID NO: 136752 - DNA, 31 bp, Homo sapiens; identical to SEQ ID NO: 14429
  chr1:31539597-31539628
  hypo

SEQ ID NO: 136753 - DNA, 17 bp, Homo sapiens
  chr1:31563198-31563215
  hypo
agcgagactttgtctca

SEQ ID NO: 136754 - DNA, 30 bp, Homo sapiens; identical to SEQ ID NO: 14431
  chr1:31567947-31567977
  hypo

SEQ ID NO: 136755 - DNA, 31 bp, Homo sapiens; identical to SEQ ID NO: 59865
  chr1:31568455-31568486
  hypo

SEQ ID NO: 136756 - DNA, 18 bp, Homo sapiens
  chr1:31585023-31585041
  hypo
gagtttggctctcgtcgc

SEQ ID NO: 136757 - DNA, 77 bp, Homo sapiens
  chr1:31585280-31585357
  hypo
ggataataggcatgagccaccacgcccagctgaactagaggttttaacaaatgtcccggtgacggaaactgaatggg

SEQ ID NO: 136758 - DNA, 30 bp, Homo sapiens
  chr1:31593449-31593479
  hypo
gcgtatccccagtggcgtgctggtacgtgt

SEQ ID NO: 136759 - DNA, 28 bp, Homo sapiens
  chr1:31606305-31606333
  hypo
cactgcaccccagcgtgggtgactgagc

SEQ ID NO: 136760 - DNA, 27 bp, Homo sapiens
  chr1:31613461-31613488
  hypo
tttttaggccgggcgcggtggctcaca

SEQ ID NO: 136761 - DNA, 31 bp, Homo sapiens; identical to SEQ ID NO: 59867
  chr1:31623745-31623776
  hypo

SEQ ID NO: 136762 - DNA, 21 bp, Homo sapiens
  chr1:31627059-31627080
  hypo
ccaccgcgccctgccaagttg

SEQ ID NO: 136763 - DNA, 28 bp, Homo sapiens
  chr1:31631012-31631040
  hypo
aattaacaatatgaatcgttattcaatt

SEQ ID NO: 136764 - DNA, 31 bp, Homo sapiens; identical to SEQ ID NO: 14433
  chr1:31632165-31632196
  hypo

SEQ ID NO: 136765 - DNA, 144 bp, Homo sapiens
  chr1:31633839-31633983
  hypo
acactctggctctgggcgggaaaaaaggacattcatgtccccaagtttttcctcttccttcctcagccccttccacaaactcaaggccttatgccccaccattaagatggtcttcaattcaggcattgttaaagcacaaatgcc

SEQ ID NO: 136766 - DNA, 63 bp, Homo sapiens; identical to SEQ ID NO: 14434
  chr1:31639517-31639580
  hypo

SEQ ID NO: 136767 - DNA, 163 bp, Homo sapiens
  chr1:31676126-31676289
  hypo
aaaataaaataaataaaaaataatgaaaacactgtggatgtccctcagaaggggtcacagtcaatgacagtgcctccacacgattcaacacaatgcagccattatgatggagtgtgggaagagggccaagctaccacgtttgaaacggcgctgcagagccact

SEQ ID NO: 136768 - DNA, 37 bp, Homo sapiens; identical to SEQ ID NO: 14435
  chr1:31732223-31732260
  hypo

SEQ ID NO: 136769 - DNA, 106 bp, Homo sapiens
  chr1:31863043-31863149
  hypo
tgtgtgttctgggcacgcagcgggcctcatttatgacttagttcaacattacaaaccttcgggagccccaccctccttctctgagagttgccgctccctactaggt

SEQ ID NO: 136770 - DNA, 38 bp, Homo sapiens; identical to SEQ ID NO: 59874
  chr1:31871813-31871851
  hypo

SEQ ID NO: 136771 - DNA, 56 bp, Homo sapiens; identical to SEQ ID NO: 59875
  chr1:32050769-32050825
  hypo

SEQ ID NO: 136772 - DNA, 669 bp, Homo sapiens
  chr1:32091928-32092597
  hypo
cagggtgctgggatgctctggcggacagaggctgaggcgcccagcacagcgtgactgccaaatgcaaaagggctgctgctgccgtcattttcatcatcaaagggcagagaggacacaagcctcgcaacagatagtgacccccacgtacacaccaaggagagcagaggtgacctgaggcccccgagccagacaccacgttttgagtcagcctccgagccagagcacagtcaaggaatcagatggcaattgcgtctctccttgggaacccgctccagggcttctgtcctctctctctggcggtgccgaggttgcctcagggctctccctcccagctctatccctccctccctccccgccccctcataggcagcttggctggagctgcgtgggtgtccctgggctcaaggccccttcctgctgcatctgtctccttatggctgtgtcttttgtctcccaaccaaggcaaattccgggagcagtttaaggctgccttctcctgctgcctgcctggcctgggtccctgcggctctctgaaggcccctagtccccgctcctctgccagccacaagtccttgtccttgcagagccgatgctccatctccaaaatctctgagcatgtggtgctcaccagcgtcaccacagtgctgccctgagcgagggctgccctgg

SEQ ID NO: 136773 - DNA, 30 bp, Homo sapiens
  chr1:32133285-32133315
  hypo
actaatgcgaggagcggagactgcagctgg

SEQ ID NO: 136774 - DNA, 197 bp, Homo sapiens; identical to SEQ ID NO: 14437
  chr1:32139296-32139493
  hypo

SEQ ID NO: 136775 - DNA, 177 bp, Homo sapiens; identical to SEQ ID NO: 59878
  chr1:32156855-32157032
  hypo

SEQ ID NO: 136776 - DNA, 127 bp, Homo sapiens
  chr1:32208522-32208649
  hypo
tccgcatccggctccgggacccccgcccgcagctgcgggagcacaggctccaggacccccactcctcccacacgccgtgcactgcaaggaagcacgtggccggtggctgggcggcaccatggccccg

SEQ ID NO: 136777 - DNA, 120 bp, Homo sapiens; identical to SEQ ID NO: 59880
  chr1:32221873-32221993
  hypo

SEQ ID NO: 136778 - DNA, 30 bp, Homo sapiens; identical to SEQ ID NO: 14439
  chr1:32224968-32224998
  hypo

SEQ ID NO: 136779 - DNA, 31 bp, Homo sapiens; identical to SEQ ID NO: 59882
  chr1:32306490-32306521
  hypo

SEQ ID NO: 136780 - DNA, 18 bp, Homo sapiens
  chr1:32307624-32307642
  hypo
ttttttttttttgagacg

SEQ ID NO: 136781 - DNA, 30 bp, Homo sapiens; identical to SEQ ID NO: 103022
  chr1:32404311-32404341
  hypo

SEQ ID NO: 136782 - DNA, 30 bp, Homo sapiens; identical to SEQ ID NO: 103023
  chr1:32404365-32404395
  hypo

SEQ ID NO: 136783 - DNA, 22 bp, Homo sapiens
  chr1:32404685-32404707
  hypo
ttgagaagggccaggcgcggtg

SEQ ID NO: 136784 - DNA, 21 bp, Homo sapiens
  chr1:32405006-32405027
  hypo
agaaaacgcttgagttgagaa

SEQ ID NO: 136785 - DNA, 78 bp, Homo sapiens; identical to SEQ ID NO: 59884
  chr1:32407224-32407302
  hypo

SEQ ID NO: 136786 - DNA, 21 bp, Homo sapiens
  chr1:32416757-32416778
  hypo
agccaccgcgcctggcctaaa

SEQ ID NO: 136787 - DNA, 121 bp, Homo sapiens
  chr1:32469885-32470006
  hypo
ttaaaacatatggataggctaaatctaacctgtgagctgtggtgttcttccctcctttccgcgtctgaccacgttatctcactgttctccactggcactctatctccttatctgagcatca

SEQ ID NO: 136788 - DNA, 17 bp, Homo sapiens
  chr1:32470309-32470326
  hypo
cccggctcagactacct

SEQ ID NO: 136789 - DNA, 30 bp, Homo sapiens; identical to SEQ ID NO: 59885
  chr1:32478209-32478239
  hypo

SEQ ID NO: 136790 - DNA, 56 bp, Homo sapiens
  chr1:32497744-32497800
  hypo
ctacagaatctaatgcgtcttttttttccccatgccatagccgcgtacgctgtgta

SEQ ID NO: 136791 - DNA, 30 bp, Homo sapiens; identical to SEQ ID NO: 14442
  chr1:32527909-32527939
  hypo

SEQ ID NO: 136792 - DNA, 144 bp, Homo sapiens; identical to SEQ ID NO: 103031
  chr1:32666249-32666393
  hypo

SEQ ID NO: 136793 - DNA, 40 bp, Homo sapiens
  chr1:32674988-32675028
  hypo
ctagcaagggaggtaacggcaagagcgtgtattcagtacc

SEQ ID NO: 136794 - DNA, 287 bp, Homo sapiens; identical to SEQ ID NO: 59888
  chr1:32705374-32705661
  hypo

SEQ ID NO: 136795 - DNA, 30 bp, Homo sapiens; identical to SEQ ID NO: 59889
  chr1:32740387-32740417
  hypo

SEQ ID NO: 136796 - DNA, 30 bp, Homo sapiens; identical to SEQ ID NO: 14443
  chr1:32740743-32740773
  hypo

SEQ ID NO: 136797 - DNA, 144 bp, Homo sapiens
  chr1:32741467-32741611
  hypo
actcactgcgttctttcgtcgctttgtccatccattcattcattcaggatcgttttcactgtcggtccgggacttcgaccagaaccagggagaggtggtgaaacattacaagatccgtaatctggacaacggtggcttctacat

SEQ ID NO: 136798 - DNA, 526 bp, Homo sapiens
  chr1:32741985-32742511
  hypo
agaagccccagaagccgtggtgggaggacgagtgggaggttcccagggagacgctgaagctggtggagcggctgggggctggacagttcggggaggtgtggatgggtgagtgtggcctccaggactgcctgggaagaggggaacgggaggggccgctgaggtgatgagagtcccaggacagctgcctggcgactttcccactccttcccttccccgacccagggtactacaacgggcacacgaaggtggcggtgaagagcctgaagcagggcagcatgtccccggacgccttcctggccgaggccaacctcatgaagcagctgcaacaccagcggctggttcggctctacgctgtggtcacccaggagcccatctacatcatcactgaatacatggagaatggtgggtgctacccgagtcggctaccaggggatactgctctccctgctgtccctgccagagggtggaaatacaccttttcttctggcccaaagctcaagcaaggagggtttcttgagctttcctg

SEQ ID NO: 136799 - DNA, 30 bp, Homo sapiens
  chr1:32745481-32745511
  hypo
ttcatcgtgaccttcgggctgccaacattc

SEQ ID NO: 136800 - DNA, 48 bp, Homo sapiens; identical to SEQ ID NO: 14444
  chr1:32751093-32751141
  hypo

SEQ ID NO: 136801 - DNA, 26 bp, Homo sapiens
  chr1:32756492-32756518
  hypo
gagaaacctgccctcctaggccgggc

SEQ ID NO: 136802 - DNA, 300 bp, Homo sapiens; identical to SEQ ID NO: 103036
  chr1:32757387-32757687
  hypo

SEQ ID NO: 136803 - DNA, 241 bp, Homo sapiens
  chr1:32764104-32764345
  hypo
ctaggcccagccgggaatagacttcttacttgagaaactgagttttgcagtgaggtcattactttgggattcagatttggctctgccattgagaagctttgtaatatcaggcaagtcaccttacatttcagatttctctcctataaaatcaaaatgataggagttcctattatgagaacaatgatgggaaagctctttaagagtttaaagtatggctggcgccatggctcacgtctgtaat

SEQ ID NO: 136804 - DNA, 20 bp, Homo sapiens
  chr1:32773626-32773646
  hypo
gtctttacttcgggccgggc

SEQ ID NO: 136805 - DNA, 157 bp, Homo sapiens
  chr1:32788456-32788613
  hypo
aatcacttaacttctcggtatctgtttgttcctccgcacagtggggttgatatctggcttgtccagctcatagagttgttgtgaggatcaaatgaggttgtatatgtgaaaggacttggaaaagggccgggatatattttcacaggcttttaagaca

SEQ ID NO: 136806 - DNA, 30 bp, Homo sapiens; identical to SEQ ID NO: 14446
  chr1:32797638-32797668
  hypo

SEQ ID NO: 136807 - DNA, 77 bp, Homo sapiens; identical to SEQ ID NO: 59897
  chr1:32804500-32804577
  hypo

SEQ ID NO: 136808 - DNA, 30 bp, Homo sapiens
  chr1:32806915-32806945
  hypo
cgtcattgctgccggcgttggttgcgtgcc

SEQ ID NO: 136809 - DNA, 198 bp, Homo sapiens
  chr1:32817542-32817740
  hypo
aggcagggcacgggccggggtcactcctggtcgatttagagggacgtggaaagggactggaggcccccactggcgccttcccaaggacctgagtgcctcctcccccagctgccagaccagggcgctttatccagctggcgccctccctcgggccccctcactgggacagaagaaaattcaccacgaagtgagcagtct

SEQ ID NO: 136810 - DNA, 415 bp, Homo sapiens
  chr1:32826699-32827114
  hypo
ggggtcaggaccagcaagatacgagaggagtgaagtggcgtaggttgaaaggcggaagggcgggcccctaaggctgggtccaaacgaggaggctgcggaagggaaagtgttattggactgggcagagcagctggtgggcccgacggatagacatacactgccagcccggagtggaaagaacagtttgtgctgtgctttattaaaatgtgcatcattcttttattttaaaatgtgcatcattgtctcgtgctcggcgcatgcgacctcagcgtggtggcccgctgggggcctcgttcccgcccagctcccgcggagccgcagggagcaggcgcactcacgtggcgcgggcccgggggctcccgcccatggcgaggtagacgtcgatgggcacgtgcagcagcgtcaggcagtggca

SEQ ID NO: 136811 - DNA, 102 bp, Homo sapiens; identical to SEQ ID NO: 288
  chr1:32852879-32852981
  hypo

SEQ ID NO: 136812 - DNA, 80 bp, Homo sapiens
  chr1:32893208-32893288
  hypo
ttttcgctaaactttcgataccctttgttgcatgtttgataattaattcaccgccctattaggtacgggctgccaggcaa

SEQ ID NO: 136813 - DNA, 30 bp, Homo sapiens
  chr1:32914813-32914843
  hypo
tgtgaggctcctttacgctaggttgctggc

SEQ ID NO: 136814 - DNA, 141 bp, Homo sapiens; identical to SEQ ID NO: 59900
  chr1:32950769-32950910
  hypo

SEQ ID NO: 136815 - DNA, 30 bp, Homo sapiens; identical to SEQ ID NO: 14448
  chr1:32964475-32964505
  hypo

SEQ ID NO: 136816 - DNA, 37 bp, Homo sapiens; identical to SEQ ID NO: 291
  chr1:33005605-33005642
  hypo

SEQ ID NO: 136817 - DNA, 33 bp, Homo sapiens; identical to SEQ ID NO: 59903
  chr1:33016263-33016296
  hypo

SEQ ID NO: 136818 - DNA, 92 bp, Homo sapiens; identical to SEQ ID NO: 59904
  chr1:33016535-33016627
  hypo

SEQ ID NO: 136819 - DNA, 34 bp, Homo sapiens; identical to SEQ ID NO: 59905
  chr1:33154202-33154236
  hypo

SEQ ID NO: 136820 - DNA, 323 bp, Homo sapiens
  chr1:33169542-33169865
  hypo
gttcattcatcctcgcgtctgagtgtgctgcctgtggctgtatatttatatttctctgtctaatgcaagggggtggaagatttaacacccagggcagccaaatatacccttgtaaggtacgcacgagaaaaagccaggttttgaggctgctggtcattttctgacttacccccgaactattccaggggaggaggctggcgaagcctcagctgctgggcatttgacatctgctgcccgccagaggagagctaaggcagcaagggcaggcctgccagaggctctgtttgctgtggtaccaagcaacaggcggcaagggtggcatt

SEQ ID NO: 136821 - DNA, 327 bp, Homo sapiens; identical to SEQ ID NO: 35411
  chr1:33207543-33207870
  hypo

SEQ ID NO: 136822 - DNA, 30 bp, Homo sapiens; identical to SEQ ID NO: 14451
  chr1:33210815-33210845
  hypo

SEQ ID NO: 136823 - DNA, 30 bp, Homo sapiens; identical to SEQ ID NO: 14452
  chr1:33216935-33216965
  hypo

SEQ ID NO: 136824 - DNA, 94 bp, Homo sapiens
  chr1:33220941-33221035
  hypo
gtggtgggagaatctacgggtgtattcccaggatggcccacattcctagagattccgaaccggagcttgatgatctcatcgctccatggagggg

SEQ ID NO: 136825 - DNA, 26 bp, Homo sapiens
  chr1:33222554-33222580
  hypo
aactcgactccatttcaaaaacaaaa

SEQ ID NO: 136826 - DNA, 36 bp, Homo sapiens
  chr1:33225963-33225999
  hypo
ccaagacagtgcgtgcgcatgcgcgtggccttggga

SEQ ID NO: 136827 - DNA, 94 bp, Homo sapiens
  chr1:33226461-33226555
  hypo
ttaccggtgtgagccaccgcacccggccatgtgggtgtggttttgagagtgcccacctgcggaggtggccccagtgggacgctgcctgctgcct

SEQ ID NO: 136828 - DNA, 30 bp, Homo sapiens
  chr1:33228864-33228894
  hypo
gtgagccaccgtgcacggccagaatatttt

SEQ ID NO: 136829 - DNA, 936 bp, Homo sapiens
  chr1:33235317-33236253
  hypo
tcagggcggcgtcggcgggagcggcggagcactgtgctgggactcccgcagcatgtgcagaaggagcttggtgaggcctgggttaggagggcagtggtggggtgggtggggagccttggtcatcccctctctgctgaccccacctcctccctgtcccttccaggcctgaggaatgagcgtgaggcaccaggcacgccccgggctcctggtgcacgggatgccgtacgcatccccacagtggacggccgcccccgaggcacctcagggatgggggcccgggtgtccctgcaggcgctggaggcggaggcggaggctggcgctgagacagaggccatgctgcagcgccacattgaccgtgtctaccgggatgacacctttgttggccggtccacgggtacccgggccccaccattgacccggcccatgtccctagcagtgcctggattgacaggaggggcagggcctgcagagcccctgagcccggccatgtccatctccccccaggccacctacctgtcgaagttgattccacatgctgtgctgccgcctacagtggacgtggtggccctaggccgctgcagcctgcgcacactaagccgctgcagcctgcactcggccagcccagcctcagtccgctcgctggggcgcttctcctccgtctccagcccacagccccgcagccgccacccatcctcctccagtgacacctggagccactctcaatcctccgacaccattgtgtctgacggttccaccctctcctctaagggtggctctgagggccagccggagagctctacggctagcaatagcgtggtaccccctccccagggaggcagtgggaggggctctcccagtgggggcagcactgctgaggcctcagacacactcagcattcggagcagtgggcagttgtctggccggagtgtgtccctg

SEQ ID NO: 136830 - DNA, 30 bp, Homo sapiens
  chr1:33236455-33236485
  hypo
tacctggcttgtctccgggtggttcccggc

SEQ ID NO: 136831 - DNA, 503 bp, Homo sapiens
  chr1:33237280-33237783
  hypo
accctcctccagctccgccagccccagctcctgctagttccgccccagggcatgtggccaagctccctcagaaggaaccggtgggctgtagcaagggtggtgggcctcccagggaggacgtaggtgcgcccctggtcacgccctcgctcctgcagatggtgcggctgcgctccgtgggtgctccaggaggggctcccaccccagcactggggccatcggccccccagaaaccactgcgaagggccctgtcagggcgggccagcccagtgcctgccccctcctcagggctccatgctgcggtccgactcaaggcctgcagcctggccgccagtgaaggcctctcaagtgctcagcccaacggaccgcctgaggcagagccacggcctccccagtcccctgcctcaacggccagtttcatcttctccaagggctctaggaagctgcagctggagcggcccgtgtcccctgagacccaggctgacctccagcggaatctggtggca

SEQ ID NO: 136832 - DNA, 147 bp, Homo sapiens
  chr1:33264159-33264306
  hypo
gggtgcgatggctcacgcctgtaatcccagcactttgggaggctgaggtggaaagatcacttgagcccgggtgtctctccaaaaataaaaaacaaacaaacaaacaaaaagaaattagccaagtgtgatggtgcgcatctatagtcc

SEQ ID NO: 136833 - DNA, 41 bp, Homo sapiens; identical to SEQ ID NO: 59914
  chr1:33271258-33271299
  hypo

SEQ ID NO: 136834 - DNA, 30 bp, Homo sapiens
  chr1:33272075-33272105
  hypo
taagtacctgcagtccggggtataagaggc

SEQ ID NO: 136835 - DNA, 30 bp, Homo sapiens
  chr1:33335761-33335791
  hypo
ccagatcaggggtgccggggcccaccccac

SEQ ID NO: 136836 - DNA, 71 bp, Homo sapiens
  chr1:33336212-33336283
  hypo
agcctgccccggcgccggccccccgccccgggcccccttacccgcctgcaccagcgcgaagcagacgcagc

SEQ ID NO: 136837 - DNA, 30 bp, Homo sapiens; identical to SEQ ID NO: 59915
  chr1:33354770-33354800
  hypo

SEQ ID NO: 136838 - DNA, 165 bp, Homo sapiens; identical to SEQ ID NO: 14455
  chr1:33415195-33415360
  hypo

SEQ ID NO: 136839 - DNA, 21 bp, Homo sapiens
  chr1:33420061-33420082
  hypo
tggtgcagtcactcacgcctg

SEQ ID NO: 136840 - DNA, 79 bp, Homo sapiens; identical to SEQ ID NO: 14456
  chr1:33431247-33431326
  hypo

SEQ ID NO: 136841 - DNA, 38 bp, Homo sapiens; identical to SEQ ID NO: 14457
  chr1:33432069-33432107
  hypo

SEQ ID NO: 136842 - DNA, 170 bp, Homo sapiens; identical to SEQ ID NO: 103061
  chr1:33438468-33438638
  hypo

SEQ ID NO: 136843 - DNA, 481 bp, Homo sapiens; identical to SEQ ID NO: 59919
  chr1:33441466-33441947
  hypo

SEQ ID NO: 136844 - DNA, 44 bp, Homo sapiens
  chr1:33612962-33613006
  hypo
tgtcaagcttgtcccggacgttaagccgcgtccagggctccgtg

SEQ ID NO: 136845 - DNA, 30 bp, Homo sapiens
  chr1:33613288-33613318
  hypo
tggtgggctgtgcccgggtccagggttagg

SEQ ID NO: 136846 - DNA, 30 bp, Homo sapiens
  chr1:33625313-33625343
  hypo
ccaggaaggtgtgccggtcggtttcagcca

SEQ ID NO: 136847 - DNA, 30 bp, Homo sapiens; identical to SEQ ID NO: 59921
  chr1:33631037-33631067
  hypo

SEQ ID NO: 136848 - DNA, 30 bp, Homo sapiens; identical to SEQ ID NO: 59922
  chr1:33720515-33720545
  hypo

SEQ ID NO: 136849 - DNA, 499 bp, Homo sapiens; identical to SEQ ID NO: 103068
  chr1:33721207-33721706
  hypo

SEQ ID NO: 136850 - DNA, 175 bp, Homo sapiens; identical to SEQ ID NO: 59925
  chr1:33741929-33742104
  hypo

SEQ ID NO: 136851 - DNA, 43 bp, Homo sapiens; identical to SEQ ID NO: 59926
  chr1:33763430-33763473
  hypo

SEQ ID NO: 136852 - DNA, 30 bp, Homo sapiens; identical to SEQ ID NO: 59927
  chr1:33768588-33768618
  hypo

SEQ ID NO: 136853 - DNA, 397 bp, Homo sapiens; identical to SEQ ID NO: 103070
  chr1:33772445-33772842
  hypo

SEQ ID NO: 136854 - DNA, 100 bp, Homo sapiens; identical to SEQ ID NO: 103071
  chr1:33772856-33772956
  hypo

SEQ ID NO: 136855 - DNA, 92 bp, Homo sapiens; identical to SEQ ID NO: 103072
  chr1:33772986-33773078
  hypo

SEQ ID NO: 136856 - DNA, 30 bp, Homo sapiens; identical to SEQ ID NO: 303
  chr1:33788139-33788169
  hypo

SEQ ID NO: 136857 - DNA, 30 bp, Homo sapiens; identical to SEQ ID NO: 14462
  chr1:33790359-33790389
  hypo

SEQ ID NO: 136858 - DNA, 31 bp, Homo sapiens; identical to SEQ ID NO: 14463
  chr1:33790728-33790759
  hypo

SEQ ID NO: 136859 - DNA, 30 bp, Homo sapiens
  chr1:33806908-33806938
  hypo
gtggagggagggctgcgctgattagccgtg

SEQ ID NO: 136860 - DNA, 30 bp, Homo sapiens
  chr1:33816925-33816955
  hypo
agcttgcgagctgtacgaacactggcaatg

SEQ ID NO: 136861 - DNA, 95 bp, Homo sapiens
  chr1:33817183-33817278
  hypo
aggtggggtacagaccgtgtttctcagtgtgctacctcccttcccacagtgctttgcacagagcaggcattcacacatacacagaatgggccggg

SEQ ID NO: 136862 - DNA, 30 bp, Homo sapiens
  chr1:33818398-33818428
  hypo
tgagcgagtgactaccgtaggagtcagagt

SEQ ID NO: 136863 - DNA, 30 bp, Homo sapiens
  chr1:33835265-33835295
  hypo
ggactgtgttactttcgggatagtgtgtca

SEQ ID NO: 136864 - DNA, 98 bp, Homo sapiens; identical to SEQ ID NO: 59931
  chr1:33841564-33841662
  hypo

SEQ ID NO: 136865 - DNA, 785 bp, Homo sapiens; identical to SEQ ID NO: 103074
  chr1:33896038-33896823
  hypo

SEQ ID NO: 136866 - DNA, 30 bp, Homo sapiens; identical to SEQ ID NO: 59933
  chr1:33938889-33938919
  hypo

SEQ ID NO: 136867 - DNA, 143 bp, Homo sapiens
  chr1:33985062-33985205
  hypo
accggctgctggaggcggggctctcggtggcggtggtggcggccaggccgggtggctatactgctgtgcacactgtgctgactgtgaactccgcctcgctggccatgatgtctgtgggctggatgttgcggtcgtacattggg

SEQ ID NO: 136868 - DNA, 30 bp, Homo sapiens; identical to SEQ ID NO: 59935
  chr1:34090838-34090868
  hypo

SEQ ID NO: 136869 - DNA, 21 bp, Homo sapiens
  chr1:34520320-34520341
  hypo
acagagcgagactctgtctct

SEQ ID NO: 136870 - DNA, 2421 bp, Homo sapiens; identical to SEQ ID NO: 103077
  chr1:34628643-34631064
  hypo

SEQ ID NO: 136871 - DNA, 30 bp, Homo sapiens
  chr1:34962638-34962668
  hypo
aaggactatcgctggcggagaacaaattga

SEQ ID NO: 136872 - DNA, 29 bp, Homo sapiens
  chr1:34973108-34973137
  hypo
tacttgggccgggcgcggtggctcacgcc

SEQ ID NO: 136873 - DNA, 251 bp, Homo sapiens; identical to SEQ ID NO: 59940
  chr1:35116223-35116474
  hypo

SEQ ID NO: 136874 - DNA, 31 bp, Homo sapiens; identical to SEQ ID NO: 310
  chr1:35208445-35208476
  hypo

SEQ ID NO: 136875 - DNA, 293 bp, Homo sapiens
  chr1:35223068-35223361
  hypo
tgaccacaaggacttcgactgcaatactcgccagcccggctgctccaacgtctgctttgatgagttcttccctgtgtcccatgtgcgcctctgggccctgcagcttatcctggtgacatgcccctcactgctcgtggtcatgcacgtggcctaccgggaggttcaggagaagaggcaccgagaagcccatggggagaacagtgggcgcctctacctgaaccccggcaagaagcggggtgggctctggtggacatatgtctgcagcctagtgttcaaggcgagcgtggacatcg

SEQ ID NO: 136876 - DNA, 549 bp, Homo sapiens; identical to SEQ ID NO: 14471
  chr1:35226869-35227418
  hypo

SEQ ID NO: 136877 - DNA, 30 bp, Homo sapiens; identical to SEQ ID NO: 14472
  chr1:35245757-35245787
  hypo

SEQ ID NO: 136878 - DNA, 30 bp, Homo sapiens; identical to SEQ ID NO: 59944
  chr1:35252809-35252839
  hypo

SEQ ID NO: 136879 - DNA, 30 bp, Homo sapiens; identical to SEQ ID NO: 103085
  chr1:35259851-35259881
  hypo

SEQ ID NO: 136880 - DNA, 85 bp, Homo sapiens; identical to SEQ ID NO: 103086
  chr1:35260185-35260270
  hypo

SEQ ID NO: 136881 - DNA, 30 bp, Homo sapiens; identical to SEQ ID NO: 59945
  chr1:35321535-35321565
  hypo

SEQ ID NO: 136882 - DNA, 30 bp, Homo sapiens; identical to SEQ ID NO: 14473
  chr1:35326103-35326133
  hypo

SEQ ID NO: 136883 - DNA, 30 bp, Homo sapiens
  chr1:35330860-35330890
  hypo
gggcatcagggggccgaatctcctttccac

SEQ ID NO: 136884 - DNA, 30 bp, Homo sapiens; identical to SEQ ID NO: 59947
  chr1:35334514-35334544
  hypo

SEQ ID NO: 136885 - DNA, 30 bp, Homo sapiens; identical to SEQ ID NO: 59948
  chr1:35394309-35394339
  hypo

SEQ ID NO: 136886 - DNA, 1462 bp, Homo sapiens; identical to SEQ ID NO: 35442
  chr1:35394586-35396048
  hypo

SEQ ID NO: 136887 - DNA, 47 bp, Homo sapiens
  chr1:35442223-35442270
  hypo
ggtgtgcaggatgtcgagcgtggaggcggcgcgacaccggtctccgt

SEQ ID NO: 136888 - DNA, 30 bp, Homo sapiens
  chr1:35476583-35476613
  hypo
ctgagacaggggcaccgccgaagagtttgt

SEQ ID NO: 136889 - DNA, 31 bp, Homo sapiens; identical to SEQ ID NO: 14476
  chr1:35479658-35479689
  hypo

SEQ ID NO: 136890 - DNA, 30 bp, Homo sapiens; identical to SEQ ID NO: 59952
  chr1:35543509-35543539
  hypo

SEQ ID NO: 136891 - DNA, 25 bp, Homo sapiens
  chr1:35544155-35544180
  hypo
ttttttttttttgagacgcagtctc

SEQ ID NO: 136892 - DNA, 28 bp, Homo sapiens
  chr1:35550925-35550953
  hypo
gcgtgagccaccgcgcccggcccccata

SEQ ID NO: 136893 - DNA, 30 bp, Homo sapiens
  chr1:35582334-35582364
  hypo
ggcataagccaccacgcccagccagaaaag

SEQ ID NO: 136894 - DNA, 144 bp, Homo sapiens
  chr1:35650177-35650321
  hypo
ccaaagcgctcagtacgctattggaacagtaattaacagttcattataagtagttgatgtccatgtgtgttaagtaaatattttagaaggttccgtagtcaacgttcgtcgatacaatcaccaatgagtcgatccacaggtacc

SEQ ID NO: 136895 - DNA, 23 bp, Homo sapiens
  chr1:35661112-35661135
  hypo
ttttttttttttgagacggagtc

SEQ ID NO: 136896 - DNA, 23 bp, Homo sapiens
  chr1:35661374-35661397
  hypo
taggattacggatgtgagccacc

SEQ ID NO: 136897 - DNA, 160 bp, Homo sapiens
  chr1:35664740-35664900
  hypo
ttcttaagatttatcaagttactttacctgtatgttttgcctcagggcatttgcacttgctctttactcagcctgcagtgttctccccactcgccccgccccggctctttgcacagatatcttttcttaatctttttttttccttcgctgctttatggaa

SEQ ID NO: 136898 - DNA, 30 bp, Homo sapiens; identical to SEQ ID NO: 59956
  chr1:35738687-35738717
  hypo

SEQ ID NO: 136899 - DNA, 37 bp, Homo sapiens
  chr1:35894110-35894147
  hypo
tacaggcgtcacacaccttgcccggccgcctgagaat

SEQ ID NO: 136900 - DNA, 41 bp, Homo sapiens
  chr1:35963894-35963935
  hypo
ctacactccagcctgggaaataagtgcgaaactcccatctc

SEQ ID NO: 136901 - DNA, 271 bp, Homo sapiens; identical to SEQ ID NO: 59957
  chr1:36025947-36026218
  hypo

SEQ ID NO: 136902 - DNA, 31 bp, Homo sapiens; identical to SEQ ID NO: 14478
  chr1:36056174-36056205
  hypo

SEQ ID NO: 136903 - DNA, 40 bp, Homo sapiens; identical to SEQ ID NO: 59959
  chr1:36056552-36056592
  hypo

SEQ ID NO: 136904 - DNA, 30 bp, Homo sapiens; identical to SEQ ID NO: 59960
  chr1:36172264-36172294
  hypo

SEQ ID NO: 136905 - DNA, 652 bp, Homo sapiens; identical to SEQ ID NO: 103108
  chr1:36173084-36173736
  hypo

SEQ ID NO: 136906 - DNA, 45 bp, Homo sapiens
  chr1:36271180-36271225
  hypo
aagaatatagagtatggtggccgggcatggtggctcacgcctgta

SEQ ID NO: 136907 - DNA, 121 bp, Homo sapiens
  chr1:36271464-36271585
  hypo
gcgagactccgggtcaaaaaaaataaaagaatatagggtatggtatcagtagacaagaatgtaggcactagattaaaagtcccagttccggccgggcgcggtggctcaagctcgtaatccc

SEQ ID NO: 136908 - DNA, 31 bp, Homo sapiens; identical to SEQ ID NO: 59963
  chr1:36334780-36334811
  hypo

SEQ ID NO: 136909 - DNA, 30 bp, Homo sapiens
  chr1:36474593-36474623
  hypo
tccctgtctgcaagtcgggcaggaacagaa

SEQ ID NO: 136910 - DNA, 202 bp, Homo sapiens; identical to SEQ ID NO: 59964
  chr1:36549010-36549212
  hypo

SEQ ID NO: 136911 - DNA, 30 bp, Homo sapiens
  chr1:36553716-36553746
  hypo
tggacaccttcacacgtaccacaaatagca

SEQ ID NO: 136912 - DNA, 148 bp, Homo sapiens
  chr1:36558326-36558474
  hypo
cagctggccactagtcgtaaaaatgttgataatggattttatttgtctagcatctatactgggcgttgtgcagaatgcttcacagacacgatctcgcttcatcctcacaacagccctgtcagagagttgctaacgttactccctgtct

SEQ ID NO: 136913 - DNA, 189 bp, Homo sapiens; identical to SEQ ID NO: 59965
  chr1:36563383-36563572
  hypo

SEQ ID NO: 136914 - DNA, 31 bp, Homo sapiens; identical to SEQ ID NO: 14482
  chr1:36581068-36581099
  hypo

SEQ ID NO: 136915 - DNA, 83 bp, Homo sapiens
  chr1:36610553-36610636
  hypo
ttttcaggaggcctttcttcccgttagtgccccaaacaaaatgtcaaatctccttaaggaggctgatcttttttttctttttt

SEQ ID NO: 136916 - DNA, 30 bp, Homo sapiens; identical to SEQ ID NO: 59968
  chr1:36625153-36625183
  hypo

SEQ ID NO: 136917 - DNA, 60 bp, Homo sapiens; identical to SEQ ID NO: 59969
  chr1:36633227-36633287
  hypo

SEQ ID NO: 136918 - DNA, 89 bp, Homo sapiens
  chr1:36637142-36637231
  hypo
ctggcaaaggagcggcgagaagagcgggccaagtacctgggtgagtgagcaggaagcctcatcatcttcttcatcgtcatcatcagcat

SEQ ID NO: 136919 - DNA, 63 bp, Homo sapiens; identical to SEQ ID NO: 59970
  chr1:36638184-36638247
  hypo

SEQ ID NO: 136920 - DNA, 30 bp, Homo sapiens; identical to SEQ ID NO: 59971
  chr1:36639879-36639909
  hypo

SEQ ID NO: 136921 - DNA, 112 bp, Homo sapiens
  chr1:36640422-36640534
  hypo
ctgcatggaaggcctcggtgccccccactggctcctgccgggcccggccctaatgccgtgtcttttccccctccaggtgggagcaggtgctccgtgtcggcagttaacctgc

SEQ ID NO: 136922 - DNA, 94 bp, Homo sapiens; identical to SEQ ID NO: 14483
  chr1:36641758-36641852
  hypo

SEQ ID NO: 136923 - DNA, 30 bp, Homo sapiens; identical to SEQ ID NO: 59974
  chr1:36642381-36642411
  hypo

SEQ ID NO: 136924 - DNA, 30 bp, Homo sapiens; identical to SEQ ID NO: 14484
  chr1:36643728-36643758
  hypo

SEQ ID NO: 136925 - DNA, 28 bp, Homo sapiens
  chr1:36743958-36743986
  hypo
accaggcttcaatcgggttttgaccgta

SEQ ID NO: 136926 - DNA, 30 bp, Homo sapiens; identical to SEQ ID NO: 14485
  chr1:36769743-36769773
  hypo

SEQ ID NO: 136927 - DNA, 156 bp, Homo sapiens
  chr1:36773757-36773913
  hypo
ccccagacgagttggcgctgcggaggggggacgtggtaaaagtactcagcaaggtgtgagacgaacagggtgggggggcccagggaagccggtgttgagaaagggtagacctgcacatgtaccccctgaatctaaaataaacgttgaaattatatc

SEQ ID NO: 136928 - DNA, 43 bp, Homo sapiens; identical to SEQ ID NO: 59977
  chr1:36774201-36774244
  hypo

SEQ ID NO: 136929 - DNA, 18 bp, Homo sapiens
  chr1:36774733-36774751
  hypo
aattttccacttaaggcg

SEQ ID NO: 136930 - DNA, 21 bp, Homo sapiens
  chr1:36788083-36788104
  hypo
gctctgcggacagctcggggc

SEQ ID NO: 136931 - DNA, 117 bp, Homo sapiens; identical to SEQ ID NO: 59979
  chr1:36807403-36807520
  hypo

SEQ ID NO: 136932 - DNA, 67 bp, Homo sapiens; identical to SEQ ID NO: 59980
  chr1:36814515-36814582
  hypo

SEQ ID NO: 136933 - DNA, 77 bp, Homo sapiens; identical to SEQ ID NO: 59981
  chr1:36845271-36845348
  hypo

SEQ ID NO: 136934 - DNA, 187 bp, Homo sapiens; identical to SEQ ID NO: 14488
  chr1:36857025-36857212
  hypo

SEQ ID NO: 136935 - DNA, 30 bp, Homo sapiens; identical to SEQ ID NO: 59983
  chr1:36859402-36859432
  hypo

SEQ ID NO: 136936 - DNA, 224 bp, Homo sapiens; identical to SEQ ID NO: 14489
  chr1:36881338-36881562
  hypo

SEQ ID NO: 136937 - DNA, 31 bp, Homo sapiens; identical to SEQ ID NO: 326
  chr1:36883607-36883638
  hypo

SEQ ID NO: 136938 - DNA, 40 bp, Homo sapiens
  chr1:36931308-36931348
  hypo
ccaaagtctcttcaccgtgtcccaccgcactgtcactccc

SEQ ID NO: 136939 - DNA, 867 bp, Homo sapiens; identical to SEQ ID NO: 327
  chr1:36931642-36932509
  hypo

SEQ ID NO: 136940 - DNA, 219 bp, Homo sapiens; identical to SEQ ID NO: 328
  chr1:36933229-36933448
  hypo

SEQ ID NO: 136941 - DNA, 322 bp, Homo sapiens; identical to SEQ ID NO: 35464
  chr1:36936919-36937241
  hypo

SEQ ID NO: 136942 - DNA, 78 bp, Homo sapiens; identical to SEQ ID NO: 330
  chr1:36937668-36937746
  hypo

SEQ ID NO: 136943 - DNA, 30 bp, Homo sapiens; identical to SEQ ID NO: 331
  chr1:36938251-36938281
  hypo

SEQ ID NO: 136944 - DNA, 30 bp, Homo sapiens; identical to SEQ ID NO: 332
  chr1:36939051-36939081
  hypo

SEQ ID NO: 136945 - DNA, 30 bp, Homo sapiens; identical to SEQ ID NO: 333
  chr1:36939438-36939468
  hypo

SEQ ID NO: 136946 - DNA, 30 bp, Homo sapiens; identical to SEQ ID NO: 334
  chr1:36945020-36945050
  hypo

SEQ ID NO: 136947 - DNA, 151 bp, Homo sapiens; identical to SEQ ID NO: 14499
  chr1:36979462-36979613
  hypo

SEQ ID NO: 136948 - DNA, 31 bp, Homo sapiens; identical to SEQ ID NO: 14500
  chr1:36984328-36984359
  hypo

SEQ ID NO: 136949 - DNA, 30 bp, Homo sapiens
  chr1:37229531-37229561
  hypo
gctccctctggctgccgtgggtggtggaca

SEQ ID NO: 136950 - DNA, 30 bp, Homo sapiens; identical to SEQ ID NO: 59996
  chr1:37308831-37308861
  hypo

SEQ ID NO: 136951 - DNA, 143 bp, Homo sapiens; identical to SEQ ID NO: 59997
  chr1:37324709-37324852
  hypo

SEQ ID NO: 136952 - DNA, 30 bp, Homo sapiens
  chr1:37476283-37476313
  hypo
gagtcactgcgccatcgcaggtgtcagttt

SEQ ID NO: 136953 - DNA, 794 bp, Homo sapiens; identical to SEQ ID NO: 337
  chr1:37498888-37499682
  hypo

SEQ ID NO: 136954 - DNA, 561 bp, Homo sapiens; identical to SEQ ID NO: 35473
  chr1:37500013-37500574
  hypo

SEQ ID NO: 136955 - DNA, 45 bp, Homo sapiens
  chr1:37851535-37851580
  hypo
tcacaattcacatctctagctaacggaagtaaaatttcagagcta

SEQ ID NO: 136956 - DNA, 46 bp, Homo sapiens; identical to SEQ ID NO: 60000
  chr1:37863806-37863852
  hypo

SEQ ID NO: 136957 - DNA, 180 bp, Homo sapiens
  chr1:37898812-37898992
  hypo
gcgcagagcaacactcgtgtcccaacacatacacaaagcacagaggcaaaagccagcatgccaggcagacagaaccagccccaaaagccccttcacatgccggacagacacacttgcatgcacgtaggtacccagcacctgcacacagggatgtgcccccgcacgcgcagcggtgctgag

SEQ ID NO: 136958 - DNA, 24 bp, Homo sapiens
  chr1:37936870-37936894
  hypo
ctcgaaaataaaaaataaaaagaa

SEQ ID NO: 136959 - DNA, 396 bp, Homo sapiens; identical to SEQ ID NO: 35478
  chr1:37940473-37940869
  hypo

SEQ ID NO: 136960 - DNA, 30 bp, Homo sapiens
  chr1:37980762-37980792
  hypo
ctccggaagagctcgcgaatccatttgctt

SEQ ID NO: 136961 - DNA, 30 bp, Homo sapiens
  chr1:37981241-37981271
  hypo
agtccaaggtgtaaacgttgttttcacttg

SEQ ID NO: 136962 - DNA, 30 bp, Homo sapiens
  chr1:37981557-37981587
  hypo
ctgaataactggtttcgtgtgcggatcttg

SEQ ID NO: 136963 - DNA, 33 bp, Homo sapiens
  chr1:38030258-38030291
  hypo
ggaatgagccactgcgcccggccagagagccaa

SEQ ID NO: 136964 - DNA, 93 bp, Homo sapiens; identical to SEQ ID NO: 60003
  chr1:38149927-38150020
  hypo

SEQ ID NO: 136965 - DNA, 182 bp, Homo sapiens; identical to SEQ ID NO: 60004
  chr1:38171208-38171390
  hypo

SEQ ID NO: 136966 - DNA, 43 bp, Homo sapiens
  chr1:38184576-38184619
  hypo
acaggagaaggggagggtaaccgggccccagggctggatctgg

SEQ ID NO: 136967 - DNA, 59 bp, Homo sapiens
  chr1:38206996-38207055
  hypo
taaagtggacgttcccggtgccttcaggggattgaggaaagtaccgatcagatagtaat

SEQ ID NO: 136968 - DNA, 38 bp, Homo sapiens; identical to SEQ ID NO: 14504
  chr1:38294271-38294309
  hypo

SEQ ID NO: 136969 - DNA, 97 bp, Homo sapiens
  chr1:38327725-38327822
  hypo
aaataaaaaaatctgtgttaaataactaaagttgaaaattgaatgtcagttttattatggtggattttctcccgtgtcttcacgactcacagcgctg

SEQ ID NO: 136970 - DNA, 87 bp, Homo sapiens
  chr1:38398322-38398409
  hypo
gccaccacccccggcctattatccccattttatatacaaggcaaccaagttcagagaggttaagtctgaggtcgcagagtgactagc

SEQ ID NO: 136971 - DNA, 28 bp, Homo sapiens
  chr1:38405024-38405052
  hypo
aaactccgtctcaaaaaaataaataaaa

SEQ ID NO: 136972 - DNA, 20 bp, Homo sapiens
  chr1:38431138-38431158
  hypo
atgttgcatgttgggcgggg

SEQ ID NO: 136973 - DNA, 31 bp, Homo sapiens; identical to SEQ ID NO: 14505
  chr1:38459550-38459581
  hypo

SEQ ID NO: 136974 - DNA, 314 bp, Homo sapiens
  chr1:38492843-38493157
  hypo
cccccatgctgctgacggtggggcactgagcagttagagctgcacgtcctccagcagggaaggcagccaacagatgcagactcgctctgcctacctgtggaggccggtgaggccagggcctgttgggacttgaaacagtgaggcaagtgggtgtgtggtgctgggctccccgctcaagttctcccagcgtgccagttcccggagccttatgtgcagggtgttggggaagggcgggctgaatcgtgggtgggagtcttggctcaaagccccaggtgagtggaggaattgggggcggacctgaagtactgtcttga

SEQ ID NO: 136975 - DNA, 681 bp, Homo sapiens; identical to SEQ ID NO: 35495
  chr1:38510052-38510733
  hypo

SEQ ID NO: 136976 - DNA, 1026 bp, Homo sapiens; identical to SEQ ID NO: 355
  chr1:38510773-38511799
  hypo

SEQ ID NO: 136977 - DNA, 292 bp, Homo sapiens; identical to SEQ ID NO: 35497
  chr1:38511821-38512113
  hypo

SEQ ID NO: 136978 - DNA, 313 bp, Homo sapiens; identical to SEQ ID NO: 35498
  chr1:38512126-38512439
  hypo

SEQ ID NO: 136979 - DNA, 702 bp, Homo sapiens; identical to SEQ ID NO: 103178
  chr1:38512643-38513345
  hypo

SEQ ID NO: 136980 - DNA, 99 bp, Homo sapiens; identical to SEQ ID NO: 35499
  chr1:38580184-38580283
  hypo

SEQ ID NO: 136981 - DNA, 97 bp, Homo sapiens
  chr1:38673132-38673229
  hypo
ccagctcggaggctgcgaggcagagccgtgaacgccaacagtctggaggcaggctccggagggagacaggctcgggcccattcgctgagcttggttc

SEQ ID NO: 136982 - DNA, 30 bp, Homo sapiens
  chr1:38724079-38724109
  hypo
ggctgttgttttaaacgcgctcattagcca

SEQ ID NO: 136983 - DNA, 259 bp, Homo sapiens; identical to SEQ ID NO: 60015
  chr1:38953060-38953319
  hypo

SEQ ID NO: 136984 - DNA, 75 bp, Homo sapiens; identical to SEQ ID NO: 103180
  chr1:39043983-39044058
  hypo

SEQ ID NO: 136985 - DNA, 446 bp, Homo sapiens; identical to SEQ ID NO: 103181
  chr1:39044095-39044541
  hypo

SEQ ID NO: 136986 - DNA, 30 bp, Homo sapiens
  chr1:39075313-39075343
  hypo
tgctcaccgctcagccgcttgtatcctcaa

SEQ ID NO: 136987 - DNA, 145 bp, Homo sapiens; identical to SEQ ID NO: 14510
  chr1:39174395-39174540
  hypo

SEQ ID NO: 136988 - DNA, 30 bp, Homo sapiens
  chr1:39248508-39248538
  hypo
gaggggagtaagtgacggcccggaaagcat

SEQ ID NO: 136989 - DNA, 449 bp, Homo sapiens; identical to SEQ ID NO: 103182
  chr1:39269714-39270163
  hypo

SEQ ID NO: 136990 - DNA, 518 bp, Homo sapiens; identical to SEQ ID NO: 103183
  chr1:39284065-39284583
  hypo

SEQ ID NO: 136991 - DNA, 45 bp, Homo sapiens
  chr1:39326751-39326796
  hypo
aaaaattgttaaagccggccgcgcggtggctcacgcttgtaatcc

SEQ ID NO: 136992 - DNA, 34 bp, Homo sapiens; identical to SEQ ID NO: 14511
  chr1:39345383-39345417
  hypo

SEQ ID NO: 136993 - DNA, 121 bp, Homo sapiens; identical to SEQ ID NO: 60021
  chr1:39345656-39345777
  hypo

SEQ ID NO: 136994 - DNA, 83 bp, Homo sapiens; identical to SEQ ID NO: 60022
  chr1:39388384-39388467
  hypo

SEQ ID NO: 136995 - DNA, 106 bp, Homo sapiens; identical to SEQ ID NO: 14513
  chr1:39416851-39416957
  hypo

SEQ ID NO: 136996 - DNA, 36 bp, Homo sapiens
  chr1:39455438-39455474
  hypo
gggattacaggcgtgagccaccgcacccagccgata

SEQ ID NO: 136997 - DNA, 30 bp, Homo sapiens; identical to SEQ ID NO: 358
  chr1:39483421-39483451
  hypo

SEQ ID NO: 136998 - DNA, 25 bp, Homo sapiens
  chr1:39642821-39642846
  hypo
tttgagacctagtttcgctcttgtt

SEQ ID NO: 136999 - DNA, 25 bp, Homo sapiens
  chr1:39643085-39643110
  hypo
tcccggcctaactactgtttctata

SEQ ID NO: 137000 - DNA, 32 bp, Homo sapiens; identical to SEQ ID NO: 14515
  chr1:39739271-39739303
  hypo

SEQ ID NO: 137001 - DNA, 32 bp, Homo sapiens; identical to SEQ ID NO: 14516
  chr1:39739542-39739574
  hypo

SEQ ID NO: 137002 - DNA, 492 bp, Homo sapiens; identical to SEQ ID NO: 103194
  chr1:39874756-39875248
  hypo

SEQ ID NO: 137003 - DNA, 40 bp, Homo sapiens; identical to SEQ ID NO: 60028
  chr1:39920596-39920636
  hypo

SEQ ID NO: 137004 - DNA, 716 bp, Homo sapiens; identical to SEQ ID NO: 103195
  chr1:39956619-39957335
  hypo

SEQ ID NO: 137005 - DNA, 38 bp, Homo sapiens
  chr1:40025744-40025782
  hypo
agccactgtgcccagccgaggtgacaccagatctaaag

SEQ ID NO: 137006 - DNA, 135 bp, Homo sapiens; identical to SEQ ID NO: 60031
  chr1:40030073-40030208
  hypo

SEQ ID NO: 137007 - DNA, 23 bp, Homo sapiens
  chr1:40053788-40053811
  hypo
agccactgcgcccagcctagtca

SEQ ID NO: 137008 - DNA, 17 bp, Homo sapiens
  chr1:40066239-40066256
  hypo
cacggcgtctggcccga

SEQ ID NO: 137009 - DNA, 102 bp, Homo sapiens
  chr1:40081556-40081658
  hypo
agcctgaatgagtcttttctagcaggtgtagagcaggagtcaggtttcgcctggtgtattagttactgattgctatgtaacaatgaccgtaaacctagtgct

SEQ ID NO: 137010 - DNA, 30 bp, Homo sapiens
  chr1:40101052-40101082
  hypo
ggttagccttgcacacgtcactgcctctca

SEQ ID NO: 137011 - DNA, 626 bp, Homo sapiens; identical to SEQ ID NO: 103197
  chr1:40105060-40105686
  hypo

SEQ ID NO: 137012 - DNA, 34 bp, Homo sapiens; identical to SEQ ID NO: 60033
  chr1:40117399-40117433
  hypo

SEQ ID NO: 137013 - DNA, 249 bp, Homo sapiens
  chr1:40124817-40125066
  hypo
gcaggtgcagtccgccggggtgtctgtgccacaccataaggcacatgggcggccacagtgcccatctcctgagccccagccacatggaacatctggtcatcaaagaagatgtgtgggcggatcttctcaaggagagggcccttgggcgctccagcaaggaacaaggcttcatctgtctccaggccccagctgcgcagggtcttgagagcccgggccccggaactggctgcactgcgtgctgtcaccaag

SEQ ID NO: 137014 - DNA, 182 bp, Homo sapiens; identical to SEQ ID NO: 103199
  chr1:40149562-40149744
  hypo

SEQ ID NO: 137015 - DNA, 8 bp, Homo sapiens
  chr1:40149784-40149792
  hypo
cgtgctgc

SEQ ID NO: 137016 - DNA, 32 bp, Homo sapiens
  chr1:40179272-40179304
  hypo
gagccacggcaccctgccgtgatattacttta

SEQ ID NO: 137017 - DNA, 30 bp, Homo sapiens
  chr1:40251636-40251666
  hypo
ttgttaatctcgcagcgctggaggccccaa

SEQ ID NO: 137018 - DNA, 344 bp, Homo sapiens; identical to SEQ ID NO: 103205
  chr1:40254462-40254806
  hypo

SEQ ID NO: 137019 - DNA, 120 bp, Homo sapiens; identical to SEQ ID NO: 103206
  chr1:40254922-40255042
  hypo

SEQ ID NO: 137020 - DNA, 117 bp, Homo sapiens; identical to SEQ ID NO: 103207
  chr1:40255068-40255185
  hypo

SEQ ID NO: 137021 - DNA, 30 bp, Homo sapiens; identical to SEQ ID NO: 14518
  chr1:40346515-40346545
  hypo

SEQ ID NO: 137022 - DNA, 86 bp, Homo sapiens; identical to SEQ ID NO: 14519
  chr1:40349615-40349701
  hypo

SEQ ID NO: 137023 - DNA, 19 bp, Homo sapiens
  chr1:40350297-40350316
  hypo
actccgtcccaaacaaaac

SEQ ID NO: 137024 - DNA, 23 bp, Homo sapiens
  chr1:40357270-40357293
  hypo
cagattcctggccctgacctacg

SEQ ID NO: 137025 - DNA, 23 bp, Homo sapiens
  chr1:40357592-40357615
  hypo
ccgggtgggtagattcttaagac

SEQ ID NO: 137026 - DNA, 281 bp, Homo sapiens; identical to SEQ ID NO: 103210
  chr1:40367950-40368231
  hypo

SEQ ID NO: 137027 - DNA, 45 bp, Homo sapiens
  chr1:40409693-40409738
  hypo
caccaggcaatataggcgtattcattctgttttttttttttttga

SEQ ID NO: 137028 - DNA, 32 bp, Homo sapiens; identical to SEQ ID NO: 103211
  chr1:40420567-40420599
  hypo

SEQ ID NO: 137029 - DNA, 123 bp, Homo sapiens; identical to SEQ ID NO: 103212
  chr1:40420931-40421054
  hypo

SEQ ID NO: 137030 - DNA, 22 bp, Homo sapiens
  chr1:40651080-40651102
  hypo
cgtgagccaccttgcctagtcc

SEQ ID NO: 137031 - DNA, 22 bp, Homo sapiens
  chr1:40685624-40685646
  hypo
aacagaagtactggccaggtgc

SEQ ID NO: 137032 - DNA, 22 bp, Homo sapiens
  chr1:40685885-40685907
  hypo
cgagactctgtctcaaaaaaga

SEQ ID NO: 137033 - DNA, 30 bp, Homo sapiens
  chr1:40770365-40770395
  hypo
tggggaggcatctcacgggctgcacggagc

SEQ ID NO: 137034 - DNA, 149 bp, Homo sapiens; identical to SEQ ID NO: 60045
  chr1:40771001-40771150
  hypo

SEQ ID NO: 137035 - DNA, 30 bp, Homo sapiens
  chr1:40905029-40905059
  hypo
taccctttgtaacagcgcatgcctaactgg

SEQ ID NO: 137036 - DNA, 23 bp, Homo sapiens
  chr1:40906607-40906630
  hypo
ggagtctcgctctgtcgtacaag

SEQ ID NO: 137037 - DNA, 30 bp, Homo sapiens
  chr1:40946594-40946624
  hypo
ttcaagggtttcatcgaagtttgtgacctt

SEQ ID NO: 137038 - DNA, 30 bp, Homo sapiens; identical to SEQ ID NO: 60046
  chr1:40985010-40985040
  hypo

SEQ ID NO: 137039 - DNA, 163 bp, Homo sapiens
  chr1:41116837-41117000
  hypo
acttggtttggaaacacggtcgttgcagatgtgacaagttaagatgagatcatgctggagaagggtgggtccctcatccaatataaccagtgtccttataggaaggtggccacgtgaagacagacacggggagagcgccatgtgccgacggaggcagaaatgg

SEQ ID NO: 137040 - DNA, 33 bp, Homo sapiens
  chr1:41170003-41170036
  hypo
aagtgctggtattacaggcgtgagccacagcgc

SEQ ID NO: 137041 - DNA, 31 bp, Homo sapiens; identical to SEQ ID NO: 14525
  chr1:41236636-41236667
  hypo

SEQ ID NO: 137042 - DNA, 30 bp, Homo sapiens; identical to SEQ ID NO: 14526
  chr1:41253451-41253481
  hypo

SEQ ID NO: 137043 - DNA, 30 bp, Homo sapiens; identical to SEQ ID NO: 60050
  chr1:41255333-41255363
  hypo

SEQ ID NO: 137044 - DNA, 30 bp, Homo sapiens; identical to SEQ ID NO: 14527
  chr1:41271855-41271885
  hypo

SEQ ID NO: 137045 - DNA, 364 bp, Homo sapiens
  chr1:41281552-41281916
  hypo
caggtctctctgaccccgagctgctgtccttaaggtcaccacgaaacatgaatataaataaagccacatagaaggtgacttgggccacacatagggaggcaagcatcgggagttggcagttctgaaggggggatagtggggtgcgggaatcagaggctccgtagagctttgtagcatttgtgttcctgtaggcgtggacgatgagcagagtctcgcaggcacagacatgaggtgttctgcgtagcatgcaccgtgccagcaacggtgcagaggtggggagactggggacatctgggaaggctggcgggtcagtacacagagatgtatttccagagaagcctgttccctccggagtctcctccag

SEQ ID NO: 137046 - DNA, 30 bp, Homo sapiens; identical to SEQ ID NO: 60053
  chr1:41285481-41285511
  hypo

SEQ ID NO: 137047 - DNA, 31 bp, Homo sapiens; identical to SEQ ID NO: 60054
  chr1:41292201-41292232
  hypo

SEQ ID NO: 137048 - DNA, 80 bp, Homo sapiens
  chr1:41295713-41295793
  hypo
gagtgcatgtgtagacgtgcacgtacacgttcacatgcacacagactgtgtaaatgctgttgaaccgggagctcagtagg

SEQ ID NO: 137049 - DNA, 31 bp, Homo sapiens; identical to SEQ ID NO: 60055
  chr1:41304606-41304637
  hypo

SEQ ID NO: 137050 - DNA, 560 bp, Homo sapiens; identical to SEQ ID NO: 103232
  chr1:41326953-41327513
  hypo

SEQ ID NO: 137051 - DNA, 30 bp, Homo sapiens
  chr1:41388857-41388887
  hypo
cacagaaagcccgtccgaccgctctccctt

SEQ ID NO: 137052 - DNA, 20 bp, Homo sapiens
  chr1:41448078-41448098
  hypo
tttgaggtagtcttattctg

SEQ ID NO: 137053 - DNA, 162 bp, Homo sapiens
  chr1:41451886-41452048
  hypo
aagccactttgggcaggtggtcggggagtctcccaagagaggccatttgagctgagaggccagtcacagcgagagtggaatgagaagtgcggaggcgcagggctacgaaggcgtggttggtccgggaatggaggggaggccggcatagctaaggcagagtga

SEQ ID NO: 137054 - DNA, 30 bp, Homo sapiens
  chr1:41462012-41462042
  hypo
atcagtgcagatgggcgtcctggtggcagc

SEQ ID NO: 137055 - DNA, 395 bp, Homo sapiens
  chr1:41472914-41473309
  hypo
ggacaggctgaaggacggagcctccacccaaccgaggttacaaatgccaactgggaggcattttcttctgtgacaaaatgtctcataaggaaagcctggagaattagagcttacttacaagcctttgccacccactcagcgagggaggtttctctctagcggaagcagagttctgtagttggtgtctgttttctgaacatctccaggtcgtagacatgccagaacacaacccagggcagatgggcggaaccatgaggctgggcaagaggagaaccctgttccagaccaagaactcagtcatgagtaagagctgcctcacgctggcccagcctttggctctgcgtgcccaggacgcgtgtcttagggtgatgctgtggcttcgaggagcaggctgg

SEQ ID NO: 137056 - DNA, 138 bp, Homo sapiens; identical to SEQ ID NO: 60060
  chr1:41483522-41483660
  hypo

SEQ ID NO: 137057 - DNA, 30 bp, Homo sapiens; identical to SEQ ID NO: 60061
  chr1:41484025-41484055
  hypo

SEQ ID NO: 137058 - DNA, 348 bp, Homo sapiens; identical to SEQ ID NO: 60062
  chr1:41485928-41486276
  hypo

SEQ ID NO: 137059 - DNA, 52 bp, Homo sapiens; identical to SEQ ID NO: 60063
  chr1:41488286-41488338
  hypo

SEQ ID NO: 137060 - DNA, 30 bp, Homo sapiens
  chr1:41507234-41507264
  hypo
cacctgaaaagcggacgtgtgccagacagt

SEQ ID NO: 137061 - DNA, 30 bp, Homo sapiens; identical to SEQ ID NO: 14531
  chr1:41622015-41622045
  hypo

SEQ ID NO: 137062 - DNA, 30 bp, Homo sapiens; identical to SEQ ID NO: 14532
  chr1:41825183-41825213
  hypo

SEQ ID NO: 137063 - DNA, 476 bp, Homo sapiens; identical to SEQ ID NO: 35531
  chr1:41832017-41832493
  hypo

SEQ ID NO: 137064 - DNA, 90 bp, Homo sapiens
  chr1:41915193-41915283
  hypo
caggtgtgaggaggccgaaagcccaggcaggttgacgactgtaaaacgccggttggatttagcaaaatggaggtccggggccttgagcag

SEQ ID NO: 137065 - DNA, 99 bp, Homo sapiens
  chr1:41933800-41933899
  hypo
ctgactcgtcttctccgagggttagtttctagaaaatgggagtgaaatactgctttcctgcaggtgtcaggtaaggatcaaaagcgataaggcctgtaa

SEQ ID NO: 137066 - DNA, 254 bp, Homo sapiens
  chr1:41934215-41934469
  hypo
agctggtgacacgggcgtgggctttgacaggtgagtagatgtttatgaggggcaaggaggcagtgaaggcaggggtggggtgggtagagatggttctggggacagagggaggtgagtagaggaaggtgggcagatggcggagcttgtgttttgagctcctgtgcaacagaaatcccagatgctgcaggtgaggcagcggccaagcctggcccggttgctaccagagcagggctggcctgcggcctcctgattcc

SEQ ID NO: 137067 - DNA, 48 bp, Homo sapiens; identical to SEQ ID NO: 60067
  chr1:41967565-41967613
  hypo

SEQ ID NO: 137068 - DNA, 212 bp, Homo sapiens; identical to SEQ ID NO: 60068
  chr1:41970957-41971169
  hypo

SEQ ID NO: 137069 - DNA, 150 bp, Homo sapiens
  chr1:41976353-41976503
  hypo
gggctccaggactgcgctgcccggcgtccctggggcggccggggcaaggtgtcgggtggggtgcaggggctgtgcgtgggtgtgggctctgcaggtgccccggtcccatggggtgtccagtcaggaggcctgcccgggcctccgccggtc

SEQ ID NO: 137070 - DNA, 31 bp, Homo sapiens; identical to SEQ ID NO: 14535
  chr1:41976830-41976861
  hypo

SEQ ID NO: 137071 - DNA, 30 bp, Homo sapiens; identical to SEQ ID NO: 60071
  chr1:41978734-41978764
  hypo

SEQ ID NO: 137072 - DNA, 183 bp, Homo sapiens; identical to SEQ ID NO: 60072
  chr1:41979368-41979551
  hypo

SEQ ID NO: 137073 - DNA, 525 bp, Homo sapiens; identical to SEQ ID NO: 374
  chr1:41981636-41982161
  hypo

SEQ ID NO: 137074 - DNA, 34 bp, Homo sapiens; identical to SEQ ID NO: 60074
  chr1:41991668-41991702
  hypo

SEQ ID NO: 137075 - DNA, 31 bp, Homo sapiens; identical to SEQ ID NO: 60075
  chr1:42049652-42049683
  hypo

SEQ ID NO: 137076 - DNA, 36 bp, Homo sapiens; identical to SEQ ID NO: 14537
  chr1:42120783-42120819
  hypo

SEQ ID NO: 137077 - DNA, 67 bp, Homo sapiens
  chr1:42142943-42143010
  hypo
ctaacacgcttcacacgtataatccggtctaatcctcatgacaagcctatgtcgtaagagagaaata

SEQ ID NO: 137078 - DNA, 30 bp, Homo sapiens
  chr1:42143429-42143459
  hypo
atgcgtctgcttccccgcacatcgggcggt

SEQ ID NO: 137079 - DNA, 30 bp, Homo sapiens
  chr1:42177372-42177402
  hypo
gagctggctgtctcccgatgccagagacag

SEQ ID NO: 137080 - DNA, 179 bp, Homo sapiens
  chr1:42212493-42212672
  hypo
tgccactatcactatctcagccgtgggccagccctcaggtaacggctgctgggtgcagggtataaatgccctggttccctcgcaggtgcacagagtagagaatgagcaagtcaggagggccagcatgtgacctggtgtaacagcatcacccccggctcgaggatccatgggtcagggag

SEQ ID NO: 137081 - DNA, 30 bp, Homo sapiens; identical to SEQ ID NO: 60077
  chr1:42497791-42497821
  hypo

SEQ ID NO: 137082 - DNA, 30 bp, Homo sapiens; identical to SEQ ID NO: 60078
  chr1:42506339-42506369
  hypo

SEQ ID NO: 137083 - DNA, 31 bp, Homo sapiens; identical to SEQ ID NO: 14538
  chr1:42506900-42506931
  hypo

SEQ ID NO: 137084 - DNA, 30 bp, Homo sapiens
  chr1:42514644-42514674
  hypo
gaaattggtgatttccgaggctactttggg

SEQ ID NO: 137085 - DNA, 20 bp, Homo sapiens
  chr1:42552526-42552546
  hypo
agctccgcttcccgggttca

SEQ ID NO: 137086 - DNA, 67 bp, Homo sapiens
  chr1:42630380-42630447
  hypo
catggcagcagtgcccgagagaggggtggctgttctggatgccagggggaagcggcgggacttttaa

SEQ ID NO: 137087 - DNA, 198 bp, Homo sapiens; identical to SEQ ID NO: 60080
  chr1:42633129-42633327
  hypo

SEQ ID NO: 137088 - DNA, 30 bp, Homo sapiens; identical to SEQ ID NO: 60081
  chr1:42633579-42633609
  hypo

SEQ ID NO: 137089 - DNA, 36 bp, Homo sapiens; identical to SEQ ID NO: 60082
  chr1:42802313-42802349
  hypo

SEQ ID NO: 137090 - DNA, 36 bp, Homo sapiens; identical to SEQ ID NO: 60083
  chr1:42802588-42802624
  hypo

SEQ ID NO: 137091 - DNA, 31 bp, Homo sapiens; identical to SEQ ID NO: 60084
  chr1:42851866-42851897
  hypo

SEQ ID NO: 137092 - DNA, 31 bp, Homo sapiens; identical to SEQ ID NO: 60085
  chr1:42918351-42918382
  hypo

SEQ ID NO: 137093 - DNA, 30 bp, Homo sapiens; identical to SEQ ID NO: 60086
  chr1:42919383-42919413
  hypo

SEQ ID NO: 137094 - DNA, 20 bp, Homo sapiens
  chr1:42927508-42927528
  hypo
cccagccacccaggctcctt

SEQ ID NO: 137095 - DNA, 30 bp, Homo sapiens; identical to SEQ ID NO: 14542
  chr1:43202508-43202538
  hypo

SEQ ID NO: 137096 - DNA, 190 bp, Homo sapiens
  chr1:43203988-43204178
  hypo
agacaaagcagaggggcgctcagctctgctctggccccccgaggccactggggctggggctgcctgccatggttgtgattgtgcaggagtgaggggcactcacctgccaggatgaagagggctcccccggcgatggcaacacggcccttggcaatggggttgctgtctcccacccgcgtacacttcatgc

SEQ ID NO: 137097 - DNA, 213 bp, Homo sapiens
  chr1:43209408-43209621
  hypo
gctagatgcctggggcgccagagaccagcggcgtcttccacatccaaatcttcactgtgtttgaggagttgcctttcatcccctccaaccctcccatgggctctctcctttcttctcaagcagtcatcctctcattgctcgcgcgcccttgcatgtgcgttaccaaacgcagaccgaaatcacagtcgcatctcagccgggctgccatcaccc

SEQ ID NO: 137098 - DNA, 30 bp, Homo sapiens
  chr1:43219781-43219811
  hypo
ttaaggggcaggcacggaggatgggtcaga

SEQ ID NO: 137099 - DNA, 30 bp, Homo sapiens; identical to SEQ ID NO: 60091
  chr1:43250396-43250426
  hypo

SEQ ID NO: 137100 - DNA, 89 bp, Homo sapiens; identical to SEQ ID NO: 14544
  chr1:43296452-43296541
  hypo

SEQ ID NO: 137101 - DNA, 196 bp, Homo sapiens; identical to SEQ ID NO: 14545
  chr1:43310137-43310333
  hypo

SEQ ID NO: 137102 - DNA, 30 bp, Homo sapiens
  chr1:43317065-43317095
  hypo
aggagagctttcggcggcgctcagacctca

SEQ ID NO: 137103 - DNA, 294 bp, Homo sapiens; identical to SEQ ID NO: 60094
  chr1:43353270-43353564
  hypo

SEQ ID NO: 137104 - DNA, 375 bp, Homo sapiens
  chr1:43400330-43400705
  hypo
aggatcccacaggcccaatcccgccggctcccagcagcctccgcaaccctgggtcatgtgtgaggtgagacctggcacgtgcctgttctgaacgctcccacctcacatgcccgtcccaagcttaggatttaaacacttgatgctgccaccaccccacatccatccatcaccaggtcctctcgattctgcctccgagtctgtcctacttctctacccaggcagcctgccctgggtctcatctggattctgctcccgactcttcctatccaccaaagtcagaccccatttcccacagtgaaccacccctcagaatgcagtcggagtcctgcacaccaaatgtgccaggctcggccatccacccgcttctctgctccc

SEQ ID NO: 137105 - DNA, 170 bp, Homo sapiens
  chr1:43412603-43412773
  hypo
ttggtttcctcacctagaaaacggggatgaaagttccttccttaaagggttgctgttacgttttctatcagtatccatcatgaagcctggcagaattccctccacaagtgtttgctggatcggtgaagaatagcaagctaccctcgatcgggcagcctcagcaccatctg

SEQ ID NO: 137106 - DNA, 25 bp, Homo sapiens
  chr1:43414303-43414328
  hypo
agaaagaacctcaaggctgggcgcg

SEQ ID NO: 137107 - DNA, 28 bp, Homo sapiens
  chr1:43419893-43419921
  hypo
aaaaaacacagctaggccaggcgcggtg

SEQ ID NO: 137108 - DNA, 70 bp, Homo sapiens
  chr1:43446013-43446083
  hypo
gtttcttcctcatacctgccccgctccgatgaggctccctccaggctccgcatcttgacttagttacaac

SEQ ID NO: 137109 - DNA, 30 bp, Homo sapiens; identical to SEQ ID NO: 60098
  chr1:43472358-43472388
  hypo

SEQ ID NO: 137110 - DNA, 32 bp, Homo sapiens; identical to SEQ ID NO: 14547
  chr1:43478270-43478302
  hypo

SEQ ID NO: 137111 - DNA, 31 bp, Homo sapiens; identical to SEQ ID NO: 60100
  chr1:43498269-43498300
  hypo

SEQ ID NO: 137112 - DNA, 90 bp, Homo sapiens; identical to SEQ ID NO: 14548
  chr1:43521464-43521554
  hypo

SEQ ID NO: 137113 - DNA, 31 bp, Homo sapiens; identical to SEQ ID NO: 60102
  chr1:43524035-43524066
  hypo

SEQ ID NO: 137114 - DNA, 146 bp, Homo sapiens; identical to SEQ ID NO: 60103
  chr1:43532589-43532735
  hypo

SEQ ID NO: 137115 - DNA, 84 bp, Homo sapiens; identical to SEQ ID NO: 14549
  chr1:43533471-43533555
  hypo

SEQ ID NO: 137116 - DNA, 405 bp, Homo sapiens; identical to SEQ ID NO: 14550
  chr1:43534660-43535065
  hypo

SEQ ID NO: 137117 - DNA, 24 bp, Homo sapiens
  chr1:43593210-43593234
  hypo
gtgagactccgcctcaaaaaaaaa

SEQ ID NO: 137118 - DNA, 36 bp, Homo sapiens; identical to SEQ ID NO: 60107
  chr1:43626938-43626974
  hypo

SEQ ID NO: 137119 - DNA, 33 bp, Homo sapiens; identical to SEQ ID NO: 14551
  chr1:43702285-43702318
  hypo

SEQ ID NO: 137120 - DNA, 239 bp, Homo sapiens; identical to SEQ ID NO: 60109
  chr1:43738644-43738883
  hypo

SEQ ID NO: 137121 - DNA, 31 bp, Homo sapiens; identical to SEQ ID NO: 14553
  chr1:43739132-43739163
  hypo

SEQ ID NO: 137122 - DNA, 252 bp, Homo sapiens
  chr1:43750606-43750858
  hypo
tcagaaccagtcattgctaggcgggcagctccccgtgggcaacggctggctgaaggatctgtaccctggcgctgcagggagctgggcgttcagcccctcagtgtggtgcttgtgaaattaacgaggggagcgtgagagtgaatatacaggtgggagcgggagagacgtcctgggaaggagaggtcagctgctcattcattcctcagcctgctgtgggcctcatcctagtactaggtccgcaaaacatgagaa

SEQ ID NO: 137123 - DNA, 164 bp, Homo sapiens; identical to SEQ ID NO: 14554
  chr1:43754320-43754484
  hypo

SEQ ID NO: 137124 - DNA, 30 bp, Homo sapiens; identical to SEQ ID NO: 60113
  chr1:43774696-43774726
  hypo

SEQ ID NO: 137125 - DNA, 31 bp, Homo sapiens; identical to SEQ ID NO: 60114
  chr1:43775219-43775250
  hypo

SEQ ID NO: 137126 - DNA, 202 bp, Homo sapiens
  chr1:43782855-43783057
  hypo
ctcatcctgtgaagggcgaggagaccatcctgcagttcagctcagggaccttgacacttacccggcggccaaaactgcagcccgagcccctgagctacccagtgctagagtgggaggacatcacctttgaggacctcatcggggaggggaacttcggccaggtcatccgggccatgatcaagaaggacgggctgaagatgaa

SEQ ID NO: 137127 - DNA, 152 bp, Homo sapiens; identical to SEQ ID NO: 60116
  chr1:43783571-43783723
  hypo

SEQ ID NO: 137128 - DNA, 31 bp, Homo sapiens; identical to SEQ ID NO: 14556
  chr1:43798209-43798240
  hypo

SEQ ID NO: 137129 - DNA, 44 bp, Homo sapiens; identical to SEQ ID NO: 382
  chr1:43803508-43803552
  hypo

SEQ ID NO: 137130 - DNA, 30 bp, Homo sapiens; identical to SEQ ID NO: 383
  chr1:43803852-43803882
  hypo

SEQ ID NO: 137131 - DNA, 30 bp, Homo sapiens; identical to SEQ ID NO: 384
  chr1:43804341-43804371
  hypo

SEQ ID NO: 137132 - DNA, 209 bp, Homo sapiens; identical to SEQ ID NO: 385
  chr1:43805019-43805228
  hypo

SEQ ID NO: 137133 - DNA, 104 bp, Homo sapiens; identical to SEQ ID NO: 386
  chr1:43814926-43815030
  hypo

SEQ ID NO: 137134 - DNA, 30 bp, Homo sapiens; identical to SEQ ID NO: 387
  chr1:43817944-43817974
  hypo

SEQ ID NO: 137135 - DNA, 269 bp, Homo sapiens; identical to SEQ ID NO: 388
  chr1:43818176-43818445
  hypo

SEQ ID NO: 137136 - DNA, 30 bp, Homo sapiens
  chr1:43828665-43828695
  hypo
gccacagtggcatccgcagcagcagatgag

SEQ ID NO: 137137 - DNA, 30 bp, Homo sapiens; identical to SEQ ID NO: 60125
  chr1:43831026-43831056
  hypo

SEQ ID NO: 137138 - DNA, 106 bp, Homo sapiens
  chr1:43834715-43834821
  hypo
gaatttctacctccagcggcccctggaacagtagcacacaacgatctaacaactgcttgtatgattggatggtgtaagtgcggacagaattagggaatttgggcta

SEQ ID NO: 137139 - DNA, 202 bp, Homo sapiens; identical to SEQ ID NO: 60126
  chr1:43842606-43842808
  hypo

SEQ ID NO: 137140 - DNA, 30 bp, Homo sapiens; identical to SEQ ID NO: 14565
  chr1:43888256-43888286
  hypo

SEQ ID NO: 137141 - DNA, 892 bp, Homo sapiens
  chr1:43888922-43889814
  hypo
caggccctgtctgaccggccctgccttgtggtcctgcataagccactggacaaactgctcatcaggttggtacagaggtgtggaagggcgtggcttagcagggtatgagtggtacagaggtgtggagggcatggcttagcccggtgtgagtagtatagaggtgtggagtgcgtggcttagtggggtatgagtggtacaaaggtgtggaagggtgtggcttagcggggtgaggtgtggaagggcgtggcttagcagggtatgagtggtacggaggtgtggaagggcgtggcttagtggggtatgagtggtacagaggtgtggaagggcatggcttagcggggtatgagtggtacagaggtgtggagggcatggcttagcccggtgtgagtagtatagaggtgtggaagggtctggcctagtggggtatgagtggtacagagttgcagaagggcgtggcttagcggggtatgagtggtacagaggtgtggaagggcatggctcagcgaggaatgagtaggtcagaggtgtggaagggtgtgacttaggggggtatgagtgatacagaggtatggaagggcgtggcttagcgaggtatgagtaggtcagaggtgtggaagggtgtggcttagcggggtatgagtggtaaggagtgtggaagggtgtggcttagcagggtatcagtggtacagagatgtggaagggcatggtttagcagggtatgagtggtacagaggcatggaagggcgtggcttagccgggtatgagtggtacagaggtgtggaagggcgtggcttagccgggtatgagtggtacagaggtgtggaagggcgtggcttagccgggtatcagtggtacagaggtgtggaagggcgtggcttagccagctgtgagt

SEQ ID NO: 137142 - DNA, 333 bp, Homo sapiens
  chr1:43905358-43905691
  hypo
cccccagacccactgcgagaggaggaatttgagcaactgacccaggtcatccgctgcccggttgttgtggacagttcttcaggtgggacagcttggtcagaggatgaggtgttcagttattgctgtgggaggtaagggtggtgagtagagtgggatctagggacaccctcaagtgtccctgttctccttccagctcagaatggggccccacggcttcgattggatgtgtgggaaaaggggaacattagtattgtgcagctggaggagaaactccgaggagcagctcgccaggccctggccgatgccatcatcgagcttcagctgctgccagct

SEQ ID NO: 137143 - DNA, 35 bp, Homo sapiens
  chr1:43906213-43906248
  hypo
ctccacccagcaaagcgggccggcgtagcttctgg

SEQ ID NO: 137144 - DNA, 287 bp, Homo sapiens; identical to SEQ ID NO: 35562
  chr1:43919240-43919527
  hypo

SEQ ID NO: 137145 - DNA, 119 bp, Homo sapiens; identical to SEQ ID NO: 391
  chr1:43919541-43919660
  hypo

SEQ ID NO: 137146 - DNA, 89 bp, Homo sapiens; identical to SEQ ID NO: 14568
  chr1:43969025-43969114
  hypo

SEQ ID NO: 137147 - DNA, 30 bp, Homo sapiens; identical to SEQ ID NO: 14569
  chr1:43971524-43971554
  hypo

SEQ ID NO: 137148 - DNA, 190 bp, Homo sapiens; identical to SEQ ID NO: 14570
  chr1:43987295-43987485
  hypo

SEQ ID NO: 137149 - DNA, 30 bp, Homo sapiens
  chr1:43990568-43990598
  hypo
agtgcggttccaagccgactggagaactgc

SEQ ID NO: 137150 - DNA, 36 bp, Homo sapiens; identical to SEQ ID NO: 60136
  chr1:43991182-43991218
  hypo

SEQ ID NO: 137151 - DNA, 31 bp, Homo sapiens; identical to SEQ ID NO: 14571
  chr1:44016540-44016571
  hypo

SEQ ID NO: 137152 - DNA, 213 bp, Homo sapiens
  chr1:44029986-44030199
  hypo
ttggcttctgtggagcggctgaagggcagggggagccagcagccctgccacctacgaggttccttcatgtgtctcgtccctgcatgtgtctccaggcgcacgtgttttggcataggtgtgtctggctgtgcatgtctccacatgtgtgtttgcgtgtctctgtgtgcaccgcctctggatctgcttgcatgcgcctgtttccacaggtgctag

SEQ ID NO: 137153 - DNA, 46 bp, Homo sapiens
  chr1:44030402-44030448
  hypo
ctgtgtgtgcgggtgcgtgcctgcgtttgcacggagacgccacgaa

SEQ ID NO: 137154 - DNA, 103 bp, Homo sapiens; identical to SEQ ID NO: 60140
  chr1:44044917-44045020
  hypo

SEQ ID NO: 137155 - DNA, 160 bp, Homo sapiens
  chr1:44047736-44047896
  hypo
ctggccgcaaggcttcgtctcctcatcagacttggcttcggtgtctacctcacatctcccttctgtcccccaaattctcagggctcccagtgtcgctctctgaggccacgcgactgctacatttaatgggacagtacacgtgaagcaccaggcacattgc

SEQ ID NO: 137156 - DNA, 31 bp, Homo sapiens; identical to SEQ ID NO: 60142
  chr1:44053822-44053853
  hypo

SEQ ID NO: 137157 - DNA, 30 bp, Homo sapiens
  chr1:44056874-44056904
  hypo
catcgggcgagggccgcccagcgaggcagt

SEQ ID NO: 137158 - DNA, 30 bp, Homo sapiens; identical to SEQ ID NO: 60143
  chr1:44060101-44060131
  hypo

SEQ ID NO: 137159 - DNA, 94 bp, Homo sapiens; identical to SEQ ID NO: 14574
  chr1:44063578-44063672
  hypo

SEQ ID NO: 137160 - DNA, 30 bp, Homo sapiens; identical to SEQ ID NO: 60145
  chr1:44064500-44064530
  hypo

SEQ ID NO: 137161 - DNA, 50 bp, Homo sapiens
  chr1:44068722-44068772
  hypo
ggctgccaagagccacgcaaggtgctgggtgcgtgcgaggctgtgccctg

SEQ ID NO: 137162 - DNA, 149 bp, Homo sapiens; identical to SEQ ID NO: 60146
  chr1:44069554-44069703
  hypo

SEQ ID NO: 137163 - DNA, 129 bp, Homo sapiens; identical to SEQ ID NO: 60147
  chr1:44070959-44071088
  hypo

SEQ ID NO: 137164 - DNA, 239 bp, Homo sapiens; identical to SEQ ID NO: 60148
  chr1:44072458-44072697
  hypo

SEQ ID NO: 137165 - DNA, 30 bp, Homo sapiens; identical to SEQ ID NO: 14576
  chr1:44074439-44074469
  hypo

SEQ ID NO: 137166 - DNA, 31 bp, Homo sapiens; identical to SEQ ID NO: 60150
  chr1:44082000-44082031
  hypo

SEQ ID NO: 137167 - DNA, 348 bp, Homo sapiens; identical to SEQ ID NO: 60151
  chr1:44084830-44085178
  hypo

SEQ ID NO: 137168 - DNA, 30 bp, Homo sapiens; identical to SEQ ID NO: 60152
  chr1:44087701-44087731
  hypo

SEQ ID NO: 137169 - DNA, 81 bp, Homo sapiens; identical to SEQ ID NO: 60153
  chr1:44110062-44110143
  hypo

SEQ ID NO: 137170 - DNA, 30 bp, Homo sapiens
  chr1:44132020-44132050
  hypo
tcctctttatcattccgatgagaagcacag

SEQ ID NO: 137171 - DNA, 190 bp, Homo sapiens; identical to SEQ ID NO: 60154
  chr1:44132656-44132846
  hypo

SEQ ID NO: 137172 - DNA, 222 bp, Homo sapiens
  chr1:44137395-44137617
  hypo
tgagcctctctcctgccgagcccaagggcaaacgggagttctcactgtgcacagttatgccaaaggggatggcagggtcactgtgggagagccatgcacgaggaagaaaggaagcgccgctagaagtttcagtgagcgggagctggcagaggtatgggctccaggcagtggtgtggggtggggagctgccctggaggacaccctgtcgggaggggatctgtg

SEQ ID NO: 137173 - DNA, 74 bp, Homo sapiens; identical to SEQ ID NO: 60156
  chr1:44138997-44139071
  hypo

SEQ ID NO: 137174 - DNA, 30 bp, Homo sapiens
  chr1:44140766-44140796
  hypo
atgtacttttcaggccgagcctgatgataa

SEQ ID NO: 137175 - DNA, 258 bp, Homo sapiens
  chr1:44170221-44170479
  hypo
agccatttctgggcacgtggcagcagtcgctgatctcccagctgaggggctgagcactggaatgctgtggctgcactggccccagtccatagaggggtcaactatgctggctggactggctgccttgttcctggcctaggacttagcttcataactatcacctgcaccgactaggctgaggtgctggtacttgccccaacccctacttttgtatttatatgtgtgtgtgtgtgtgcgtgcgtgcgtgcgtgcgtgtat

SEQ ID NO: 137176 - DNA, 43 bp, Homo sapiens; identical to SEQ ID NO: 60158
  chr1:44303657-44303700
  hypo

SEQ ID NO: 137177 - DNA, 163 bp, Homo sapiens
  chr1:44303819-44303982
  hypo
ctccttatgaattaataacccactcagtgctcagtgcctggcaagctgtaactttccttctcttcccataggcctgctgaattagccaccaagtacgcaaacttttcagagggagcttgcaagcctggctatgcttcagccttgatgacggccatcttccccc

SEQ ID NO: 137178 - DNA, 30 bp, Homo sapiens
  chr1:44304828-44304858
  hypo
gccccaaagtgactccggtatatttggttt

SEQ ID NO: 137179 - DNA, 202 bp, Homo sapiens
  chr1:44309569-44309771
  hypo
agactatacctcacttcagatgctaatcacaagtagtaggttgttacctatacatctcgccaaccagctataagttgtgaattccaagaccatcccctcttgggtttgatctgtttgctagagcagctcacagaattcagggaaacttatgtttatccatttattataaaggatatcataaaggatacggatgaacagccag

SEQ ID NO: 137180 - DNA, 217 bp, Homo sapiens
  chr1:44351016-44351233
  hypo
gttccagtgcaacttccgtctcctccttccccgggtccttctcacgcactcacacacaccctgctgaaacctgatcctgaggctgcctcgcgtgccggggtgctggcggggctggcgggctggggcctgtcttttggagcctgccccaccctcccctgctaccccctaggccagggcaagcaggtcaggcgtcccacacccccgctagtctgaccag

SEQ ID NO: 137181 - DNA, 134 bp, Homo sapiens
  chr1:44380111-44380245
  hypo
aggcgggaactgcagcgatgatacaaatggtgtggtggaaagaatgccgttttggagtcaggacacctgggtttgaatccacttgcagccacttgcaggctgcttgaccttgaacgtatcgtgtcgtatcgttt

SEQ ID NO: 137182 - DNA, 30 bp, Homo sapiens
  chr1:44380636-44380666
  hypo
cctttacctcccttacgcacaccccacttc

SEQ ID NO: 137183 - DNA, 405 bp, Homo sapiens; identical to SEQ ID NO: 103292
  chr1:44401967-44402372
  hypo

SEQ ID NO: 137184 - DNA, 19 bp, Homo sapiens
  chr1:44435038-44435057
  hypo
attatgcagtgtagccggg

SEQ ID NO: 137185 - DNA, 31 bp, Homo sapiens; identical to SEQ ID NO: 60160
  chr1:44436575-44436606
  hypo

SEQ ID NO: 137186 - DNA, 30 bp, Homo sapiens
  chr1:44437151-44437181
  hypo
ctatgcccctagagcgttttgggcgccgct

SEQ ID NO: 137187 - DNA, 121 bp, Homo sapiens; identical to SEQ ID NO: 35569
  chr1:44444588-44444709
  hypo

SEQ ID NO: 137188 - DNA, 82 bp, Homo sapiens
  chr1:44446768-44446850
  hypo
caccctgctcaggccagcagccggatgcccgggcccactgggcgggccagtggccgcctgcgggatgagcagactgctgggg

SEQ ID NO: 137189 - DNA, 127 bp, Homo sapiens
  chr1:44447463-44447590
  hypo
caccccagcccagacggtggcggtcatcatcccctttagacaccgggaacaccacctgcgctactggctccactatctacaccccatcttgaggcggcagcggctgcgctacggcgtctatgtcatc

SEQ ID NO: 137190 - DNA, 30 bp, Homo sapiens; identical to SEQ ID NO: 14582
  chr1:44461875-44461905
  hypo

SEQ ID NO: 137191 - DNA, 693 bp, Homo sapiens; identical to SEQ ID NO: 60164
  chr1:44463202-44463895
  hypo

SEQ ID NO: 137192 - DNA, 30 bp, Homo sapiens; identical to SEQ ID NO: 60165
  chr1:44466586-44466616
  hypo

SEQ ID NO: 137193 - DNA, 227 bp, Homo sapiens; identical to SEQ ID NO: 60166
  chr1:44483084-44483311
  hypo

SEQ ID NO: 137194 - DNA, 138 bp, Homo sapiens
  chr1:44490959-44491097
  hypo
gcaaggtggggctggcgagctggggggcagcagccacgtggaaggaacagtctcatggcaatgctggtgcacactggattaatgtcagatgggacggaagaaaggttagtttttgacaggcctcgggagaaatccatc

SEQ ID NO: 137195 - DNA, 30 bp, Homo sapiens; identical to SEQ ID NO: 60167
  chr1:44492771-44492801
  hypo

SEQ ID NO: 137196 - DNA, 29 bp, Homo sapiens
  chr1:44494131-44494160
  hypo
aatgggccaggccaggctgggcgcggtgg

SEQ ID NO: 137197 - DNA, 30 bp, Homo sapiens; identical to SEQ ID NO: 14585
  chr1:44497679-44497709
  hypo

SEQ ID NO: 137198 - DNA, 131 bp, Homo sapiens
  chr1:44584402-44584533
  hypo
ggctgcgagggcggcgcagggcgggacgggtggggcctgaccccgccccttggcgcagctgtaaataggtaaatagaaggtgattgtggcgtggcgatgtaccgatacccgcctgcgacgccgtggtggct

SEQ ID NO: 137199 - DNA, 31 bp, Homo sapiens; identical to SEQ ID NO: 60171
  chr1:44595367-44595398
  hypo

SEQ ID NO: 137200 - DNA, 30 bp, Homo sapiens
  chr1:44687672-44687702
  hypo
ctgccgcgtggggacggcccgtccgccaca

SEQ ID NO: 137201 - DNA, 396 bp, Homo sapiens
  chr1:44717917-44718313
  hypo
tgtgccaggcaggcacgcacacacgcttcccttcccctgggctgctgcaatttccatgcacagggaagcaggtgccgagctgctcccggctggctctcccctctcgtggctctgcccgccttggctgctgccccattagcttagtggccagccatctgcgacgggcctgccgcatagccctgctgtaggtgcggcgggtggccccctgtgtaacagggagctttgccattagcgcctttaatattctgacacctcagcgcagcctgctattacatgcaaacactgatcgccctgtgaaattacattgctgggcccgcgaaatggaatcgtgtataatcagcctcctccatgcactgtcagtcccatcacaaacacggcgcccggcggcttatgggg

SEQ ID NO: 137202 - DNA, 30 bp, Homo sapiens
  chr1:44722174-44722204
  hypo
gtgtacagtgttctccggctaccaacatac

SEQ ID NO: 137203 - DNA, 567 bp, Homo sapiens
  chr1:44726772-44727339
  hypo
cagtcctttgagaactcgacaggcctcgacttgaaaagggtgctaaaagcaatgatgtctccaagtgtgatgggagatatttgtgtctgctttacccttggctttttgctccggttcaggtaggagcggggtgggccggctggcagatctgagagcgtggcacgccccagcgggcagggcgcacagcgcggaggaaggcgcgagtcagtctggagtgctccccatttatcaagctcacgcaggccgccagccgagcgagtctttctatcattacacctctcaaaatccgattcataccactaatcctgccttcattctcccagattaataacatctctttcaaccttcacagtgtgataaatagacaaagagagaacaaaaggagagacagaagagagagaaagagctggagcaagtccccataatagagagagctgagaaagaggagagggaaaaaaggagagcgaacgagagcaggcagcggccagagactgcagctaccttagagagccgctctgaggagagctggcggctgcgccccgctatgcgctccgctccgtccccaaa

SEQ ID NO: 137204 - DNA, 137 bp, Homo sapiens
  chr1:44755340-44755477
  hypo
actgagccatactggctgggccgagacagccctgatggcaaacaggtgtggctagcccggcgccagccaaggcaggggatagctcattaggggaacacccccctcgctaatgggtatggccacggtgaagcccttgt

SEQ ID NO: 137205 - DNA, 30 bp, Homo sapiens; identical to SEQ ID NO: 14589
  chr1:44786159-44786189
  hypo

SEQ ID NO: 137206 - DNA, 243 bp, Homo sapiens; identical to SEQ ID NO: 60176
  chr1:44792159-44792402
  hypo

SEQ ID NO: 137207 - DNA, 30 bp, Homo sapiens
  chr1:44802349-44802379
  hypo
atcacagtaaactaacgggtctataatttc

SEQ ID NO: 137208 - DNA, 249 bp, Homo sapiens; identical to SEQ ID NO: 396
  chr1:44872923-44873172
  hypo

SEQ ID NO: 137209 - DNA, 140 bp, Homo sapiens; identical to SEQ ID NO: 103309
  chr1:44873509-44873649
  hypo

SEQ ID NO: 137210 - DNA, 99 bp, Homo sapiens; identical to SEQ ID NO: 35576
  chr1:44883115-44883214
  hypo

SEQ ID NO: 137211 - DNA, 371 bp, Homo sapiens; identical to SEQ ID NO: 35577
  chr1:44883751-44884122
  hypo

SEQ ID NO: 137212 - DNA, 28 bp, Homo sapiens
  chr1:44945063-44945091
  hypo
aggtgtgagccaccgcgctcggccaact

SEQ ID NO: 137213 - DNA, 381 bp, Homo sapiens
  chr1:44971159-44971540
  hypo
cccctgcggctggcccgcagcagggaagccctcttgcctagctctgcatggactgctcgcttgcctgagtttgcattatttatttaatgtcttgtaccgtaaataatggtaactttatggttattaggaacgggttaaggtacatgcgggtagcaccaggctgccttcaaaaggaacagtcctggcataaaatgttgcgataattgcttcactgctgagtgttggtctttattttgtgtctgatttgtcccttaagccagcgtaacattctccccacggcaggagaatgcagagagcaaattgaagggctgagcatgaacaatgcgacatggcgcactgctgggtttttcttttttcctctttcttcgtttctcccttgac

SEQ ID NO: 137214 - DNA, 144 bp, Homo sapiens; identical to SEQ ID NO: 60181
  chr1:45068756-45068900
  hypo

SEQ ID NO: 137215 - DNA, 30 bp, Homo sapiens; identical to SEQ ID NO: 14594
  chr1:45079951-45079981
  hypo

SEQ ID NO: 137216 - DNA, 356 bp, Homo sapiens; identical to SEQ ID NO: 14595
  chr1:45087573-45087929
  hypo

SEQ ID NO: 137217 - DNA, 195 bp, Homo sapiens
  chr1:45090553-45090748
  hypo
gtcatgatttaatgccgggattttttttcaaaacacattttactgctttttggtccatgtttaaaaagcaccagtgacctttttttattccgcttgccccaggtgtaatgccgaggcctctcagggcttctaacctagagagaatgagagagagagagagagagagagagagagagaaagcgcacaaacaggagc

SEQ ID NO: 137218 - DNA, 31 bp, Homo sapiens; identical to SEQ ID NO: 60184
  chr1:45092411-45092442
  hypo

SEQ ID NO: 137219 - DNA, 100 bp, Homo sapiens; identical to SEQ ID NO: 14596
  chr1:45101745-45101845
  hypo

SEQ ID NO: 137220 - DNA, 570 bp, Homo sapiens
  chr1:45106052-45106622
  hypo
ctttagttctctctgtcgcctgttgggaggggtgaggagaggtggcaaggagcaaggcaccttctgtcccccgtggcaactgatgggatttaatcgccttttggaacacaattgttaagctaggacagagggagtgcaggcagaaggagcaagtatcaatggttttaaacggcgtctgtctctctgcgtctctcctgacgtgaggcagtgaaacgcgttatcgaggaggcccggaaagtggctaagtgcgtttgacacacgccaactccctgcctccacactggataattgcattgtcaactgttcagcgaggtggcaggtgacactgcaggccgattgattgtcccgcatcgcagctccccagactgtcagctccccaatcgatggcgtttacacaagacaccgtaactgcatctgtaactaattccagtgtaaaactcgccggaagctgctgcccctgccctccgtgttggagagcacaggcccctggagggccccgagacgtttcctttctccctgggctctggttttgttgggagcagcaggtgaggaaatcgatgcctccttttt

SEQ ID NO: 137221 - DNA, 30 bp, Homo sapiens
  chr1:45107254-45107284
  hypo
gcaagctggcgggggcgctgtctgcataaa

SEQ ID NO: 137222 - DNA, 256 bp, Homo sapiens
  chr1:45111997-45112253
  hypo
tgtcataaattcattccagcccgttgtggttgatcagtttatctcggccggggccgcgagtgctgctggcatgatgtatgggccgcggcgcagggcccggctgcccatgaatcaccgcagctgctccgtgtcagcgccggagcgggccgtatgggttctgcgcaaccagcttgtggtggggaggaatgacgtatggatgtttatttaataattctctcctactccagctgagcagggcgggcggggttgtaagggg

SEQ ID NO: 137223 - DNA, 347 bp, Homo sapiens
  chr1:45120344-45120691
  hypo
gacccggcgtgccaggcgtgcctccaccatgcgttctatgtctctggccaggactacttcgtcagccctcgagtagaggtagagctcgggccagcgagagcccgcgtcctgtagcctgtcatagaagtgggtgtggaagagggctgtgatgggagcaagcaggacgtggaacaggacgaccaccagggcaaaggccaccagcagcaacaggcgcagcatggcggcccggcgctccaggatggctgccagggcccgcagagcccctaccaggttgctgtcaccaggagcgctgtcaaagatggtgcccaccacacgcaggcggcagaagcgacgggtctgcaggagct

SEQ ID NO: 137224 - DNA, 26 bp, Homo sapiens
  chr1:45131013-45131039
  hypo
aacatgcaatctttgccgggcgcagt

SEQ ID NO: 137225 - DNA, 82 bp, Homo sapiens; identical to SEQ ID NO: 60191
  chr1:45156592-45156674
  hypo

SEQ ID NO: 137226 - DNA, 30 bp, Homo sapiens; identical to SEQ ID NO: 60192
  chr1:45183973-45184003
  hypo

SEQ ID NO: 137227 - DNA, 586 bp, Homo sapiens
  chr1:45190028-45190614
  hypo
gtttttgcagcaggccgcggccgccaaggccatcgggtaagcgggcaggggttagtgggtagctgcagcaagcctggcttggcgctgccggcgggccccgggagcgctccgtgcgccgggtgggcgggggtgtgcgccgggtgagccccagggcgtcgccccagcccgaacccccggcccagggtcctggcgcgcaacgacatgagcatcgccgaggagctgctgtacctgcgcgtggtgcgtggcctaatggccgccatgggcaacacggaccacagcaacagccagcggctggccagcctcacgctggaggtgcgcgcggcggctggttagggggcgggaagggcggcggcacccgcagccccgtcgcccccgcagtcacgccgcctcgcccgcgcggcgcagtgcttcgtgcagatgttccccttggtggcggagcacgtgcgcaagtgcatgggggaggaactctaccagctcttcctggtaagtgcgcccttcctgccccgccgcaatgagcagatggcggctcggacagtgtgatgccccttcagacagtccccatcctggagcgcgccacatgcagagt

SEQ ID NO: 137228 - DNA, 133 bp, Homo sapiens
  chr1:45190896-45191029
  hypo
tgggacgagggaagccgggcgcaggcgccgccagcacagcctcacgcccgcctttcctgcctgcagccctgtgcctccatggcagctcctacagcatgaacactctctatggctcgcgcgattcggctcagat

SEQ ID NO: 137229 - DNA, 30 bp, Homo sapiens
  chr1:45192500-45192530
  hypo
gcataagctagactccgccaactggactga

SEQ ID NO: 137230 - DNA, 19 bp, Homo sapiens
  chr1:45197952-45197971
  hypo
cccatccagtttattacca

SEQ ID NO: 137231 - DNA, 30 bp, Homo sapiens
  chr1:45232824-45232854
  hypo
ataagcagcaagaaacggccccagtgacga

SEQ ID NO: 137232 - DNA, 30 bp, Homo sapiens
  chr1:45233204-45233234
  hypo
tctggggagagagacggagcctttagtaca

SEQ ID NO: 137233 - DNA, 379 bp, Homo sapiens
  chr1:45253064-45253443
  hypo
tgaggtctgctgagcggttgcagtaccgggccacctgagcatacacgtacctctgctcctgggtcagcagcagcctggggaaggcaggtgtaggcttgggttagagggaggtgggtggcccagtctccccacttgcgccagctctaagaccctgcccttaccggtaggtgatgctaagcacagcgtacaaggccccaaagaggaggaattccttgtagaggagcttgtagatgcttcccctccagcggagaagcaggccagagaaacctccgaagcgggcctccgccactttgagagtgtatgaaaccgtcatggtgctgggagcctggggcaggaggtcacaagagttgcccccagggctgtcgtttagttctccaga

SEQ ID NO: 137234 - DNA, 33 bp, Homo sapiens
  chr1:45264887-45264920
  hypo
tagctgcccaagtgcccgtgtctagcatttgag

SEQ ID NO: 137235 - DNA, 216 bp, Homo sapiens; identical to SEQ ID NO: 14601
  chr1:45268610-45268826
  hypo

SEQ ID NO: 137236 - DNA, 30 bp, Homo sapiens; identical to SEQ ID NO: 60197
  chr1:45269312-45269342
  hypo

SEQ ID NO: 137237 - DNA, 30 bp, Homo sapiens; identical to SEQ ID NO: 60198
  chr1:45271737-45271767
  hypo

SEQ ID NO: 137238 - DNA, 137 bp, Homo sapiens; identical to SEQ ID NO: 60199
  chr1:45280522-45280659
  hypo

SEQ ID NO: 137239 - DNA, 154 bp, Homo sapiens
  chr1:45293093-45293247
  hypo
tagtgcagccaggtgcggggtgcctgggtggccggtgggggcagcaccgccttgagggaactgaagcgctggtgcagatcaaagagggcgcgttgggagtgggcgtagtcaaagccaccctgggtcaccagggccacctcgtacagggagaagt

SEQ ID NO: 137240 - DNA, 88 bp, Homo sapiens; identical to SEQ ID NO: 60200
  chr1:45308227-45308315
  hypo

SEQ ID NO: 137241 - DNA, 121 bp, Homo sapiens
  chr1:45409392-45409513
  hypo
gcccagagctgttattattagcactttaccaacgaagaaacagatttatagtagttatgtaactaagatttaacaattagtaatggctatttgtataactaaagaatctgtattactgaat

SEQ ID NO: 137242 - DNA, 84 bp, Homo sapiens; identical to SEQ ID NO: 60201
  chr1:45454355-45454439
  hypo

SEQ ID NO: 137243 - DNA, 207 bp, Homo sapiens
  chr1:45457723-45457930
  hypo
actgctgaagggcatcgtgagcaaagtaggttttccgcttattgtaatactttaataaatagggatccagaacaagcctggtcactctcactttagcagtcttttgcatttttgtcccaatcaccttccccacgatccacttggcatgggtggatgaatgaactacggacattatgtggctttggtcacctccgccacgactgtgca

SEQ ID NO: 137244 - DNA, 30 bp, Homo sapiens; identical to SEQ ID NO: 60202
  chr1:45469112-45469142
  hypo

SEQ ID NO: 137245 - DNA, 106 bp, Homo sapiens; identical to SEQ ID NO: 60203
  chr1:45529303-45529409
  hypo

SEQ ID NO: 137246 - DNA, 39 bp, Homo sapiens; identical to SEQ ID NO: 60204
  chr1:45656869-45656908
  hypo

SEQ ID NO: 137247 - DNA, 168 bp, Homo sapiens; identical to SEQ ID NO: 60205
  chr1:45759289-45759457
  hypo

SEQ ID NO: 137248 - DNA, 33 bp, Homo sapiens
  chr1:45801239-45801272
  hypo
taccccaggccaggcacggtggctcatgcctgt

SEQ ID NO: 137249 - DNA, 25 bp, Homo sapiens
  chr1:45909227-45909252
  hypo
cgagatccatcgcaaaaaaaaaaaa

SEQ ID NO: 137250 - DNA, 30 bp, Homo sapiens
  chr1:45943420-45943450
  hypo
ctttagcccggcattcgaagactctgctcc

SEQ ID NO: 137251 - DNA, 121 bp, Homo sapiens; identical to SEQ ID NO: 14604
  chr1:45950718-45950839
  hypo

SEQ ID NO: 137252 - DNA, 30 bp, Homo sapiens
  chr1:45963175-45963205
  hypo
caagaaggcaaggccgcactcagtgctcaa

SEQ ID NO: 137253 - DNA, 84 bp, Homo sapiens; identical to SEQ ID NO: 14605
  chr1:46049071-46049155
  hypo

SEQ ID NO: 137254 - DNA, 21 bp, Homo sapiens
  chr1:46077817-46077838
  hypo
tacaggcgtgagtcaccgcgc

SEQ ID NO: 137255 - DNA, 228 bp, Homo sapiens; identical to SEQ ID NO: 60209
  chr1:46089386-46089614
  hypo

SEQ ID NO: 137256 - DNA, 108 bp, Homo sapiens
  chr1:46111786-46111894
  hypo
cctagtaagaaccggcgtttccctctcttttcggcattggtgatactcttgagagcaacaggtaggatgttcacacacaccattgtggcagcgcgaaacaatgccgga

SEQ ID NO: 137257 - DNA, 80 bp, Homo sapiens; identical to SEQ ID NO: 60210
  chr1:46131434-46131514
  hypo

SEQ ID NO: 137258 - DNA, 31 bp, Homo sapiens; identical to SEQ ID NO: 60211
  chr1:46278401-46278432
  hypo

SEQ ID NO: 137259 - DNA, 36 bp, Homo sapiens; identical to SEQ ID NO: 60212
  chr1:46338429-46338465
  hypo

SEQ ID NO: 137260 - DNA, 20 bp, Homo sapiens
  chr1:46409260-46409280
  hypo
tacaaaattagctgggcgtg

SEQ ID NO: 137261 - DNA, 91 bp, Homo sapiens
  chr1:46476445-46476536
  hypo
caacactccagacagcgtgctgcccttggcagatggagccctgagctttattcatcatcaggtgattgagatggcccgagactgcctggat

SEQ ID NO: 137262 - DNA, 30 bp, Homo sapiens
  chr1:46476849-46476879
  hypo
ctttgttgtattacgcgaagctccaccatg

SEQ ID NO: 137263 - DNA, 30 bp, Homo sapiens; identical to SEQ ID NO: 60214
  chr1:46485337-46485367
  hypo

SEQ ID NO: 137264 - DNA, 30 bp, Homo sapiens
  chr1:46495796-46495826
  hypo
ccagcccgctcagagcgataccaccacatg

SEQ ID NO: 137265 - DNA, 296 bp, Homo sapiens
  chr1:46500307-46500603
  hypo
gcacccaagctccaacgccagtaccgctctccacggcgcaagtcagcaggcagcatcccactgtcaccactggcccacaccccttctcccccacccccaacagcttcacctcagcggtccccatcgcccctgtctggccatgtagcccaggcctttcccacaaagcttcacttgtcacctcccctgggcaggcaactctcacggcccaagagtgcggagccaccccgttcaccactactcaagagggtgcagtcggctgagaaactggcagcagcacttgccgcctctgagaagaa

SEQ ID NO: 137266 - DNA, 30 bp, Homo sapiens
  chr1:46568829-46568859
  hypo
gcgtgataggggaaacgacgagtcactgtt

SEQ ID NO: 137267 - DNA, 26 bp, Homo sapiens
  chr1:46588317-46588343
  hypo
gtgtgagccaccgcgcccggcctatt

SEQ ID NO: 137268 - DNA, 35 bp, Homo sapiens
  chr1:46618504-46618539
  hypo
attacaggcatgagccaccgcgcccagcctgatta

SEQ ID NO: 137269 - DNA, 269 bp, Homo sapiens; identical to SEQ ID NO: 103355
  chr1:46632676-46632945
  hypo

SEQ ID NO: 137270 - DNA, 30 bp, Homo sapiens
  chr1:46645759-46645789
  hypo
gtgcgtgtgtgcgcacggacgcacacacac

SEQ ID NO: 137271 - DNA, 191 bp, Homo sapiens; identical to SEQ ID NO: 60215
  chr1:46653314-46653505
  hypo

SEQ ID NO: 137272 - DNA, 31 bp, Homo sapiens; identical to SEQ ID NO: 14606
  chr1:46743579-46743610
  hypo

SEQ ID NO: 137273 - DNA, 123 bp, Homo sapiens
  chr1:46744594-46744717
  hypo
acatggcaggtagcccggagccgccggatggcttccctggctgtgactgcatcctggtccagccagttttggaagaggcgcaggtgaccaaaggctccacggccccagcgctccagccgcttg

SEQ ID NO: 137274 - DNA, 90 bp, Homo sapiens; identical to SEQ ID NO: 14607
  chr1:46751245-46751335
  hypo

SEQ ID NO: 137275 - DNA, 98 bp, Homo sapiens
  chr1:46751627-46751725
  hypo
gggctgcagcacatcgctcagcagcatcccggcggggccgacgtgagcccaataagagggacccttcatctcgggatggggcccggcctcgggaggcc

SEQ ID NO: 137276 - DNA, 60 bp, Homo sapiens
  chr1:46752070-46752130
  hypo
cgctgatcacaaagacgcctgtcagaagacacatcaatggtcccacgtagaacatgggaa

SEQ ID NO: 137277 - DNA, 55 bp, Homo sapiens
  chr1:46805243-46805298
  hypo
ataagaaaaagctttcggctgggggcagcgtgagccaccgcgcccggccaagttt

SEQ ID NO: 137278 - DNA, 287 bp, Homo sapiens; identical to SEQ ID NO: 60221
  chr1:46807506-46807793
  hypo

SEQ ID NO: 137279 - DNA, 30 bp, Homo sapiens; identical to SEQ ID NO: 14609
  chr1:46871217-46871247
  hypo

SEQ ID NO: 137280 - DNA, 30 bp, Homo sapiens; identical to SEQ ID NO: 60223
  chr1:46910870-46910900
  hypo

SEQ ID NO: 137281 - DNA, 111 bp, Homo sapiens; identical to SEQ ID NO: 35607
  chr1:46913765-46913876
  hypo

SEQ ID NO: 137282 - DNA, 359 bp, Homo sapiens; identical to SEQ ID NO: 408
  chr1:46913886-46914245
  hypo

SEQ ID NO: 137283 - DNA, 78 bp, Homo sapiens; identical to SEQ ID NO: 409
  chr1:46914285-46914363
  hypo

SEQ ID NO: 137284 - DNA, 152 bp, Homo sapiens
  chr1:46921731-46921883
  hypo
cgcagccaggcccccgagtgtgcgccgtgtaaagtgacacatattcatcaccagctcgtggcgccggcgccgacgctgatacaatattagtgttgccccccctttcggagcccgctccgcccggctccccgatggcacgaatccatcacctg

SEQ ID NO: 137285 - DNA, 556 bp, Homo sapiens; identical to SEQ ID NO: 103367
  chr1:46932179-46932735
  hypo

SEQ ID NO: 137286 - DNA, 30 bp, Homo sapiens
  chr1:46949424-46949454
  hypo
gggacgtggtggtggcgcaggcagcgacag

SEQ ID NO: 137287 - DNA, 244 bp, Homo sapiens; identical to SEQ ID NO: 14612
  chr1:46963444-46963688
  hypo

SEQ ID NO: 137288 - DNA, 30 bp, Homo sapiens; identical to SEQ ID NO: 14613
  chr1:47018057-47018087
  hypo

SEQ ID NO: 137289 - DNA, 86 bp, Homo sapiens; identical to SEQ ID NO: 60231
  chr1:47033311-47033397
  hypo

SEQ ID NO: 137290 - DNA, 382 bp, Homo sapiens
  chr1:47035268-47035650
  hypo
cagtcctccgattcccgactagaaggcaaaagcctggcccaggccacgggaggcacttcactaaagaagaaaaacctgagctccagcaagctcagtaacttcatcagtcacctaattgaacgagaacccagagcaactcagtccaggctgcacaaattgagtagcactgctctgcagctcgctgcactaaaagtggaagatattttccattacagcaagtgctcccacagaaggatcacgagccacacacggagccttactctccaaataggcgcccatggcccagtcgtcccttagcctaagaactcagagagccaggctgtaataatggggctgccgtgtgagcacagcagccatcgagctgctccggttcatttcccag

SEQ ID NO: 137291 - DNA, 30 bp, Homo sapiens
  chr1:47036268-47036298
  hypo
gcctaccactggtcccgggcacccacaacc

SEQ ID NO: 137292 - DNA, 319 bp, Homo sapiens; identical to SEQ ID NO: 14615
  chr1:47041012-47041331
  hypo

SEQ ID NO: 137293 - DNA, 30 bp, Homo sapiens; identical to SEQ ID NO: 14616
  chr1:47073123-47073153
  hypo

SEQ ID NO: 137294 - DNA, 290 bp, Homo sapiens; identical to SEQ ID NO: 35621
  chr1:47078537-47078827
  hypo

SEQ ID NO: 137295 - DNA, 31 bp, Homo sapiens; identical to SEQ ID NO: 60236
  chr1:47652619-47652650
  hypo

SEQ ID NO: 137296 - DNA, 113 bp, Homo sapiens; identical to SEQ ID NO: 60237
  chr1:47684468-47684581
  hypo

SEQ ID NO: 137297 - DNA, 440 bp, Homo sapiens; identical to SEQ ID NO: 60238
  chr1:47685396-47685836
  hypo

SEQ ID NO: 137298 - DNA, 28 bp, Homo sapiens
  chr1:47749593-47749621
  hypo
agagtctccctctgtcgcccaggctgga

SEQ ID NO: 137299 - DNA, 26 bp, Homo sapiens
  chr1:47793445-47793471
  hypo
tatctgaggccaggtgcgatggctca

SEQ ID NO: 137300 - DNA, 27 bp, Homo sapiens
  chr1:47801450-47801477
  hypo
gtttttgtgacagtctcactccgtcac

SEQ ID NO: 137301 - DNA, 31 bp, Homo sapiens; identical to SEQ ID NO: 60241
  chr1:47813588-47813619
  hypo

SEQ ID NO: 137302 - DNA, 450 bp, Homo sapiens; identical to SEQ ID NO: 35635
  chr1:47903679-47904129
  hypo

SEQ ID NO: 137303 - DNA, 262 bp, Homo sapiens; identical to SEQ ID NO: 103410
  chr1:47910748-47911010
  hypo

SEQ ID NO: 137304 - DNA, 222 bp, Homo sapiens
  chr1:47974404-47974626
  hypo
tctgtgctggggagacgccctggggctctccgttctcgtccactcctcagcctattcatctcctaattcgattttctatgtcagggcggagcagtgtggaggctgagagctgtctgggccctgctcacccatttttttttttttttttggcatttctgcatctagaaaggggatgtcataagcgaggcacctcctaagtaggggctccggtggcctggctct

SEQ ID NO: 137305 - DNA, 30 bp, Homo sapiens
  chr1:48093530-48093560
  hypo
gtgagtctctgcaggcgggtgcatgcatgt

SEQ ID NO: 137306 - DNA, 103 bp, Homo sapiens; identical to SEQ ID NO: 60244
  chr1:48187538-48187641
  hypo

SEQ ID NO: 137307 - DNA, 196 bp, Homo sapiens; identical to SEQ ID NO: 35647
  chr1:48190694-48190890
  hypo

SEQ ID NO: 137308 - DNA, 316 bp, Homo sapiens; identical to SEQ ID NO: 103420
  chr1:48190924-48191240
  hypo

SEQ ID NO: 137309 - DNA, 31 bp, Homo sapiens; identical to SEQ ID NO: 60247
  chr1:48231659-48231690
  hypo

SEQ ID NO: 137310 - DNA, 104 bp, Homo sapiens; identical to SEQ ID NO: 60248
  chr1:48246982-48247086
  hypo

SEQ ID NO: 137311 - DNA, 189 bp, Homo sapiens; identical to SEQ ID NO: 60249
  chr1:48257293-48257482
  hypo

SEQ ID NO: 137312 - DNA, 143 bp, Homo sapiens
  chr1:48270032-48270175
  hypo
acacggcacatgcctcggatgaaagtgtccatgtcgagttgatccgctctccttccctgggggcctgggacacaggcttcccgtgactacactcggccactgcacacacctgctcccttgtttctcggcgtcggcttggccaa

SEQ ID NO: 137313 - DNA, 470 bp, Homo sapiens; identical to SEQ ID NO: 14623
  chr1:48459791-48460261
  hypo

SEQ ID NO: 137314 - DNA, 952 bp, Homo sapiens; identical to SEQ ID NO: 103422
  chr1:48462220-48463172
  hypo

SEQ ID NO: 137315 - DNA, 60 bp, Homo sapiens; identical to SEQ ID NO: 435
  chr1:48463405-48463465
  hypo

SEQ ID NO: 137316 - DNA, 30 bp, Homo sapiens; identical to SEQ ID NO: 60254
  chr1:48555188-48555218
  hypo

SEQ ID NO: 137317 - DNA, 31 bp, Homo sapiens; identical to SEQ ID NO: 14625
  chr1:48694609-48694640
  hypo

SEQ ID NO: 137318 - DNA, 31 bp, Homo sapiens; identical to SEQ ID NO: 60256
  chr1:48733207-48733238
  hypo

SEQ ID NO: 137319 - DNA, 946 bp, Homo sapiens; identical to SEQ ID NO: 103427
  chr1:49242175-49243121
  hypo

SEQ ID NO: 137320 - DNA, 670 bp, Homo sapiens; identical to SEQ ID NO: 442
  chr1:50798646-50799316
  hypo

SEQ ID NO: 137321 - DNA, 49 bp, Homo sapiens
  chr1:50919070-50919119
  hypo
gagtttagtccctaacgacatacaaaagacttgccggtgtgatttattc

SEQ ID NO: 137322 - DNA, 30 bp, Homo sapiens
  chr1:51025265-51025295
  hypo
ttgctgctggcagaacgcaaaccttgagtt

SEQ ID NO: 137323 - DNA, 37 bp, Homo sapiens
  chr1:51099439-51099476
  hypo
aaaagcgtctaataacgatattcgttgcctgtcaaac

SEQ ID NO: 137324 - DNA, 356 bp, Homo sapiens
  chr1:51165681-51166037
  hypo
atggtgcttaaatagcgcactttaaaacaaaaaaaactccaattggcttttcatacatccaccctccccaaaaataacgcacttgaaaaactcaaatgatatgaaaggcttcaaggcctcttttctccctttcatacccccctttttttttttatttctgtttgcagtaatctgcctttctctttctcattgctacagagcaagcgaggaggctcagagctttgaaaagggggctgtgtgtaatgggtccactagaattaatttacttgcaccaaatccattgagcacagaggttcttttcccccctctctctctctcttctcaaatcatttggagtcgaacgcagcccccggcct

SEQ ID NO: 137325 - DNA, 30 bp, Homo sapiens
  chr1:51215510-51215540
  hypo
agtggaaatgacaaccgtagaacaaacact

SEQ ID NO: 137326 - DNA, 21 bp, Homo sapiens
  chr1:51268046-51268067
  hypo
ccaccgcgcccggccattata

SEQ ID NO: 137327 - DNA, 30 bp, Homo sapiens
  chr1:51312104-51312134
  hypo
gctcgcttccgagccgcacgcatcgagcct

SEQ ID NO: 137328 - DNA, 36 bp, Homo sapiens; identical to SEQ ID NO: 14629
  chr1:51424029-51424065
  hypo

SEQ ID NO: 137329 - DNA, 31 bp, Homo sapiens; identical to SEQ ID NO: 103457
  chr1:51426398-51426429
  hypo

SEQ ID NO: 137330 - DNA, 27 bp, Homo sapiens
  chr1:51426976-51427003
  hypo
tgggattacaggcgtgagccactgcac

SEQ ID NO: 137331 - DNA, 310 bp, Homo sapiens; identical to SEQ ID NO: 14630
  chr1:51439563-51439873
  hypo

SEQ ID NO: 137332 - DNA, 28 bp, Homo sapiens
  chr1:51716219-51716247
  hypo
aattttttttttttacgcttaattcgct

SEQ ID NO: 137333 - DNA, 30 bp, Homo sapiens; identical to SEQ ID NO: 60264
  chr1:51749369-51749399
  hypo

SEQ ID NO: 137334 - DNA, 30 bp, Homo sapiens
  chr1:51749638-51749668
  hypo
aaccaccacgcccagccaaacatgaacttt

SEQ ID NO: 137335 - DNA, 252 bp, Homo sapiens; identical to SEQ ID NO: 60265
  chr1:51761676-51761928
  hypo

SEQ ID NO: 137336 - DNA, 394 bp, Homo sapiens; identical to SEQ ID NO: 14632
  chr1:51763205-51763599
  hypo

SEQ ID NO: 137337 - DNA, 31 bp, Homo sapiens; identical to SEQ ID NO: 14633
  chr1:51767451-51767482
  hypo

SEQ ID NO: 137338 - DNA, 30 bp, Homo sapiens; identical to SEQ ID NO: 60268
  chr1:51793645-51793675
  hypo

SEQ ID NO: 137339 - DNA, 25 bp, Homo sapiens
  chr1:51800920-51800945
  hypo
taagaaggcccttaatatggccggg

SEQ ID NO: 137340 - DNA, 30 bp, Homo sapiens; identical to SEQ ID NO: 60270
  chr1:51808546-51808576
  hypo

SEQ ID NO: 137341 - DNA, 84 bp, Homo sapiens
  chr1:51848398-51848482
  hypo
ttttaaaattaacaaaacaaaacacctcccaacaaagaaaagctcacgattacatgacttcacgggtgaattctaccaaacatt

SEQ ID NO: 137342 - DNA, 21 bp, Homo sapiens
  chr1:51897402-51897423
  hypo
gttaccgcgcctggccagaaa

SEQ ID NO: 137343 - DNA, 48 bp, Homo sapiens
  chr1:52049260-52049308
  hypo
gccagctggatcaggcctattcggttcgggcatcagtccagggtgatt

SEQ ID NO: 137344 - DNA, 45 bp, Homo sapiens; identical to SEQ ID NO: 14635
  chr1:52060512-52060557
  hypo

SEQ ID NO: 137345 - DNA, 204 bp, Homo sapiens; identical to SEQ ID NO: 35690
  chr1:52081940-52082144
  hypo

SEQ ID NO: 137346 - DNA, 39 bp, Homo sapiens; identical to SEQ ID NO: 14637
  chr1:52089595-52089634
  hypo

SEQ ID NO: 137347 - DNA, 25 bp, Homo sapiens
  chr1:52110287-52110312
  hypo
ccgcgcccagcccatgttgagtttt

SEQ ID NO: 137348 - DNA, 349 bp, Homo sapiens; identical to SEQ ID NO: 460
  chr1:52194940-52195289
  hypo

SEQ ID NO: 137349 - DNA, 30 bp, Homo sapiens
  chr1:52256009-52256039
  hypo
tagcacccagctcacgtggccacctaaggt

SEQ ID NO: 137350 - DNA, 43 bp, Homo sapiens
  chr1:52284962-52285005
  hypo
ctgtctccaaaaaaaaaaaaaagaaatccgatacaaatgactt

SEQ ID NO: 137351 - DNA, 46 bp, Homo sapiens; identical to SEQ ID NO: 60278
  chr1:52310964-52311010
  hypo

SEQ ID NO: 137352 - DNA, 39 bp, Homo sapiens; identical to SEQ ID NO: 60279
  chr1:52337809-52337848
  hypo

SEQ ID NO: 137353 - DNA, 39 bp, Homo sapiens; identical to SEQ ID NO: 14639
  chr1:52455124-52455163
  hypo

SEQ ID NO: 137354 - DNA, 99 bp, Homo sapiens
  chr1:52505299-52505398
  hypo
gctgagaaactacgttatactgcgatacgcaatacactggagagacgtactgctcactgaagatgattaatgttgcacggcattttaagtggatactca

SEQ ID NO: 137355 - DNA, 33 bp, Homo sapiens
  chr1:52524547-52524580
  hypo
aggcgtgagccaccgtgccgggcctgaatttgg

SEQ ID NO: 137356 - DNA, 44 bp, Homo sapiens; identical to SEQ ID NO: 60281
  chr1:52549395-52549439
  hypo

SEQ ID NO: 137357 - DNA, 20 bp, Homo sapiens
  chr1:52559282-52559302
  hypo
cagagcgagactccatctcc

SEQ ID NO: 137358 - DNA, 30 bp, Homo sapiens; identical to SEQ ID NO: 60283
  chr1:52559874-52559904
  hypo

SEQ ID NO: 137359 - DNA, 257 bp, Homo sapiens; identical to SEQ ID NO: 103478
  chr1:52608419-52608676
  hypo

SEQ ID NO: 137360 - DNA, 301 bp, Homo sapiens; identical to SEQ ID NO: 60284
  chr1:52659365-52659666
  hypo

SEQ ID NO: 137361 - DNA, 30 bp, Homo sapiens
  chr1:52718484-52718514
  hypo
cagcccagaggttgcggccaacaatgacac

SEQ ID NO: 137362 - DNA, 95 bp, Homo sapiens; identical to SEQ ID NO: 60285
  chr1:52832631-52832726
  hypo

SEQ ID NO: 137363 - DNA, 30 bp, Homo sapiens
  chr1:52852062-52852092
  hypo
ccatggcccacggtgcgggacctggagaaa

SEQ ID NO: 137364 - DNA, 30 bp, Homo sapiens
  chr1:52852345-52852375
  hypo
ctttacaggctggtgcggtgactcacgcct

SEQ ID NO: 137365 - DNA, 78 bp, Homo sapiens; identical to SEQ ID NO: 60286
  chr1:52879565-52879643
  hypo

SEQ ID NO: 137366 - DNA, 30 bp, Homo sapiens
  chr1:52902531-52902561
  hypo
taaagtctcgagtatcgtggaggtctcggg

SEQ ID NO: 137367 - DNA, 105 bp, Homo sapiens; identical to SEQ ID NO: 14642
  chr1:53053489-53053594
  hypo

SEQ ID NO: 137368 - DNA, 728 bp, Homo sapiens; identical to SEQ ID NO: 103484
  chr1:53067877-53068605
  hypo

SEQ ID NO: 137369 - DNA, 614 bp, Homo sapiens; identical to SEQ ID NO: 103485
  chr1:53098659-53099273
  hypo

SEQ ID NO: 137370 - DNA, 30 bp, Homo sapiens
  chr1:53124424-53124454
  hypo
atggcttttaggcttcgccttcggaatgca

SEQ ID NO: 137371 - DNA, 80 bp, Homo sapiens
  chr1:53129043-53129123
  hypo
gtggcgttcattatgcgctcctatccaccaaagcttatgtttgctttttttcttctttccgtatctttggtagtttaact

SEQ ID NO: 137372 - DNA, 20 bp, Homo sapiens
  chr1:53129422-53129442
  hypo
aactgcgtctaaaaaaaaag

SEQ ID NO: 137373 - DNA, 22 bp, Homo sapiens
  chr1:53164843-53164865
  hypo
atgaatgaggccgggcgcggtg

SEQ ID NO: 137374 - DNA, 30 bp, Homo sapiens
  chr1:53191201-53191231
  hypo
cgtggggaggaatagcgaaaaggtagttgg

SEQ ID NO: 137375 - DNA, 30 bp, Homo sapiens
  chr1:53232047-53232077
  hypo
cccaaagtgccaccgcgcctggtctgttac

SEQ ID NO: 137376 - DNA, 169 bp, Homo sapiens; identical to SEQ ID NO: 60291
  chr1:53238153-53238322
  hypo

SEQ ID NO: 137377 - DNA, 242 bp, Homo sapiens; identical to SEQ ID NO: 103490
  chr1:53308365-53308607
  hypo

SEQ ID NO: 137378 - DNA, 87 bp, Homo sapiens
  chr1:53479847-53479934
  hypo
attacaggcgtgagccaccgcgcccggccctgatagaacattcttaacccagctctccttcaatagctggtccgatagaaaggcaaa

SEQ ID NO: 137379 - DNA, 30 bp, Homo sapiens
  chr1:53532628-53532658
  hypo
tgtgcccacactctcgctcttagaaccccg

SEQ ID NO: 137380 - DNA, 93 bp, Homo sapiens; identical to SEQ ID NO: 60294
  chr1:53535641-53535734
  hypo

SEQ ID NO: 137381 - DNA, 31 bp, Homo sapiens; identical to SEQ ID NO: 14649
  chr1:53537412-53537443
  hypo

SEQ ID NO: 137382 - DNA, 264 bp, Homo sapiens; identical to SEQ ID NO: 60296
  chr1:53544124-53544388
  hypo

SEQ ID NO: 137383 - DNA, 30 bp, Homo sapiens
  chr1:53560773-53560803
  hypo
gaaagaccaggcacacgctgatgcggggac

SEQ ID NO: 137384 - DNA, 241 bp, Homo sapiens
  chr1:53561176-53561417
  hypo
tcacacactctgcctcgttacactcacaccgcctcggtacactcaactcgccttggtacactcaccctgcctcgatacactcacacaccccgcctcgttacacacacactgccttggtacacttaaacccgcctcagtacactcacacaacctgcctaggtacactcacacaccccagctcaatacactcacacaccctgcctcggtacacacacacaacttgcctcggtacactcaactg

SEQ ID NO: 137385 - DNA, 31 bp, Homo sapiens; identical to SEQ ID NO: 14650
  chr1:53562234-53562265
  hypo

SEQ ID NO: 137386 - DNA, 92 bp, Homo sapiens
  chr1:53583643-53583735
  hypo
ggagaggtgagcagccgcgggaactgctggtgacagctggcagcacaggccagcctcccccggagtgccagggccaccgcaggtgagggcgg

SEQ ID NO: 137387 - DNA, 30 bp, Homo sapiens; identical to SEQ ID NO: 60298
  chr1:53593696-53593726
  hypo

SEQ ID NO: 137388 - DNA, 213 bp, Homo sapiens
  chr1:53600838-53601051
  hypo
gaataaaatctctctcgtgtagcagatggcaggtgaccagaggacagagccgagtactgttcatgcattcattcaacccgcatcgtgccacgcatcacagtgggtaccccaacatgaactaggcagggttcctgtcctgagaagttcccagcctagctggtgaggagacccactcctaagcagaccatggccgccttgcgagtcagtttctcc

SEQ ID NO: 137389 - DNA, 31 bp, Homo sapiens; identical to SEQ ID NO: 60299
  chr1:53607948-53607979
  hypo

SEQ ID NO: 137390 - DNA, 38 bp, Homo sapiens
  chr1:53703057-53703095
  hypo
caagcccggccgggcgcggtggctcacacctgtaatcc

SEQ ID NO: 137391 - DNA, 24 bp, Homo sapiens
  chr1:53705684-53705708
  hypo
cacggagtccttttctccctgcaa

SEQ ID NO: 137392 - DNA, 30 bp, Homo sapiens
  chr1:53722567-53722597
  hypo
agcaacggctgtgtgcgtgagcacctccag

SEQ ID NO: 137393 - DNA, 327 bp, Homo sapiens
  chr1:53769483-53769810
  hypo
cttgaatgctctcagcgacaggggactcagtcagccgtgctggctggaggctgaacacgttccttcctcttgaacggggagggaaataagctctcaacaggagatccccactttgtacaaatggatttttcacccctccttgttctttggctcggtcagaaagactcccagggaagtggaaaggagccaagagctgccatgaaatgactttacccagcagacaggctggtgataggtttcggtgggaaaaagaaaggaaaggggcgatgaattccaacttgctgagcgataaaggaaattaaggcataataccgaggaggcagcagt

SEQ ID NO: 137394 - DNA, 30 bp, Homo sapiens; identical to SEQ ID NO: 60303
  chr1:53789949-53789979
  hypo

SEQ ID NO: 137395 - DNA, 30 bp, Homo sapiens; identical to SEQ ID NO: 60304
  chr1:53828480-53828510
  hypo

SEQ ID NO: 137396 - DNA, 31 bp, Homo sapiens; identical to SEQ ID NO: 14651
  chr1:53859594-53859625
  hypo

SEQ ID NO: 137397 - DNA, 30 bp, Homo sapiens
  chr1:53904050-53904080
  hypo
cttcttcaggggttcgggcgcttgagccac

SEQ ID NO: 137398 - DNA, 237 bp, Homo sapiens; identical to SEQ ID NO: 60306
  chr1:53905597-53905834
  hypo

SEQ ID NO: 137399 - DNA, 30 bp, Homo sapiens; identical to SEQ ID NO: 60307
  chr1:53926212-53926242
  hypo

SEQ ID NO: 137400 - DNA, 30 bp, Homo sapiens
  chr1:53947929-53947959
  hypo
tgactctcacctctccggcctcagcagcca

SEQ ID NO: 137401 - DNA, 30 bp, Homo sapiens
  chr1:53948199-53948229
  hypo
tgggcatgcaggttacgctgcggggagcag

SEQ ID NO: 137402 - DNA, 57 bp, Homo sapiens; identical to SEQ ID NO: 60308
  chr1:53986259-53986316
  hypo

SEQ ID NO: 137403 - DNA, 30 bp, Homo sapiens
  chr1:53999964-53999994
  hypo
acgacccgagggcatcgtaatgattccatg

SEQ ID NO: 137404 - DNA, 78 bp, Homo sapiens
  chr1:54009674-54009752
  hypo
ggtggcgggaggagccgttctggggcgcgcagcccagcccagatgcctggctcagcagagctgcgccacccgactcag

SEQ ID NO: 137405 - DNA, 83 bp, Homo sapiens
  chr1:54009965-54010048
  hypo
actaagagaggagcccgcaactctgctggagatgggagaaggggaaggttgggagccagggtgcagtccggcccccggggcac

SEQ ID NO: 137406 - DNA, 38 bp, Homo sapiens
  chr1:54037529-54037567
  hypo
cgtgagccaccacgcccggccaaaatcttaaaaatata

SEQ ID NO: 137407 - DNA, 76 bp, Homo sapiens; identical to SEQ ID NO: 60309
  chr1:54060384-54060460
  hypo

SEQ ID NO: 137408 - DNA, 30 bp, Homo sapiens
  chr1:54067818-54067848
  hypo
gcctggccagcccctcgcaagcttatgttt

SEQ ID NO: 137409 - DNA, 129 bp, Homo sapiens
  chr1:54142672-54142801
  hypo
tctgggactgcatgacgtgacatacacggagcccctagctgagcaacgcaaacagcaggtaccgcacaagcccaagctctccttcccctgtcccgctacccttgaggatgacgccggcctacagctctg

SEQ ID NO: 137410 - DNA, 30 bp, Homo sapiens
  chr1:54143037-54143067
  hypo
aggcagtggggatggcgcgggggcaggaat

SEQ ID NO: 137411 - DNA, 30 bp, Homo sapiens
  chr1:54195786-54195816
  hypo
aaatcagtgactccgcggaggcctattctc

SEQ ID NO: 137412 - DNA, 1496 bp, Homo sapiens; identical to SEQ ID NO: 103507
  chr1:54203828-54205324
  hypo

SEQ ID NO: 137413 - DNA, 161 bp, Homo sapiens
  chr1:54260082-54260243
  hypo
gctgcagcaagcagcacgtgtctggttgggtagaaagtgacacggcagtactaatggcatatagagccgtatgggatcccgaagtttatgaaatgcctttaaccattcattccctattaatcagtcattccatcagcaaacatgttataatttctcccatc

SEQ ID NO: 137414 - DNA, 267 bp, Homo sapiens
  chr1:54408678-54408945
  hypo
tgaaaaatagaaatgcgactataatttttactctcagtggtgctcacaaatggaaaaaggatttaaatttctttttttttacacctcctggggcgtgaactggactcaacaaatgcacattttaagcaggaagactttggagagacaaggactttcgttcaaagtaaagattttaaatttctttcatccctgaaaacgtccaagaaaagtcggtaagagatcataatctatggaagaaggcaaagaaatctacgaaggaagccaaag

SEQ ID NO: 137415 - DNA, 31 bp, Homo sapiens; identical to SEQ ID NO: 14657
  chr1:54417838-54417869
  hypo

SEQ ID NO: 137416 - DNA, 241 bp, Homo sapiens
  chr1:54474563-54474804
  hypo
ttcctgcccttgtgcgctaggatttgattttcatgtgaagggttatcagtgccattccagccagccttccatgctggcctgagtggcccactcagggtccgggacaggcatactcatcggaccagtcggagcagtgctgtacatggtcgcggcagagatgcctcggtatacagtcgcagtacttgaagaaggttgaaggacagcgccaccacccagggccgcagggtgggcacacagttac

SEQ ID NO: 137417 - DNA, 30 bp, Homo sapiens; identical to SEQ ID NO: 14659
  chr1:54583785-54583815
  hypo

SEQ ID NO: 137418 - DNA, 210 bp, Homo sapiens
  chr1:54586632-54586842
  hypo
atggtggtacgtgggcggacagagctggatgagagacctgggagagggagaaatccgaggccagcgcagaagtctgggtgtggagaggccgctcatccaaacgacaggagaggctcagggagcgccaatgattccgtgtgaggcacagggcgtggctgcgggtgggtgggagggcgactgcagcatgggaaatttcggtggagaaccaga

SEQ ID NO: 137419 - DNA, 31 bp, Homo sapiens; identical to SEQ ID NO: 14660
  chr1:54595917-54595948
  hypo

SEQ ID NO: 137420 - DNA, 167 bp, Homo sapiens
  chr1:54602337-54602504
  hypo
ggatcctgaggttgccgccgacctcctgggcggcacagctccggctgcccaggtagaccttggtccgctccagcggggccagcgcctgcgtggagatcaggatctggaagtccgtgcgggagcagctcacgttcatgggcaccactgggaatcggagggaggagctg

SEQ ID NO: 137421 - DNA, 205 bp, Homo sapiens; identical to SEQ ID NO: 14662
  chr1:54605373-54605578
  hypo

SEQ ID NO: 137422 - DNA, 51 bp, Homo sapiens; identical to SEQ ID NO: 14663
  chr1:54610115-54610166
  hypo

SEQ ID NO: 137423 - DNA, 30 bp, Homo sapiens; identical to SEQ ID NO: 60320
  chr1:54645108-54645138
  hypo

SEQ ID NO: 137424 - DNA, 275 bp, Homo sapiens
  chr1:54683784-54684059
  hypo
tgttttaattgctgccgttaaacctagtagcaggatcctaatgaaccgtgttctttccaggaacctgttggcccagttggtttcaagccagagacattcagaaagtttttagctctatatttgcatggtgctgcgtgagcggaggacccctctgaatcctgaaacccctcttgcctctcttccacggaagagggcctgggccccgtggagcctcagtgcccgtttggcctgctgctctcgctgacaataaagagcccttgcgttgcactgaagcc

SEQ ID NO: 137425 - DNA, 31 bp, Homo sapiens; identical to SEQ ID NO: 14664
  chr1:54685802-54685833
  hypo

SEQ ID NO: 137426 - DNA, 120 bp, Homo sapiens
  chr1:54694091-54694211
  hypo
cgccgccagggagaccgagtgcacactcacttttggaagtccgtctatgtcgcctgaccctggaaagaaaaaataatccaattcagtttcttgcttgctcttccacggaggggtctcccc

SEQ ID NO: 137427 - DNA, 30 bp, Homo sapiens
  chr1:54694463-54694493
  hypo
gcccatcggaccgtccgagccgggacccat

SEQ ID NO: 137428 - DNA, 30 bp, Homo sapiens
  chr1:54712225-54712255
  hypo
acatgcagtacgcagcgctgagctgggagg

SEQ ID NO: 137429 - DNA, 30 bp, Homo sapiens
  chr1:54722190-54722220
  hypo
gcaaaaatccctccccgtaatcagacccct

SEQ ID NO: 137430 - DNA, 255 bp, Homo sapiens
  chr1:54722602-54722857
  hypo
aggcaggtgaactgccgcaccatgggcacagcggggacatggggccctctctggggaacagctagtaagctaccagccacgttaaacctgcccctccacccctcaatcctttccctcaactttcattttgtgtcaaagtccacctagggccaaggatggctgagggaggggagagagaacatgaaaaggtacagtacctggtttcccattctgatcgggggcctggggccgcctgcgtatcgcggtgacataaaa

SEQ ID NO: 137431 - DNA, 30 bp, Homo sapiens; identical to SEQ ID NO: 60324
  chr1:54724003-54724033
  hypo

SEQ ID NO: 137432 - DNA, 417 bp, Homo sapiens
  chr1:54725169-54725586
  hypo
gagacaggcctccattcgctcttccccacccatgactgtgctgttttttagaggttggtttttagaaaaattcaaaatgtgcacagggggtgagtgtggctaaattaaaaagagagaggagctgcctaggtagggtttcccccttggccttctcctgcagagccaggctgccagccgcctgcccactggggaggaggggcgtgggcccacagagaagaggtgtgcagagaacatcgcagggggctgtacaagaacccgagggcgccgccgctgtgaggcctgggagtttcttggccaagcgaggagctgctcacttccggaaagctccgaggagcagatgttcccctacctgccacgctactaatttcaacaagtgtgtgtctttctagcggctgccagcaacggcatggtttgtta

SEQ ID NO: 137433 - DNA, 30 bp, Homo sapiens
  chr1:54726185-54726215
  hypo
gaccagtgctccaaccggggtctgctgaga

SEQ ID NO: 137434 - DNA, 61 bp, Homo sapiens
  chr1:54726655-54726716
  hypo
gcctgcccacctctcggcacagagccagacgcctgccatttcccaacgggccacccacgtc

SEQ ID NO: 137435 - DNA, 208 bp, Homo sapiens; identical to SEQ ID NO: 14666
  chr1:54746226-54746434
  hypo

SEQ ID NO: 137436 - DNA, 359 bp, Homo sapiens; identical to SEQ ID NO: 60328
  chr1:54747982-54748341
  hypo

SEQ ID NO: 137437 - DNA, 106 bp, Homo sapiens; identical to SEQ ID NO: 60329
  chr1:54756001-54756107
  hypo

SEQ ID NO: 137438 - DNA, 44 bp, Homo sapiens; identical to SEQ ID NO: 60330
  chr1:54757159-54757203
  hypo

SEQ ID NO: 137439 - DNA, 93 bp, Homo sapiens
  chr1:54757485-54757578
  hypo
tcaggcagccctccacgcccagctgtcaggcaaggaatagcatagatggttctcctgcctgaaatccaggtgcgagcccgcatcctgctcagg

SEQ ID NO: 137440 - DNA, 120 bp, Homo sapiens
  chr1:54766193-54766313
  hypo
aaccagtgcaacacagagtaccgcacaggcctgtactcagctccaggatcccaaagaaaggaaggattatttctgccggagggtggggcttcacagagcggtgacatctgatcagacacc

SEQ ID NO: 137441 - DNA, 32 bp, Homo sapiens
  chr1:54767236-54767268
  hypo
ccacgcggggaccctcgcggctcctaaggcac

SEQ ID NO: 137442 - DNA, 30 bp, Homo sapiens
  chr1:54768764-54768794
  hypo
aattagagacaagagcgaggcacaccgcgc

SEQ ID NO: 137443 - DNA, 258 bp, Homo sapiens
  chr1:54775633-54775891
  hypo
tctcaaaacaaaaggcgagacacagcatgtagggaagcccgggcaggctccttctccctgcacacttccaagcctttgaatacccgcagatctcggtccagagctggcagctgtctgttattatcccagcaactccaagggccccagcaccagggagcatgtcccgagcaggtgaacaccatctgcccggctgacaagatgcccgtcttagtgcctgctgctgccagcaggccgtgtggacctcggggaggcgcagcc

SEQ ID NO: 137444 - DNA, 29 bp, Homo sapiens
  chr1:54782920-54782949
  hypo
aaagcatcggccaaccgtggtgactcaca

SEQ ID NO: 137445 - DNA, 280 bp, Homo sapiens
  chr1:54808632-54808912
  hypo
gtatggatcatgtttcgtgactagcaaaacacgccagccgggacactttgagaacccggccggttttcaggaacaggattttacacatttcccaggattggcggatctgcgctcgcctccacccgcctgcgagctccatagcccggatcctgtaccagggggatacttaggacaggtggggggaagaggggaggctgtgccctaaccctctgccgcttttcatattgctactaccatttatgtattgaacacgtgatacattcctcgctgcgtgtcaggt

SEQ ID NO: 137446 - DNA, 122 bp, Homo sapiens; identical to SEQ ID NO: 60334
  chr1:54818600-54818722
  hypo

SEQ ID NO: 137447 - DNA, 30 bp, Homo sapiens; identical to SEQ ID NO: 14669
  chr1:54819977-54820007
  hypo

SEQ ID NO: 137448 - DNA, 30 bp, Homo sapiens; identical to SEQ ID NO: 14670
  chr1:54839966-54839996
  hypo

SEQ ID NO: 137449 - DNA, 79 bp, Homo sapiens; identical to SEQ ID NO: 60337
  chr1:54860654-54860733
  hypo

SEQ ID NO: 137450 - DNA, 30 bp, Homo sapiens
  chr1:54867430-54867460
  hypo
aaataaagaccactgcgaactggctgtgtt

SEQ ID NO: 137451 - DNA, 31 bp, Homo sapiens; identical to SEQ ID NO: 35726
  chr1:54871324-54871355
  hypo

SEQ ID NO: 137452 - DNA, 30 bp, Homo sapiens; identical to SEQ ID NO: 14671
  chr1:54876220-54876250
  hypo

SEQ ID NO: 137453 - DNA, 139 bp, Homo sapiens; identical to SEQ ID NO: 60340
  chr1:54880302-54880441
  hypo

SEQ ID NO: 137454 - DNA, 37 bp, Homo sapiens; identical to SEQ ID NO: 60341
  chr1:54944839-54944876
  hypo

SEQ ID NO: 137455 - DNA, 31 bp, Homo sapiens; identical to SEQ ID NO: 14672
  chr1:54961586-54961617
  hypo

SEQ ID NO: 137456 - DNA, 45 bp, Homo sapiens; identical to SEQ ID NO: 60343
  chr1:55009516-55009561
  hypo

SEQ ID NO: 137457 - DNA, 95 bp, Homo sapiens; identical to SEQ ID NO: 60344
  chr1:55033217-55033312
  hypo

SEQ ID NO: 137458 - DNA, 30 bp, Homo sapiens
  chr1:55048743-55048773
  hypo
cagtggttaccatggcgatgggtcctgctg

SEQ ID NO: 137459 - DNA, 156 bp, Homo sapiens; identical to SEQ ID NO: 14673
  chr1:55050845-55051001
  hypo

SEQ ID NO: 137460 - DNA, 30 bp, Homo sapiens
  chr1:55065025-55065055
  hypo
cccgtcccaggtcggcgaccgtctggtgct

SEQ ID NO: 137461 - DNA, 73 bp, Homo sapiens; identical to SEQ ID NO: 14674
  chr1:55065737-55065810
  hypo

SEQ ID NO: 137462 - DNA, 190 bp, Homo sapiens; identical to SEQ ID NO: 14675
  chr1:55066932-55067122
  hypo

SEQ ID NO: 137463 - DNA, 294 bp, Homo sapiens; identical to SEQ ID NO: 60348
  chr1:55067376-55067670
  hypo

SEQ ID NO: 137464 - DNA, 207 bp, Homo sapiens; identical to SEQ ID NO: 60349
  chr1:55074066-55074273
  hypo

SEQ ID NO: 137465 - DNA, 30 bp, Homo sapiens
  chr1:55136546-55136576
  hypo
tgccctccgtgcaggcgatgcaggagaagg

SEQ ID NO: 137466 - DNA, 20 bp, Homo sapiens
  chr1:55137068-55137088
  hypo
tctcaaaacaaaatgaaaca

SEQ ID NO: 137467 - DNA, 31 bp, Homo sapiens; identical to SEQ ID NO: 14677
  chr1:55144367-55144398
  hypo

SEQ ID NO: 137468 - DNA, 206 bp, Homo sapiens; identical to SEQ ID NO: 60352
  chr1:55146064-55146270
  hypo

SEQ ID NO: 137469 - DNA, 31 bp, Homo sapiens; identical to SEQ ID NO: 60353
  chr1:55160577-55160608
  hypo

SEQ ID NO: 137470 - DNA, 31 bp, Homo sapiens; identical to SEQ ID NO: 60354
  chr1:55166801-55166832
  hypo

SEQ ID NO: 137471 - DNA, 30 bp, Homo sapiens; identical to SEQ ID NO: 60355
  chr1:55180695-55180725
  hypo

SEQ ID NO: 137472 - DNA, 270 bp, Homo sapiens; identical to SEQ ID NO: 60356
  chr1:55261712-55261982
  hypo

SEQ ID NO: 137473 - DNA, 30 bp, Homo sapiens
  chr1:55292532-55292562
  hypo
gtgtggttatctactcgctgttttggtcct

SEQ ID NO: 137474 - DNA, 30 bp, Homo sapiens
  chr1:55317290-55317320
  hypo
ctggctttggcacagcgcatctggggcctc

SEQ ID NO: 137475 - DNA, 135 bp, Homo sapiens
  chr1:55317919-55318054
  hypo
ccttgcagatcttgtcgtacacctcggggaaggcgtcctggcaacccagcttctctcgcagcttgtggtacaaggagccatcaaacatctcccagaactcctcccggttcatgtagcagtcggcatacagcatct

SEQ ID NO: 137476 - DNA, 237 bp, Homo sapiens; identical to SEQ ID NO: 479
  chr1:55352447-55352684
  hypo

SEQ ID NO: 137477 - DNA, 98 bp, Homo sapiens
  chr1:55447257-55447355
  hypo
tccagcctgggcaacagagcaagatggaatctcaaacaaaacaaaacaaaacaaaaatgcccttattggtatggagtagggcacggagaatggcatgg

SEQ ID NO: 137478 - DNA, 774 bp, Homo sapiens; identical to SEQ ID NO: 35739
  chr1:55462134-55462908
  hypo

SEQ ID NO: 137479 - DNA, 30 bp, Homo sapiens; identical to SEQ ID NO: 14680
  chr1:55474300-55474330
  hypo

SEQ ID NO: 137480 - DNA, 31 bp, Homo sapiens; identical to SEQ ID NO: 60360
  chr1:55494086-55494117
  hypo

SEQ ID NO: 137481 - DNA, 199 bp, Homo sapiens; identical to SEQ ID NO: 14681
  chr1:55517830-55518029
  hypo

SEQ ID NO: 137482 - DNA, 31 bp, Homo sapiens; identical to SEQ ID NO: 60362
  chr1:55524322-55524353
  hypo

SEQ ID NO: 137483 - DNA, 31 bp, Homo sapiens; identical to SEQ ID NO: 60363
  chr1:55525309-55525340
  hypo

SEQ ID NO: 137484 - DNA, 156 bp, Homo sapiens
  chr1:55529040-55529196
  hypo
ggtgaccgtggcctgcgaggagggctggaccctgactggctgcagtgccctccctgggacctcccacgtcctgggggcctacgccgtagacaacacgtgtgtagtcaggagccgggacgtcagcactacaggcagcaccagcgaaggggccgtgac

SEQ ID NO: 137485 - DNA, 76 bp, Homo sapiens; identical to SEQ ID NO: 60364
  chr1:55532713-55532789
  hypo

SEQ ID NO: 137486 - DNA, 30 bp, Homo sapiens
  chr1:55547074-55547104
  hypo
tgtgctgaactccatcgacgtatctgtcat

SEQ ID NO: 137487 - DNA, 30 bp, Homo sapiens
  chr1:55554996-55555026
  hypo
gagggaagagacttgcgtctctgaccccct

SEQ ID NO: 137488 - DNA, 119 bp, Homo sapiens
  chr1:55560943-55561062
  hypo
cttcctgccgtacaacgctgactcgacttttctttggtaatactggggagttctgatcagacaccctttggtagaaaagcatataggcattccagtatcttcggcgcacatcagtgtat

SEQ ID NO: 137489 - DNA, 42 bp, Homo sapiens; identical to SEQ ID NO: 60365
  chr1:55567198-55567240
  hypo

SEQ ID NO: 137490 - DNA, 30 bp, Homo sapiens
  chr1:55571504-55571534
  hypo
atttacttgtactttcgacataatttttat

SEQ ID NO: 137491 - DNA, 31 bp, Homo sapiens; identical to SEQ ID NO: 14682
  chr1:55573225-55573256
  hypo

SEQ ID NO: 137492 - DNA, 41 bp, Homo sapiens; identical to SEQ ID NO: 60367
  chr1:55583106-55583147
  hypo

SEQ ID NO: 137493 - DNA, 30 bp, Homo sapiens; identical to SEQ ID NO: 60368
  chr1:55590212-55590242
  hypo

SEQ ID NO: 137494 - DNA, 184 bp, Homo sapiens; identical to SEQ ID NO: 60369
  chr1:55620059-55620243
  hypo

SEQ ID NO: 137495 - DNA, 294 bp, Homo sapiens
  chr1:55740623-55740917
  hypo
gagcaggacgaccaccggggacccgcacacagcagctgggctggccagcacccttcctgccactgacacacctcaagacatgtttgttttctgggtcctcctcagggtcagagtgggagcagggagcacgtggggcggtgggggacagatgttgtttttcaagtgacaagcgcgactctgtttccgattctcacaggcaacctgaatgcccatcacatcaggcagggagagctgcccagatctgacactaaccccttgtggaagtgcctggcgggtccgcggggtgagggggga

SEQ ID NO: 137496 - DNA, 30 bp, Homo sapiens; identical to SEQ ID NO: 14684
  chr1:56169493-56169523
  hypo

SEQ ID NO: 137497 - DNA, 485 bp, Homo sapiens; identical to SEQ ID NO: 103539
  chr1:56943216-56943701
  hypo

SEQ ID NO: 137498 - DNA, 955 bp, Homo sapiens; identical to SEQ ID NO: 103541
  chr1:57044087-57045042
  hypo

SEQ ID NO: 137499 - DNA, 30 bp, Homo sapiens; identical to SEQ ID NO: 60374
  chr1:57046882-57046912
  hypo

SEQ ID NO: 137500 - DNA, 149 bp, Homo sapiens; identical to SEQ ID NO: 103542
  chr1:57110513-57110662
  hypo

SEQ ID NO: 137501 - DNA, 806 bp, Homo sapiens; identical to SEQ ID NO: 103543
  chr1:57110714-57111520
  hypo

SEQ ID NO: 137502 - DNA, 495 bp, Homo sapiens; identical to SEQ ID NO: 489
  chr1:58715359-58715854
  hypo

SEQ ID NO: 137503 - DNA, 166 bp, Homo sapiens; identical to SEQ ID NO: 35750
  chr1:58715978-58716144
  hypo

SEQ ID NO: 137504 - DNA, 31 bp, Homo sapiens; identical to SEQ ID NO: 60379
  chr1:58794164-58794195
  hypo

SEQ ID NO: 137505 - DNA, 18 bp, Homo sapiens
  chr1:59044793-59044811
  hypo
tctcgatctcctgacctc

SEQ ID NO: 137506 - DNA, 30 bp, Homo sapiens
  chr1:59280936-59280966
  hypo
cagattcctatcaggcgaaggccgcctttc

SEQ ID NO: 137507 - DNA, 122 bp, Homo sapiens; identical to SEQ ID NO: 103559
  chr1:59369442-59369564
  hypo

SEQ ID NO: 137508 - DNA, 191 bp, Homo sapiens; identical to SEQ ID NO: 103560
  chr1:59369777-59369968
  hypo

SEQ ID NO: 137509 - DNA, 31 bp, Homo sapiens; identical to SEQ ID NO: 14691
  chr1:59404584-59404615
  hypo

SEQ ID NO: 137510 - DNA, 111 bp, Homo sapiens
  chr1:59500702-59500813
  hypo
ggccttcgcggaggacgtgctcacattcctcccctcaaagcaaaattgatcggccatgacctggggccgcaccaaagagaaggaatcgctgggggccggggtgccattcgg

SEQ ID NO: 137511 - DNA, 191 bp, Homo sapiens; identical to SEQ ID NO: 103562
  chr1:59762029-59762220
  hypo

SEQ ID NO: 137512 - DNA, 30 bp, Homo sapiens
  chr1:59762909-59762939
  hypo
gtgctgcttcctctccgatcagtgcccact

SEQ ID NO: 137513 - DNA, 30 bp, Homo sapiens; identical to SEQ ID NO: 497
  chr1:59799495-59799525
  hypo

SEQ ID NO: 137514 - DNA, 55 bp, Homo sapiens
  chr1:59893084-59893139
  hypo
tgagacacgagatggcggaggtaagagttggttaccttgccgtctcctcctcagc

SEQ ID NO: 137515 - DNA, 155 bp, Homo sapiens; identical to SEQ ID NO: 60384
  chr1:59911862-59912017
  hypo

SEQ ID NO: 137516 - DNA, 30 bp, Homo sapiens
  chr1:60125740-60125770
  hypo
aggcatttcacgttccgctcacaaaaaggg

SEQ ID NO: 137517 - DNA, 205 bp, Homo sapiens; identical to SEQ ID NO: 14694
  chr1:60220991-60221196
  hypo

SEQ ID NO: 137518 - DNA, 219 bp, Homo sapiens; identical to SEQ ID NO: 103566
  chr1:60280121-60280340
  hypo

SEQ ID NO: 137519 - DNA, 279 bp, Homo sapiens; identical to SEQ ID NO: 35762
  chr1:60280812-60281091
  hypo

SEQ ID NO: 137520 - DNA, 25 bp, Homo sapiens
  chr1:60371579-60371604
  hypo
gaatatattttcctcacgcttgtaa

SEQ ID NO: 137521 - DNA, 199 bp, Homo sapiens
  chr1:60382732-60382931
  hypo
gctgtatagttcaatcgttttcggctcttgcggaagttgctttattttttgagcctcaactccccagctataaaagggagaaaattattcctctctcttaaggttctgtgaggaagaatgagagcagcaatgtgaaaggcactttgttttcttgttccaggcgcacagccacccagcgagtctccgaggaatgaaagag

SEQ ID NO: 137522 - DNA, 30 bp, Homo sapiens
  chr1:60756190-60756220
  hypo
aaaaagagttttcttcgcctatgccgcctc

SEQ ID NO: 137523 - DNA, 43 bp, Homo sapiens; identical to SEQ ID NO: 60388
  chr1:61333527-61333570
  hypo

SEQ ID NO: 137524 - DNA, 93 bp, Homo sapiens
  chr1:61339524-61339617
  hypo
tggcaacttcagttctcgtttttgtaagtatgcgagaaacgccctgttatcaggtgtcatagcctgaactccgtcctaataaacagtaaggaa

SEQ ID NO: 137525 - DNA, 77 bp, Homo sapiens; identical to SEQ ID NO: 60389
  chr1:61445391-61445468
  hypo

SEQ ID NO: 137526 - DNA, 217 bp, Homo sapiens
  chr1:61456416-61456633
  hypo
tcaaccagggaaatccgaggctttggattattagccgggttggatcacgttaccctgtttggctctgcagaaatcacacttttcattttgcctttaatcctaaaggtcaccgggaaggtcagccccaaacacaaatgatactttgtggtcttactttcagacaattatcaactcataaatcttggtcagactgtaatgagagcgcgaggaataattg

SEQ ID NO: 137527 - DNA, 616 bp, Homo sapiens; identical to SEQ ID NO: 103570
  chr1:61508553-61509169
  hypo

SEQ ID NO: 137528 - DNA, 41 bp, Homo sapiens; identical to SEQ ID NO: 501
  chr1:61516033-61516074
  hypo

SEQ ID NO: 137529 - DNA, 31 bp, Homo sapiens; identical to SEQ ID NO: 60393
  chr1:61530060-61530091
  hypo

SEQ ID NO: 137530 - DNA, 37 bp, Homo sapiens; identical to SEQ ID NO: 14699
  chr1:61541525-61541562
  hypo

SEQ ID NO: 137531 - DNA, 31 bp, Homo sapiens; identical to SEQ ID NO: 14700
  chr1:61543522-61543553
  hypo

SEQ ID NO: 137532 - DNA, 360 bp, Homo sapiens; identical to SEQ ID NO: 103579
  chr1:61547844-61548204
  hypo

SEQ ID NO: 137533 - DNA, 1141 bp, Homo sapiens; identical to SEQ ID NO: 103580
  chr1:61548436-61549577
  hypo

SEQ ID NO: 137534 - DNA, 30 bp, Homo sapiens; identical to SEQ ID NO: 14705
  chr1:61554399-61554429
  hypo

SEQ ID NO: 137535 - DNA, 253 bp, Homo sapiens; identical to SEQ ID NO: 60399
  chr1:61601534-61601787
  hypo

SEQ ID NO: 137536 - DNA, 31 bp, Homo sapiens; identical to SEQ ID NO: 60400
  chr1:61655354-61655385
  hypo

SEQ ID NO: 137537 - DNA, 25 bp, Homo sapiens
  chr1:61663363-61663388
  hypo
cagacgtaggcatggcgcggtggct

SEQ ID NO: 137538 - DNA, 24 bp, Homo sapiens
  chr1:61663687-61663711
  hypo
gagaaagaacgaacagacatagat

SEQ ID NO: 137539 - DNA, 30 bp, Homo sapiens; identical to SEQ ID NO: 60403
  chr1:61664315-61664345
  hypo

SEQ ID NO: 137540 - DNA, 64 bp, Homo sapiens
  chr1:61716876-61716940
  hypo
acatacacatgcatccgtacaaataaaaatttcactggaaagggaactccgtgatctctttact

SEQ ID NO: 137541 - DNA, 134 bp, Homo sapiens; identical to SEQ ID NO: 60404
  chr1:61833607-61833741
  hypo

SEQ ID NO: 137542 - DNA, 30 bp, Homo sapiens; identical to SEQ ID NO: 14707
  chr1:61848981-61849011
  hypo

SEQ ID NO: 137543 - DNA, 160 bp, Homo sapiens; identical to SEQ ID NO: 60406
  chr1:61875329-61875489
  hypo

SEQ ID NO: 137544 - DNA, 417 bp, Homo sapiens; identical to SEQ ID NO: 60407
  chr1:61913158-61913575
  hypo

SEQ ID NO: 137545 - DNA, 31 bp, Homo sapiens; identical to SEQ ID NO: 60408
  chr1:61959223-61959254
  hypo

SEQ ID NO: 137546 - DNA, 118 bp, Homo sapiens; identical to SEQ ID NO: 60409
  chr1:62119987-62120105
  hypo

SEQ ID NO: 137547 - DNA, 31 bp, Homo sapiens; identical to SEQ ID NO: 60410
  chr1:62120543-62120574
  hypo

SEQ ID NO: 137548 - DNA, 29 bp, Homo sapiens
  chr1:62189867-62189896
  hypo
gagggggatgcggatcgcttgagaccagg

SEQ ID NO: 137549 - DNA, 602 bp, Homo sapiens; identical to SEQ ID NO: 509
  chr1:62207659-62208261
  hypo

SEQ ID NO: 137550 - DNA, 519 bp, Homo sapiens; identical to SEQ ID NO: 510
  chr1:62208291-62208810
  hypo

SEQ ID NO: 137551 - DNA, 37 bp, Homo sapiens; identical to SEQ ID NO: 60413
  chr1:62213622-62213659
  hypo

SEQ ID NO: 137552 - DNA, 30 bp, Homo sapiens
  chr1:62214459-62214489
  hypo
aggcacgcaccggcacgcaccaccacgctc

SEQ ID NO: 137553 - DNA, 31 bp, Homo sapiens; identical to SEQ ID NO: 14712
  chr1:62285410-62285441
  hypo

SEQ ID NO: 137554 - DNA, 59 bp, Homo sapiens; identical to SEQ ID NO: 60415
  chr1:62729379-62729438
  hypo

SEQ ID NO: 137555 - DNA, 31 bp, Homo sapiens; identical to SEQ ID NO: 60416
  chr1:62734254-62734285
  hypo

SEQ ID NO: 137556 - DNA, 1060 bp, Homo sapiens; identical to SEQ ID NO: 103585
  chr1:62784144-62785204
  hypo

SEQ ID NO: 137557 - DNA, 61 bp, Homo sapiens; identical to SEQ ID NO: 60418
  chr1:62836528-62836589
  hypo

SEQ ID NO: 137558 - DNA, 31 bp, Homo sapiens; identical to SEQ ID NO: 512
  chr1:63153559-63153590
  hypo

SEQ ID NO: 137559 - DNA, 30 bp, Homo sapiens
  chr1:63196433-63196463
  hypo
gatatgctaagaacgcgtaggaggggcatt

SEQ ID NO: 137560 - DNA, 30 bp, Homo sapiens; identical to SEQ ID NO: 513
  chr1:63348082-63348112
  hypo

SEQ ID NO: 137561 - DNA, 30 bp, Homo sapiens
  chr1:63517869-63517899
  hypo
ccttgccaccacactcgcaggccaagggtt

SEQ ID NO: 137562 - DNA, 30 bp, Homo sapiens
  chr1:63521496-63521526
  hypo
agttaaacacggtaacgggcgatcatatat

SEQ ID NO: 137563 - DNA, 558 bp, Homo sapiens; identical to SEQ ID NO: 514
  chr1:63539430-63539988
  hypo

SEQ ID NO: 137564 - DNA, 864 bp, Homo sapiens; identical to SEQ ID NO: 103600
  chr1:63787902-63788766
  hypo

SEQ ID NO: 137565 - DNA, 577 bp, Homo sapiens; identical to SEQ ID NO: 518
  chr1:63788919-63789496
  hypo

SEQ ID NO: 137566 - DNA, 63 bp, Homo sapiens; identical to SEQ ID NO: 519
  chr1:63789728-63789791
  hypo

SEQ ID NO: 137567 - DNA, 63 bp, Homo sapiens; identical to SEQ ID NO: 520
  chr1:63789849-63789912
  hypo

SEQ ID NO: 137568 - DNA, 39 bp, Homo sapiens
  chr1:63831675-63831714
  hypo
gcctgggcaacaagagaacaagagcgaaactgcgtctca

SEQ ID NO: 137569 - DNA, 225 bp, Homo sapiens
  chr1:63832611-63832836
  hypo
cacagccgtccatgcgtgattggacagaagcctagactgagatggaaatagtggaactggaaaggaagggatcaatgcaaaaggaaaagtgtgcaggtcttactaacttactagataggtatttttggcaagtttgggaccaggtgattcaagctgcccgctggggcacgtgtagtggctactcgagggcagggctgtccttttgcacaacgcacaggctctcgc

SEQ ID NO: 137570 - DNA, 30 bp, Homo sapiens
  chr1:63953543-63953573
  hypo
gctacaatgttatgacggctaccgggcaac

SEQ ID NO: 137571 - DNA, 42 bp, Homo sapiens
  chr1:64014769-64014811
  hypo
agtaggcggagcttcgccaaggctggcgcagtcggttttgac

SEQ ID NO: 137572 - DNA, 185 bp, Homo sapiens
  chr1:64104293-64104478
  hypo
tccctcacatggccacgctaacagtcctgctgtgatgtaactttgatttcatgcctttgaagggtggctagtgctacaaagattgctttgtatgagaccccaactggctggaagttttttgggaatttgatggacgcgagcaaactgtccctttgtggggaggagagcttcgggaccggtaagtc

SEQ ID NO: 137573 - DNA, 131 bp, Homo sapiens; identical to SEQ ID NO: 60427
  chr1:64383871-64384002
  hypo

SEQ ID NO: 137574 - DNA, 30 bp, Homo sapiens; identical to SEQ ID NO: 60428
  chr1:64608502-64608532
  hypo

SEQ ID NO: 137575 - DNA, 150 bp, Homo sapiens; identical to SEQ ID NO: 60429
  chr1:64734440-64734590
  hypo

SEQ ID NO: 137576 - DNA, 30 bp, Homo sapiens
  chr1:64972399-64972429
  hypo
ggttttgttcttgcccgttacttactgtgt

SEQ ID NO: 137577 - DNA, 30 bp, Homo sapiens
  chr1:65099860-65099890
  hypo
cagtcctacccagcacgcagtgggattcca

SEQ ID NO: 137578 - DNA, 30 bp, Homo sapiens
  chr1:65209174-65209204
  hypo
ttctgatattttatacgcatggaatcatac

SEQ ID NO: 137579 - DNA, 30 bp, Homo sapiens
  chr1:65209529-65209559
  hypo
gatcccatttcctcacgtgtaaagtgagga

SEQ ID NO: 137580 - DNA, 14 bp, Homo sapiens
  chr1:65210893-65210907
  hypo
cgcgggcctgggca

SEQ ID NO: 137581 - DNA, 419 bp, Homo sapiens; identical to SEQ ID NO: 35809
  chr1:65210939-65211358
  hypo

SEQ ID NO: 137582 - DNA, 69 bp, Homo sapiens
  chr1:65316658-65316727
  hypo
ctgctgagccggggccgtgggaccggtgtgcgggcgcttgctgcttcagtcattcgacaagtgcttatt

SEQ ID NO: 137583 - DNA, 30 bp, Homo sapiens
  chr1:65320540-65320570
  hypo
tctgtttgcacgtgccgagatgccctgacc

SEQ ID NO: 137584 - DNA, 20 bp, Homo sapiens
  chr1:65417624-65417644
  hypo
ccaccgcgccaggcacaagt

SEQ ID NO: 137585 - DNA, 92 bp, Homo sapiens; identical to SEQ ID NO: 60432
  chr1:65513411-65513503
  hypo

SEQ ID NO: 137586 - DNA, 23 bp, Homo sapiens
  chr1:65518060-65518083
  hypo
ggttacaaatgatgactaggccg

SEQ ID NO: 137587 - DNA, 30 bp, Homo sapiens
  chr1:65642185-65642215
  hypo
atgatcagttgatttcgctgcccgtgaatg

SEQ ID NO: 137588 - DNA, 30 bp, Homo sapiens; identical to SEQ ID NO: 60433
  chr1:65682141-65682171
  hypo

SEQ ID NO: 137589 - DNA, 40 bp, Homo sapiens; identical to SEQ ID NO: 538
  chr1:65720328-65720368
  hypo

SEQ ID NO: 137590 - DNA, 82 bp, Homo sapiens
  chr1:65796413-65796495
  hypo
tgttgggattacaggcgtgtgccaccgcgcccagccttgaaggcttatttcttgctcatataaaagtcggatctggaatgga

SEQ ID NO: 137591 - DNA, 30 bp, Homo sapiens
  chr1:65871640-65871670
  hypo
ccagcctatgggtggcgggtggcagcaggg

SEQ ID NO: 137592 - DNA, 31 bp, Homo sapiens; identical to SEQ ID NO: 540
  chr1:65886883-65886914
  hypo

SEQ ID NO: 137593 - DNA, 30 bp, Homo sapiens; identical to SEQ ID NO: 60436
  chr1:66030258-66030288
  hypo

SEQ ID NO: 137594 - DNA, 476 bp, Homo sapiens; identical to SEQ ID NO: 103650
  chr1:66258671-66259147
  hypo

SEQ ID NO: 137595 - DNA, 128 bp, Homo sapiens; identical to SEQ ID NO: 60438
  chr1:66834311-66834439
  hypo

SEQ ID NO: 137596 - DNA, 30 bp, Homo sapiens
  chr1:66869978-66870008
  hypo
tatttattgggtgcacgctatgtgctggcg

SEQ ID NO: 137597 - DNA, 30 bp, Homo sapiens
  chr1:67410830-67410860
  hypo
cctgtaaacctccctcggataccaaaatcg

SEQ ID NO: 137598 - DNA, 21 bp, Homo sapiens
  chr1:67669761-67669782
  hypo
tttgagacggagtctcgctct

SEQ ID NO: 137599 - DNA, 20 bp, Homo sapiens
  chr1:67669961-67669981
  hypo
ggtctcgatctcctgacctc

SEQ ID NO: 137600 - DNA, 747 bp, Homo sapiens; identical to SEQ ID NO: 103658
  chr1:67773094-67773841
  hypo

SEQ ID NO: 137601 - DNA, 31 bp, Homo sapiens; identical to SEQ ID NO: 14728
  chr1:67797228-67797259
  hypo

SEQ ID NO: 137602 - DNA, 30 bp, Homo sapiens
  chr1:68021354-68021384
  hypo
ggcgcagggtctgcacgtgtgaggaatgca

SEQ ID NO: 137603 - DNA, 112 bp, Homo sapiens
  chr1:68174579-68174691
  hypo
atgtaattctgccataaaggccgagaccagacaaagctgcaaaaaaacactagcaacccagactccagggcatccatcacgtgggcaccacggtgctccacactgagttcta

SEQ ID NO: 137604 - DNA, 37 bp, Homo sapiens; identical to SEQ ID NO: 60442
  chr1:68344802-68344839
  hypo

SEQ ID NO: 137605 - DNA, 131 bp, Homo sapiens; identical to SEQ ID NO: 60443
  chr1:68629017-68629148
  hypo

SEQ ID NO: 137606 - DNA, 71 bp, Homo sapiens
  chr1:68703994-68704065
  hypo
ccagaaacacctgccccggacagtgattcctgtgatatgcagacaacacccagtaccgtggcagacttggc

SEQ ID NO: 137607 - DNA, 22 bp, Homo sapiens
  chr1:68958070-68958092
  hypo
ctttatagttttgttacgatcg

SEQ ID NO: 137608 - DNA, 36 bp, Homo sapiens; identical to SEQ ID NO: 60446
  chr1:69982629-69982665
  hypo

SEQ ID NO: 137609 - DNA, 35 bp, Homo sapiens; identical to SEQ ID NO: 60447
  chr1:69982904-69982939
  hypo

SEQ ID NO: 137610 - DNA, 46 bp, Homo sapiens; identical to SEQ ID NO: 60448
  chr1:70661585-70661631
  hypo

SEQ ID NO: 137611 - DNA, 20 bp, Homo sapiens
  chr1:70672855-70672875
  hypo
tcagtcgccgtgcccagcct

SEQ ID NO: 137612 - DNA, 30 bp, Homo sapiens; identical to SEQ ID NO: 60449
  chr1:70691509-70691539
  hypo

SEQ ID NO: 137613 - DNA, 103 bp, Homo sapiens
  chr1:70710351-70710454
  hypo
cttttacactattaggcggtcaagaagcagatcgagacggcggtcacattctaagtctaggagtcggcgacgatccaaaagcccaaggcggagaagatctcat

SEQ ID NO: 137614 - DNA, 36 bp, Homo sapiens
  chr1:70720483-70720519
  hypo
gggattacaggcatgagccaccgtgcccggccgatg

SEQ ID NO: 137615 - DNA, 28 bp, Homo sapiens
  chr1:70796947-70796975
  hypo
tagaacactaagtaggccaggcgcagtg

SEQ ID NO: 137616 - DNA, 27 bp, Homo sapiens
  chr1:70797094-70797121
  hypo
ttagccgggcatggtaacacacacctg

SEQ ID NO: 137617 - DNA, 31 bp, Homo sapiens; identical to SEQ ID NO: 14731
  chr1:71175455-71175486
  hypo

SEQ ID NO: 137618 - DNA, 30 bp, Homo sapiens
  chr1:71271710-71271740
  hypo
ggagacacgaggaaccgcagagccctcaaa

SEQ ID NO: 137619 - DNA, 217 bp, Homo sapiens
  chr1:71519813-71520030
  hypo
ccacccagctggaggcggatgggctgcgcttctcaaattgctttgaggaacgttcttttagtggggagggagtgcctttcctgaagaagtccttgggatggacatgctgatcctgaatgagtcttaagaagtacaggtttcccaagacccggagaagacagcaagcctgtgttcccagccagcgctagtggcagctgggttccgggcaggtggagcc

SEQ ID NO: 137620 - DNA, 37 bp, Homo sapiens; identical to SEQ ID NO: 60455
  chr1:71555023-71555060
  hypo

SEQ ID NO: 137621 - DNA, 30 bp, Homo sapiens
  chr1:72088938-72088968
  hypo
agaaaatatgttaagcgaatgacattttcc

SEQ ID NO: 137622 - DNA, 35 bp, Homo sapiens; identical to SEQ ID NO: 14732
  chr1:72383169-72383204
  hypo

SEQ ID NO: 137623 - DNA, 35 bp, Homo sapiens; identical to SEQ ID NO: 14733
  chr1:72383443-72383478
  hypo

SEQ ID NO: 137624 - DNA, 145 bp, Homo sapiens; identical to SEQ ID NO: 60458
  chr1:72740461-72740606
  hypo

SEQ ID NO: 137625 - DNA, 31 bp, Homo sapiens; identical to SEQ ID NO: 60459
  chr1:72885249-72885280
  hypo

SEQ ID NO: 137626 - DNA, 42 bp, Homo sapiens; identical to SEQ ID NO: 14734
  chr1:73222392-73222434
  hypo

SEQ ID NO: 137627 - DNA, 30 bp, Homo sapiens
  chr1:73951903-73951933
  hypo
cctgcctcagcctcccgagtaccttggact

SEQ ID NO: 137628 - DNA, 30 bp, Homo sapiens
  chr1:73975850-73975880
  hypo
aacaacaacaacaaacgaaaaacactgcgt

SEQ ID NO: 137629 - DNA, 1310 bp, Homo sapiens; identical to SEQ ID NO: 103692
  chr1:75601917-75603227
  hypo

SEQ ID NO: 137630 - DNA, 31 bp, Homo sapiens; identical to SEQ ID NO: 14736
  chr1:76192235-76192266
  hypo

SEQ ID NO: 137631 - DNA, 30 bp, Homo sapiens; identical to SEQ ID NO: 14737
  chr1:76840017-76840047
  hypo

SEQ ID NO: 137632 - DNA, 74 bp, Homo sapiens; identical to SEQ ID NO: 60464
  chr1:77165570-77165644
  hypo

SEQ ID NO: 137633 - DNA, 96 bp, Homo sapiens
  chr1:77510043-77510139
  hypo
cagcctgagggtcatcgcgcattccagcatccagaggatcctccgcaaccgccatgacctgctcaacgtgagccagggcaccgtgttcatcttctg

SEQ ID NO: 137634 - DNA, 17 bp, Homo sapiens
  chr1:77614417-77614434
  hypo
tgagacagagtcttgct

SEQ ID NO: 137635 - DNA, 31 bp, Homo sapiens; identical to SEQ ID NO: 60466
  chr1:77992103-77992134
  hypo

SEQ ID NO: 137636 - DNA, 30 bp, Homo sapiens
  chr1:78150353-78150383
  hypo
gtgggggaggccgggcgcggtgtctcaagc

SEQ ID NO: 137637 - DNA, 36 bp, Homo sapiens; identical to SEQ ID NO: 60467
  chr1:78152466-78152502
  hypo

SEQ ID NO: 137638 - DNA, 25 bp, Homo sapiens
  chr1:78246592-78246617
  hypo
cttttttttttttttttgaggcgga

SEQ ID NO: 137639 - DNA, 163 bp, Homo sapiens; identical to SEQ ID NO: 14738
  chr1:78254758-78254921
  hypo

SEQ ID NO: 137640 - DNA, 30 bp, Homo sapiens
  chr1:78277591-78277621
  hypo
acctgccgaggagccgcccaagcccatttt

SEQ ID NO: 137641 - DNA, 69 bp, Homo sapiens; identical to SEQ ID NO: 578
  chr1:78354048-78354117
  hypo

SEQ ID NO: 137642 - DNA, 779 bp, Homo sapiens; identical to SEQ ID NO: 35884
  chr1:78354190-78354969
  hypo

SEQ ID NO: 137643 - DNA, 91 bp, Homo sapiens; identical to SEQ ID NO: 14740
  chr1:78458352-78458443
  hypo

SEQ ID NO: 137644 - DNA, 31 bp, Homo sapiens
  chr1:78458682-78458713
  hypo
taggcttgagccaccgcgcccggcctatttc

SEQ ID NO: 137645 - DNA, 81 bp, Homo sapiens; identical to SEQ ID NO: 14741
  chr1:78463739-78463820
  hypo

SEQ ID NO: 137646 - DNA, 36 bp, Homo sapiens; identical to SEQ ID NO: 60474
  chr1:78510239-78510275
  hypo

SEQ ID NO: 137647 - DNA, 818 bp, Homo sapiens; identical to SEQ ID NO: 35888
  chr1:78511527-78512345
  hypo

SEQ ID NO: 137648 - DNA, 32 bp, Homo sapiens; identical to SEQ ID NO: 60476
  chr1:79267842-79267874
  hypo

SEQ ID NO: 137649 - DNA, 130 bp, Homo sapiens; identical to SEQ ID NO: 14743
  chr1:83243220-83243350
  hypo

SEQ ID NO: 137650 - DNA, 1350 bp, Homo sapiens; identical to SEQ ID NO: 103728
  chr1:84543140-84544490
  hypo

SEQ ID NO: 137651 - DNA, 17 bp, Homo sapiens
  chr1:84819376-84819393
  hypo
ggcgtgagccaccgcac

SEQ ID NO: 137652 - DNA, 39 bp, Homo sapiens; identical to SEQ ID NO: 14745
  chr1:84944529-84944568
  hypo

SEQ ID NO: 137653 - DNA, 30 bp, Homo sapiens; identical to SEQ ID NO: 27469
  chr1:84967821-84967851
  hypo

SEQ ID NO: 137654 - DNA, 30 bp, Homo sapiens
  chr1:85008900-85008930
  hypo
aaactaatgaggtaccgaagcataattgaa

SEQ ID NO: 137655 - DNA, 30 bp, Homo sapiens; identical to SEQ ID NO: 103735
  chr1:85086531-85086561
  hypo

SEQ ID NO: 137656 - DNA, 30 bp, Homo sapiens; identical to SEQ ID NO: 60481
  chr1:85102831-85102861
  hypo

SEQ ID NO: 137657 - DNA, 316 bp, Homo sapiens; identical to SEQ ID NO: 35907
  chr1:85358276-85358592
  hypo

SEQ ID NO: 137658 - DNA, 526 bp, Homo sapiens; identical to SEQ ID NO: 103739
  chr1:85358751-85359277
  hypo

SEQ ID NO: 137659 - DNA, 911 bp, Homo sapiens; identical to SEQ ID NO: 103740
  chr1:85462468-85463379
  hypo

SEQ ID NO: 137660 - DNA, 39 bp, Homo sapiens
  chr1:85646086-85646125
  hypo
gttctaggccggacgcggtggctcacacctgtaatccca

SEQ ID NO: 137661 - DNA, 437 bp, Homo sapiens; identical to SEQ ID NO: 103745
  chr1:85666726-85667163
  hypo

SEQ ID NO: 137662 - DNA, 30 bp, Homo sapiens
  chr1:85680720-85680750
  hypo
ttaataaaaagcgaacgtacacccacgagt

SEQ ID NO: 137663 - DNA, 18 bp, Homo sapiens
  chr1:85720385-85720403
  hypo
taacgagttaattatcac

SEQ ID NO: 137664 - DNA, 37 bp, Homo sapiens; identical to SEQ ID NO: 14748
  chr1:85725177-85725214
  hypo

SEQ ID NO: 137665 - DNA, 257 bp, Homo sapiens
  chr1:85743255-85743512
  hypo
tcaaacatttattgagtccttactaatatgttctaggcaacttatactatgagtcctccattttatagggggagactgatgaagagacgactatccccagaccgtattttaactactatggcgctgtgtaagaagcaacctgagaagtgtggatgaaaagctacaggtagagccctgggcccaagacggtggcttggacaacatgctaaataaactataaactagatggtatttgaagctacgagagtagataaaaa

SEQ ID NO: 137666 - DNA, 1197 bp, Homo sapiens; identical to SEQ ID NO: 103752
  chr1:85929934-85931131
  hypo

SEQ ID NO: 137667 - DNA, 153 bp, Homo sapiens; identical to SEQ ID NO: 103753
  chr1:86042080-86042233
  hypo

SEQ ID NO: 137668 - DNA, 30 bp, Homo sapiens
  chr1:86042508-86042538
  hypo
tgcccgggtctaccccgccgcccgcaacgc

SEQ ID NO: 137669 - DNA, 99 bp, Homo sapiens
  chr1:86048505-86048604
  hypo
ccggcccaagtactgcggttcctgcgtggacggccgatgctgcacgccccagctgaccaggactgtgaagatgcggttccgctgcgaagatggggagac

SEQ ID NO: 137670 - DNA, 146 bp, Homo sapiens; identical to SEQ ID NO: 60491
  chr1:86175120-86175266
  hypo

SEQ ID NO: 137671 - DNA, 30 bp, Homo sapiens
  chr1:86195760-86195790
  hypo
atgtatatgcccatcggggacctgaataca

SEQ ID NO: 137672 - DNA, 106 bp, Homo sapiens
  chr1:86277765-86277871
  hypo
aatgtcaaatggctacgctctcgttctctgttttgcccattatgaactcggtaataatcgaattcactgaaccataaaattgaatgtataccgcagcactctattc

SEQ ID NO: 137673 - DNA, 101 bp, Homo sapiens; identical to SEQ ID NO: 14751
  chr1:86860848-86860949
  hypo

SEQ ID NO: 137674 - DNA, 213 bp, Homo sapiens; identical to SEQ ID NO: 60493
  chr1:86973441-86973654
  hypo

SEQ ID NO: 137675 - DNA, 30 bp, Homo sapiens; identical to SEQ ID NO: 60494
  chr1:87018745-87018775
  hypo

SEQ ID NO: 137676 - DNA, 30 bp, Homo sapiens
  chr1:87207809-87207839
  hypo
agtaaacagcgccaccgagtggtggtatta

SEQ ID NO: 137677 - DNA, 91 bp, Homo sapiens; identical to SEQ ID NO: 60495
  chr1:87299758-87299849
  hypo

SEQ ID NO: 137678 - DNA, 160 bp, Homo sapiens
  chr1:87381456-87381616
  hypo
agcttcatcggagtacggaaatgagggtccggagatttaaattcttctttagtggcgctaaactgatgaattggggcttgagaatagggatgcctatgtatgttgcttcacggcagtgttgatgtgaatttcgaagaggagggaacgctgaaggggaatt

SEQ ID NO: 137679 - DNA, 30 bp, Homo sapiens
  chr1:87570289-87570319
  hypo
agagcccatgccgttcgagaaaaagatgga

SEQ ID NO: 137680 - DNA, 169 bp, Homo sapiens
  chr1:87607279-87607448
  hypo
atcagtactcccctggaccagcgtcatcatcctgggccccatgtggctgcccatcgcatacaggaggcctaattgtatgtctgctgtgtgtggcatgactccttcgaatggcgttccttttcccaccccgtggcattgctctgctctcgcagtctctctccatagtaac

SEQ ID NO: 137681 - DNA, 128 bp, Homo sapiens; identical to SEQ ID NO: 35930
  chr1:87793798-87793926
  hypo

SEQ ID NO: 137682 - DNA, 30 bp, Homo sapiens; identical to SEQ ID NO: 103772
  chr1:87796993-87797023
  hypo

SEQ ID NO: 137683 - DNA, 30 bp, Homo sapiens; identical to SEQ ID NO: 103773
  chr1:87797036-87797066
  hypo

SEQ ID NO: 137684 - DNA, 31 bp, Homo sapiens; identical to SEQ ID NO: 14753
  chr1:87797490-87797521
  hypo

SEQ ID NO: 137685 - DNA, 30 bp, Homo sapiens; identical to SEQ ID NO: 603
  chr1:87907740-87907770
  hypo

SEQ ID NO: 137686 - DNA, 30 bp, Homo sapiens; identical to SEQ ID NO: 60500
  chr1:88734863-88734893
  hypo

SEQ ID NO: 137687 - DNA, 23 bp, Homo sapiens
  chr1:89132151-89132174
  hypo
tataaaattcccagacctgaccg

SEQ ID NO: 137688 - DNA, 23 bp, Homo sapiens
  chr1:89132413-89132436
  hypo
ccgtctcaagaaaaaaagaaaaa

SEQ ID NO: 137689 - DNA, 85 bp, Homo sapiens; identical to SEQ ID NO: 60503
  chr1:89148473-89148558
  hypo

SEQ ID NO: 137690 - DNA, 30 bp, Homo sapiens; identical to SEQ ID NO: 60504
  chr1:89154152-89154182
  hypo

SEQ ID NO: 137691 - DNA, 78 bp, Homo sapiens; identical to SEQ ID NO: 60505
  chr1:89228940-89229018
  hypo

SEQ ID NO: 137692 - DNA, 25 bp, Homo sapiens
  chr1:89240660-89240685
  hypo
ggattataggcgtgagccactatgc

SEQ ID NO: 137693 - DNA, 20 bp, Homo sapiens
  chr1:89241771-89241791
  hypo
cagagcgagactccgtctca

SEQ ID NO: 137694 - DNA, 21 bp, Homo sapiens
  chr1:89347741-89347762
  hypo
cagaacgctgggaggtcgagg

SEQ ID NO: 137695 - DNA, 37 bp, Homo sapiens
  chr1:89451826-89451863
  hypo
gcactccagcctgggcggcaagagtgagagactgtat

SEQ ID NO: 137696 - DNA, 106 bp, Homo sapiens; identical to SEQ ID NO: 60508
  chr1:89919386-89919492
  hypo

SEQ ID NO: 137697 - DNA, 35 bp, Homo sapiens
  chr1:89984976-89985011
  hypo
ggattacaggcgtgagccaccgcgcccagccaaga

SEQ ID NO: 137698 - DNA, 30 bp, Homo sapiens
  chr1:90053752-90053782
  hypo
gcagtccctgggtggcggatattcactgag

SEQ ID NO: 137699 - DNA, 256 bp, Homo sapiens
  chr1:90075873-90076129
  hypo
gcccggctgtgacatcgcccacacttggcctcaactccaccctgtgattggagccaacagcagggagaggccaggcagtggaagcagacaccttcaagcctacgggggctaacaatggggattcccaggtcccctgagagtgcagagatgcccgggtctgcagctgcaacctgggcggccgtagaggcgcctgggagggtggggctcctgcctgctcctcgctcctgcaggctccgtggaacgctgcaccactcct

SEQ ID NO: 137700 - DNA, 1192 bp, Homo sapiens; identical to SEQ ID NO: 103786
  chr1:90098145-90099337
  hypo

SEQ ID NO: 137701 - DNA, 30 bp, Homo sapiens
  chr1:90152100-90152130
  hypo
gtgggatgtgtttaccgattacctctcagt

SEQ ID NO: 137702 - DNA, 144 bp, Homo sapiens; identical to SEQ ID NO: 103788
  chr1:90228346-90228490
  hypo

SEQ ID NO: 137703 - DNA, 146 bp, Homo sapiens; identical to SEQ ID NO: 103789
  chr1:90228980-90229126
  hypo

SEQ ID NO: 137704 - DNA, 768 bp, Homo sapiens; identical to SEQ ID NO: 611
  chr1:90308852-90309620
  hypo

SEQ ID NO: 137705 - DNA, 163 bp, Homo sapiens; identical to SEQ ID NO: 60513
  chr1:90400240-90400403
  hypo

SEQ ID NO: 137706 - DNA, 199 bp, Homo sapiens; identical to SEQ ID NO: 14758
  chr1:90448904-90449103
  hypo

SEQ ID NO: 137707 - DNA, 30 bp, Homo sapiens
  chr1:90473045-90473075
  hypo
agccttgactctttcggaggtagaaaccag

SEQ ID NO: 137708 - DNA, 30 bp, Homo sapiens; identical to SEQ ID NO: 14759
  chr1:90478708-90478738
  hypo

SEQ ID NO: 137709 - DNA, 46 bp, Homo sapiens
  chr1:90725981-90726027
  hypo
aagaaagttttagtgattggacggaaaagcaaaccaaccggccagg

SEQ ID NO: 137710 - DNA, 35 bp, Homo sapiens; identical to SEQ ID NO: 60516
  chr1:91072760-91072795
  hypo

SEQ ID NO: 137711 - DNA, 360 bp, Homo sapiens; identical to SEQ ID NO: 617
  chr1:91183250-91183610
  hypo

SEQ ID NO: 137712 - DNA, 757 bp, Homo sapiens; identical to SEQ ID NO: 103807
  chr1:91183775-91184532
  hypo

SEQ ID NO: 137713 - DNA, 288 bp, Homo sapiens; identical to SEQ ID NO: 103818
  chr1:91195117-91195405
  hypo

SEQ ID NO: 137714 - DNA, 30 bp, Homo sapiens; identical to SEQ ID NO: 14762
  chr1:91359518-91359548
  hypo

SEQ ID NO: 137715 - DNA, 36 bp, Homo sapiens
  chr1:91483483-91483519
  hypo
acccgcgcctgggaaacagaccgagactccgtcccc

SEQ ID NO: 137716 - DNA, 30 bp, Homo sapiens; identical to SEQ ID NO: 633
  chr1:91904864-91904894
  hypo

SEQ ID NO: 137717 - DNA, 217 bp, Homo sapiens
  chr1:92001227-92001444
  hypo
atggccaacctgggcgaggcgggcgccgcgccggcagctagggggaagtcggccaacaattgggccacctcctcctcttcctcctgcttggacgacggtcttccgcctggactgtggagcctcgccgaccgttcgtcctcacagccaccccatgggcaaccagcgcggtgcaggctcattgtgtctgcgacaggcagaagccgagcgggtcccaacg

SEQ ID NO: 137718 - DNA, 30 bp, Homo sapiens
  chr1:92057225-92057255
  hypo
atctcagccaggtttcgaaaacctgggtat

SEQ ID NO: 137719 - DNA, 33 bp, Homo sapiens
  chr1:92068722-92068755
  hypo
tacaggcatgagccaccgcgccaggccatgcct

SEQ ID NO: 137720 - DNA, 196 bp, Homo sapiens; identical to SEQ ID NO: 60523
  chr1:92102534-92102730
  hypo

SEQ ID NO: 137721 - DNA, 30 bp, Homo sapiens
  chr1:92206935-92206965
  hypo
agcgccactcccccacgccccggcacctcc

SEQ ID NO: 137722 - DNA, 45 bp, Homo sapiens; identical to SEQ ID NO: 60524
  chr1:92371563-92371608
  hypo

SEQ ID NO: 137723 - DNA, 30 bp, Homo sapiens
  chr1:92414815-92414845
  hypo
caggcctgagctgcccggctcagactccta

SEQ ID NO: 137724 - DNA, 30 bp, Homo sapiens; identical to SEQ ID NO: 60525
  chr1:92415130-92415160
  hypo

SEQ ID NO: 137725 - DNA, 44 bp, Homo sapiens
  chr1:92662384-92662428
  hypo
tacaggcgtcagccaccacccccggccactagcccatgttttca

SEQ ID NO: 137726 - DNA, 191 bp, Homo sapiens; identical to SEQ ID NO: 60526
  chr1:92683499-92683690
  hypo

SEQ ID NO: 137727 - DNA, 30 bp, Homo sapiens
  chr1:92762941-92762971
  hypo
acaccaagattgtacgcaccttattctttt

SEQ ID NO: 137728 - DNA, 36 bp, Homo sapiens; identical to SEQ ID NO: 35988
  chr1:92946277-92946313
  hypo

SEQ ID NO: 137729 - DNA, 60 bp, Homo sapiens; identical to SEQ ID NO: 35989
  chr1:92946604-92946664
  hypo

SEQ ID NO: 137730 - DNA, 924 bp, Homo sapiens; identical to SEQ ID NO: 35990
  chr1:92946768-92947692
  hypo

SEQ ID NO: 137731 - DNA, 4459 bp, Homo sapiens; identical to SEQ ID NO: 103843
  chr1:92948157-92952616
  hypo

SEQ ID NO: 137732 - DNA, 21 bp, Homo sapiens
  chr1:93226594-93226615
  hypo
acacagcgaggctccatctca

SEQ ID NO: 137733 - DNA, 619 bp, Homo sapiens; identical to SEQ ID NO: 103845
  chr1:93250439-93251058
  hypo

SEQ ID NO: 137734 - DNA, 27 bp, Homo sapiens
  chr1:93507009-93507036
  hypo
cagagtccctctctctcgcccaggctg

SEQ ID NO: 137735 - DNA, 22 bp, Homo sapiens
  chr1:93542194-93542216
  hypo
ttttttcttttttcttcgagac

SEQ ID NO: 137736 - DNA, 35 bp, Homo sapiens
  chr1:93647179-93647214
  hypo
cttttttttttgagaccgagtctcactctgtcgcc

SEQ ID NO: 137737 - DNA, 35 bp, Homo sapiens
  chr1:93647453-93647488
  hypo
gagccaccgcgcccggactgggagttatttcttgc

SEQ ID NO: 137738 - DNA, 30 bp, Homo sapiens; identical to SEQ ID NO: 60536
  chr1:93720787-93720817
  hypo

SEQ ID NO: 137739 - DNA, 30 bp, Homo sapiens
  chr1:93790712-93790742
  hypo
aggcatgagccaccgcgcccagcctatgct

SEQ ID NO: 137740 - DNA, 1056 bp, Homo sapiens; identical to SEQ ID NO: 103856
  chr1:93913409-93914465
  hypo

SEQ ID NO: 137741 - DNA, 31 bp, Homo sapiens; identical to SEQ ID NO: 60538
  chr1:93917485-93917516
  hypo

SEQ ID NO: 137742 - DNA, 22 bp, Homo sapiens
  chr1:93971512-93971534
  hypo
cgtgagccaccatgcctggccc

SEQ ID NO: 137743 - DNA, 45 bp, Homo sapiens; identical to SEQ ID NO: 60540
  chr1:93973206-93973251
  hypo

SEQ ID NO: 137744 - DNA, 34 bp, Homo sapiens; identical to SEQ ID NO: 60541
  chr1:93975135-93975169
  hypo

SEQ ID NO: 137745 - DNA, 100 bp, Homo sapiens
  chr1:94033358-94033458
  hypo
tgggtgtactggtgccgcagagcagtccacgtcttttctaaccttgtgatctggaagaaaggtggtgttttggaaaaggttctttttaaaattacctttt

SEQ ID NO: 137746 - DNA, 141 bp, Homo sapiens
  chr1:94041431-94041572
  hypo
tcgctgtaggccatgcgccctgaagtactgttaccccagggctaggctggtgctgcgcctctctttgttctaaaacctgctgctctgatgcctggaaggagctgggagggtcggaagtgcagaggacggcactgctcacct

SEQ ID NO: 137747 - DNA, 168 bp, Homo sapiens
  chr1:94043255-94043423
  hypo
ccatgcacgcttcctcgcatatttagacagctgccctctgtcagaggtcccaaaccctgtacttctgaggggtgtcccccacgctctgggtggcgagattaaaaggcctgtgattgattcaggtttgctctggaaaacctggcagatgggcggcggcccctgctctcc

SEQ ID NO: 137748 - DNA, 599 bp, Homo sapiens
  chr1:94047862-94048461
  hypo
agtccatgctcagtacgtgctgggcgatgaccttggggtcgttgttggtgaacagttcttttgcacgtttcaacattgctgtttccaggggcttattctcagggggaaggaactttgactcaaactcgttgggcctgaaggaggagacagtctccaggaggggcgtcacaaactcgcccttgtcccactgccccttctccatctgagctgccgcaggttcccaaggtctttccctgtcatcatcatcaaggatcaagtagttgacgccagagttccggggacctggcgcctcattctgcttggctgtgagcagttctgtgtggcttccctgggcacatgagggtagctttgctcccctgccgcagcctgtggcaaacgctgggttcagttcacagtagttggcctctgagttgagccaggcagagggagacgagggaaccttgaggaacggcaccttgcagggcttaggcgggggcttagggcacagttgactgtctgatcccctcagcgcctccccagccctggcgtctgaggagaccctccgaaccactgctgggctcagggcaggctcgcttcccgtcctgaacacaggtgagttt

SEQ ID NO: 137749 - DNA, 30 bp, Homo sapiens; identical to SEQ ID NO: 60543
  chr1:94054820-94054850
  hypo

SEQ ID NO: 137750 - DNA, 459 bp, Homo sapiens; identical to SEQ ID NO: 103858
  chr1:94146397-94146856
  hypo

SEQ ID NO: 137751 - DNA, 26 bp, Homo sapiens
  chr1:94343567-94343593
  hypo
aaaatcaaaatttggccgggcgcggt

SEQ ID NO: 137752 - DNA, 93 bp, Homo sapiens; identical to SEQ ID NO: 60546
  chr1:94345694-94345787
  hypo

SEQ ID NO: 137753 - DNA, 33 bp, Homo sapiens; identical to SEQ ID NO: 60547
  chr1:94346026-94346059
  hypo

SEQ ID NO: 137754 - DNA, 67 bp, Homo sapiens; identical to SEQ ID NO: 60548
  chr1:94354602-94354669
  hypo

SEQ ID NO: 137755 - DNA, 193 bp, Homo sapiens; identical to SEQ ID NO: 60549
  chr1:94466587-94466780
  hypo

SEQ ID NO: 137756 - DNA, 279 bp, Homo sapiens; identical to SEQ ID NO: 60550
  chr1:94495947-94496226
  hypo

SEQ ID NO: 137757 - DNA, 30 bp, Homo sapiens
  chr1:94496649-94496679
  hypo
aaacacaaaggtagccgggagcacgatctg

SEQ ID NO: 137758 - DNA, 44 bp, Homo sapiens; identical to SEQ ID NO: 60551
  chr1:94507307-94507351
  hypo

SEQ ID NO: 137759 - DNA, 103 bp, Homo sapiens; identical to SEQ ID NO: 14777
  chr1:94507710-94507813
  hypo

SEQ ID NO: 137760 - DNA, 31 bp, Homo sapiens; identical to SEQ ID NO: 60553
  chr1:94528402-94528433
  hypo

SEQ ID NO: 137761 - DNA, 103 bp, Homo sapiens; identical to SEQ ID NO: 60554
  chr1:94546399-94546502
  hypo

SEQ ID NO: 137762 - DNA, 30 bp, Homo sapiens; identical to SEQ ID NO: 60555
  chr1:94587574-94587604
  hypo

SEQ ID NO: 137763 - DNA, 657 bp, Homo sapiens; identical to SEQ ID NO: 36005
  chr1:94702420-94703077
  hypo

SEQ ID NO: 137764 - DNA, 425 bp, Homo sapiens; identical to SEQ ID NO: 651
  chr1:94703103-94703528
  hypo

SEQ ID NO: 137765 - DNA, 30 bp, Homo sapiens
  chr1:94718800-94718830
  hypo
aggtgtgagccactgcgcccgatccattct

SEQ ID NO: 137766 - DNA, 50 bp, Homo sapiens
  chr1:94719183-94719233
  hypo
tggaacacacacgcacgcacgcacgcacgcacgcacgcacgcacatgcac

SEQ ID NO: 137767 - DNA, 26 bp, Homo sapiens
  chr1:94812326-94812352
  hypo
tgagactccatcgaaaaaaaaaaaaa

SEQ ID NO: 137768 - DNA, 30 bp, Homo sapiens
  chr1:94957225-94957255
  hypo
agagccgcacagtagcgctacaaatagaca

SEQ ID NO: 137769 - DNA, 1310 bp, Homo sapiens; identical to SEQ ID NO: 103869
  chr1:95006822-95008132
  hypo

SEQ ID NO: 137770 - DNA, 24 bp, Homo sapiens
  chr1:95071324-95071348
  hypo
gccggcaaccctgttttatttgtt

SEQ ID NO: 137771 - DNA, 30 bp, Homo sapiens
  chr1:95086441-95086471
  hypo
cgtcgttatgtcccacgttctcaaacaagt

SEQ ID NO: 137772 - DNA, 32 bp, Homo sapiens; identical to SEQ ID NO: 60561
  chr1:95222490-95222522
  hypo

SEQ ID NO: 137773 - DNA, 31 bp, Homo sapiens; identical to SEQ ID NO: 14783
  chr1:95314374-95314405
  hypo

SEQ ID NO: 137774 - DNA, 107 bp, Homo sapiens
  chr1:95315113-95315220
  hypo
agagggactctgagccgctttcacctcttatgaagaggcgccaggtgatcgggtggcgagcccgctgcacagtgcccgattgtctcattccacgtcccacaggcagc

SEQ ID NO: 137775 - DNA, 144 bp, Homo sapiens
  chr1:95340130-95340274
  hypo
tcaggcagctaggaactcctgcgaggcaattgagtggtcagtgcaaatgacttcgacttcctcctaagtgtgcggctcccgaagacaagaataccagccactcactggcacttactatgtaccggatactgtgctactttatgt

SEQ ID NO: 137776 - DNA, 152 bp, Homo sapiens
  chr1:95343780-95343932
  hypo
tccgtctcacaaaaaaaccaaaacaaacaaacaaacaaaaaaaaaacagagaaacttggttggggcccaaagaatgcgaggctcctgacctcgcttagtgccctgtccccagtccccagcctggagcttggccaaagcggaccttccatgtg

SEQ ID NO: 137777 - DNA, 1448 bp, Homo sapiens; identical to SEQ ID NO: 103871
  chr1:95391394-95392842
  hypo

SEQ ID NO: 137778 - DNA, 21 bp, Homo sapiens
  chr1:95572689-95572710
  hypo
ttcttttaggccgggcgcggt

SEQ ID NO: 137779 - DNA, 936 bp, Homo sapiens; identical to SEQ ID NO: 103876
  chr1:95582632-95583568
  hypo

SEQ ID NO: 137780 - DNA, 26 bp, Homo sapiens
  chr1:95693439-95693465
  hypo
ttttttttttttgagacggagtctcg

SEQ ID NO: 137781 - DNA, 30 bp, Homo sapiens
  chr1:96259528-96259558
  hypo
taatctgttgtccttcgctaaattaccacg

SEQ ID NO: 137782 - DNA, 23 bp, Homo sapiens
  chr1:97184492-97184515
  hypo
tgagatggagcctctctctgtcg

SEQ ID NO: 137783 - DNA, 22 bp, Homo sapiens
  chr1:97184754-97184776
  hypo
aagtcaccgtgccaggtccaaa

SEQ ID NO: 137784 - DNA, 223 bp, Homo sapiens
  chr1:97185210-97185433
  hypo
tgagaaccaatcaatcaatatcgatcgagcgaatgtggggaataccaagaattaataccatagttcccgccctttggtagcttgcacattcaattgttgagtgaaaacacatgtatgaaaccacaaatatgtgaaaagtgattattagtggcactaataacagatcctttattttaaggtttaaggtgaagtggttattgtaggaaatttgatatgtggtttt

SEQ ID NO: 137785 - DNA, 43 bp, Homo sapiens; identical to SEQ ID NO: 60569
  chr1:97185732-97185775
  hypo

SEQ ID NO: 137786 - DNA, 84 bp, Homo sapiens
  chr1:98336378-98336462
  hypo
gactgtgattaaaaacgctgctgccattgtctacctattcaggcctctagcattttacgtgggttccaccgattagtgtttgaa

SEQ ID NO: 137787 - DNA, 372 bp, Homo sapiens; identical to SEQ ID NO: 103881
  chr1:98386194-98386566
  hypo

SEQ ID NO: 137788 - DNA, 310 bp, Homo sapiens; identical to SEQ ID NO: 36023
  chr1:98386618-98386928
  hypo

SEQ ID NO: 137789 - DNA, 1136 bp, Homo sapiens; identical to SEQ ID NO: 103887
  chr1:99126874-99128010
  hypo

SEQ ID NO: 137790 - DNA, 30 bp, Homo sapiens
  chr1:99611875-99611905
  hypo
gcttcatggagccagcgggagccccgcccc

SEQ ID NO: 137791 - DNA, 30 bp, Homo sapiens
  chr1:99612156-99612186
  hypo
cattgtcctgctgcgcgttgggggtgatga

SEQ ID NO: 137792 - DNA, 169 bp, Homo sapiens; identical to SEQ ID NO: 14790
  chr1:99667087-99667256
  hypo

SEQ ID NO: 137793 - DNA, 164 bp, Homo sapiens; identical to SEQ ID NO: 60574
  chr1:100106763-100106927
  hypo

SEQ ID NO: 137794 - DNA, 139 bp, Homo sapiens; identical to SEQ ID NO: 36036
  chr1:100437130-100437269
  hypo

SEQ ID NO: 137795 - DNA, 182 bp, Homo sapiens; identical to SEQ ID NO: 14792
  chr1:100500498-100500680
  hypo

SEQ ID NO: 137796 - DNA, 30 bp, Homo sapiens; identical to SEQ ID NO: 60577
  chr1:100678752-100678782
  hypo

SEQ ID NO: 137797 - DNA, 30 bp, Homo sapiens
  chr1:100789952-100789982
  hypo
attggtctccgcagtcgttctcaaactggg

SEQ ID NO: 137798 - DNA, 195 bp, Homo sapiens
  chr1:100928309-100928504
  hypo
cacagacgctggcttcgagcactatgacctcttcttcatagatggcagcacacccagtgacaacatcgtgcgaaggttcctgaacatctgtgagaacaccgaaggggccatcgccgttcactgcaaaggtgtgtgcaaggcctcggtggtggtggctgtgcttatcgaaggggcgggccaaggaagagcaaataa

SEQ ID NO: 137799 - DNA, 217 bp, Homo sapiens
  chr1:100931954-100932171
  hypo
atagaaggcaaattacgcagaaatcttaatcataaagggagagccccactgagaccaaaattaaacctcactcttcgaaagaacattgatgtttgatctggggcaagggttccttcagattaaaacagaacacacacacacacctcatctaatgaaacagagtatgaatacttcttaaaaaggaagggttagccgggagtggtggcccacgcctgta

SEQ ID NO: 137800 - DNA, 277 bp, Homo sapiens; identical to SEQ ID NO: 677
  chr1:101004539-101004816
  hypo

SEQ ID NO: 137801 - DNA, 992 bp, Homo sapiens; identical to SEQ ID NO: 36048
  chr1:101004842-101005834
  hypo

SEQ ID NO: 137802 - DNA, 36 bp, Homo sapiens; identical to SEQ ID NO: 14796
  chr1:101675508-101675544
  hypo

SEQ ID NO: 137803 - DNA, 1549 bp, Homo sapiens; identical to SEQ ID NO: 103910
  chr1:101701718-101703267
  hypo

SEQ ID NO: 137804 - DNA, 121 bp, Homo sapiens
  chr1:101721446-101721567
  hypo
cctgctcctgactcaccactgttcgctcttgtgaggaacagttggtcaggaagccgcgcagcagccatggcttttaagaataccgggcactttgggaggccgaggtggacggatcacaagg

SEQ ID NO: 137805 - DNA, 91 bp, Homo sapiens
  chr1:101721806-101721897
  hypo
tcaaaaaaaaaaaaaaaaaaaaaaaaagaattccggaaacacactcgtggagccagaggtggcaattcaccgaattcgaatcactgtaaca

SEQ ID NO: 137806 - DNA, 33 bp, Homo sapiens; identical to SEQ ID NO: 60586
  chr1:102292872-102292905
  hypo

SEQ ID NO: 137807 - DNA, 31 bp, Homo sapiens; identical to SEQ ID NO: 60587
  chr1:102415995-102416026
  hypo

SEQ ID NO: 137808 - DNA, 1210 bp, Homo sapiens; identical to SEQ ID NO: 103919
  chr1:107599192-107600402
  hypo

SEQ ID NO: 137809 - DNA, 1917 bp, Homo sapiens; identical to SEQ ID NO: 103920
  chr1:107682641-107684558
  hypo

SEQ ID NO: 137810 - DNA, 30 bp, Homo sapiens
  chr1:108087064-108087094
  hypo
agaaattatttgtgccgatcattcattatt

SEQ ID NO: 137811 - DNA, 29 bp, Homo sapiens
  chr1:108199571-108199600
  hypo
ttttttttttttttttttttccgagacga

SEQ ID NO: 137812 - DNA, 106 bp, Homo sapiens
  chr1:108230623-108230729
  hypo
tttgcactaattctacggaatttcagtaattcggcaaatgtcgggcagtgacacaacatttcatgacggggacgcatctaccaacttctggcgataagggccaccc

SEQ ID NO: 137813 - DNA, 45 bp, Homo sapiens; identical to SEQ ID NO: 60590
  chr1:108314146-108314191
  hypo

SEQ ID NO: 137814 - DNA, 25 bp, Homo sapiens
  chr1:108465286-108465311
  hypo
caatttggccgggcgcggtggctca

SEQ ID NO: 137815 - DNA, 227 bp, Homo sapiens; identical to SEQ ID NO: 690
  chr1:108507148-108507375
  hypo

SEQ ID NO: 137816 - DNA, 112 bp, Homo sapiens; identical to SEQ ID NO: 691
  chr1:108507494-108507606
  hypo

SEQ ID NO: 137817 - DNA, 872 bp, Homo sapiens; identical to SEQ ID NO: 692
  chr1:108507657-108508529
  hypo

SEQ ID NO: 137818 - DNA, 38 bp, Homo sapiens; identical to SEQ ID NO: 693
  chr1:108508549-108508587
  hypo

SEQ ID NO: 137819 - DNA, 351 bp, Homo sapiens; identical to SEQ ID NO: 60595
  chr1:108735213-108735564
  hypo

SEQ ID NO: 137820 - DNA, 767 bp, Homo sapiens; identical to SEQ ID NO: 103928
  chr1:109203572-109204339
  hypo

SEQ ID NO: 137821 - DNA, 204 bp, Homo sapiens; identical to SEQ ID NO: 60597
  chr1:109241832-109242036
  hypo

SEQ ID NO: 137822 - DNA, 30 bp, Homo sapiens; identical to SEQ ID NO: 696
  chr1:109257153-109257183
  hypo

SEQ ID NO: 137823 - DNA, 30 bp, Homo sapiens; identical to SEQ ID NO: 60599
  chr1:109285035-109285065
  hypo

SEQ ID NO: 137824 - DNA, 31 bp, Homo sapiens; identical to SEQ ID NO: 697
  chr1:109420435-109420466
  hypo

SEQ ID NO: 137825 - DNA, 17 bp, Homo sapiens
  chr1:109423193-109423210
  hypo
tccgtctcaaaaaaaaa

SEQ ID NO: 137826 - DNA, 30 bp, Homo sapiens; identical to SEQ ID NO: 60602
  chr1:109513840-109513870
  hypo

SEQ ID NO: 137827 - DNA, 99 bp, Homo sapiens
  chr1:109585386-109585485
  hypo
atacgtgatgttcaaccgagcttaattaagcatccaggaagtataaccataaggaagaatacaattacacaaacctgtaagaacatcattctcggccag

SEQ ID NO: 137828 - DNA, 39 bp, Homo sapiens
  chr1:109585724-109585763
  hypo
tgcactccggcctgggtgacagagcgagagactccgtct

SEQ ID NO: 137829 - DNA, 28 bp, Homo sapiens
  chr1:109593505-109593533
  hypo
tcaagggccaggcaccgcggctcacgcc

SEQ ID NO: 137830 - DNA, 31 bp, Homo sapiens; identical to SEQ ID NO: 60605
  chr1:109605918-109605949
  hypo

SEQ ID NO: 137831 - DNA, 105 bp, Homo sapiens; identical to SEQ ID NO: 14809
  chr1:109609235-109609340
  hypo

SEQ ID NO: 137832 - DNA, 29 bp, Homo sapiens
  chr1:109617388-109617417
  hypo
gagactccgtctcaaaaaaaaaaaaaaag

SEQ ID NO: 137833 - DNA, 92 bp, Homo sapiens; identical to SEQ ID NO: 60608
  chr1:109646189-109646281
  hypo

SEQ ID NO: 137834 - DNA, 332 bp, Homo sapiens
  chr1:109646880-109647212
  hypo
gggattacagaagttagccaccgcgcccctccatagtttgagtagatgtatccaaacttgcttagcctttcacctctggagaactggagtcaattcgggtgaatccggtcccgccgtgcatcatggcaaagtgagattgttgtcttgccacctggttcagcttggccagatcaagcggagaaatgatgtgttgtccttgaatcgagtaggcatctagaggtggtccctccaggtcacgggtgcctcgggggtagcccacagccttgctgcaacgatcttggccgcccgcgcagatgactggggacttggccggcatgggctggtatggaatg

SEQ ID NO: 137835 - DNA, 34 bp, Homo sapiens
  chr1:109679036-109679070
  hypo
ctcccttgtggcttccgaaggaaccagccctgcc

SEQ ID NO: 137836 - DNA, 93 bp, Homo sapiens
  chr1:109679129-109679222
  hypo
caaagccacccagtctgtggcactttgttacagcagccctgaaagacgaatgcaggcaccgtgaggtagaacatccctcgcgaacagggcaca

SEQ ID NO: 137837 - DNA, 30 bp, Homo sapiens; identical to SEQ ID NO: 60610
  chr1:109694776-109694806
  hypo

SEQ ID NO: 137838 - DNA, 77 bp, Homo sapiens; identical to SEQ ID NO: 60611
  chr1:109725167-109725244
  hypo

SEQ ID NO: 137839 - DNA, 30 bp, Homo sapiens; identical to SEQ ID NO: 60612
  chr1:109729836-109729866
  hypo

SEQ ID NO: 137840 - DNA, 146 bp, Homo sapiens; identical to SEQ ID NO: 60613
  chr1:109741854-109742000
  hypo

SEQ ID NO: 137841 - DNA, 30 bp, Homo sapiens
  chr1:109755942-109755972
  hypo
cctcaacaccttatacggcgttcaaatctg

SEQ ID NO: 137842 - DNA, 138 bp, Homo sapiens; identical to SEQ ID NO: 60614
  chr1:109772085-109772223
  hypo

SEQ ID NO: 137843 - DNA, 30 bp, Homo sapiens; identical to SEQ ID NO: 14812
  chr1:109772424-109772454
  hypo

SEQ ID NO: 137844 - DNA, 30 bp, Homo sapiens
  chr1:109772717-109772747
  hypo
gcacagaccacgagacgactctggaggtca

SEQ ID NO: 137845 - DNA, 30 bp, Homo sapiens; identical to SEQ ID NO: 60616
  chr1:109793451-109793481
  hypo

SEQ ID NO: 137846 - DNA, 601 bp, Homo sapiens; identical to SEQ ID NO: 14813
  chr1:109795508-109796109
  hypo

SEQ ID NO: 137847 - DNA, 358 bp, Homo sapiens
  chr1:109797579-109797937
  hypo
acccagcctgcctttggtgagcgtggccaggcactggcagagaagcgcccccattaagccttcggtctcccaccagggcagagccctagaccttggttccctagtctagagaaggctcggggcaacatccaggacggctcctcctggcccggcagctctggccccaccctctcccttcggccctgacccttggaggcagtcaccacggcaaccccaaagttcagggaggccggggtgagggggagctgactcccactgcccctttgttttcctcctcttgttctttgtctcttctttctttcccgcccctgcccatgcggagccctgcagcactgcctctctccggtgccctctccct

SEQ ID NO: 137848 - DNA, 30 bp, Homo sapiens; identical to SEQ ID NO: 14814
  chr1:109801412-109801442
  hypo

SEQ ID NO: 137849 - DNA, 36 bp, Homo sapiens; identical to SEQ ID NO: 60619
  chr1:109801646-109801682
  hypo

SEQ ID NO: 137850 - DNA, 114 bp, Homo sapiens
  chr1:109805485-109805599
  hypo
ttcccagtccgaatgcggcagttcgtgggctgcatgcggaacctgcaggtggacagccggcacatagacatggctgacttcattgccaacaatggcaccgtgcctggtatgggg

SEQ ID NO: 137851 - DNA, 32 bp, Homo sapiens
  chr1:109805821-109805853
  hypo
cgtgaaccagtgggacgcgttcagctgcgagt

SEQ ID NO: 137852 - DNA, 68 bp, Homo sapiens; identical to SEQ ID NO: 14817
  chr1:109812119-109812187
  hypo

SEQ ID NO: 137853 - DNA, 263 bp, Homo sapiens; identical to SEQ ID NO: 60622
  chr1:109816070-109816333
  hypo

SEQ ID NO: 137854 - DNA, 297 bp, Homo sapiens
  chr1:109839443-109839740
  hypo
ctgtttcactgagtccgcactggttttcagcaaagacacggaaggcataggagttgccgatgatgaggtcagagacgatgcagctggtgcggtgatagtgctccagcaccgtgaaccacagctgcggggccgaacatgatgccagaaatcagccaccccatgtggagctaccagaggcctgtcccaacatgccctcttccaccctccttccttcccagctggcctcaccccggattttgtgtcagccttctgcaccgtgtatcccagaagtgctgtattccccgtatcttggggcgg

SEQ ID NO: 137855 - DNA, 618 bp, Homo sapiens; identical to SEQ ID NO: 36083
  chr1:109940218-109940836
  hypo

SEQ ID NO: 137856 - DNA, 30 bp, Homo sapiens
  chr1:109941473-109941503
  hypo
aaaataaaacccctacgctgttccctttac

SEQ ID NO: 137857 - DNA, 99 bp, Homo sapiens; identical to SEQ ID NO: 103959
  chr1:110025978-110026077
  hypo

SEQ ID NO: 137858 - DNA, 66 bp, Homo sapiens
  chr1:110026126-110026192
  hypo
cgcttcgtggccgccagcccgggaaggggcgccagccagctggcggacgcacggcttagaggggcg

SEQ ID NO: 137859 - DNA, 31 bp, Homo sapiens; identical to SEQ ID NO: 14820
  chr1:110027020-110027051
  hypo

SEQ ID NO: 137860 - DNA, 30 bp, Homo sapiens; identical to SEQ ID NO: 60625
  chr1:110039689-110039719
  hypo

SEQ ID NO: 137861 - DNA, 79 bp, Homo sapiens; identical to SEQ ID NO: 60626
  chr1:110042270-110042349
  hypo

SEQ ID NO: 137862 - DNA, 207 bp, Homo sapiens; identical to SEQ ID NO: 103962
  chr1:110052078-110052285
  hypo

SEQ ID NO: 137863 - DNA, 31 bp, Homo sapiens; identical to SEQ ID NO: 14823
  chr1:110061030-110061061
  hypo

SEQ ID NO: 137864 - DNA, 261 bp, Homo sapiens
  chr1:110073071-110073332
  hypo
ctctccacttcatggcgcagctaatggcctggaaaaaactggccagctgttccccagctgtgacataatgagctcagggacgatcaatgccgttccggtctctaattaggccagggagctggctgcagcgagagtgcggcctgtttcttgagggcaccacttctactccagtccccagctgctgtctgttggcagccacctgggcccatgcatctacgtaccagaggagcagacagggccctccagcggcccttgggaggg

SEQ ID NO: 137865 - DNA, 171 bp, Homo sapiens; identical to SEQ ID NO: 60629
  chr1:110085338-110085509
  hypo

SEQ ID NO: 137866 - DNA, 45 bp, Homo sapiens; identical to SEQ ID NO: 14825
  chr1:110085847-110085892
  hypo

SEQ ID NO: 137867 - DNA, 30 bp, Homo sapiens; identical to SEQ ID NO: 60631
  chr1:110141591-110141621
  hypo

SEQ ID NO: 137868 - DNA, 103 bp, Homo sapiens; identical to SEQ ID NO: 14826
  chr1:110167961-110168064
  hypo

SEQ ID NO: 137869 - DNA, 30 bp, Homo sapiens
  chr1:110168304-110168334
  hypo
gctgagagcgagctccgtagtgccccgtat

SEQ ID NO: 137870 - DNA, 271 bp, Homo sapiens; identical to SEQ ID NO: 14827
  chr1:110170705-110170976
  hypo

SEQ ID NO: 137871 - DNA, 30 bp, Homo sapiens; identical to SEQ ID NO: 60634
  chr1:110171345-110171375
  hypo

SEQ ID NO: 137872 - DNA, 38 bp, Homo sapiens
  chr1:110196411-110196449
  hypo
cagaagtgcccaggcgcgttggctcacgcctgtaatcc

SEQ ID NO: 137873 - DNA, 30 bp, Homo sapiens; identical to SEQ ID NO: 60636
  chr1:110200945-110200975
  hypo

SEQ ID NO: 137874 - DNA, 157 bp, Homo sapiens; identical to SEQ ID NO: 60637
  chr1:110305359-110305516
  hypo

SEQ ID NO: 137875 - DNA, 31 bp, Homo sapiens; identical to SEQ ID NO: 14829
  chr1:110307261-110307292
  hypo

SEQ ID NO: 137876 - DNA, 30 bp, Homo sapiens; identical to SEQ ID NO: 60639
  chr1:110307557-110307587
  hypo

SEQ ID NO: 137877 - DNA, 38 bp, Homo sapiens; identical to SEQ ID NO: 14830
  chr1:110338323-110338361
  hypo

SEQ ID NO: 137878 - DNA, 31 bp, Homo sapiens; identical to SEQ ID NO: 14831
  chr1:110354911-110354942
  hypo

SEQ ID NO: 137879 - DNA, 148 bp, Homo sapiens; identical to SEQ ID NO: 36095
  chr1:110453159-110453307
  hypo

SEQ ID NO: 137880 - DNA, 422 bp, Homo sapiens; identical to SEQ ID NO: 36096
  chr1:110453530-110453952
  hypo

SEQ ID NO: 137881 - DNA, 152 bp, Homo sapiens
  chr1:110471933-110472085
  hypo
cagagagaggagcctgaagttcgtggggcgggacagcgtcggcctgatttcccgtaaaggtgtgcagcctgagagacgggaagaggaggcctctggacctgctggtctgcactgacagcctgaagggtctacaccctcggctcacctaagtg

SEQ ID NO: 137882 - DNA, 190 bp, Homo sapiens
  chr1:110561014-110561204
  hypo
cgggagcacttggatcgcatgaaaaacagttgtatcgtatgcaatatgggccactccaacacagaaatcgatgtggtaaggcttctctcatttgttgctaggcatttctctactacctttcattaataaccatagtcaactgtgctttcttcctttcagaccagcctccgcactccggagctgacgtggg

SEQ ID NO: 137883 - DNA, 30 bp, Homo sapiens; identical to SEQ ID NO: 60644
  chr1:110596846-110596876
  hypo

SEQ ID NO: 137884 - DNA, 30 bp, Homo sapiens; identical to SEQ ID NO: 14834
  chr1:110623923-110623953
  hypo

SEQ ID NO: 137885 - DNA, 876 bp, Homo sapiens; identical to SEQ ID NO: 103981
  chr1:110626790-110627666
  hypo

SEQ ID NO: 137886 - DNA, 30 bp, Homo sapiens
  chr1:110655076-110655106
  hypo
aagccaacatctcccgcaggaccccctaat

SEQ ID NO: 137887 - DNA, 529 bp, Homo sapiens; identical to SEQ ID NO: 712
  chr1:110692967-110693496
  hypo

SEQ ID NO: 137888 - DNA, 433 bp, Homo sapiens; identical to SEQ ID NO: 103985
  chr1:110693736-110694169
  hypo

SEQ ID NO: 137889 - DNA, 30 bp, Homo sapiens; identical to SEQ ID NO: 60649
  chr1:110716489-110716519
  hypo

SEQ ID NO: 137890 - DNA, 95 bp, Homo sapiens
  chr1:110726679-110726774
  hypo
aaagcacgctgtttccgacgatcagtgaggcaattatacaagcctgttttttctgtttttgttggttttttttgacggagtctcgctctgttgcc

SEQ ID NO: 137891 - DNA, 38 bp, Homo sapiens
  chr1:110737244-110737282
  hypo
catgacgcacttccccgcctccccgttctggtccgtca

SEQ ID NO: 137892 - DNA, 30 bp, Homo sapiens
  chr1:110737739-110737769
  hypo
ttgtcactccagtcccgggctgtgtccaca

SEQ ID NO: 137893 - DNA, 291 bp, Homo sapiens
  chr1:110737983-110738274
  hypo
gaaagttagacacaacgccttcctcaggtgctccccgactagtagagcggggctcagaacctgagcatctggatccctcgtgcaggactgagcctgctggcaggagggctgcaggcatgctttggggagggatgtgatgggaggggcctgggtgcccccgagacccccagggccctgcccaccctgcacctttgcccccaaaccggcctcccggctctctgtagtgggctgctgtgtctttgcattcctcgtggggctgttgttcgtccagcgctccggaaactactttgt

SEQ ID NO: 137894 - DNA, 384 bp, Homo sapiens; identical to SEQ ID NO: 714
  chr1:110753509-110753893
  hypo

SEQ ID NO: 137895 - DNA, 399 bp, Homo sapiens; identical to SEQ ID NO: 715
  chr1:110753957-110754356
  hypo

SEQ ID NO: 137896 - DNA, 108 bp, Homo sapiens
  chr1:110765709-110765817
  hypo
gcgtgcacttccggcgggaggtagagacagagcccatcctgacctacatcgagggcgtatgtgtgctgtggttcacactggagttcctggtgcgcatcgtgtgctgcc

SEQ ID NO: 137897 - DNA, 30 bp, Homo sapiens; identical to SEQ ID NO: 60655
  chr1:110768704-110768734
  hypo

SEQ ID NO: 137898 - DNA, 178 bp, Homo sapiens
  chr1:110771214-110771392
  hypo
tgtctccactggcatcgcgttacagcttgccctaccctctgaaaaagttcctgctcacccccttccaccccctcaccggcccaccccctggtcactctgccccttagctgcaccttcccctctgggcacacgcgcacaaacaggcacccttccatgccctcagcgctcactccccagg

SEQ ID NO: 137899 - DNA, 30 bp, Homo sapiens
  chr1:110771595-110771625
  hypo
gccttgccttcctctcggggtcccaccagg

SEQ ID NO: 137900 - DNA, 266 bp, Homo sapiens
  chr1:110771990-110772256
  hypo
ggcgggctgcctaggcgagggaggcccttccctcaggaagcctctgcccagattcagtggtgactcccactggcggcacctggtgtcccttctgcgccccgagctgcagcatcgctctccacgctgcttcctctgcttctgcgacagttcttcttccctctccctctccctcaaactcccagccctgcctctgagtcacctgccattcccacccagcctctgcgctctgtattcctgccagaaccggagactcatctaatttctat

SEQ ID NO: 137901 - DNA, 30 bp, Homo sapiens; identical to SEQ ID NO: 60657
  chr1:110838286-110838316
  hypo

SEQ ID NO: 137902 - DNA, 735 bp, Homo sapiens
  chr1:110883455-110884190
  hypo
cgatttggcaccatacgcaccatagactaccgaaaaggtgatagttgggcatatatccagtatgaaagcctggatgcagcgcatgctgcctggacccatatgcggggcttcccacttggtggcccagatcgacgccttagagtagactttgccgacaccgaacatcgttaccagcagcagtatctgcagcctctgcccttgactcattatgagctggtgacagatgcttttggacatcgggcaccagaccctttgaggggtgctcgggataggacaccacccttactatacagagatcgtgatagggacctttatcctgactctgattgggtgccacccccacccccagtccgagaacgcagcactcggactgcagctacttctgtgcctgcttacgagccactggatagcctagatcgcaggcgggatggttggtccttggaccgggacagaggtgatcgagatctgcccagcagcagagaccagcctaggaagcgaaggctgcctgaggagagtggaggacgtcatctggataggtctcctgagagtgaccgcccacgaaaacgtcactgcgctccttctcctgaccgcagtccagaattgagcagtagccgggatcgttacaacagcgacaatgatcgatcttcccgtcttctcttggaaaggccctctccaatcagagacagacgaggtagtttggagaagagccagggtgacaagcgagaccgtaaaaac

SEQ ID NO: 137903 - DNA, 27 bp, Homo sapiens
  chr1:110900906-110900933
  hypo
tattgcgccactgcgctagagcccagg

SEQ ID NO: 137904 - DNA, 30 bp, Homo sapiens; identical to SEQ ID NO: 14840
  chr1:110946979-110947009
  hypo

SEQ ID NO: 137905 - DNA, 34 bp, Homo sapiens; identical to SEQ ID NO: 14841
  chr1:110947364-110947398
  hypo

SEQ ID NO: 137906 - DNA, 121 bp, Homo sapiens; identical to SEQ ID NO: 14842
  chr1:110947697-110947818
  hypo

SEQ ID NO: 137907 - DNA, 33 bp, Homo sapiens; identical to SEQ ID NO: 60662
  chr1:111001560-111001593
  hypo

SEQ ID NO: 137908 - DNA, 152 bp, Homo sapiens; identical to SEQ ID NO: 60663
  chr1:111022637-111022789
  hypo

SEQ ID NO: 137909 - DNA, 30 bp, Homo sapiens; identical to SEQ ID NO: 60664
  chr1:111061359-111061389
  hypo

SEQ ID NO: 137910 - DNA, 1205 bp, Homo sapiens; identical to SEQ ID NO: 103996
  chr1:111148987-111150192
  hypo

SEQ ID NO: 137911 - DNA, 40 bp, Homo sapiens
  chr1:111204440-111204480
  hypo
taatgtcagccgggcgcggtggctcacgcctataatccca

SEQ ID NO: 137912 - DNA, 228 bp, Homo sapiens
  chr1:111216246-111216474
  hypo
catggacgccttcagcgtttgcccgaggatctgcagccccttggagtggcgcgacagcttgaagatgcggaagacccttaccaggcggatgaccctcaggatggccagagacatggcctgctgtccattgccctgtcgttcggccagctcggtacccagagtgataaaataaggaatgatggccacaatgtcgatcaggttcatgatgtttcgcgagaaggtggcttt

SEQ ID NO: 137913 - DNA, 258 bp, Homo sapiens; identical to SEQ ID NO: 36116
  chr1:111216714-111216972
  hypo

SEQ ID NO: 137914 - DNA, 697 bp, Homo sapiens; identical to SEQ ID NO: 718
  chr1:111217194-111217891
  hypo

SEQ ID NO: 137915 - DNA, 59 bp, Homo sapiens; identical to SEQ ID NO: 36118
  chr1:111217923-111217982
  hypo

SEQ ID NO: 137916 - DNA, 100 bp, Homo sapiens
  chr1:111296097-111296197
  hypo
gcaacttctgcctcccgcatgcaagtgcctgcaccagcctctgtcgccaggccgcagtgcagtggtgcgatcttcactacaacctccgccttccgggctc

SEQ ID NO: 137917 - DNA, 30 bp, Homo sapiens; identical to SEQ ID NO: 60669
  chr1:111490654-111490684
  hypo

SEQ ID NO: 137918 - DNA, 160 bp, Homo sapiens
  chr1:111496807-111496967
  hypo
tacctttctgcagcccgaataacattattatatccttacaaaaatttaaaagtcttttggacacgtgagagtgggtcaaaatattacattgacattttgttattgttgctgttgagacagggcccggctctgtcatccagactggagtgtaggtgtacaa

SEQ ID NO: 137919 - DNA, 30 bp, Homo sapiens; identical to SEQ ID NO: 60670
  chr1:111890784-111890814
  hypo

SEQ ID NO: 137920 - DNA, 124 bp, Homo sapiens
  chr1:112058222-112058346
  hypo
cggcagcacgggccgctcccctgagcctgggaaggaggacacagagactgcccaggagcagcgctgagggggccctggcgccggggactgtggccccgacaaccccccagaagtcgcagtggcg

SEQ ID NO: 137921 - DNA, 259 bp, Homo sapiens
  chr1:112058396-112058655
  hypo
cgacctgattcatccaagacacaatttgaggatgctggtgctgcgccggccggacgcactcctccggaactccgggagccggggaggccggagggaggggtgttccccgcagctcgcagaggtcagcacagccccagcccagactggaggaactgaccgcggcgttcctaccatttatatgtcagggagcggcgggaacctgcaggtgggaccgcatgattcctgctgaaggactcatctgaggcgagtctctaggagg

SEQ ID NO: 137922 - DNA, 200 bp, Homo sapiens; identical to SEQ ID NO: 60671
  chr1:112084791-112084991
  hypo

SEQ ID NO: 137923 - DNA, 35 bp, Homo sapiens
  chr1:112151466-112151501
  hypo
gcagcagtacagtccagcttcggctcggcatcggg

SEQ ID NO: 137924 - DNA, 31 bp, Homo sapiens; identical to SEQ ID NO: 60672
  chr1:112155751-112155782
  hypo

SEQ ID NO: 137925 - DNA, 29 bp, Homo sapiens
  chr1:112160643-112160672
  hypo
acagagcaagactccgcctcaaaaaaaaa

SEQ ID NO: 137926 - DNA, 25 bp, Homo sapiens
  chr1:112232314-112232339
  hypo
gcagtctcgctctgtcgcccaggct

SEQ ID NO: 137927 - DNA, 25 bp, Homo sapiens
  chr1:112232578-112232603
  hypo
tgagccactgcgcccggcctcaggt

SEQ ID NO: 137928 - DNA, 31 bp, Homo sapiens; identical to SEQ ID NO: 60675
  chr1:112245184-112245215
  hypo

SEQ ID NO: 137929 - DNA, 77 bp, Homo sapiens
  chr1:112288928-112289005
  hypo
gccaagaaatgctgccgccgcttaacaagtgaagatgcatactggagaataggaactgaacacgcgaaggagtttcg

SEQ ID NO: 137930 - DNA, 173 bp, Homo sapiens
  chr1:112317424-112317597
  hypo
tggagaaaactactcccggggcctcttggaagggctctggatgggctttatggtgggtcttgaaggaagggtccatagcaaggtgccctaatgaccggctgaggctgcgagccctgggtccttccgttctcccctcactggcacataccagagttgaccgcgtctcaggtgtt

SEQ ID NO: 137931 - DNA, 1036 bp, Homo sapiens; identical to SEQ ID NO: 60677
  chr1:112524369-112525405
  hypo

SEQ ID NO: 137932 - DNA, 30 bp, Homo sapiens; identical to SEQ ID NO: 60678
  chr1:112773188-112773218
  hypo

SEQ ID NO: 137933 - DNA, 528 bp, Homo sapiens; identical to SEQ ID NO: 36132
  chr1:113051156-113051684
  hypo

SEQ ID NO: 137934 - DNA, 162 bp, Homo sapiens; identical to SEQ ID NO: 60680
  chr1:113059790-113059952
  hypo

SEQ ID NO: 137935 - DNA, 151 bp, Homo sapiens
  chr1:113067108-113067259
  hypo
agacacagagttctccgtaagcaatcctgcagagccgccccctgggtgcagaaatgaaatacgggagagcttcacattacacagagacctgtagctcacacctggttattgatggccttggtggaggcctctgccccgaccctccacttgg

SEQ ID NO: 137936 - DNA, 30 bp, Homo sapiens
  chr1:113118175-113118205
  hypo
taagtgactaatgggcgggtagcatagaca

SEQ ID NO: 137937 - DNA, 198 bp, Homo sapiens
  chr1:113185129-113185327
  hypo
cctggccgaccaccctctttttaatgtaggtatacagagttgattgcatcttcctttgtgcctcactctgcatttattacctgcttgctacattactatctaggcatcaggtccttgagggtagtgacaatgtcttatccagtcttcggtctttatttattgatacttctcttcctagtttgccgaatgggtgaatta

SEQ ID NO: 137938 - DNA, 118 bp, Homo sapiens
  chr1:113230413-113230531
  hypo
ctacgaggtaagtctcgctttcctccaattttatagaggaggaaagcgaggctctgagaggtgaggtcaactgagctgacctggctagagttgtcaagtgggccgcccccctctgccc

SEQ ID NO: 137939 - DNA, 30 bp, Homo sapiens
  chr1:113230772-113230802
  hypo
gctcctcgaggcaagcgctgagtttctagc

SEQ ID NO: 137940 - DNA, 30 bp, Homo sapiens; identical to SEQ ID NO: 60681
  chr1:113240695-113240725
  hypo

SEQ ID NO: 137941 - DNA, 206 bp, Homo sapiens; identical to SEQ ID NO: 14853
  chr1:113244293-113244499
  hypo

SEQ ID NO: 137942 - DNA, 191 bp, Homo sapiens; identical to SEQ ID NO: 36136
  chr1:113249225-113249416
  hypo

SEQ ID NO: 137943 - DNA, 156 bp, Homo sapiens; identical to SEQ ID NO: 60684
  chr1:113290950-113291106
  hypo

SEQ ID NO: 137944 - DNA, 31 bp, Homo sapiens; identical to SEQ ID NO: 60685
  chr1:113399486-113399517
  hypo

SEQ ID NO: 137945 - DNA, 92 bp, Homo sapiens
  chr1:113412274-113412366
  hypo
tgagatgtttttcagaactaacgccaatgagtccaaagaccacaccaaggaaccaagtcggtctgagaatgcagtttcttcagctgggcgcg

SEQ ID NO: 137946 - DNA, 30 bp, Homo sapiens
  chr1:113432791-113432821
  hypo
aggcatgagccactgcgcccggctgactag

SEQ ID NO: 137947 - DNA, 36 bp, Homo sapiens; identical to SEQ ID NO: 60686
  chr1:113442039-113442075
  hypo

SEQ ID NO: 137948 - DNA, 155 bp, Homo sapiens
  chr1:113465947-113466102
  hypo
aatccctaaagccacgcggccgccaactccagggagctgatgcttccaaccactgcacgttgctcccgggctgtcgcagtctcctgttgccgccatcatgtcccggccctccacggtgttgggtgccatggagatggggcgccgtagtcacccgc

SEQ ID NO: 137949 - DNA, 1692 bp, Homo sapiens; identical to SEQ ID NO: 104039
  chr1:113497848-113499540
  hypo

SEQ ID NO: 137950 - DNA, 77 bp, Homo sapiens; identical to SEQ ID NO: 60689
  chr1:113630282-113630359
  hypo

SEQ ID NO: 137951 - DNA, 30 bp, Homo sapiens; identical to SEQ ID NO: 14857
  chr1:113749371-113749401
  hypo

SEQ ID NO: 137952 - DNA, 31 bp, Homo sapiens; identical to SEQ ID NO: 14858
  chr1:113774557-113774588
  hypo

SEQ ID NO: 137953 - DNA, 706 bp, Homo sapiens; identical to SEQ ID NO: 732
  chr1:113932572-113933278
  hypo

SEQ ID NO: 137954 - DNA, 778 bp, Homo sapiens; identical to SEQ ID NO: 36142
  chr1:113933305-113934083
  hypo

SEQ ID NO: 137955 - DNA, 27 bp, Homo sapiens
  chr1:114223091-114223118
  hypo
acacagggccgggcgcggtggctcacg

SEQ ID NO: 137956 - DNA, 42 bp, Homo sapiens
  chr1:114246757-114246799
  hypo
accacatcaactgaacgctgtggcccccgtctctgtggagtg

SEQ ID NO: 137957 - DNA, 26 bp, Homo sapiens
  chr1:114295292-114295318
  hypo
actgcgcccagcctactgtcattttt

SEQ ID NO: 137958 - DNA, 30 bp, Homo sapiens; identical to SEQ ID NO: 14862
  chr1:114298138-114298168
  hypo

SEQ ID NO: 137959 - DNA, 27 bp, Homo sapiens
  chr1:114299489-114299516
  hypo
acttaaaaccatactctaggccgggcg

SEQ ID NO: 137960 - DNA, 245 bp, Homo sapiens; identical to SEQ ID NO: 36144
  chr1:114302509-114302754
  hypo

SEQ ID NO: 137961 - DNA, 35 bp, Homo sapiens
  chr1:114355896-114355931
  hypo
agtatttatttagagacgggcggggcggggctcgg

SEQ ID NO: 137962 - DNA, 35 bp, Homo sapiens
  chr1:114435046-114435081
  hypo
tgttcaggcgaggcacggtagctcatgcctgtaat

SEQ ID NO: 137963 - DNA, 30 bp, Homo sapiens; identical to SEQ ID NO: 36147
  chr1:114448373-114448403
  hypo

SEQ ID NO: 137964 - DNA, 30 bp, Homo sapiens; identical to SEQ ID NO: 14864
  chr1:114505986-114506016
  hypo

SEQ ID NO: 137965 - DNA, 137 bp, Homo sapiens
  chr1:114522548-114522685
  hypo
gaagttggaggttcccggggaatctataacttcctgtctttttaacaggttgagatccgtagcattttagtgtccgagaggataattgctaagggagcagagacctcttcacaccttcatgcgcttagacctgccta

SEQ ID NO: 137966 - DNA, 341 bp, Homo sapiens
  chr1:114522989-114523330
  hypo
catgctgctgagctgcgggacttcaagaacaagatgctgccactgctggaggtggcagagaaggagcgggaggcactcagaactgaggccgacaccatctccgggagagtggatcgtctggagcgggaggtagactatctggagacccagaacccagctctgccctgtgtagagtttgatgagaaggtgactggaggccctgggaccaaaggcaagggaagaaggaatgagaagtacgatatggtgacaggtaaataatctgaaagcaggcccctaactcttctcagaaccgatattcttccttccttgcttcttactctttttttcgctttgtcccagtc

SEQ ID NO: 137967 - DNA, 30 bp, Homo sapiens
  chr1:114523752-114523782
  hypo
gcccggaaagcttcccgagtccgggtgccc

SEQ ID NO: 137968 - DNA, 590 bp, Homo sapiens; identical to SEQ ID NO: 36149
  chr1:114695146-114695736
  hypo

SEQ ID NO: 137969 - DNA, 383 bp, Homo sapiens; identical to SEQ ID NO: 36150
  chr1:114695799-114696182
  hypo

SEQ ID NO: 137970 - DNA, 583 bp, Homo sapiens; identical to SEQ ID NO: 104055
  chr1:114697442-114698025
  hypo

SEQ ID NO: 137971 - DNA, 30 bp, Homo sapiens; identical to SEQ ID NO: 14869
  chr1:115049733-115049763
  hypo

SEQ ID NO: 137972 - DNA, 39 bp, Homo sapiens
  chr1:115184836-115184875
  hypo
gctaggattacaggtgtgagccaccgcgcccagctaata

SEQ ID NO: 137973 - DNA, 30 bp, Homo sapiens; identical to SEQ ID NO: 744
  chr1:115252199-115252229
  hypo

SEQ ID NO: 137974 - DNA, 72 bp, Homo sapiens; identical to SEQ ID NO: 745
  chr1:115256505-115256577
  hypo

SEQ ID NO: 137975 - DNA, 95 bp, Homo sapiens; identical to SEQ ID NO: 746
  chr1:115258667-115258762
  hypo

SEQ ID NO: 137976 - DNA, 81 bp, Homo sapiens
  chr1:115261261-115261342
  hypo
cgaagaaccattaggcgaggagcactggcatcatccagagtgatattcttcaagcgattgaccaaccgatcaggtcgagga

SEQ ID NO: 137977 - DNA, 280 bp, Homo sapiens
  chr1:115829154-115829434
  hypo
gcacacggggtgaacggagtcgccgctttttaaacagcctggggtccacagtaatgttgcgggtctgccccgccacgcgtgcagctatcgccgctgccggggcgctgcgggctctgcgaagggcagtgtcaagggaatgctgaagtttagtccagtgggcttgggggatggtgtgtcctgcagggacattgctctctgagtgtggttccgcctgtatgccgatcagaaaagctgtgatcagagtgtagaacaacatggacattacgctatgcacctggaa

SEQ ID NO: 137978 - DNA, 648 bp, Homo sapiens; identical to SEQ ID NO: 750
  chr1:115880146-115880794
  hypo

SEQ ID NO: 137979 - DNA, 1148 bp, Homo sapiens; identical to SEQ ID NO: 104072
  chr1:116184426-116185574
  hypo

SEQ ID NO: 137980 - DNA, 31 bp, Homo sapiens; identical to SEQ ID NO: 60713
  chr1:116205679-116205710
  hypo

SEQ ID NO: 137981 - DNA, 31 bp, Homo sapiens; identical to SEQ ID NO: 14875
  chr1:116206290-116206321
  hypo

SEQ ID NO: 137982 - DNA, 458 bp, Homo sapiens
  chr1:116213985-116214443
  hypo
ccctggctgcaaagccgccactcaactctgctccagcccaggtttcggggagccgggatccacttgggcaggccgggagcctcagactccagacttttcatggtgcgctccttcctgcttactcaggaggaaggcgaggcagtccagcatcctgggtggagtggaggtgtttcgagtccatatctaaatctttttcttagagcaccctaagcaggctgctgtctttgatccccatgcctctgctgtttatcttggtgtgattcatcactgtaatttaagacgtggagagagcaaagttcccatcccaggcaggggaggcgcagtgcaggttggactgtgtaaggaaatggcagcatggcgaggtttgtgccgcggcctacaagcagggctgcatgctccccaggcagactgtggcagagccaagcccctcacttgtagggaagcgtgtctcctaggtg

SEQ ID NO: 137983 - DNA, 113 bp, Homo sapiens
  chr1:116214942-116215055
  hypo
accaaaagccaggtacgctttccagccttccgatattggttcaaagaatttggctgccgaagcttttgtgtagctgaggcaccagcaggcccgaggcacgagtgaatccaggt

SEQ ID NO: 137984 - DNA, 30 bp, Homo sapiens
  chr1:116219096-116219126
  hypo
atggccatataagctcgtggtggctatcgt

SEQ ID NO: 137985 - DNA, 160 bp, Homo sapiens; identical to SEQ ID NO: 60716
  chr1:116219340-116219500
  hypo

SEQ ID NO: 137986 - DNA, 37 bp, Homo sapiens; identical to SEQ ID NO: 60717
  chr1:116224396-116224433
  hypo

SEQ ID NO: 137987 - DNA, 157 bp, Homo sapiens; identical to SEQ ID NO: 60718
  chr1:116225056-116225213
  hypo

SEQ ID NO: 137988 - DNA, 101 bp, Homo sapiens; identical to SEQ ID NO: 14877
  chr1:116226507-116226608
  hypo

SEQ ID NO: 137989 - DNA, 31 bp, Homo sapiens; identical to SEQ ID NO: 60720
  chr1:116228226-116228257
  hypo

SEQ ID NO: 137990 - DNA, 30 bp, Homo sapiens
  chr1:116233256-116233286
  hypo
gccagtaaatggtagcgcatgcgttcttat

SEQ ID NO: 137991 - DNA, 133 bp, Homo sapiens
  chr1:116233749-116233882
  hypo
aacggtacctcagtgcgggccccaccctgcaatatgacaaggaccgctggctctctacacagtggaggcttgtcagtgatgaggctgtgactaatggattacgggatggaattgtgttcgtccttaagtgctt

SEQ ID NO: 137992 - DNA, 187 bp, Homo sapiens; identical to SEQ ID NO: 60721
  chr1:116295787-116295974
  hypo

SEQ ID NO: 137993 - DNA, 30 bp, Homo sapiens
  chr1:116310949-116310979
  hypo
ttggaactgtttttgcgtgaccttatctga

SEQ ID NO: 137994 - DNA, 30 bp, Homo sapiens
  chr1:116311375-116311405
  hypo
acacacacgcacgcacgcacgcacgcatga

SEQ ID NO: 137995 - DNA, 2211 bp, Homo sapiens; identical to SEQ ID NO: 36169
  chr1:116380294-116382505
  hypo

SEQ ID NO: 137996 - DNA, 22 bp, Homo sapiens
  chr1:116494714-116494736
  hypo
ttttttgtttgttttttgagac

SEQ ID NO: 137997 - DNA, 286 bp, Homo sapiens; identical to SEQ ID NO: 60723
  chr1:116573984-116574270
  hypo

SEQ ID NO: 137998 - DNA, 31 bp, Homo sapiens; identical to SEQ ID NO: 14879
  chr1:116642573-116642604
  hypo

SEQ ID NO: 137999 - DNA, 19 bp, Homo sapiens
  chr1:116674141-116674160
  hypo
ttttttgtttttgagacgg

SEQ ID NO: 138000 - DNA, 52 bp, Homo sapiens; identical to SEQ ID NO: 60726
  chr1:116840628-116840680
  hypo

SEQ ID NO: 138001 - DNA, 144 bp, Homo sapiens; identical to SEQ ID NO: 60727
  chr1:116935454-116935598
  hypo

SEQ ID NO: 138002 - DNA, 30 bp, Homo sapiens
  chr1:116943601-116943631
  hypo
gtggaagacagctacgggcagcagtgggtg

SEQ ID NO: 138003 - DNA, 30 bp, Homo sapiens; identical to SEQ ID NO: 60728
  chr1:116947188-116947218
  hypo

SEQ ID NO: 138004 - DNA, 57 bp, Homo sapiens
  chr1:116952564-116952621
  hypo
gcagatctgcttcccaggctgcggctgtctgcgtacggggatgtgtcccttgcctcc

SEQ ID NO: 138005 - DNA, 20 bp, Homo sapiens
  chr1:117021628-117021648
  hypo
caacatggtgaaaccccgtc

SEQ ID NO: 138006 - DNA, 31 bp, Homo sapiens; identical to SEQ ID NO: 14881
  chr1:117055697-117055728
  hypo

SEQ ID NO: 138007 - DNA, 62 bp, Homo sapiens; identical to SEQ ID NO: 60732
  chr1:117060146-117060208
  hypo

SEQ ID NO: 138008 - DNA, 204 bp, Homo sapiens; identical to SEQ ID NO: 14882
  chr1:117076614-117076818
  hypo

SEQ ID NO: 138009 - DNA, 161 bp, Homo sapiens; identical to SEQ ID NO: 60734
  chr1:117077073-117077234
  hypo

SEQ ID NO: 138010 - DNA, 77 bp, Homo sapiens; identical to SEQ ID NO: 60735
  chr1:117127237-117127314
  hypo

SEQ ID NO: 138011 - DNA, 172 bp, Homo sapiens; identical to SEQ ID NO: 60736
  chr1:117131422-117131594
  hypo

SEQ ID NO: 138012 - DNA, 35 bp, Homo sapiens; identical to SEQ ID NO: 60737
  chr1:117157579-117157614
  hypo

SEQ ID NO: 138013 - DNA, 339 bp, Homo sapiens; identical to SEQ ID NO: 36176
  chr1:117209808-117210147
  hypo

SEQ ID NO: 138014 - DNA, 38 bp, Homo sapiens; identical to SEQ ID NO: 60739
  chr1:117250042-117250080
  hypo

SEQ ID NO: 138015 - DNA, 30 bp, Homo sapiens
  chr1:117284521-117284551
  hypo
ctggccgagcagctcgcccacctgctcctg

SEQ ID NO: 138016 - DNA, 30 bp, Homo sapiens; identical to SEQ ID NO: 14887
  chr1:117284787-117284817
  hypo

SEQ ID NO: 138017 - DNA, 74 bp, Homo sapiens; identical to SEQ ID NO: 14888
  chr1:117297900-117297974
  hypo

SEQ ID NO: 138018 - DNA, 31 bp, Homo sapiens; identical to SEQ ID NO: 14889
  chr1:117371752-117371783
  hypo

SEQ ID NO: 138019 - DNA, 30 bp, Homo sapiens; identical to SEQ ID NO: 60743
  chr1:117418210-117418240
  hypo

SEQ ID NO: 138020 - DNA, 97 bp, Homo sapiens; identical to SEQ ID NO: 60744
  chr1:117450852-117450949
  hypo

SEQ ID NO: 138021 - DNA, 36 bp, Homo sapiens; identical to SEQ ID NO: 14890
  chr1:117451188-117451224
  hypo

SEQ ID NO: 138022 - DNA, 31 bp, Homo sapiens; identical to SEQ ID NO: 60746
  chr1:117452157-117452188
  hypo

SEQ ID NO: 138023 - DNA, 30 bp, Homo sapiens; identical to SEQ ID NO: 60747
  chr1:117487524-117487554
  hypo

SEQ ID NO: 138024 - DNA, 50 bp, Homo sapiens
  chr1:117490698-117490748
  hypo
gcttactggggccagcgccatgccgttgatgccagcgacttgctagaagg

SEQ ID NO: 138025 - DNA, 70 bp, Homo sapiens; identical to SEQ ID NO: 60748
  chr1:117503896-117503966
  hypo

SEQ ID NO: 138026 - DNA, 31 bp, Homo sapiens; identical to SEQ ID NO: 60749
  chr1:117509520-117509551
  hypo

SEQ ID NO: 138027 - DNA, 76 bp, Homo sapiens
  chr1:117527380-117527456
  hypo
ggatcggaagggcatcgtgaccacctcccggagggactggaagagcgacctcagcctggagcgcgtgagtgtgctg

SEQ ID NO: 138028 - DNA, 227 bp, Homo sapiens; identical to SEQ ID NO: 60750
  chr1:117529537-117529764
  hypo

SEQ ID NO: 138029 - DNA, 30 bp, Homo sapiens; identical to SEQ ID NO: 60751
  chr1:117529993-117530023
  hypo

SEQ ID NO: 138030 - DNA, 43 bp, Homo sapiens; identical to SEQ ID NO: 60752
  chr1:117560923-117560966
  hypo

SEQ ID NO: 138031 - DNA, 19 bp, Homo sapiens
  chr1:117625853-117625872
  hypo
actccgtctcaaaaaaaaa

SEQ ID NO: 138032 - DNA, 220 bp, Homo sapiens; identical to SEQ ID NO: 60754
  chr1:117630358-117630578
  hypo

SEQ ID NO: 138033 - DNA, 23 bp, Homo sapiens
  chr1:117630869-117630892
  hypo
gaaaagtcggctgggcgcggtgg

SEQ ID NO: 138034 - DNA, 21 bp, Homo sapiens
  chr1:117631130-117631151
  hypo
cctgggcgacggagcgagact

SEQ ID NO: 138035 - DNA, 30 bp, Homo sapiens; identical to SEQ ID NO: 60756
  chr1:117661240-117661270
  hypo

SEQ ID NO: 138036 - DNA, 676 bp, Homo sapiens; identical to SEQ ID NO: 104091
  chr1:117664692-117665368
  hypo

SEQ ID NO: 138037 - DNA, 24 bp, Homo sapiens
  chr1:117670097-117670121
  hypo
aaacaataaatatgctgggcacgg

SEQ ID NO: 138038 - DNA, 23 bp, Homo sapiens
  chr1:117670360-117670383
  hypo
gcgagattctgtctcaaaaaaaa

SEQ ID NO: 138039 - DNA, 31 bp, Homo sapiens; identical to SEQ ID NO: 762
  chr1:117695844-117695875
  hypo

SEQ ID NO: 138040 - DNA, 31 bp, Homo sapiens; identical to SEQ ID NO: 14893
  chr1:117715857-117715888
  hypo

SEQ ID NO: 138041 - DNA, 167 bp, Homo sapiens
  chr1:117918951-117919118
  hypo
gcaggcatacagctccgcttattatgtaaccatgtcatgtgaggcgcattaggtgatcacccatgtgagtgtgtgcttggcttggagccactatggtctgtgaaaggtctaattaccctgctaacgtggtacaaaaggctcgcgccaaggctcgctcacgcccagag

SEQ ID NO: 138042 - DNA, 30 bp, Homo sapiens
  chr1:118042744-118042774
  hypo
cagtttatgtaaagcgaacgtttcacagtg

SEQ ID NO: 138043 - DNA, 170 bp, Homo sapiens; identical to SEQ ID NO: 60763
  chr1:118083727-118083897
  hypo

SEQ ID NO: 138044 - DNA, 53 bp, Homo sapiens
  chr1:118114931-118114984
  hypo
gtggtggatccggaccgattctagtcagtctgactctacgggccacataccca

SEQ ID NO: 138045 - DNA, 152 bp, Homo sapiens; identical to SEQ ID NO: 14894
  chr1:118147371-118147523
  hypo

SEQ ID NO: 138046 - DNA, 81 bp, Homo sapiens; identical to SEQ ID NO: 60765
  chr1:118163136-118163217
  hypo

SEQ ID NO: 138047 - DNA, 234 bp, Homo sapiens; identical to SEQ ID NO: 14895
  chr1:118163672-118163906
  hypo

SEQ ID NO: 138048 - DNA, 30 bp, Homo sapiens
  chr1:118164293-118164323
  hypo
agcaagtcagaaaggcggagggggtgggaa

SEQ ID NO: 138049 - DNA, 229 bp, Homo sapiens; identical to SEQ ID NO: 14896
  chr1:118166361-118166590
  hypo

SEQ ID NO: 138050 - DNA, 30 bp, Homo sapiens
  chr1:118166993-118167023
  hypo
ggagaatttgggcagcgcgtgagaagtgct

SEQ ID NO: 138051 - DNA, 151 bp, Homo sapiens; identical to SEQ ID NO: 14897
  chr1:118172977-118173128
  hypo

SEQ ID NO: 138052 - DNA, 337 bp, Homo sapiens
  chr1:118173563-118173900
  hypo
ggtttctgtcagtgccgcccagaatctagggagctggagcctgtcgggaggcttggtttcataccattcctcacccagctcagagcaacgcaggctacctgttctggccatgactggatcacaggtctcccagctcagggcattttcaccacagcaggccatcccagggccaccttttacttaggaagtttccgaaaatgggaaatgtccctaagggaaaggcatgagaagctggagtcgctgcctttctttcgggtgcttccctggaaaaaaggtatccgaggctatagtgttcgagagagagagagatggagacgggcagcaccacagcaacttt

SEQ ID NO: 138053 - DNA, 178 bp, Homo sapiens; identical to SEQ ID NO: 60770
  chr1:118198079-118198257
  hypo

SEQ ID NO: 138054 - DNA, 93 bp, Homo sapiens; identical to SEQ ID NO: 60771
  chr1:118223359-118223452
  hypo

SEQ ID NO: 138055 - DNA, 31 bp, Homo sapiens; identical to SEQ ID NO: 60772
  chr1:118475521-118475552
  hypo

SEQ ID NO: 138056 - DNA, 30 bp, Homo sapiens; identical to SEQ ID NO: 765
  chr1:119168297-119168327
  hypo

SEQ ID NO: 138057 - DNA, 31 bp, Homo sapiens; identical to SEQ ID NO: 60774
  chr1:119876257-119876288
  hypo

SEQ ID NO: 138058 - DNA, 171 bp, Homo sapiens; identical to SEQ ID NO: 60775
  chr1:120166011-120166182
  hypo

SEQ ID NO: 138059 - DNA, 40 bp, Homo sapiens; identical to SEQ ID NO: 14901
  chr1:120166426-120166466
  hypo

SEQ ID NO: 138060 - DNA, 86 bp, Homo sapiens; identical to SEQ ID NO: 36209
  chr1:120190363-120190449
  hypo

SEQ ID NO: 138061 - DNA, 293 bp, Homo sapiens; identical to SEQ ID NO: 780
  chr1:120190519-120190812
  hypo

SEQ ID NO: 138062 - DNA, 154 bp, Homo sapiens; identical to SEQ ID NO: 60779
  chr1:120321238-120321392
  hypo

SEQ ID NO: 138063 - DNA, 33 bp, Homo sapiens; identical to SEQ ID NO: 60780
  chr1:120321631-120321664
  hypo

SEQ ID NO: 138064 - DNA, 30 bp, Homo sapiens; identical to SEQ ID NO: 782
  chr1:120336067-120336097
  hypo

SEQ ID NO: 138065 - DNA, 30 bp, Homo sapiens; identical to SEQ ID NO: 36213
  chr1:121280597-121280627
  hypo

SEQ ID NO: 138066 - DNA, 30 bp, Homo sapiens; identical to SEQ ID NO: 36214
  chr1:145644968-145644998
  hypo

SEQ ID NO: 138067 - DNA, 35 bp, Homo sapiens
  chr1:150283343-150283378
  hypo
ctccagcttgggcaacggagcgtccccaaaaaaaa

SEQ ID NO: 138068 - DNA, 30 bp, Homo sapiens; identical to SEQ ID NO: 14906
  chr1:150445752-150445782
  hypo

SEQ ID NO: 138069 - DNA, 187 bp, Homo sapiens; identical to SEQ ID NO: 60786
  chr1:150484151-150484338
  hypo

SEQ ID NO: 138070 - DNA, 30 bp, Homo sapiens; identical to SEQ ID NO: 14907
  chr1:150486246-150486276
  hypo

SEQ ID NO: 138071 - DNA, 96 bp, Homo sapiens
  chr1:150502357-150502453
  hypo
ccaccgcgcccagcctgtgaatttcttaaagtatgcaaaatgcggtgtgtctgtgtgtgtgcatttttctggggcgagtatctgtagcttacatca

SEQ ID NO: 138072 - DNA, 77 bp, Homo sapiens; identical to SEQ ID NO: 60788
  chr1:150504348-150504425
  hypo

SEQ ID NO: 138073 - DNA, 35 bp, Homo sapiens
  chr1:150519103-150519138
  hypo
caggcatgagccaccgcgcccggcccaattcctac

SEQ ID NO: 138074 - DNA, 40 bp, Homo sapiens
  chr1:150519663-150519703
  hypo
agtaaaaatataggccgggagcagtggctcatgtctgtaa

SEQ ID NO: 138075 - DNA, 121 bp, Homo sapiens
  chr1:150520493-150520614
  hypo
agagtgaaactccatctcaaaaaaaaaaagaaaaaaaaaagataaaactaatagatggattgctcttgtggttaaaaaaattcacaaaaataacattacatagctgggtgcggtggctcac

SEQ ID NO: 138076 - DNA, 30 bp, Homo sapiens; identical to SEQ ID NO: 60790
  chr1:150525897-150525927
  hypo

SEQ ID NO: 138077 - DNA, 30 bp, Homo sapiens; identical to SEQ ID NO: 60791
  chr1:150529155-150529185
  hypo

SEQ ID NO: 138078 - DNA, 111 bp, Homo sapiens; identical to SEQ ID NO: 60792
  chr1:150529746-150529857
  hypo

SEQ ID NO: 138079 - DNA, 30 bp, Homo sapiens
  chr1:150542024-150542054
  hypo
attacaggcatgagccgccacgcctggctc

SEQ ID NO: 138080 - DNA, 181 bp, Homo sapiens; identical to SEQ ID NO: 60793
  chr1:150565321-150565502
  hypo

SEQ ID NO: 138081 - DNA, 88 bp, Homo sapiens; identical to SEQ ID NO: 14909
  chr1:150579403-150579491
  hypo

SEQ ID NO: 138082 - DNA, 44 bp, Homo sapiens; identical to SEQ ID NO: 14910
  chr1:150581802-150581846
  hypo

SEQ ID NO: 138083 - DNA, 90 bp, Homo sapiens
  chr1:150603042-150603132
  hypo
ttaacatttcctgggcgtctgtctgtatgtggatggtactgtgttagttggggggggtacgtgtatagtaaggcagtctctgcccttaga

SEQ ID NO: 138084 - DNA, 29 bp, Homo sapiens
  chr1:150603551-150603580
  hypo
gagagtccgtctcaaaaaaaaaaaaaaaa

SEQ ID NO: 138085 - DNA, 139 bp, Homo sapiens; identical to SEQ ID NO: 60797
  chr1:150633719-150633858
  hypo

SEQ ID NO: 138086 - DNA, 39 bp, Homo sapiens; identical to SEQ ID NO: 14912
  chr1:150643982-150644021
  hypo

SEQ ID NO: 138087 - DNA, 23 bp, Homo sapiens
  chr1:150685906-150685929
  hypo
gaggctgaggcaggagaatggcg

SEQ ID NO: 138088 - DNA, 23 bp, Homo sapiens
  chr1:150685988-150686011
  hypo
gcgacagagcaagactccatctc

SEQ ID NO: 138089 - DNA, 30 bp, Homo sapiens; identical to SEQ ID NO: 60799
  chr1:150693284-150693314
  hypo

SEQ ID NO: 138090 - DNA, 35 bp, Homo sapiens
  chr1:150722021-150722056
  hypo
tgcctcgcctcaccccgccccgcctcaccccgccc

SEQ ID NO: 138091 - DNA, 137 bp, Homo sapiens
  chr1:150722390-150722527
  hypo
aagctagaattacaggcatgaaccaccgtgctcagccaatatcctttctttctttctttaaattctaattattgtttattttattttttaccacttctgtagaggaagaaagaaggatgacgcgcatctacaccaac

SEQ ID NO: 138092 - DNA, 42 bp, Homo sapiens
  chr1:150748730-150748772
  hypo
tttacagatctgagccactgcgcccagcctatttattgtttt

SEQ ID NO: 138093 - DNA, 121 bp, Homo sapiens
  chr1:150850361-150850482
  hypo
aactgttgggattacaggcgtgagccaccacacctggccagtgaggagtttttaatagggaatcaataagatgatggctgtgcagatttattttcttttttctttatttttttctgagacg

SEQ ID NO: 138094 - DNA, 18 bp, Homo sapiens
  chr1:150850601-150850619
  hypo
gcgcgcaccaccacgccc

SEQ ID NO: 138095 - DNA, 38 bp, Homo sapiens
  chr1:150858611-150858649
  hypo
gggattacaagcgtgagccaccgcgcccggcctgactt

SEQ ID NO: 138096 - DNA, 23 bp, Homo sapiens
  chr1:150863268-150863291
  hypo
gcgcctggcccaatgtgaaattt

SEQ ID NO: 138097 - DNA, 78 bp, Homo sapiens; identical to SEQ ID NO: 60801
  chr1:150889715-150889793
  hypo

SEQ ID NO: 138098 - DNA, 43 bp, Homo sapiens
  chr1:150890072-150890115
  hypo
tatcgcagggctggccgggtgccgtggctcacacctgtaatat

SEQ ID NO: 138099 - DNA, 67 bp, Homo sapiens
  chr1:150935071-150935138
  hypo
aagctctcgaaattacggttacaatccttctcctgtgaagcctgaaggacttcgccgcccacctagt

SEQ ID NO: 138100 - DNA, 30 bp, Homo sapiens
  chr1:150940618-150940648
  hypo
caacgctctacctggcggccagagagcccg

SEQ ID NO: 138101 - DNA, 30 bp, Homo sapiens; identical to SEQ ID NO: 14913
  chr1:150940916-150940946
  hypo

SEQ ID NO: 138102 - DNA, 403 bp, Homo sapiens; identical to SEQ ID NO: 14914
  chr1:150941387-150941790
  hypo

SEQ ID NO: 138103 - DNA, 30 bp, Homo sapiens; identical to SEQ ID NO: 14915
  chr1:150959365-150959395
  hypo

SEQ ID NO: 138104 - DNA, 38 bp, Homo sapiens; identical to SEQ ID NO: 14916
  chr1:151019714-151019752
  hypo

SEQ ID NO: 138105 - DNA, 30 bp, Homo sapiens; identical to SEQ ID NO: 60806
  chr1:151044722-151044752
  hypo

SEQ ID NO: 138106 - DNA, 27 bp, Homo sapiens
  chr1:151056645-151056672
  hypo
cctaaatgctgcaattgcaggcgtgag

SEQ ID NO: 138107 - DNA, 28 bp, Homo sapiens
  chr1:151095642-151095670
  hypo
caaaaatggctgggcacggtggctcacg

SEQ ID NO: 138108 - DNA, 32 bp, Homo sapiens
  chr1:151098356-151098388
  hypo
gcgtgagccaccgagcccggccaaatttgtat

SEQ ID NO: 138109 - DNA, 318 bp, Homo sapiens; identical to SEQ ID NO: 60810
  chr1:151105802-151106120
  hypo

SEQ ID NO: 138110 - DNA, 29 bp, Homo sapiens
  chr1:151114518-151114547
  hypo
cttttttttttttttttgagacggagtct

SEQ ID NO: 138111 - DNA, 21 bp, Homo sapiens
  chr1:151122206-151122227
  hypo
acagagcgagactccatctca

SEQ ID NO: 138112 - DNA, 100 bp, Homo sapiens; identical to SEQ ID NO: 60813
  chr1:151146164-151146264
  hypo

SEQ ID NO: 138113 - DNA, 65 bp, Homo sapiens; identical to SEQ ID NO: 60814
  chr1:151148216-151148281
  hypo

SEQ ID NO: 138114 - DNA, 30 bp, Homo sapiens; identical to SEQ ID NO: 60815
  chr1:151149046-151149076
  hypo

SEQ ID NO: 138115 - DNA, 31 bp, Homo sapiens; identical to SEQ ID NO: 60816
  chr1:151164981-151165012
  hypo

SEQ ID NO: 138116 - DNA, 121 bp, Homo sapiens; identical to SEQ ID NO: 60817
  chr1:151169637-151169758
  hypo

SEQ ID NO: 138117 - DNA, 149 bp, Homo sapiens; identical to SEQ ID NO: 60818
  chr1:151170057-151170206
  hypo

SEQ ID NO: 138118 - DNA, 37 bp, Homo sapiens; identical to SEQ ID NO: 60819
  chr1:151173583-151173620
  hypo

SEQ ID NO: 138119 - DNA, 17 bp, Homo sapiens
  chr1:151222754-151222771
  hypo
gagactgtctaaaaaaa

SEQ ID NO: 138120 - DNA, 36 bp, Homo sapiens
  chr1:151231641-151231677
  hypo
ctgcgcttgaacctgtgcctgcgcttgaacctgtgc

SEQ ID NO: 138121 - DNA, 267 bp, Homo sapiens; identical to SEQ ID NO: 60821
  chr1:151252541-151252808
  hypo

SEQ ID NO: 138122 - DNA, 25 bp, Homo sapiens
  chr1:151292524-151292549
  hypo
tttgagacggagtctcgctctgtcg

SEQ ID NO: 138123 - DNA, 24 bp, Homo sapiens
  chr1:151292788-151292812
  hypo
gtgagctgccgcgcccggccccag

SEQ ID NO: 138124 - DNA, 57 bp, Homo sapiens
  chr1:151293164-151293221
  hypo
tccctgccacaccttcgtagggcactctcatcagagggtcaccgattcaacggggac

SEQ ID NO: 138125 - DNA, 33 bp, Homo sapiens
  chr1:151322964-151322997
  hypo
cgttcttttttttttcgagacggattcttgctc

SEQ ID NO: 138126 - DNA, 32 bp, Homo sapiens
  chr1:151323236-151323268
  hypo
acaggcgtgagctaccgcgtgcggcctcagat

SEQ ID NO: 138127 - DNA, 22 bp, Homo sapiens
  chr1:151325112-151325134
  hypo
agacagtgtcttgctttctcac

SEQ ID NO: 138128 - DNA, 31 bp, Homo sapiens; identical to SEQ ID NO: 60823
  chr1:151338236-151338267
  hypo

SEQ ID NO: 138129 - DNA, 243 bp, Homo sapiens; identical to SEQ ID NO: 60824
  chr1:151338719-151338962
  hypo

SEQ ID NO: 138130 - DNA, 170 bp, Homo sapiens; identical to SEQ ID NO: 14923
  chr1:151339196-151339366
  hypo

SEQ ID NO: 138131 - DNA, 391 bp, Homo sapiens
  chr1:151345675-151346066
  hypo
gaccagctcgtgctctttagtgggtgcctgggtgtgtgtggatttgtgtgtctgggcatgtgtgtgttcctgtatacctgcgtgttgctcgtgcacgtgcctgcatgagtgtgtatctgtgcctgtgtgtgaatttccacgtgtgtgaatgtgcctgtgagtgtgcttgtgtgtatttgtgcgtgtgtgtgtgtgcgcgcctctgtatgtgcctaccagagtatctacgcctgtgtgtgtgtgtgtgtgtgtgtgcgcgcctctgtgagtatgtgcttgctagagtatctacgcctgtgtggacatgtgcataagtgcttgtgtatgtgtagtgtgtggctatgtggctgtgcatgtgcttgtgtaagcctgcgcacgtatgtgttcctgt

SEQ ID NO: 138132 - DNA, 31 bp, Homo sapiens; identical to SEQ ID NO: 60827
  chr1:151346972-151347003
  hypo

SEQ ID NO: 138133 - DNA, 178 bp, Homo sapiens; identical to SEQ ID NO: 60828
  chr1:151356359-151356537
  hypo

SEQ ID NO: 138134 - DNA, 27 bp, Homo sapiens
  chr1:151362759-151362786
  hypo
ccggccgctttcatttattttttattg

SEQ ID NO: 138135 - DNA, 30 bp, Homo sapiens; identical to SEQ ID NO: 60830
  chr1:151372991-151373021
  hypo

SEQ ID NO: 138136 - DNA, 78 bp, Homo sapiens; identical to SEQ ID NO: 60831
  chr1:151373753-151373831
  hypo

SEQ ID NO: 138137 - DNA, 30 bp, Homo sapiens
  chr1:151377833-151377863
  hypo
agcatgcctttgctgcgctggcaagctgtg

SEQ ID NO: 138138 - DNA, 285 bp, Homo sapiens
  chr1:151378238-151378523
  hypo
tgggccacagctcgccgggcatggggagtcaggtggtgccgcagcatgaaacgcacagcccactcataggagatcttaaaccccccttccaaagaacgtcctattttggtggccttctggaacaaggtctcctcatttacaggtagctgttgttcgcgctgggttagcacccactcagccagtttctcttctgcctcaaagctcagatatttgccctctagattctccccctgggaggcctggaaacgtcgaagccaacggcgaatacgtcgctggggatttcgg

SEQ ID NO: 138139 - DNA, 35 bp, Homo sapiens; identical to SEQ ID NO: 60833
  chr1:151378887-151378922
  hypo

SEQ ID NO: 138140 - DNA, 30 bp, Homo sapiens; identical to SEQ ID NO: 60834
  chr1:151379233-151379263
  hypo

SEQ ID NO: 138141 - DNA, 226 bp, Homo sapiens; identical to SEQ ID NO: 14927
  chr1:151481570-151481796
  hypo

SEQ ID NO: 138142 - DNA, 30 bp, Homo sapiens
  chr1:151551260-151551290
  hypo
ctcaagagccagcagcggaaagtccggcaa

SEQ ID NO: 138143 - DNA, 102 bp, Homo sapiens; identical to SEQ ID NO: 60836
  chr1:151557470-151557572
  hypo

SEQ ID NO: 138144 - DNA, 105 bp, Homo sapiens; identical to SEQ ID NO: 14929
  chr1:151597622-151597727
  hypo

SEQ ID NO: 138145 - DNA, 664 bp, Homo sapiens; identical to SEQ ID NO: 104195
  chr1:151693821-151694485
  hypo

SEQ ID NO: 138146 - DNA, 197 bp, Homo sapiens; identical to SEQ ID NO: 14931
  chr1:151699288-151699485
  hypo

SEQ ID NO: 138147 - DNA, 86 bp, Homo sapiens; identical to SEQ ID NO: 60840
  chr1:151742597-151742683
  hypo

SEQ ID NO: 138148 - DNA, 30 bp, Homo sapiens; identical to SEQ ID NO: 104199
  chr1:151763365-151763395
  hypo

SEQ ID NO: 138149 - DNA, 304 bp, Homo sapiens; identical to SEQ ID NO: 104200
  chr1:151763858-151764162
  hypo

SEQ ID NO: 138150 - DNA, 30 bp, Homo sapiens
  chr1:151773280-151773310
  hypo
ggaggtgcaggagagcggtgctgctcggga

SEQ ID NO: 138151 - DNA, 17 bp, Homo sapiens
  chr1:151826511-151826528
  hypo
aaccaactcacaggccg

SEQ ID NO: 138152 - DNA, 30 bp, Homo sapiens; identical to SEQ ID NO: 14933
  chr1:151827369-151827399
  hypo

SEQ ID NO: 138153 - DNA, 81 bp, Homo sapiens; identical to SEQ ID NO: 60844
  chr1:151829047-151829128
  hypo

SEQ ID NO: 138154 - DNA, 149 bp, Homo sapiens; identical to SEQ ID NO: 14934
  chr1:151882271-151882420
  hypo

SEQ ID NO: 138155 - DNA, 34 bp, Homo sapiens
  chr1:151952134-151952168
  hypo
gtgttgacggagtctcgctctgtcgcccaggctg

SEQ ID NO: 138156 - DNA, 391 bp, Homo sapiens; identical to SEQ ID NO: 104211
  chr1:152083935-152084326
  hypo

SEQ ID NO: 138157 - DNA, 144 bp, Homo sapiens; identical to SEQ ID NO: 104212
  chr1:152084598-152084742
  hypo

SEQ ID NO: 138158 - DNA, 337 bp, Homo sapiens; identical to SEQ ID NO: 60846
  chr1:152191328-152191665
  hypo

SEQ ID NO: 138159 - DNA, 402 bp, Homo sapiens
  chr1:152192943-152193345
  hypo
agagcttgatgcctgccctgacgtagatccatgttgtccctggctagaggagtgacctgagccagaaccatgcttactatagccagaggactgtcctgagccagactcatgttgcccaaagccagaagtctggcctgagccagactcataatggccacggctgtaagagtaacttgagccagacccgtgttggccgtggctggaggagtgccccgaaccggacccatgtcggacgtggctaggagactggcgagatccagacccttgtcggccgtggcccaaagactgacgggaaccagacccatgctgaccatagctggaagacgaacctgagctagatctgtgtcgttcacccctagatgactgtcctgacctagagccgtgttgtccgtagccagagga

SEQ ID NO: 138160 - DNA, 30 bp, Homo sapiens
  chr1:152281717-152281747
  hypo
ctgagtgcctggagccgtctcctgattgtt

SEQ ID NO: 138161 - DNA, 30 bp, Homo sapiens
  chr1:152282004-152282034
  hypo
gtgctgggccctgtgcgtccatgggcggac

SEQ ID NO: 138162 - DNA, 30 bp, Homo sapiens
  chr1:152732847-152732877
  hypo
ctgcagcttttcccccgcagctgttcccca

SEQ ID NO: 138163 - DNA, 333 bp, Homo sapiens
  chr1:152733096-152733429
  hypo
gttgagattcctcccatcagacgccgctcccagagctgtggcccgcagccctcctggggcgcctcctgccctgagctgaggccacacgtagagccacgtccactcccaagcttctgtccaccacggcgtcttgaccagtgtccagagtcaccactgcagcgatgtccacctcctgctccacgtccacgtctgcgcccagaaccatgcataagtctagaaccacgcccgcgtcctctaccacgacaactttcagaaccttgtttgtatccagaaccacttccagcactacgtccaacaccgcggccagttccccttcctcgcccagggcagtgt

SEQ ID NO: 138164 - DNA, 26 bp, Homo sapiens
  chr1:153121398-153121424
  hypo
cgcccggctaatgttattttgtattt

SEQ ID NO: 138165 - DNA, 92 bp, Homo sapiens
  chr1:153265797-153265889
  hypo
tcggggagtccaagccggcagggagaaggcacgcgggcagcaaagaggcactacgaggccggggccgagtccatgggcgcttgcggtgggag

SEQ ID NO: 138166 - DNA, 30 bp, Homo sapiens
  chr1:153310571-153310601
  hypo
tggacccatcttcttcgtcacctgttcccc

SEQ ID NO: 138167 - DNA, 33 bp, Homo sapiens; identical to SEQ ID NO: 14936
  chr1:153352634-153352667
  hypo

SEQ ID NO: 138168 - DNA, 513 bp, Homo sapiens
  chr1:153352906-153353419
  hypo
actccgtctcggaaaaaaaaaaaaatctggtaacagaagaatgggatgatccagaatgcgtgttgcctgtatgcttcgtaattagccttaattacgtaattagccttaattctcatgatatcagtatcatgagaagagaaatcgcaatggcaatgcacgtattggcgtcatccatgaactcaaaatcacctcccagttcagaacttgaaaagtgatactgatccggatcagccagggcactcaacaaaatcaggagtaccacggcgttgatgatcaggtaccagacacctaacaggatggtgctggtgcggacatggaggcacaggcagcagctgttggagtagaaccgcatccagggtgcgaccagggcgtgaccatcgtcattgctcctggagcagaggcgcgaggacgagcccaagtttccaggagcgttgacctcctcgcccagactccgccacgcggctgctgcagactcctcggctgctccggcttccggcccgctcaccggtgtgc

SEQ ID NO: 138169 - DNA, 162 bp, Homo sapiens; identical to SEQ ID NO: 60852
  chr1:153519005-153519167
  hypo

SEQ ID NO: 138170 - DNA, 154 bp, Homo sapiens; identical to SEQ ID NO: 60853
  chr1:153537352-153537506
  hypo

SEQ ID NO: 138171 - DNA, 53 bp, Homo sapiens; identical to SEQ ID NO: 60854
  chr1:153539591-153539644
  hypo

SEQ ID NO: 138172 - DNA, 492 bp, Homo sapiens
  chr1:153540017-153540509
  hypo
ttaaaaagcctggcagtgaggcgctccagactcggcctgctgctgcgtgtcccttaaacacaccggcacatgcaactagtgtggccaagaccctcggcttgcgctgacccctctgttcagaacgtgcccacacatgcccatgccctctatcctgctgaaatccaacccccccttcaaaggccactgcagggagccttcccagggcccaaccggattcagtgtctacctgttctgtcctgtacaaagcgccccttttgcccttttcgtgtgtacttagagaattctgattttgactgaatcacctgtgtacttgttttctctcagcctcacccccacatggtgagctcaccggtcttactcatttctgcatgaggtaagggtctcgcccacaccaggtgccaaccagtgcttacggctaccacatggcaacaggggtcactggaggagtgcttaggagcaagggagtccttctcaccccgtgaaatcacacca

SEQ ID NO: 138173 - DNA, 30 bp, Homo sapiens; identical to SEQ ID NO: 60856
  chr1:153587687-153587717
  hypo

SEQ ID NO: 138174 - DNA, 30 bp, Homo sapiens; identical to SEQ ID NO: 60857
  chr1:153597876-153597906
  hypo

SEQ ID NO: 138175 - DNA, 25 bp, Homo sapiens
  chr1:153611357-153611382
  hypo
ctttttttttttttttttagacgga

SEQ ID NO: 138176 - DNA, 30 bp, Homo sapiens
  chr1:153613528-153613558
  hypo
agtaacaggacaggccgttacggttggtta

SEQ ID NO: 138177 - DNA, 1495 bp, Homo sapiens; identical to SEQ ID NO: 104225
  chr1:153650944-153652439
  hypo

SEQ ID NO: 138178 - DNA, 30 bp, Homo sapiens; identical to SEQ ID NO: 14941
  chr1:153662338-153662368
  hypo

SEQ ID NO: 138179 - DNA, 31 bp, Homo sapiens; identical to SEQ ID NO: 60860
  chr1:153669242-153669273
  hypo

SEQ ID NO: 138180 - DNA, 123 bp, Homo sapiens
  chr1:153914345-153914468
  hypo
cttccaagggtaggcggtgggggcctgagacggagtagcggtaaaggaaggtgaggaaggcgcggaaggcagggaaggcaggccagcgggacagcacagcgatggcacgccggctgcgcacag

SEQ ID NO: 138181 - DNA, 30 bp, Homo sapiens; identical to SEQ ID NO: 60862
  chr1:153933030-153933060
  hypo

SEQ ID NO: 138182 - DNA, 30 bp, Homo sapiens
  chr1:153934770-153934800
  hypo
caaaaagacgccccccgcgaaacagcttac

SEQ ID NO: 138183 - DNA, 177 bp, Homo sapiens; identical to SEQ ID NO: 808
  chr1:153936614-153936791
  hypo

SEQ ID NO: 138184 - DNA, 79 bp, Homo sapiens; identical to SEQ ID NO: 14945
  chr1:153937069-153937148
  hypo

SEQ ID NO: 138185 - DNA, 181 bp, Homo sapiens; identical to SEQ ID NO: 14946
  chr1:153937387-153937568
  hypo

SEQ ID NO: 138186 - DNA, 331 bp, Homo sapiens; identical to SEQ ID NO: 810
  chr1:153958646-153958977
  hypo

SEQ ID NO: 138187 - DNA, 27 bp, Homo sapiens
  chr1:153963224-153963251
  hypo
ttccgctttcgctcctttccggcggtg

SEQ ID NO: 138188 - DNA, 308 bp, Homo sapiens; identical to SEQ ID NO: 104239
  chr1:153963300-153963608
  hypo

SEQ ID NO: 138189 - DNA, 91 bp, Homo sapiens
  chr1:154098519-154098610
  hypo
aggcgtgagccaccgcgcccggccaagaaatgtttttaatgaaacctgaaaccccaaatgatatatacacaatgaccgcaaatgcagatat

SEQ ID NO: 138190 - DNA, 22 bp, Homo sapiens
  chr1:154107501-154107523
  hypo
ccacgcccggcctctgtgtacc

SEQ ID NO: 138191 - DNA, 33 bp, Homo sapiens; identical to SEQ ID NO: 14949
  chr1:154115065-154115098
  hypo

SEQ ID NO: 138192 - DNA, 58 bp, Homo sapiens; identical to SEQ ID NO: 60871
  chr1:154116695-154116753
  hypo

SEQ ID NO: 138193 - DNA, 235 bp, Homo sapiens
  chr1:154179782-154180017
  hypo
ctctaagaactctggatacaacgggaacttggatggatacagtctgggcctgctgggccagatgttccgagggcggcccggcaagcagcctgtcttgcacattgcaactgactggcttaatctacggcaagagtccttcagctccgtcacagagtactctccaatgtgttatagttatccttaaagctcttcaattcaaggaagtgcttggcacgtttactcttctgactggagg

SEQ ID NO: 138194 - DNA, 32 bp, Homo sapiens; identical to SEQ ID NO: 14952
  chr1:154243764-154243796
  hypo

SEQ ID NO: 138195 - DNA, 31 bp, Homo sapiens; identical to SEQ ID NO: 14953
  chr1:154243915-154243946
  hypo

SEQ ID NO: 138196 - DNA, 30 bp, Homo sapiens
  chr1:154245970-154246000
  hypo
agggatacgtttccacgataacttcggctt

SEQ ID NO: 138197 - DNA, 79 bp, Homo sapiens; identical to SEQ ID NO: 60875
  chr1:154273377-154273456
  hypo

SEQ ID NO: 138198 - DNA, 449 bp, Homo sapiens; identical to SEQ ID NO: 104250
  chr1:154297540-154297989
  hypo

SEQ ID NO: 138199 - DNA, 114 bp, Homo sapiens; identical to SEQ ID NO: 36278
  chr1:154298038-154298152
  hypo

SEQ ID NO: 138200 - DNA, 240 bp, Homo sapiens; identical to SEQ ID NO: 104252
  chr1:154298253-154298493
  hypo

SEQ ID NO: 138201 - DNA, 78 bp, Homo sapiens
  chr1:154315740-154315818
  hypo
gacttcaacaacatccgcaagcggatgtcggtcataggtgaggccaggcctggggtgctggggcgtttggggacagca

SEQ ID NO: 138202 - DNA, 30 bp, Homo sapiens; identical to SEQ ID NO: 60879
  chr1:154328848-154328878
  hypo

SEQ ID NO: 138203 - DNA, 96 bp, Homo sapiens; identical to SEQ ID NO: 60880
  chr1:154343719-154343815
  hypo

SEQ ID NO: 138204 - DNA, 21 bp, Homo sapiens
  chr1:154363711-154363732
  hypo
caggcacgtaccaccacgcct

SEQ ID NO: 138205 - DNA, 22 bp, Homo sapiens
  chr1:154401879-154401901
  hypo
ggccggccgcccagctgggact

SEQ ID NO: 138206 - DNA, 184 bp, Homo sapiens; identical to SEQ ID NO: 14957
  chr1:154402828-154403012
  hypo

SEQ ID NO: 138207 - DNA, 134 bp, Homo sapiens
  chr1:154407563-154407697
  hypo
tctttctacagactacggtttgagctcagatatcgggctgaacggtcaaagacattcacaacatggatggtaaatttatgttttacttctggtcagagaggcgcccctagatgcttaggcgtagtagaaagggt

SEQ ID NO: 138208 - DNA, 284 bp, Homo sapiens; identical to SEQ ID NO: 36281
  chr1:154474300-154474584
  hypo

SEQ ID NO: 138209 - DNA, 34 bp, Homo sapiens; identical to SEQ ID NO: 815
  chr1:154474743-154474777
  hypo

SEQ ID NO: 138210 - DNA, 80 bp, Homo sapiens; identical to SEQ ID NO: 816
  chr1:154474987-154475067
  hypo

SEQ ID NO: 138211 - DNA, 67 bp, Homo sapiens; identical to SEQ ID NO: 817
  chr1:154475371-154475438
  hypo

SEQ ID NO: 138212 - DNA, 30 bp, Homo sapiens
  chr1:154524266-154524296
  hypo
tgcagatggcccctccgcccagaacatacc

SEQ ID NO: 138213 - DNA, 30 bp, Homo sapiens
  chr1:154524627-154524657
  hypo
gatcgttgtgcaaagcgctgtcctggtcaa

SEQ ID NO: 138214 - DNA, 31 bp, Homo sapiens; identical to SEQ ID NO: 60886
  chr1:154533445-154533476
  hypo

SEQ ID NO: 138215 - DNA, 30 bp, Homo sapiens; identical to SEQ ID NO: 60887
  chr1:154544523-154544553
  hypo

SEQ ID NO: 138216 - DNA, 30 bp, Homo sapiens; identical to SEQ ID NO: 60888
  chr1:154564014-154564044
  hypo

SEQ ID NO: 138217 - DNA, 30 bp, Homo sapiens
  chr1:154573700-154573730
  hypo
actcacctggtgctgcgcggatactattca

SEQ ID NO: 138218 - DNA, 30 bp, Homo sapiens; identical to SEQ ID NO: 60889
  chr1:154573995-154574025
  hypo

SEQ ID NO: 138219 - DNA, 30 bp, Homo sapiens; identical to SEQ ID NO: 14961
  chr1:154680598-154680628
  hypo

SEQ ID NO: 138220 - DNA, 303 bp, Homo sapiens; identical to SEQ ID NO: 60891
  chr1:154685554-154685857
  hypo

SEQ ID NO: 138221 - DNA, 30 bp, Homo sapiens
  chr1:154690126-154690156
  hypo
agtcacagcacggcccgggtagctgagaga

SEQ ID NO: 138222 - DNA, 30 bp, Homo sapiens
  chr1:154742805-154742835
  hypo
tctgttggccaaaacgctgaaagaaatgtc

SEQ ID NO: 138223 - DNA, 30 bp, Homo sapiens; identical to SEQ ID NO: 14962
  chr1:154744743-154744773
  hypo

SEQ ID NO: 138224 - DNA, 92 bp, Homo sapiens; identical to SEQ ID NO: 60893
  chr1:154808779-154808871
  hypo

SEQ ID NO: 138225 - DNA, 31 bp, Homo sapiens; identical to SEQ ID NO: 818
  chr1:154816590-154816621
  hypo

SEQ ID NO: 138226 - DNA, 30 bp, Homo sapiens
  chr1:154833707-154833737
  hypo
ggtatgagccaccgcgcctggccccaagtc

SEQ ID NO: 138227 - DNA, 30 bp, Homo sapiens; identical to SEQ ID NO: 60895
  chr1:154919131-154919161
  hypo

SEQ ID NO: 138228 - DNA, 242 bp, Homo sapiens; identical to SEQ ID NO: 14964
  chr1:154931247-154931489
  hypo

SEQ ID NO: 138229 - DNA, 223 bp, Homo sapiens
  chr1:154933510-154933733
  hypo
gcggcaaaaggaagacgcagacaagtttccctgaggtttccccaacctcttttctctcagccatgctctgaggaactcctttaacgtcaatacatacttgcttatttattcaacaaatgctaacaaggggtgcaatatgaaaaatagattgtgaagatgatcatactctcagctacgtcttcctttaaatgaaagatatcccatctttcgatatcctcaagct

SEQ ID NO: 138230 - DNA, 30 bp, Homo sapiens
  chr1:154933934-154933964
  hypo
tcgcagcgcgctcaccggccttgccctgct

SEQ ID NO: 138231 - DNA, 77 bp, Homo sapiens
  chr1:154934179-154934256
  hypo
agggaagcgccgagccgccgcgcaaactgcgcgctctctccagactcgccgcccgccagcggcggcagcaaccggaa

SEQ ID NO: 138232 - DNA, 30 bp, Homo sapiens; identical to SEQ ID NO: 60897
  chr1:154938424-154938454
  hypo

SEQ ID NO: 138233 - DNA, 38 bp, Homo sapiens; identical to SEQ ID NO: 60898
  chr1:154944720-154944758
  hypo

SEQ ID NO: 138234 - DNA, 23 bp, Homo sapiens
  chr1:154954135-154954158
  hypo
tttttctttttgatggagcctcg

SEQ ID NO: 138235 - DNA, 181 bp, Homo sapiens; identical to SEQ ID NO: 60900
  chr1:154954397-154954578
  hypo

SEQ ID NO: 138236 - DNA, 23 bp, Homo sapiens
  chr1:154954877-154954900
  hypo
atgaattcgggcccttaccattc

SEQ ID NO: 138237 - DNA, 30 bp, Homo sapiens; identical to SEQ ID NO: 60902
  chr1:154960698-154960728
  hypo

SEQ ID NO: 138238 - DNA, 155 bp, Homo sapiens
  chr1:154965404-154965559
  hypo
taccgtgcggaacccggccctgaagtgcctgagcccaggaggacaccccacataccgtccagcctatctactggagaacgaagaagaggagcggaactcccgcacatgacctcccaccctaggagggagggaaggacaccgtcctagggtataac

SEQ ID NO: 138239 - DNA, 30 bp, Homo sapiens; identical to SEQ ID NO: 60904
  chr1:154966303-154966333
  hypo

SEQ ID NO: 138240 - DNA, 37 bp, Homo sapiens; identical to SEQ ID NO: 14966
  chr1:154987688-154987725
  hypo

SEQ ID NO: 138241 - DNA, 32 bp, Homo sapiens; identical to SEQ ID NO: 60906
  chr1:155005173-155005205
  hypo

SEQ ID NO: 138242 - DNA, 31 bp, Homo sapiens; identical to SEQ ID NO: 60907
  chr1:155005731-155005762
  hypo

SEQ ID NO: 138243 - DNA, 243 bp, Homo sapiens; identical to SEQ ID NO: 60908
  chr1:155012855-155013098
  hypo

SEQ ID NO: 138244 - DNA, 30 bp, Homo sapiens; identical to SEQ ID NO: 60909
  chr1:155030081-155030111
  hypo

SEQ ID NO: 138245 - DNA, 107 bp, Homo sapiens
  chr1:155065376-155065483
  hypo
ttaggcacatactaacgccccactgtctataacacactcacgcaggcaccagaccccacacagggcaaggggctcccaggtaccctgagccgcgcttgcatccaggg

SEQ ID NO: 138246 - DNA, 38 bp, Homo sapiens; identical to SEQ ID NO: 14968
  chr1:155082408-155082446
  hypo

SEQ ID NO: 138247 - DNA, 538 bp, Homo sapiens; identical to SEQ ID NO: 104289
  chr1:155099555-155100093
  hypo

SEQ ID NO: 138248 - DNA, 30 bp, Homo sapiens; identical to SEQ ID NO: 60912
  chr1:155148142-155148172
  hypo

SEQ ID NO: 138249 - DNA, 33 bp, Homo sapiens; identical to SEQ ID NO: 60913
  chr1:155149476-155149509
  hypo

SEQ ID NO: 138250 - DNA, 123 bp, Homo sapiens; identical to SEQ ID NO: 14971
  chr1:155149964-155150087
  hypo

SEQ ID NO: 138251 - DNA, 30 bp, Homo sapiens
  chr1:155150585-155150615
  hypo
caggagcggctggcccgtctcagcgcccag

SEQ ID NO: 138252 - DNA, 444 bp, Homo sapiens; identical to SEQ ID NO: 36306
  chr1:155152068-155152512
  hypo

SEQ ID NO: 138253 - DNA, 148 bp, Homo sapiens
  chr1:155156246-155156394
  hypo
ctcgtccccaacacccgcttctgcaggtacgacccggacagcgggcacgacagcggtgccgaggatgccacagtggaggcgtcgccacccttcgctttcctaaccattggcatgggcaagatcctgctggggtcgggggcaagctcaa

SEQ ID NO: 138254 - DNA, 138 bp, Homo sapiens; identical to SEQ ID NO: 14972
  chr1:155160919-155161057
  hypo

SEQ ID NO: 138255 - DNA, 54 bp, Homo sapiens; identical to SEQ ID NO: 60917
  chr1:155162034-155162088
  hypo

SEQ ID NO: 138256 - DNA, 933 bp, Homo sapiens; identical to SEQ ID NO: 104299
  chr1:155164119-155165052
  hypo

SEQ ID NO: 138257 - DNA, 30 bp, Homo sapiens; identical to SEQ ID NO: 60919
  chr1:155167898-155167928
  hypo

SEQ ID NO: 138258 - DNA, 31 bp, Homo sapiens
  chr1:155283338-155283369
  hypo
ctgcctgtcctgtgggcggtggaaattccag

SEQ ID NO: 138259 - DNA, 458 bp, Homo sapiens; identical to SEQ ID NO: 104306
  chr1:155294651-155295109
  hypo

SEQ ID NO: 138260 - DNA, 109 bp, Homo sapiens; identical to SEQ ID NO: 60920
  chr1:155311711-155311820
  hypo

SEQ ID NO: 138261 - DNA, 30 bp, Homo sapiens; identical to SEQ ID NO: 14975
  chr1:155317637-155317667
  hypo

SEQ ID NO: 138262 - DNA, 88 bp, Homo sapiens
  chr1:155362560-155362648
  hypo
gataattgttattcccgggagggttagcctgatgtaatctactctttcaataccaaaagtagaattcctcgtctttttttttttttga

SEQ ID NO: 138263 - DNA, 224 bp, Homo sapiens; identical to SEQ ID NO: 60922
  chr1:155363621-155363845
  hypo

SEQ ID NO: 138264 - DNA, 30 bp, Homo sapiens; identical to SEQ ID NO: 60923
  chr1:155386188-155386218
  hypo

SEQ ID NO: 138265 - DNA, 184 bp, Homo sapiens; identical to SEQ ID NO: 14976
  chr1:155403642-155403826
  hypo

SEQ ID NO: 138266 - DNA, 30 bp, Homo sapiens
  chr1:155407440-155407470
  hypo
ccgctgtcatagcggcgttacggcatggaa

SEQ ID NO: 138267 - DNA, 35 bp, Homo sapiens; identical to SEQ ID NO: 60925
  chr1:155412079-155412114
  hypo

SEQ ID NO: 138268 - DNA, 30 bp, Homo sapiens
  chr1:155448885-155448915
  hypo
aatcatgattcctgcgcttacatttgtgtt

SEQ ID NO: 138269 - DNA, 83 bp, Homo sapiens; identical to SEQ ID NO: 14977
  chr1:155466711-155466794
  hypo

SEQ ID NO: 138270 - DNA, 28 bp, Homo sapiens
  chr1:155489764-155489792
  hypo
accagtcgctgcagacagaagaaatgga

SEQ ID NO: 138271 - DNA, 181 bp, Homo sapiens
  chr1:155516122-155516303
  hypo
aaaaaaaaaaaagaaattattgcattaccataatggtaaaggggaaagggaggtgaacaggtgacagtgagtaaagatttgcttatatcgtcatctaaccactagcattccttacatgagtttatttccacttttaagagcactctgggttgggcgcggtggctcatgcctataatcccag

SEQ ID NO: 138272 - DNA, 136 bp, Homo sapiens; identical to SEQ ID NO: 60929
  chr1:155518909-155519045
  hypo

SEQ ID NO: 138273 - DNA, 30 bp, Homo sapiens
  chr1:155577240-155577270
  hypo
aggtctgagccaccgcgcctagccgagttt

SEQ ID NO: 138274 - DNA, 121 bp, Homo sapiens
  chr1:155578924-155579045
  hypo
tgtttctaaatacacacaagaatgttaatcatagcacctaatagcccaaaaattggaaacaatcccaaaagctattatcagcagtatatatatatatatatatatatatattttttttttt

SEQ ID NO: 138275 - DNA, 34 bp, Homo sapiens; identical to SEQ ID NO: 60931
  chr1:155620900-155620934
  hypo

SEQ ID NO: 138276 - DNA, 17 bp, Homo sapiens
  chr1:155640467-155640484
  hypo
ttttttttttttttttt

SEQ ID NO: 138277 - DNA, 76 bp, Homo sapiens; identical to SEQ ID NO: 60932
  chr1:155640723-155640799
  hypo

SEQ ID NO: 138278 - DNA, 152 bp, Homo sapiens; identical to SEQ ID NO: 60933
  chr1:155654054-155654206
  hypo

SEQ ID NO: 138279 - DNA, 102 bp, Homo sapiens
  chr1:155659965-155660067
  hypo
aaagagtaggtaatgtcggtgatagatataaagaaaggaaaagatctccagatgtggaatcttctactggatcctgtaacagaaagaagacattaggctggg

SEQ ID NO: 138280 - DNA, 30 bp, Homo sapiens
  chr1:155664388-155664418
  hypo
gctgaaatgttcattcgagccatcaggcgt

SEQ ID NO: 138281 - DNA, 30 bp, Homo sapiens
  chr1:155664799-155664829
  hypo
ggctcgctcaacaatcgcttgcctttgaga

SEQ ID NO: 138282 - DNA, 30 bp, Homo sapiens
  chr1:155665660-155665690
  hypo
tccaaaggggcatcacgagtaattttcgga

SEQ ID NO: 138283 - DNA, 34 bp, Homo sapiens; identical to SEQ ID NO: 60934
  chr1:155674455-155674489
  hypo

SEQ ID NO: 138284 - DNA, 30 bp, Homo sapiens
  chr1:155675972-155676002
  hypo
tgtttgtggaattggcggtcttactatgta

SEQ ID NO: 138285 - DNA, 27 bp, Homo sapiens
  chr1:155686756-155686783
  hypo
gtttgataaccccgtaacactgaaatg

SEQ ID NO: 138286 - DNA, 19 bp, Homo sapiens
  chr1:155826317-155826336
  hypo
cgcccgacctacagttagt

SEQ ID NO: 138287 - DNA, 451 bp, Homo sapiens; identical to SEQ ID NO: 36311
  chr1:155830058-155830509
  hypo

SEQ ID NO: 138288 - DNA, 83 bp, Homo sapiens; identical to SEQ ID NO: 60936
  chr1:155862236-155862319
  hypo

SEQ ID NO: 138289 - DNA, 35 bp, Homo sapiens
  chr1:155881926-155881961
  hypo
tctgggccgggcgggcgcggtggctcacacctgta

SEQ ID NO: 138290 - DNA, 30 bp, Homo sapiens
  chr1:155884766-155884796
  hypo
tcttttctagatacacgttggttggaaaca

SEQ ID NO: 138291 - DNA, 27 bp, Homo sapiens
  chr1:155892696-155892723
  hypo
tgctataaagacagtcctggccgggcg

SEQ ID NO: 138292 - DNA, 26 bp, Homo sapiens
  chr1:155892962-155892988
  hypo
tccagcctgggcgacagaaaaaaaaa

SEQ ID NO: 138293 - DNA, 94 bp, Homo sapiens; identical to SEQ ID NO: 60938
  chr1:155893728-155893822
  hypo

SEQ ID NO: 138294 - DNA, 466 bp, Homo sapiens
  chr1:155911573-155912039
  hypo
gtgctgatgatgctccgatgcctgtcaaattcctagccctgaggctcatggttgccctggcctatgggcttgtgggggccattggcttgctgggaaatttggcggtgctgtgggtactgagtaactgtgcccggagagcccctggcccaccttcagacaccttcgtcttcaacctggctctggcggacctgggactggcactcactctccccttttgggcagccgagtcggcactggactttcactggcccttcggaggtgccctctgcaagatggttctgacggccactgtcctcaacgtctatgccagcatcttcctcatcacagcgctgagcgttgctcgctactgggtggtggccatggctgcggggccaggcacccacctctcactcttctgggcccgaatagccaccctggcagtgtgggcggcggctgccctggtgacggtgcccacagctgtcttcgg

SEQ ID NO: 138295 - DNA, 162 bp, Homo sapiens
  chr1:155912489-155912651
  hypo
gctgtggccccagggcggaggctgggtgcaacaggtggccctaaagcaggtaggcaggcggtgggtcgcaagcaacccccgggagagccgcccttctaccctgctcaccaacctggacagagggacacccgggtgaagggcgcaagctgaacacactcctct

SEQ ID NO: 138296 - DNA, 28 bp, Homo sapiens
  chr1:155913890-155913918
  hypo
gagccaccgcacccggtcgagctattat

SEQ ID NO: 138297 - DNA, 30 bp, Homo sapiens; identical to SEQ ID NO: 60940
  chr1:155920795-155920825
  hypo

SEQ ID NO: 138298 - DNA, 203 bp, Homo sapiens; identical to SEQ ID NO: 60941
  chr1:155931416-155931619
  hypo

SEQ ID NO: 138299 - DNA, 175 bp, Homo sapiens
  chr1:155954282-155954457
  hypo
gcttcctcccccacccgcttcacctagatcaggttcccaagctgcaggtgcatgtgacgctattcctgagggcgggcagtgggcagcagggagagagggcggggtctaagcagggcagagctgaagaatttaggagccatgggaacagagcaccgggttatgtggagacagtggc

SEQ ID NO: 138300 - DNA, 37 bp, Homo sapiens; identical to SEQ ID NO: 60942
  chr1:155972835-155972872
  hypo

SEQ ID NO: 138301 - DNA, 121 bp, Homo sapiens
  chr1:156009311-156009432
  hypo
attacagaagtgagccaccgcctggctagcttggcttttcattcttgtcattcctctaattatctcctgtaaatgtttgcccaaggggtatttggaaagcacaagccttgattatgaacaa

SEQ ID NO: 138302 - DNA, 101 bp, Homo sapiens; identical to SEQ ID NO: 60944
  chr1:156010522-156010623
  hypo

SEQ ID NO: 138303 - DNA, 145 bp, Homo sapiens
  chr1:156030707-156030852
  hypo
tgctcattagttgggggaccggccctcaccacagattccagaagcccagcaatgcacactcagccctcagtgggctgtctctgaaggtcctgtccctttttcgcttcccccccgctggagctgcttctcccgcttgcgggagccc

SEQ ID NO: 138304 - DNA, 37 bp, Homo sapiens; identical to SEQ ID NO: 14983
  chr1:156032531-156032568
  hypo

SEQ ID NO: 138305 - DNA, 318 bp, Homo sapiens; identical to SEQ ID NO: 60947
  chr1:156047206-156047524
  hypo

SEQ ID NO: 138306 - DNA, 30 bp, Homo sapiens; identical to SEQ ID NO: 14985
  chr1:156081253-156081283
  hypo

SEQ ID NO: 138307 - DNA, 158 bp, Homo sapiens; identical to SEQ ID NO: 104330
  chr1:156084255-156084413
  hypo

SEQ ID NO: 138308 - DNA, 424 bp, Homo sapiens; identical to SEQ ID NO: 104331
  chr1:156084628-156085052
  hypo

SEQ ID NO: 138309 - DNA, 31 bp, Homo sapiens; identical to SEQ ID NO: 14987
  chr1:156085875-156085906
  hypo

SEQ ID NO: 138310 - DNA, 30 bp, Homo sapiens
  chr1:156105862-156105892
  hypo
gacatggagatccacgcctaccgcaagctc

SEQ ID NO: 138311 - DNA, 48 bp, Homo sapiens
  chr1:156111313-156111361
  hypo
ctgagggcatagggccgcacacaaacactgccccacaagctggcagca

SEQ ID NO: 138312 - DNA, 201 bp, Homo sapiens
  chr1:156111379-156111580
  hypo
gggactcagcagttaaggtgtccacacacgtggtcacctcacatgatgctcacagcacaagtcagcactcagcagccacatttcattatgtaaaaaaaaaaaagttgttgttgttaaaatgtaatacatgcttggcctagcgtggtggcacgcacgcctgtagtcccagcaactcctggcctgaggcgggaaaattgtctg

SEQ ID NO: 138313 - DNA, 144 bp, Homo sapiens; identical to SEQ ID NO: 60953
  chr1:156143322-156143466
  hypo

SEQ ID NO: 138314 - DNA, 30 bp, Homo sapiens; identical to SEQ ID NO: 60954
  chr1:156167252-156167282
  hypo

SEQ ID NO: 138315 - DNA, 197 bp, Homo sapiens; identical to SEQ ID NO: 14989
  chr1:156179132-156179329
  hypo

SEQ ID NO: 138316 - DNA, 21 bp, Homo sapiens
  chr1:156218408-156218429
  hypo
tttttttttaaggtggagtct

SEQ ID NO: 138317 - DNA, 30 bp, Homo sapiens; identical to SEQ ID NO: 14990
  chr1:156232286-156232316
  hypo

SEQ ID NO: 138318 - DNA, 30 bp, Homo sapiens
  chr1:156233247-156233277
  hypo
caggaagcagaccttcggccatcaggacct

SEQ ID NO: 138319 - DNA, 39 bp, Homo sapiens
  chr1:156239860-156239899
  hypo
cttaacactcatgacattttgtgtcgtttcttaaaaaca

SEQ ID NO: 138320 - DNA, 38 bp, Homo sapiens
  chr1:156254133-156254171
  hypo
tgggcagctccttcccggacggacggatggacagacgc

SEQ ID NO: 138321 - DNA, 496 bp, Homo sapiens
  chr1:156255261-156255757
  hypo
ctcagcccagtgctccgttcccggatccccctggctggcgggacattgaaccagagccccctgagtcagaaccacttaccaagctagaggagctgcccgaagacgatgccaacctgctgcctgagaaagcggcccgtgccttcgtgcctattgacctacagtgcattgagcggcagccccaagaagaccttatcgtgcgctgtgaggcaggcgagggcgagtgccgaaccttcatgcccccccgggtcacccaccccgaccccactgagcgcaagtgggctgaggcagtggtgaggccgcctggctgttcctgtgggggctgcgggagctgtggagaccgtgagtggctaagggctgtggcctccgtgggagccgcactcattctcttcccttgcctactatacggggcatatgccttcctgccgtttgatgtcccacggctgcccaccatgagttcccgcctgatctacacactgcgctgcggggtctttgccac

SEQ ID NO: 138322 - DNA, 191 bp, Homo sapiens
  chr1:156256079-156256270
  hypo
tgcttttctgcccttcggccctttggggagccacggcgggaggtggagatccaccggcgatatgtggcccagtcggtccagctctttattctctacttcttcaacctggccgtgctttccacttacctgccccaggataccctcaaactgctccctctgctcactggtctctttgccgtctcccggtaagt

SEQ ID NO: 138323 - DNA, 30 bp, Homo sapiens; identical to SEQ ID NO: 60962
  chr1:156262768-156262798
  hypo

SEQ ID NO: 138324 - DNA, 37 bp, Homo sapiens
  chr1:156269033-156269070
  hypo
tacttccgttcacccggatttcggcaagagttacaat

SEQ ID NO: 138325 - DNA, 31 bp, Homo sapiens
  chr1:156271415-156271446
  hypo
gagcccatcaaagccccggacccagccacaa

SEQ ID NO: 138326 - DNA, 85 bp, Homo sapiens; identical to SEQ ID NO: 14995
  chr1:156276622-156276707
  hypo

SEQ ID NO: 138327 - DNA, 702 bp, Homo sapiens; identical to SEQ ID NO: 104341
  chr1:156357855-156358557
  hypo

SEQ ID NO: 138328 - DNA, 151 bp, Homo sapiens; identical to SEQ ID NO: 60966
  chr1:156362386-156362537
  hypo

SEQ ID NO: 138329 - DNA, 1176 bp, Homo sapiens; identical to SEQ ID NO: 104342
  chr1:156390039-156391215
  hypo

SEQ ID NO: 138330 - DNA, 359 bp, Homo sapiens; identical to SEQ ID NO: 843
  chr1:156391242-156391601
  hypo

SEQ ID NO: 138331 - DNA, 97 bp, Homo sapiens; identical to SEQ ID NO: 104344
  chr1:156405317-156405414
  hypo

SEQ ID NO: 138332 - DNA, 436 bp, Homo sapiens; identical to SEQ ID NO: 36330
  chr1:156405634-156406070
  hypo

SEQ ID NO: 138333 - DNA, 604 bp, Homo sapiens; identical to SEQ ID NO: 36331
  chr1:156406104-156406708
  hypo

SEQ ID NO: 138334 - DNA, 325 bp, Homo sapiens
  chr1:156432017-156432342
  hypo
cagtacagatggtcatcggcattttgcagatgaggaaacccaaggcatgaagcctgactcctgtgtgctcccacaactaaggctagcacccacagccttaaccatgcttcatggattttaggcgttcataggcctgtctctgccatcgtatatggcccctcacactccgcgttcgcctctgcagcacctgggctaggtacagagaagcagccacaccctgttcggaggaagccaagccggatctgctttcctccacagccgctccatctgccccagggcacggctgtgccaggtatgagggaggaggcagggttttttttttttt

SEQ ID NO: 138335 - DNA, 145 bp, Homo sapiens; identical to SEQ ID NO: 60972
  chr1:156432941-156433086
  hypo

SEQ ID NO: 138336 - DNA, 127 bp, Homo sapiens
  chr1:156433372-156433499
  hypo
ctgagacatgtggaagtgccccgccctgaaggccgccccccattcttccctgctgagatgaagcactgcctctcaccctgatggggccacaccagtccttccttcccatcctcgcggcaccaaagaa

SEQ ID NO: 138337 - DNA, 38 bp, Homo sapiens; identical to SEQ ID NO: 15004
  chr1:156441192-156441230
  hypo

SEQ ID NO: 138338 - DNA, 289 bp, Homo sapiens
  chr1:156445327-156445616
  hypo
agggaagggagacatcgtccatcccctgtctctctggagcccactctccatccatcacactgcagcacacgccccggcagaggcgtgctggcatctgcgaggggaatgtggggcctggcgtggcgtgtgcctgcgcgtatgcacacacgtgtgtggggctgtcagctccatctgccgctgagtcacttgtttattccaactccatgctggggccgaaactgccgccgtgttggccgccaaagcctgcctgccttttccagcctctctggcctcccgtcagggagttagg

SEQ ID NO: 138339 - DNA, 30 bp, Homo sapiens; identical to SEQ ID NO: 60976
  chr1:156452243-156452273
  hypo

SEQ ID NO: 138340 - DNA, 30 bp, Homo sapiens; identical to SEQ ID NO: 60977
  chr1:156479696-156479726
  hypo

SEQ ID NO: 138341 - DNA, 17 bp, Homo sapiens
  chr1:156481145-156481162
  hypo
gttgaaagtgctaatga

SEQ ID NO: 138342 - DNA, 574 bp, Homo sapiens; identical to SEQ ID NO: 104353
  chr1:156541930-156542504
  hypo

SEQ ID NO: 138343 - DNA, 222 bp, Homo sapiens; identical to SEQ ID NO: 60980
  chr1:156553585-156553807
  hypo

SEQ ID NO: 138344 - DNA, 241 bp, Homo sapiens
  chr1:156572017-156572258
  hypo
caccgtgaccggcctcatcaaacactttttgactcaccattgtgtgccagaacttgtccctttggtactgggggataaaaagacgcataagacacaggtcttgatttaggggaacacccagtctagcctgggaaacttgggaccttgagtgggattagatggaggacatgccagtgggacttggagaaagatacaggatgggtgagacgcggtggctcatgcctgtaatcccagcactttg

SEQ ID NO: 138345 - DNA, 23 bp, Homo sapiens
  chr1:156572377-156572400
  hypo
gtggtgcacgcctgtgggtccca

SEQ ID NO: 138346 - DNA, 1435 bp, Homo sapiens; identical to SEQ ID NO: 848
  chr1:156593617-156595052
  hypo

SEQ ID NO: 138347 - DNA, 103 bp, Homo sapiens; identical to SEQ ID NO: 849
  chr1:156595080-156595183
  hypo

SEQ ID NO: 138348 - DNA, 82 bp, Homo sapiens; identical to SEQ ID NO: 36339
  chr1:156595221-156595303
  hypo

SEQ ID NO: 138349 - DNA, 40 bp, Homo sapiens; identical to SEQ ID NO: 15008
  chr1:156664564-156664604
  hypo

SEQ ID NO: 138350 - DNA, 30 bp, Homo sapiens
  chr1:156666863-156666893
  hypo
agcctccctgcactccggtcaagcctccga

SEQ ID NO: 138351 - DNA, 102 bp, Homo sapiens
  chr1:156667363-156667465
  hypo
agaagtgggaggccctggccccggggcaccctggtcttgcagggagaggaggcttataggctatgaagcgtgaccactgactgtcagcgctgatgaagggag

SEQ ID NO: 138352 - DNA, 844 bp, Homo sapiens; identical to SEQ ID NO: 36351
  chr1:156675830-156676674
  hypo

SEQ ID NO: 138353 - DNA, 31 bp, Homo sapiens; identical to SEQ ID NO: 15011
  chr1:156716807-156716838
  hypo

SEQ ID NO: 138354 - DNA, 342 bp, Homo sapiens
  chr1:156754045-156754387
  hypo
ttgtatttatagtagatgaaaaaggagtcatgcaagatgttggcgtgctgagactgagcaaaggcagtcctgttaccaggatagcttcctggaggaggtagactggctcagaaggcgcccccactgtaagactgaagactgtaaagaacaatcttccaggtggtaggaagaaatgagtagatagaggaattctgagctcttaaggcagagtggggacttaggactgcaaaatgttgtagccatgaccccagatatgtgacaagtcagacacttcaaggtagcctgagggtgtgctccgccctgtacctcagtgtggttcctatgaaccggagcctctgggcg

SEQ ID NO: 138355 - DNA, 43 bp, Homo sapiens
  chr1:156768639-156768682
  hypo
aaaaaaaaaaaagatttatgacattgtacgcaatgaaaaacac

SEQ ID NO: 138356 - DNA, 157 bp, Homo sapiens
  chr1:156785629-156785786
  hypo
ggtactcctcattttcgttctctctctctgtgccccagcccgttggcagacccggatcattcctgccttctcttggagtggcctttgtccatctgcaagtccttccccatgggagggtgggagagatgagggagctgcaccacgctgccgccccagg

SEQ ID NO: 138357 - DNA, 392 bp, Homo sapiens
  chr1:156823675-156824067
  hypo
ccacgatgtggttggcgccaggtgctggctgcagcagtccccagtcaatggtggagaggtggcagagctcctggttcttctccacacgcacagccccacgcagcacggccccaagtgcaggcagtgccacgtcacgcagatgtggcatctcaaagatgaccagtgcatagcccaggaagaggcgcgtcccgcggatgactgctaggttggggaagaggtcgcgcaggctctccagtccgtagacacggaagagcagcaggtagtcggtgacctgggtgaggcgagggaagctgaggccgcggaagtcctccccggtggctgtgaacatgagcaggatctgcaggtggccctccaccacgctgcagttctccagctgacgaagctctgccacc

SEQ ID NO: 138358 - DNA, 30 bp, Homo sapiens
  chr1:156824370-156824400
  hypo
cagtcaggctcccaacgactgcaagcgact

SEQ ID NO: 138359 - DNA, 19 bp, Homo sapiens
  chr1:156837273-156837292
  hypo
atttctttcatttttacgt

SEQ ID NO: 138360 - DNA, 104 bp, Homo sapiens; identical to SEQ ID NO: 60990
  chr1:156838290-156838394
  hypo

SEQ ID NO: 138361 - DNA, 30 bp, Homo sapiens; identical to SEQ ID NO: 60991
  chr1:156843563-156843593
  hypo

SEQ ID NO: 138362 - DNA, 267 bp, Homo sapiens
  chr1:156849660-156849927
  hypo
aagtgctgggattacaggcgtgaaccaccgagcttgtgtatttatttttaatgatggggctggggtaggctgtgccttgacgggctgtcccaggcgcccctggaattgatgcagtgtccgcccgtggcaggtgggaggccgcaccatgctgcccattcgctggatgccgcccgagagcatcctgtaccgtaagttcaccaccgagagcgacgtgtggagcttcggcgtggtgctctgggagatcttcacctacggcaagcagccctg

SEQ ID NO: 138363 - DNA, 30 bp, Homo sapiens
  chr1:156882597-156882627
  hypo
cagtagcgtataactcgctgggtgcagtga

SEQ ID NO: 138364 - DNA, 430 bp, Homo sapiens; identical to SEQ ID NO: 104401
  chr1:156897223-156897653
  hypo

SEQ ID NO: 138365 - DNA, 30 bp, Homo sapiens; identical to SEQ ID NO: 15014
  chr1:156905969-156905999
  hypo

SEQ ID NO: 138366 - DNA, 30 bp, Homo sapiens; identical to SEQ ID NO: 15015
  chr1:157039340-157039370
  hypo

SEQ ID NO: 138367 - DNA, 30 bp, Homo sapiens
  chr1:157084771-157084801
  hypo
gcatgggagctggggcgcaggattggggca

SEQ ID NO: 138368 - DNA, 30 bp, Homo sapiens
  chr1:157134319-157134349
  hypo
ttccaccctcacttccgcacccctcggagc

SEQ ID NO: 138369 - DNA, 144 bp, Homo sapiens; identical to SEQ ID NO: 60996
  chr1:157458772-157458916
  hypo

SEQ ID NO: 138370 - DNA, 23 bp, Homo sapiens
  chr1:157515598-157515621
  hypo
taagccaccgcgcctggccaggt

SEQ ID NO: 138371 - DNA, 168 bp, Homo sapiens
  chr1:157678815-157678983
  hypo
actccaagtcgtcgacgaaggtctagttctgtgggtagaagaaggagctttagcctttccccaagccgccggagccacacccccagccgccagagaagatcaaagtctgtggtaagaagacgaagcttcagtatctcaccaatcagattaaggcgatcaagaacaccc

SEQ ID NO: 138372 - DNA, 30 bp, Homo sapiens; identical to SEQ ID NO: 60997
  chr1:157719992-157720022
  hypo

SEQ ID NO: 138373 - DNA, 28 bp, Homo sapiens
  chr1:157791995-157792023
  hypo
aaggcgggcggatcacgaggtcaggaga

SEQ ID NO: 138374 - DNA, 877 bp, Homo sapiens
  chr1:157895153-157896030
  hypo
tctgaatctgctagccggcggctccctgctggggtcagtttccttctgtagcagcgaggatgctccaaggtgacgacaagaaacagggcgtgaggagggtaagaggccctatgggcactgtagtcttgtgatgggggaggtggtggcagcggcagcggtggcagagagctagaggagggtgagaaggtggacgcggggccatgtatcccgagctcttcaccagagcccagcacagctctgccggaagcacccctgcagggttagaccagcaggtgcgaggtgcgacgtgggaaagagtccagggccggcggggtgctatgaggcgaggacttcctgagccgaggaccgggtgggttgtgagttgcgaccagcctcgctgacggaccctactacctctttcagttccagtgtcgcgtcttctcctcagcttcattgctcctggcgccctggccttcattggccatgtggtggagcttcactgcgaagacaggagagcgtctgcacccattctgttttggtgttaccatgaaaatgtgactctggggaaagcctcagcaccttctggaggaggagcgtccttcaacctctccgtcgccgcagagcattctgggaactactcctgtgaggccgacaatggctggggatcccagcgcagtgaggtggtggcactcacggtcacaggtgggacatggcaaacagctccttccagagagcttgttgcaattataccaagcaatggctggtgcttcctttccttcggaaatttctgctcctcgaggaatcagagttcctctagaaagcgccttaatgctccagggctctccctgtaattgggttttttgtttgtttgttttgttttttgtttcggcttttgttt

SEQ ID NO: 138375 - DNA, 141 bp, Homo sapiens
  chr1:158059254-158059395
  hypo
tcctggctccccacccgaggctgctctctctgcccaggtcctgagtaacagcaaccagctgctgctgaagtcggtgactcaggcagacgctggcacctacacctgccgggccatcgtgcctcgaatcggagtggctgagcg

SEQ ID NO: 138376 - DNA, 83 bp, Homo sapiens; identical to SEQ ID NO: 60999
  chr1:158098451-158098534
  hypo

SEQ ID NO: 138377 - DNA, 506 bp, Homo sapiens; identical to SEQ ID NO: 867
  chr1:158150550-158151056
  hypo

SEQ ID NO: 138378 - DNA, 22 bp, Homo sapiens
  chr1:158151116-158151138
  hypo
cggcacagagttcgctggcatc

SEQ ID NO: 138379 - DNA, 154 bp, Homo sapiens; identical to SEQ ID NO: 15018
  chr1:158237093-158237247
  hypo

SEQ ID NO: 138380 - DNA, 30 bp, Homo sapiens
  chr1:158636136-158636166
  hypo
ccgtgtttcctgagtcgattctgtacctcg

SEQ ID NO: 138381 - DNA, 30 bp, Homo sapiens
  chr1:158641912-158641942
  hypo
cactgctcatactgacgatgacgctcgtcc

SEQ ID NO: 138382 - DNA, 246 bp, Homo sapiens; identical to SEQ ID NO: 15019
  chr1:158669636-158669882
  hypo

SEQ ID NO: 138383 - DNA, 115 bp, Homo sapiens; identical to SEQ ID NO: 15020
  chr1:158710950-158711065
  hypo

SEQ ID NO: 138384 - DNA, 30 bp, Homo sapiens; identical to SEQ ID NO: 15021
  chr1:158736097-158736127
  hypo

SEQ ID NO: 138385 - DNA, 34 bp, Homo sapiens; identical to SEQ ID NO: 15022
  chr1:158753869-158753903
  hypo

SEQ ID NO: 138386 - DNA, 29 bp, Homo sapiens
  chr1:158815317-158815346
  hypo
ccgcgcccggcctcctgctcaaagtttta

SEQ ID NO: 138387 - DNA, 31 bp, Homo sapiens
  chr1:158840933-158840964
  hypo
caggcgtgagccaccgcgcccggcctcttac

SEQ ID NO: 138388 - DNA, 23 bp, Homo sapiens
  chr1:158855869-158855892
  hypo
ggagtaaaagaataatgtagccg

SEQ ID NO: 138389 - DNA, 30 bp, Homo sapiens
  chr1:158911802-158911832
  hypo
agtaaaaatattttccgagaagacccaata

SEQ ID NO: 138390 - DNA, 121 bp, Homo sapiens; identical to SEQ ID NO: 61009
  chr1:158992058-158992179
  hypo

SEQ ID NO: 138391 - DNA, 147 bp, Homo sapiens
  chr1:159075004-159075151
  hypo
cactggctccatgtgaggctacgactggaccagacgtactgcaactggcgtctggacagggggaatgcagtagcatccaaaagcttgcagatgccagaaaccacagacctccaaagagggtgttacagccctcgcccgtggaccccc

SEQ ID NO: 138392 - DNA, 30 bp, Homo sapiens
  chr1:159075450-159075480
  hypo
tcctatctggaggcacgtcatcctgatgag

SEQ ID NO: 138393 - DNA, 28 bp, Homo sapiens
  chr1:159141371-159141399
  hypo
gccctatttaatccccgcgactgcagca

SEQ ID NO: 138394 - DNA, 111 bp, Homo sapiens; identical to SEQ ID NO: 104413
  chr1:159141432-159141543
  hypo

SEQ ID NO: 138395 - DNA, 591 bp, Homo sapiens; identical to SEQ ID NO: 104414
  chr1:159141599-159142190
  hypo

SEQ ID NO: 138396 - DNA, 30 bp, Homo sapiens
  chr1:159155068-159155098
  hypo
aatttgctatactgtcgttttcatcatact

SEQ ID NO: 138397 - DNA, 30 bp, Homo sapiens
  chr1:159163737-159163767
  hypo
gggaggatgatggggcgagcatcgtgtgct

SEQ ID NO: 138398 - DNA, 40 bp, Homo sapiens; identical to SEQ ID NO: 15026
  chr1:159202103-159202143
  hypo

SEQ ID NO: 138399 - DNA, 46 bp, Homo sapiens; identical to SEQ ID NO: 15027
  chr1:159229595-159229641
  hypo

SEQ ID NO: 138400 - DNA, 30 bp, Homo sapiens; identical to SEQ ID NO: 61013
  chr1:159266991-159267021
  hypo

SEQ ID NO: 138401 - DNA, 23 bp, Homo sapiens
  chr1:159650194-159650217
  hypo
ccggcccactttttttaaactaa

SEQ ID NO: 138402 - DNA, 17 bp, Homo sapiens
  chr1:159652210-159652227
  hypo
cttttcacttaagaaga

SEQ ID NO: 138403 - DNA, 38 bp, Homo sapiens
  chr1:159714652-159714690
  hypo
ccaaggttggttgggcgccgtggctcacgcctgtaatc

SEQ ID NO: 138404 - DNA, 299 bp, Homo sapiens; identical to SEQ ID NO: 104417
  chr1:159750346-159750645
  hypo

SEQ ID NO: 138405 - DNA, 638 bp, Homo sapiens; identical to SEQ ID NO: 104418
  chr1:159750677-159751315
  hypo

SEQ ID NO: 138406 - DNA, 30 bp, Homo sapiens
  chr1:159752164-159752194
  hypo
cttccccatgttgtcgatggggccagagat

SEQ ID NO: 138407 - DNA, 676 bp, Homo sapiens; identical to SEQ ID NO: 104420
  chr1:159824348-159825024
  hypo

SEQ ID NO: 138408 - DNA, 176 bp, Homo sapiens; identical to SEQ ID NO: 61017
  chr1:159842713-159842889
  hypo

SEQ ID NO: 138409 - DNA, 142 bp, Homo sapiens; identical to SEQ ID NO: 61018
  chr1:159869542-159869684
  hypo

SEQ ID NO: 138410 - DNA, 30 bp, Homo sapiens; identical to SEQ ID NO: 61019
  chr1:159897041-159897071
  hypo

SEQ ID NO: 138411 - DNA, 195 bp, Homo sapiens; identical to SEQ ID NO: 61020
  chr1:159909832-159910027
  hypo

SEQ ID NO: 138412 - DNA, 102 bp, Homo sapiens; identical to SEQ ID NO: 15030
  chr1:159931576-159931678
  hypo

SEQ ID NO: 138413 - DNA, 241 bp, Homo sapiens; identical to SEQ ID NO: 61022
  chr1:159931917-159932158
  hypo

SEQ ID NO: 138414 - DNA, 42 bp, Homo sapiens; identical to SEQ ID NO: 61023
  chr1:159932217-159932259
  hypo

SEQ ID NO: 138415 - DNA, 30 bp, Homo sapiens; identical to SEQ ID NO: 61024
  chr1:160012192-160012222
  hypo

SEQ ID NO: 138416 - DNA, 23 bp, Homo sapiens
  chr1:160012719-160012742
  hypo
ccgtctcaaaaaaaaaaaaaagt

SEQ ID NO: 138417 - DNA, 30 bp, Homo sapiens; identical to SEQ ID NO: 15034
  chr1:160058299-160058329
  hypo

SEQ ID NO: 138418 - DNA, 61 bp, Homo sapiens; identical to SEQ ID NO: 15035
  chr1:160063719-160063780
  hypo

SEQ ID NO: 138419 - DNA, 30 bp, Homo sapiens
  chr1:160064970-160065000
  hypo
ctgtgccagccacgcggtacaagggcccct

SEQ ID NO: 138420 - DNA, 30 bp, Homo sapiens; identical to SEQ ID NO: 877
  chr1:160093911-160093941
  hypo

SEQ ID NO: 138421 - DNA, 30 bp, Homo sapiens; identical to SEQ ID NO: 61029
  chr1:160097217-160097247
  hypo

SEQ ID NO: 138422 - DNA, 218 bp, Homo sapiens
  chr1:160121080-160121298
  hypo
atttttgagtcatctatttggcatacctctaagcctccaaagtctgcaggaccacacaagaactttgttctagttctgccctcagactgaaactctttctgtagcagggcctgctccaatcgtcctcaaacccaaagactgagacttctaggttcttggttaaaaccttcatgaggcctttgcgacagcagacctggaccatcgccaaggcaagactt

SEQ ID NO: 138423 - DNA, 43 bp, Homo sapiens; identical to SEQ ID NO: 61031
  chr1:160121589-160121632
  hypo

SEQ ID NO: 138424 - DNA, 25 bp, Homo sapiens
  chr1:160135222-160135247
  hypo
atattattgttatctcctccacgtt

SEQ ID NO: 138425 - DNA, 30 bp, Homo sapiens; identical to SEQ ID NO: 61033
  chr1:160146137-160146167
  hypo

SEQ ID NO: 138426 - DNA, 30 bp, Homo sapiens
  chr1:160154917-160154947
  hypo
acgaagtcttggtctcgctctgtcgcccag

SEQ ID NO: 138427 - DNA, 105 bp, Homo sapiens
  chr1:160155211-160155316
  hypo
tttatgtttctgtctcgtgcctctcctctccactcccgatcactaatcccacaggatttgacctcctcaaaggtagggctcaggccgggcacgatggctcatgcc

SEQ ID NO: 138428 - DNA, 30 bp, Homo sapiens; identical to SEQ ID NO: 61034
  chr1:160171133-160171163
  hypo

SEQ ID NO: 138429 - DNA, 31 bp, Homo sapiens; identical to SEQ ID NO: 878
  chr1:160175619-160175650
  hypo

SEQ ID NO: 138430 - DNA, 30 bp, Homo sapiens
  chr1:160188189-160188219
  hypo
aagctatcttcatcccgctcccgcttgttc

SEQ ID NO: 138431 - DNA, 25 bp, Homo sapiens
  chr1:160214686-160214711
  hypo
ccacgcccagcccaactaacttcaa

SEQ ID NO: 138432 - DNA, 25 bp, Homo sapiens
  chr1:160227557-160227582
  hypo
gaggcgcaatctcagcgcactgcag

SEQ ID NO: 138433 - DNA, 268 bp, Homo sapiens; identical to SEQ ID NO: 61037
  chr1:160255642-160255910
  hypo

SEQ ID NO: 138434 - DNA, 148 bp, Homo sapiens; identical to SEQ ID NO: 15039
  chr1:160293180-160293328
  hypo

SEQ ID NO: 138435 - DNA, 30 bp, Homo sapiens
  chr1:160295002-160295032
  hypo
ggttctcgataactccgattaaatttcctg

SEQ ID NO: 138436 - DNA, 734 bp, Homo sapiens; identical to SEQ ID NO: 104437
  chr1:160370124-160370858
  hypo

SEQ ID NO: 138437 - DNA, 30 bp, Homo sapiens
  chr1:160377727-160377757
  hypo
accagcttagtgtcccgtcttcccgccggc

SEQ ID NO: 138438 - DNA, 157 bp, Homo sapiens; identical to SEQ ID NO: 61040
  chr1:160385714-160385871
  hypo

SEQ ID NO: 138439 - DNA, 30 bp, Homo sapiens
  chr1:160388540-160388570
  hypo
cagtgtccagctccccgagggctcgggtct

SEQ ID NO: 138440 - DNA, 30 bp, Homo sapiens; identical to SEQ ID NO: 61041
  chr1:160389359-160389389
  hypo

SEQ ID NO: 138441 - DNA, 41 bp, Homo sapiens
  chr1:160508425-160508466
  hypo
cacccacctcagcctcccaatacaggcgtgagccactgtgc

SEQ ID NO: 138442 - DNA, 166 bp, Homo sapiens
  chr1:160523239-160523405
  hypo
gcacgctcagcaacccggtgtggtgagtacggaagcccattgcgatgtctggaaatagaagatgcagtgagtcttgattctcaggaaataggcccaagaggctgggcaggtttgcccacagtcaggggcattatgaaaattgggtgccctccgaaggagtgccaaa

SEQ ID NO: 138443 - DNA, 28 bp, Homo sapiens
  chr1:160524876-160524904
  hypo
ttttttttttttgagacggagtcttgct

SEQ ID NO: 138444 - DNA, 189 bp, Homo sapiens; identical to SEQ ID NO: 881
  chr1:160526914-160527103
  hypo

SEQ ID NO: 138445 - DNA, 98 bp, Homo sapiens
  chr1:160693863-160693961
  hypo
ggtcaacttctcacccgtggtaacccgagccctggtattatacacataggtcctgtcctcctgaaaacgggtcaggactggccaggcgcagtggctca

SEQ ID NO: 138446 - DNA, 35 bp, Homo sapiens; identical to SEQ ID NO: 61046
  chr1:160752823-160752858
  hypo

SEQ ID NO: 138447 - DNA, 234 bp, Homo sapiens; identical to SEQ ID NO: 61047
  chr1:160771681-160771915
  hypo

SEQ ID NO: 138448 - DNA, 30 bp, Homo sapiens; identical to SEQ ID NO: 15044
  chr1:160772122-160772152
  hypo

SEQ ID NO: 138449 - DNA, 79 bp, Homo sapiens
  chr1:160865082-160865161
  hypo
ctgggcgggtgaaacgattaccacccatagtgcgaggagagccatcgacagatattggcccaccgccgatgggcgcctg

SEQ ID NO: 138450 - DNA, 128 bp, Homo sapiens; identical to SEQ ID NO: 61050
  chr1:160878332-160878460
  hypo

SEQ ID NO: 138451 - DNA, 28 bp, Homo sapiens
  chr1:160880704-160880732
  hypo
acagcaggccaggcgcggtggctcatgc

SEQ ID NO: 138452 - DNA, 46 bp, Homo sapiens; identical to SEQ ID NO: 61051
  chr1:160902455-160902501
  hypo

SEQ ID NO: 138453 - DNA, 56 bp, Homo sapiens; identical to SEQ ID NO: 61052
  chr1:160924873-160924929
  hypo

SEQ ID NO: 138454 - DNA, 30 bp, Homo sapiens; identical to SEQ ID NO: 882
  chr1:160948028-160948058
  hypo

SEQ ID NO: 138455 - DNA, 323 bp, Homo sapiens; identical to SEQ ID NO: 61054
  chr1:160953509-160953832
  hypo

SEQ ID NO: 138456 - DNA, 37 bp, Homo sapiens; identical to SEQ ID NO: 61055
  chr1:160985843-160985880
  hypo

SEQ ID NO: 138457 - DNA, 36 bp, Homo sapiens
  chr1:160986419-160986455
  hypo
ctgggtaacagaatgagactccgtctcaaaaaaaaa

SEQ ID NO: 138458 - DNA, 18 bp, Homo sapiens
  chr1:160987544-160987562
  hypo
ccaccttacgagaaacac

SEQ ID NO: 138459 - DNA, 24 bp, Homo sapiens
  chr1:160992337-160992361
  hypo
ttaatagtcttggccgggtgcgtg

SEQ ID NO: 138460 - DNA, 30 bp, Homo sapiens; identical to SEQ ID NO: 15048
  chr1:161004656-161004686
  hypo

SEQ ID NO: 138461 - DNA, 176 bp, Homo sapiens
  chr1:161007586-161007762
  hypo
tctctataggctccagcgtagttgcgagccctgtggagacaaagaagcgtgagagactgacaggaatgacaggcagtccccatcacctcccagctagcagccacacctccccgtacccagtgtatccaagactccgggccagctgcgtggcctggaggccccgcttgcccatctga

SEQ ID NO: 138462 - DNA, 30 bp, Homo sapiens
  chr1:161009629-161009659
  hypo
gaaggaaaggggcacgggattaggctgttg

SEQ ID NO: 138463 - DNA, 256 bp, Homo sapiens; identical to SEQ ID NO: 61059
  chr1:161044439-161044695
  hypo

SEQ ID NO: 138464 - DNA, 33 bp, Homo sapiens
  chr1:161055747-161055780
  hypo
tataggcgtgagccaccacgcctggccccctcc

SEQ ID NO: 138465 - DNA, 30 bp, Homo sapiens
  chr1:161056794-161056824
  hypo
tctggtcctagctctcggtctactgaagtc

SEQ ID NO: 138466 - DNA, 30 bp, Homo sapiens
  chr1:161062136-161062166
  hypo
tgacattgctgcgtgcgcgcctgcacccat

SEQ ID NO: 138467 - DNA, 30 bp, Homo sapiens
  chr1:161062448-161062478
  hypo
ccatgacaggctgcacgcctcagccaaacc

SEQ ID NO: 138468 - DNA, 855 bp, Homo sapiens; identical to SEQ ID NO: 104443
  chr1:161067871-161068726
  hypo

SEQ ID NO: 138469 - DNA, 30 bp, Homo sapiens
  chr1:161110845-161110875
  hypo
tccccctgaccctgcggtcctggcaacgtc

SEQ ID NO: 138470 - DNA, 30 bp, Homo sapiens
  chr1:161111955-161111985
  hypo
atttgattcaacaagcgtatagagtccact

SEQ ID NO: 138471 - DNA, 20 bp, Homo sapiens
  chr1:161122835-161122855
  hypo
gtctccaaaaaaaaaaaaaa

SEQ ID NO: 138472 - DNA, 190 bp, Homo sapiens; identical to SEQ ID NO: 61061
  chr1:161145674-161145864
  hypo

SEQ ID NO: 138473 - DNA, 275 bp, Homo sapiens
  chr1:161166335-161166610
  hypo
tggggcctcacctgacgggtaaacagaatggctgtgtcaaagtggtcagggtccgagtcctcaggggtgttgaggccccgctgccaggcacagaagctgcgcagggtctgggcagcactgggccccacttggggcccctcctcgcctgaccccaggatcactagccgagtcaccaccaagctgacaggattgcggatgcttgggtgcttgaaggccttggctgctgctgccatcactgttagcaggtagcgctttagccccgcaccgtggaatgc

SEQ ID NO: 138474 - DNA, 24 bp, Homo sapiens
  chr1:161182710-161182734
  hypo
tttgagacggtgtcacgctctttc

SEQ ID NO: 138475 - DNA, 23 bp, Homo sapiens
  chr1:161182973-161182996
  hypo
tgagtcaccgcacccggccatat

SEQ ID NO: 138476 - DNA, 38 bp, Homo sapiens
  chr1:161305960-161305998
  hypo
ttaggaggcccggtgcggtggctcatgcctgtaatccc

SEQ ID NO: 138477 - DNA, 31 bp, Homo sapiens; identical to SEQ ID NO: 61063
  chr1:161342806-161342837
  hypo

SEQ ID NO: 138478 - DNA, 16 bp, Homo sapiens
  chr1:161359213-161359229
  hypo
gcggagatcgcgccat

SEQ ID NO: 138479 - DNA, 22 bp, Homo sapiens
  chr1:161361044-161361066
  hypo
tgggtgtggtggcagtcgcctg

SEQ ID NO: 138480 - DNA, 241 bp, Homo sapiens; identical to SEQ ID NO: 15051
  chr1:161367366-161367607
  hypo

SEQ ID NO: 138481 - DNA, 165 bp, Homo sapiens; identical to SEQ ID NO: 61066
  chr1:161367786-161367951
  hypo

SEQ ID NO: 138482 - DNA, 698 bp, Homo sapiens; identical to SEQ ID NO: 891
  chr1:161369560-161370258
  hypo

SEQ ID NO: 138483 - DNA, 37 bp, Homo sapiens; identical to SEQ ID NO: 61068
  chr1:161370746-161370783
  hypo

SEQ ID NO: 138484 - DNA, 837 bp, Homo sapiens; identical to SEQ ID NO: 104466
  chr1:161409867-161410704
  hypo

SEQ ID NO: 138485 - DNA, 197 bp, Homo sapiens; identical to SEQ ID NO: 15055
  chr1:161450370-161450567
  hypo

SEQ ID NO: 138486 - DNA, 31 bp, Homo sapiens; identical to SEQ ID NO: 15056
  chr1:161466295-161466326
  hypo

SEQ ID NO: 138487 - DNA, 31 bp, Homo sapiens; identical to SEQ ID NO: 15057
  chr1:161466385-161466416
  hypo

SEQ ID NO: 138488 - DNA, 30 bp, Homo sapiens; identical to SEQ ID NO: 895
  chr1:161601157-161601187
  hypo

SEQ ID NO: 138489 - DNA, 30 bp, Homo sapiens
  chr1:161655041-161655071
  hypo
gggagaaggaaagccgagaatctatgtcat

SEQ ID NO: 138490 - DNA, 24 bp, Homo sapiens
  chr1:161662015-161662039
  hypo
ttttgttttgtttttttgagacgg

SEQ ID NO: 138491 - DNA, 30 bp, Homo sapiens; identical to SEQ ID NO: 61075
  chr1:161860368-161860398
  hypo

SEQ ID NO: 138492 - DNA, 30 bp, Homo sapiens
  chr1:161863236-161863266
  hypo
tgagccactgcgccccgccacggaaacttt

SEQ ID NO: 138493 - DNA, 42 bp, Homo sapiens
  chr1:161879451-161879493
  hypo
agtgaacagtaagggccggtcacagaggctcacacctgtaat

SEQ ID NO: 138494 - DNA, 26 bp, Homo sapiens
  chr1:161910636-161910662
  hypo
ccaccgtgcctggccagaaaatgttc

SEQ ID NO: 138495 - DNA, 243 bp, Homo sapiens; identical to SEQ ID NO: 15060
  chr1:161953578-161953821
  hypo

SEQ ID NO: 138496 - DNA, 30 bp, Homo sapiens; identical to SEQ ID NO: 61078
  chr1:161954642-161954672
  hypo

SEQ ID NO: 138497 - DNA, 30 bp, Homo sapiens
  chr1:161980382-161980412
  hypo
tccagctcttagacacgtgtgcgtgtgccc

SEQ ID NO: 138498 - DNA, 188 bp, Homo sapiens
  chr1:161982117-161982305
  hypo
tattagctggtgaaacgatatatcccccagggtcaggaatgcttctttgatcatgcctttcagtccagaaacacaaaagccaccaaagctttaggtgtgggggagaagccctcagcaatgcctgtgccagtacattctggggagcggaccagttctgggtctggtaaatccatcgtggacttaaatct

SEQ ID NO: 138499 - DNA, 931 bp, Homo sapiens; identical to SEQ ID NO: 104483
  chr1:162039134-162040065
  hypo

SEQ ID NO: 138500 - DNA, 30 bp, Homo sapiens; identical to SEQ ID NO: 36425
  chr1:162058274-162058304
  hypo

SEQ ID NO: 138501 - DNA, 46 bp, Homo sapiens; identical to SEQ ID NO: 15062
  chr1:162116824-162116870
  hypo

SEQ ID NO: 138502 - DNA, 88 bp, Homo sapiens
  chr1:162335160-162335248
  hypo
cctgtcttctctgccgctgcctcttctctgcaggtacacttgctgaaggaccagttggctgctgaggctgcggcgcggctggaggccc

SEQ ID NO: 138503 - DNA, 225 bp, Homo sapiens; identical to SEQ ID NO: 61083
  chr1:162343770-162343995
  hypo

SEQ ID NO: 138504 - DNA, 86 bp, Homo sapiens; identical to SEQ ID NO: 61084
  chr1:162344601-162344687
  hypo

SEQ ID NO: 138505 - DNA, 49 bp, Homo sapiens; identical to SEQ ID NO: 61085
  chr1:162346579-162346628
  hypo

SEQ ID NO: 138506 - DNA, 30 bp, Homo sapiens; identical to SEQ ID NO: 15065
  chr1:162351042-162351072
  hypo

SEQ ID NO: 138507 - DNA, 154 bp, Homo sapiens; identical to SEQ ID NO: 61087
  chr1:162351642-162351796
  hypo

SEQ ID NO: 138508 - DNA, 30 bp, Homo sapiens; identical to SEQ ID NO: 36426
  chr1:162393905-162393935
  hypo

SEQ ID NO: 138509 - DNA, 38 bp, Homo sapiens; identical to SEQ ID NO: 15066
  chr1:162426946-162426984
  hypo

SEQ ID NO: 138510 - DNA, 37 bp, Homo sapiens; identical to SEQ ID NO: 15067
  chr1:162427223-162427260
  hypo

SEQ ID NO: 138511 - DNA, 163 bp, Homo sapiens; identical to SEQ ID NO: 61091
  chr1:162428145-162428308
  hypo

SEQ ID NO: 138512 - DNA, 26 bp, Homo sapiens
  chr1:162533430-162533456
  hypo
gcgtgagccaccgcgcccggccctat

SEQ ID NO: 138513 - DNA, 30 bp, Homo sapiens; identical to SEQ ID NO: 36430
  chr1:162660818-162660848
  hypo

SEQ ID NO: 138514 - DNA, 30 bp, Homo sapiens
  chr1:163186385-163186415
  hypo
ttttaggagatttttcgtaggtcgtcattt

SEQ ID NO: 138515 - DNA, 31 bp, Homo sapiens; identical to SEQ ID NO: 902
  chr1:163378140-163378171
  hypo

SEQ ID NO: 138516 - DNA, 90 bp, Homo sapiens; identical to SEQ ID NO: 903
  chr1:163378350-163378440
  hypo

SEQ ID NO: 138517 - DNA, 287 bp, Homo sapiens; identical to SEQ ID NO: 61095
  chr1:163392833-163393120
  hypo

SEQ ID NO: 138518 - DNA, 144 bp, Homo sapiens
  chr1:163662091-163662235
  hypo
gggaaccggaggcaacgaacattggaaccagcagtcactcctctctcgggggagcaggctctgtgcgggccccacagcagcattcaggtgtgttacagccatgttctttcaagccctgctgtctggggacggctaagtgccaac

SEQ ID NO: 138519 - DNA, 46 bp, Homo sapiens; identical to SEQ ID NO: 15070
  chr1:163872822-163872868
  hypo

SEQ ID NO: 138520 - DNA, 44 bp, Homo sapiens
  chr1:163900505-163900549
  hypo
gaaagtggccaggcgcggtggctcacacctgtaatcccagaact

SEQ ID NO: 138521 - DNA, 39 bp, Homo sapiens
  chr1:164079140-164079179
  hypo
gctgggattacaggcatgagccaccgcgcccggccctcc

SEQ ID NO: 138522 - DNA, 20 bp, Homo sapiens
  chr1:164185264-164185284
  hypo
ggcagccaagatggccgaat

SEQ ID NO: 138523 - DNA, 30 bp, Homo sapiens; identical to SEQ ID NO: 61097
  chr1:164325916-164325946
  hypo

SEQ ID NO: 138524 - DNA, 35 bp, Homo sapiens; identical to SEQ ID NO: 15071
  chr1:164518129-164518164
  hypo

SEQ ID NO: 138525 - DNA, 30 bp, Homo sapiens
  chr1:164537964-164537994
  hypo
aatggggtaatcgatcgtcgctcatgagga

SEQ ID NO: 138526 - DNA, 44 bp, Homo sapiens; identical to SEQ ID NO: 61099
  chr1:164550440-164550484
  hypo

SEQ ID NO: 138527 - DNA, 43 bp, Homo sapiens; identical to SEQ ID NO: 61100
  chr1:164550723-164550766
  hypo

SEQ ID NO: 138528 - DNA, 25 bp, Homo sapiens
  chr1:164563531-164563556
  hypo
tacttttctttttttttgagacgga

SEQ ID NO: 138529 - DNA, 28 bp, Homo sapiens
  chr1:164570177-164570205
  hypo
aatagcagacacagggctgggcgcagtg

SEQ ID NO: 138530 - DNA, 31 bp, Homo sapiens; identical to SEQ ID NO: 15075
  chr1:164579428-164579459
  hypo

SEQ ID NO: 138531 - DNA, 105 bp, Homo sapiens; identical to SEQ ID NO: 61104
  chr1:164590519-164590624
  hypo

SEQ ID NO: 138532 - DNA, 174 bp, Homo sapiens; identical to SEQ ID NO: 15076
  chr1:164604711-164604885
  hypo

SEQ ID NO: 138533 - DNA, 30 bp, Homo sapiens
  chr1:164607899-164607929
  hypo
caaagcagtcaggagcgataaaggcaggtg

SEQ ID NO: 138534 - DNA, 29 bp, Homo sapiens
  chr1:164622103-164622132
  hypo
tttaaacttttttttttttttcggacaga

SEQ ID NO: 138535 - DNA, 30 bp, Homo sapiens
  chr1:164637567-164637597
  hypo
tttggggcggtggttcgactttgagggtca

SEQ ID NO: 138536 - DNA, 328 bp, Homo sapiens
  chr1:164637869-164638197
  hypo
tgtaacatactcttcccctttcgccttaccttccccaggcgcagccaacacttgacatctttttatcagatgagcttggcactgccaggaccggctcctcgcgccaatgtggcagcagccacagcccctcagcttgttagactgaaagaatgtgccgttttaattaatgatatgtaaatatccttgaatgggccgcatttgcatattaagagagatttgcggaatctgcggagtaatatattttaattaaggattaattaaaaataatgggaatttcatttcgcctggcagaatccgtttagattttagcacacgtctgcttgggagt

SEQ ID NO: 138537 - DNA, 126 bp, Homo sapiens; identical to SEQ ID NO: 61107
  chr1:164651957-164652083
  hypo

SEQ ID NO: 138538 - DNA, 26 bp, Homo sapiens
  chr1:164655944-164655970
  hypo
gtgatctttgggaggctgaggcgggc

SEQ ID NO: 138539 - DNA, 25 bp, Homo sapiens
  chr1:164656209-164656234
  hypo
aaacgaaaacaaaaacaaaaccaaa

SEQ ID NO: 138540 - DNA, 64 bp, Homo sapiens
  chr1:164658203-164658267
  hypo
ctgtgtctggctggagggtggcgtcgcgcctccccttggtgccgcaggccacgcagagaggcaa

SEQ ID NO: 138541 - DNA, 30 bp, Homo sapiens
  chr1:164660530-164660560
  hypo
atgagccactgtgcccggcgagagttgttt

SEQ ID NO: 138542 - DNA, 272 bp, Homo sapiens; identical to SEQ ID NO: 61110
  chr1:164667271-164667543
  hypo

SEQ ID NO: 138543 - DNA, 23 bp, Homo sapiens
  chr1:164680517-164680540
  hypo
tgaaacagagtcttgctctgtcg

SEQ ID NO: 138544 - DNA, 30 bp, Homo sapiens; identical to SEQ ID NO: 61112
  chr1:164714292-164714322
  hypo

SEQ ID NO: 138545 - DNA, 43 bp, Homo sapiens; identical to SEQ ID NO: 61113
  chr1:164723969-164724012
  hypo

SEQ ID NO: 138546 - DNA, 20 bp, Homo sapiens
  chr1:164730963-164730983
  hypo
gccaccgcgcccggcccatt

SEQ ID NO: 138547 - DNA, 20 bp, Homo sapiens
  chr1:164736212-164736232
  hypo
cctcagcctcccaaagtgct

SEQ ID NO: 138548 - DNA, 194 bp, Homo sapiens; identical to SEQ ID NO: 61116
  chr1:164753546-164753740
  hypo

SEQ ID NO: 138549 - DNA, 337 bp, Homo sapiens; identical to SEQ ID NO: 61117
  chr1:164761682-164762019
  hypo

SEQ ID NO: 138550 - DNA, 37 bp, Homo sapiens; identical to SEQ ID NO: 15085
  chr1:164765527-164765564
  hypo

SEQ ID NO: 138551 - DNA, 557 bp, Homo sapiens; identical to SEQ ID NO: 61119
  chr1:164768738-164769295
  hypo

SEQ ID NO: 138552 - DNA, 89 bp, Homo sapiens; identical to SEQ ID NO: 61120
  chr1:164776127-164776216
  hypo

SEQ ID NO: 138553 - DNA, 194 bp, Homo sapiens; identical to SEQ ID NO: 15086
  chr1:164790952-164791146
  hypo

SEQ ID NO: 138554 - DNA, 30 bp, Homo sapiens
  chr1:164810291-164810321
  hypo
ccttgcttttatggtcgggtaggtgaaacc

SEQ ID NO: 138555 - DNA, 30 bp, Homo sapiens
  chr1:164814495-164814525
  hypo
ttctcagtcgtgaaccgggacacctgcttt

SEQ ID NO: 138556 - DNA, 30 bp, Homo sapiens
  chr1:164875381-164875411
  hypo
gggagaggcgacacacgcctgtaatctcag

SEQ ID NO: 138557 - DNA, 200 bp, Homo sapiens; identical to SEQ ID NO: 104500
  chr1:165204496-165204696
  hypo

SEQ ID NO: 138558 - DNA, 736 bp, Homo sapiens; identical to SEQ ID NO: 36441
  chr1:165204732-165205468
  hypo

SEQ ID NO: 138559 - DNA, 1160 bp, Homo sapiens; identical to SEQ ID NO: 104508
  chr1:165324196-165325356
  hypo

SEQ ID NO: 138560 - DNA, 810 bp, Homo sapiens; identical to SEQ ID NO: 104509
  chr1:165325394-165326204
  hypo

SEQ ID NO: 138561 - DNA, 389 bp, Homo sapiens; identical to SEQ ID NO: 104511
  chr1:165345283-165345672
  hypo

SEQ ID NO: 138562 - DNA, 33 bp, Homo sapiens; identical to SEQ ID NO: 61127
  chr1:165495512-165495545
  hypo

SEQ ID NO: 138563 - DNA, 24 bp, Homo sapiens
  chr1:165591139-165591163
  hypo
ctggcacagtggctcacgcctgta

SEQ ID NO: 138564 - DNA, 22 bp, Homo sapiens
  chr1:165699280-165699302
  hypo
gggcgcggtggctcacgcctgt

SEQ ID NO: 138565 - DNA, 86 bp, Homo sapiens
  chr1:165711410-165711496
  hypo
acaaagcctgccgaacggcaatatgttcagaaactgaataatgccctaaaataaagaattgttcagccagagaccttaattatcgg

SEQ ID NO: 138566 - DNA, 147 bp, Homo sapiens
  chr1:165809089-165809236
  hypo
gtcacttgccggtaccgtgattcatgttctgtgcagatgtgctgtcagaacaggctggttggccagccttcccccaccccggcccccgccccagacagagtcctgctgtgctgcccaggctggagtgtggcgcgatctcggcccact

SEQ ID NO: 138567 - DNA, 30 bp, Homo sapiens
  chr1:166089636-166089666
  hypo
gggctgaccgtgccacgcctacttagcagg

SEQ ID NO: 138568 - DNA, 30 bp, Homo sapiens
  chr1:166090004-166090034
  hypo
agcagaggacatccacggtgaactcacagt

SEQ ID NO: 138569 - DNA, 730 bp, Homo sapiens; identical to SEQ ID NO: 918
  chr1:166134160-166134890
  hypo

SEQ ID NO: 138570 - DNA, 1296 bp, Homo sapiens; identical to SEQ ID NO: 104525
  chr1:166134933-166136229
  hypo

SEQ ID NO: 138571 - DNA, 43 bp, Homo sapiens
  chr1:166266743-166266786
  hypo
gggtgagccactgcgcccggccgagggtgtttatttttctgga

SEQ ID NO: 138572 - DNA, 29 bp, Homo sapiens
  chr1:166317393-166317422
  hypo
caagaaatgctgtgagggtggcgggcgcc

SEQ ID NO: 138573 - DNA, 28 bp, Homo sapiens
  chr1:166317541-166317569
  hypo
agactccgtctcaaaaaaaaaaaaaaaa

SEQ ID NO: 138574 - DNA, 37 bp, Homo sapiens; identical to SEQ ID NO: 61134
  chr1:166479111-166479148
  hypo

SEQ ID NO: 138575 - DNA, 36 bp, Homo sapiens; identical to SEQ ID NO: 61135
  chr1:166479387-166479423
  hypo

SEQ ID NO: 138576 - DNA, 17 bp, Homo sapiens
  chr1:166579268-166579285
  hypo
tgaagggggccagcccg

SEQ ID NO: 138577 - DNA, 30 bp, Homo sapiens
  chr1:166806256-166806286
  hypo
gtctacagcggtccccgaggaacagacgta

SEQ ID NO: 138578 - DNA, 30 bp, Homo sapiens
  chr1:166807311-166807341
  hypo
gtcttgggttgtcaccgtgattgcacttcc

SEQ ID NO: 138579 - DNA, 32 bp, Homo sapiens; identical to SEQ ID NO: 61137
  chr1:166958566-166958598
  hypo

SEQ ID NO: 138580 - DNA, 30 bp, Homo sapiens; identical to SEQ ID NO: 15091
  chr1:166959015-166959045
  hypo

SEQ ID NO: 138581 - DNA, 110 bp, Homo sapiens
  chr1:167032008-167032118
  hypo
cttacagcaacatggtgctgtcgttgtgtggagccataaaacggtggtgtgtctggggcagcgggggtccgtgacggctgagagggaccggcctggataaggaatgggaa

SEQ ID NO: 138582 - DNA, 30 bp, Homo sapiens; identical to SEQ ID NO: 15092
  chr1:167042607-167042637
  hypo

SEQ ID NO: 138583 - DNA, 30 bp, Homo sapiens; identical to SEQ ID NO: 15093
  chr1:167063943-167063973
  hypo

SEQ ID NO: 138584 - DNA, 31 bp, Homo sapiens; identical to SEQ ID NO: 61141
  chr1:167065623-167065654
  hypo

SEQ ID NO: 138585 - DNA, 30 bp, Homo sapiens; identical to SEQ ID NO: 15094
  chr1:167088543-167088573
  hypo

SEQ ID NO: 138586 - DNA, 239 bp, Homo sapiens; identical to SEQ ID NO: 36471
  chr1:167090626-167090865
  hypo

SEQ ID NO: 138587 - DNA, 280 bp, Homo sapiens; identical to SEQ ID NO: 15095
  chr1:167096196-167096476
  hypo

SEQ ID NO: 138588 - DNA, 30 bp, Homo sapiens
  chr1:167131991-167132021
  hypo
aagtcattgcccaggcgcgtgtagtacttt

SEQ ID NO: 138589 - DNA, 238 bp, Homo sapiens; identical to SEQ ID NO: 925
  chr1:167190163-167190401
  hypo

SEQ ID NO: 138590 - DNA, 99 bp, Homo sapiens; identical to SEQ ID NO: 15097
  chr1:167221024-167221123
  hypo

SEQ ID NO: 138591 - DNA, 30 bp, Homo sapiens
  chr1:167247954-167247984
  hypo
tcacttttcagcaagcgtttcagtgcttac

SEQ ID NO: 138592 - DNA, 267 bp, Homo sapiens; identical to SEQ ID NO: 61147
  chr1:167393531-167393798
  hypo

SEQ ID NO: 138593 - DNA, 30 bp, Homo sapiens; identical to SEQ ID NO: 61148
  chr1:167411780-167411810
  hypo

SEQ ID NO: 138594 - DNA, 166 bp, Homo sapiens; identical to SEQ ID NO: 104542
  chr1:167423948-167424114
  hypo

SEQ ID NO: 138595 - DNA, 214 bp, Homo sapiens
  chr1:167430238-167430452
  hypo
cgcgctgtgagcattcgcctatgacgtactttgcgtggatcaaaggccccacaaagcctgccgtgcctgcagctgccacgctggggacatgctggggacgtgggcgatcgtgggctgagaggcagactgctgggctgccgcctcccatggcagctttctcccatgggagggagttcaccttgcggcttccaaactcagccgggccgcccctagg

SEQ ID NO: 138596 - DNA, 105 bp, Homo sapiens
  chr1:167443920-167444025
  hypo
gctcccactggccaacgatggaacaacttgagcatataagaaaaacgactgccatgggttaaaactgtctttttttttttttttttttttgacggagtcttgctc

SEQ ID NO: 138597 - DNA, 30 bp, Homo sapiens
  chr1:167455768-167455798
  hypo
cgccggtccagggcccgcctcgagtttgcg

SEQ ID NO: 138598 - DNA, 30 bp, Homo sapiens
  chr1:167481975-167482005
  hypo
ctccacagtcccctgcgtgaagaggcacca

SEQ ID NO: 138599 - DNA, 30 bp, Homo sapiens
  chr1:167483778-167483808
  hypo
catactatgtacatgcgctgactaaagcga

SEQ ID NO: 138600 - DNA, 222 bp, Homo sapiens
  chr1:167486828-167487050
  hypo
tggctgggcgctgctcgtggtggtgacttaaccaggcacatcgtctcatctgccccgtgttctgtcaatgccgggccctctggctgggctagatggccgcctaaggggcaggctggggtgagtcacggagcctgggatggtgcgtcacccggcagtcccaggcgtgggtgtggggacagccatgacaaggctgagcctagacacggacgcttggccatgagg

SEQ ID NO: 138601 - DNA, 162 bp, Homo sapiens; identical to SEQ ID NO: 15100
  chr1:167487338-167487500
  hypo

SEQ ID NO: 138602 - DNA, 217 bp, Homo sapiens; identical to SEQ ID NO: 15101
  chr1:167524972-167525189
  hypo

SEQ ID NO: 138603 - DNA, 777 bp, Homo sapiens; identical to SEQ ID NO: 36480
  chr1:167599107-167599884
  hypo

SEQ ID NO: 138604 - DNA, 186 bp, Homo sapiens
  chr1:167690722-167690908
  hypo
acacggcacggggaacgtgttccacctggacgactgaatcagaagtctctcccccatcaattgaacgcctcattatttttctttctgtcttttctttctttttaaggtaaatgaattgcttctttttcgttaggtgaggccggcagagaacaagaagagctgaaacggaggcgaggttagtaccca

SEQ ID NO: 138605 - DNA, 46 bp, Homo sapiens
  chr1:167732417-167732463
  hypo
cttgcagctaggcctcgaggaagggatctggtttaagaaaatcctt

SEQ ID NO: 138606 - DNA, 23 bp, Homo sapiens
  chr1:167741350-167741373
  hypo
ccgaaaaaaggaggagagagagg

SEQ ID NO: 138607 - DNA, 30 bp, Homo sapiens
  chr1:167746820-167746850
  hypo
gtgctaggatgagcacgagcacttcagaga

SEQ ID NO: 138608 - DNA, 30 bp, Homo sapiens
  chr1:167754333-167754363
  hypo
tagtggcttaaaacacgcactatttatttg

SEQ ID NO: 138609 - DNA, 20 bp, Homo sapiens
  chr1:167789092-167789112
  hypo
gcgcccggcatgattttcta

SEQ ID NO: 138610 - DNA, 30 bp, Homo sapiens; identical to SEQ ID NO: 61155
  chr1:167819120-167819150
  hypo

SEQ ID NO: 138611 - DNA, 81 bp, Homo sapiens; identical to SEQ ID NO: 15103
  chr1:167823387-167823468
  hypo

SEQ ID NO: 138612 - DNA, 43 bp, Homo sapiens; identical to SEQ ID NO: 61157
  chr1:167844892-167844935
  hypo

SEQ ID NO: 138613 - DNA, 40 bp, Homo sapiens; identical to SEQ ID NO: 61158
  chr1:167852541-167852581
  hypo

SEQ ID NO: 138614 - DNA, 21 bp, Homo sapiens
  chr1:168054672-168054693
  hypo
acagtgacatgctcccaaggc

SEQ ID NO: 138615 - DNA, 202 bp, Homo sapiens
  chr1:168054754-168054956
  hypo
gcaccctgaggccctcatctctgctcggcagctaaaacatctccttcttcgatgctctgcaactgcagcctctggctcacaagagttctgctgcctcggcggcccccgaagccgccccccgggacagtccgtgctgtaaccaagacccctggcaaagcctcctccccaaataagttgattttggcttcggcctcaatggctt

SEQ ID NO: 138616 - DNA, 66 bp, Homo sapiens; identical to SEQ ID NO: 15104
  chr1:168058061-168058127
  hypo

SEQ ID NO: 138617 - DNA, 42 bp, Homo sapiens
  chr1:168062077-168062119
  hypo
tgagtcagtgtccttcgcaggagataacgggaaaggctctat

SEQ ID NO: 138618 - DNA, 22 bp, Homo sapiens
  chr1:168101995-168102017
  hypo
ttttaagatggagtttcgctct

SEQ ID NO: 138619 - DNA, 37 bp, Homo sapiens
  chr1:168104281-168104318
  hypo
acaaagagaacggttcggatatcgttgcggccttgga

SEQ ID NO: 138620 - DNA, 30 bp, Homo sapiens; identical to SEQ ID NO: 61163
  chr1:168107375-168107405
  hypo

SEQ ID NO: 138621 - DNA, 46 bp, Homo sapiens; identical to SEQ ID NO: 61164
  chr1:168116115-168116161
  hypo

SEQ ID NO: 138622 - DNA, 241 bp, Homo sapiens; identical to SEQ ID NO: 15105
  chr1:168150754-168150995
  hypo

SEQ ID NO: 138623 - DNA, 37 bp, Homo sapiens; identical to SEQ ID NO: 15106
  chr1:168151294-168151331
  hypo

SEQ ID NO: 138624 - DNA, 33 bp, Homo sapiens; identical to SEQ ID NO: 15107
  chr1:168151563-168151596
  hypo

SEQ ID NO: 138625 - DNA, 142 bp, Homo sapiens
  chr1:168198887-168199029
  hypo
ggccaatcctactaccgctcttttcttcccacctgcagctagttcttttcgcaccttggcaaggtaagttctttggtttttgcatgactaggaagagtggtagcttctcattttattctgtccttggcgagagcttaaatgc

SEQ ID NO: 138626 - DNA, 390 bp, Homo sapiens
  chr1:168250291-168250681
  hypo
ttgggtaacggctctcggcaaagttcgagaagtgcctatggccatgagtgagctgggcactcggaagcccagcgatggcactgtttctcatctgctcaatgtggtggagagtgagcttcaggcagggagggaaaaaggcgaccctacggagaagcaacttcagatcatcctggaggatgcacctctctggcagagattcaaggaagtcactaatgagatgattgtgaccaagaatggcaggtgagtttatctgccgccccgcgtgggctggcagggcttggcaggagagatgagaccccttgaatattgaagaggctgccgctcttcactcagaggcggcgggatctgattaaacatgcttacaggaacgactgtctccaatggctttcc

SEQ ID NO: 138627 - DNA, 187 bp, Homo sapiens; identical to SEQ ID NO: 61168
  chr1:168260493-168260680
  hypo

SEQ ID NO: 138628 - DNA, 234 bp, Homo sapiens; identical to SEQ ID NO: 61169
  chr1:168399586-168399820
  hypo

SEQ ID NO: 138629 - DNA, 45 bp, Homo sapiens
  chr1:168445203-168445248
  hypo
agattctgtcactgcacttcagcaacagagcgagggcaacagagc

SEQ ID NO: 138630 - DNA, 29 bp, Homo sapiens
  chr1:168538956-168538985
  hypo
ccttttctggacggacgcgttggctcacg

SEQ ID NO: 138631 - DNA, 32 bp, Homo sapiens; identical to SEQ ID NO: 61170
  chr1:168698960-168698992
  hypo

SEQ ID NO: 138632 - DNA, 27 bp, Homo sapiens
  chr1:168847750-168847777
  hypo
tggatttggccaggcacggtggttcat

SEQ ID NO: 138633 - DNA, 90 bp, Homo sapiens
  chr1:168878539-168878629
  hypo
aatgtacagtggagtggtattcgagaagttttgcaaaggagaggagagccttgaggatacgaagcagagtggccagccatcaaaagttga

SEQ ID NO: 138634 - DNA, 127 bp, Homo sapiens; identical to SEQ ID NO: 61173
  chr1:168882769-168882896
  hypo

SEQ ID NO: 138635 - DNA, 30 bp, Homo sapiens
  chr1:169075793-169075823
  hypo
gcccaccaataggtgcggggctcggagccg

SEQ ID NO: 138636 - DNA, 333 bp, Homo sapiens; identical to SEQ ID NO: 104564
  chr1:169076041-169076374
  hypo

SEQ ID NO: 138637 - DNA, 60 bp, Homo sapiens
  chr1:169096469-169096529
  hypo
agtgaaccgaaagaacgaggagactttaatcatgaacgaggagagcgaaaggtctgcaga

SEQ ID NO: 138638 - DNA, 30 bp, Homo sapiens; identical to SEQ ID NO: 61175
  chr1:169342757-169342787
  hypo

SEQ ID NO: 138639 - DNA, 30 bp, Homo sapiens
  chr1:169349795-169349825
  hypo
atctcctaagtgaacgggaacagtttcgtc

SEQ ID NO: 138640 - DNA, 42 bp, Homo sapiens; identical to SEQ ID NO: 61176
  chr1:169355661-169355703
  hypo

SEQ ID NO: 138641 - DNA, 102 bp, Homo sapiens
  chr1:169457177-169457279
  hypo
gagtactcgtctcaaaaaacaaaacaacaataacaaaaacagctttccatcccttccctgaggcttgggtacctgaaccacgttaatctgtaaatcactgct

SEQ ID NO: 138642 - DNA, 89 bp, Homo sapiens; identical to SEQ ID NO: 61178
  chr1:169575558-169575647
  hypo

SEQ ID NO: 138643 - DNA, 184 bp, Homo sapiens; identical to SEQ ID NO: 61179
  chr1:169838010-169838194
  hypo

SEQ ID NO: 138644 - DNA, 79 bp, Homo sapiens; identical to SEQ ID NO: 61180
  chr1:169850179-169850258
  hypo

SEQ ID NO: 138645 - DNA, 91 bp, Homo sapiens; identical to SEQ ID NO: 61181
  chr1:170064327-170064418
  hypo

SEQ ID NO: 138646 - DNA, 28 bp, Homo sapiens
  chr1:170185283-170185311
  hypo
ctgggattacaggcgtgagctaccgcgc

SEQ ID NO: 138647 - DNA, 31 bp, Homo sapiens; identical to SEQ ID NO: 15112
  chr1:170521417-170521448
  hypo

SEQ ID NO: 138648 - DNA, 121 bp, Homo sapiens
  chr1:171452991-171453112
  hypo
cgcgcccggccatacgtgtcagtcttatgaccttggttaatgtaatttcatctgattgctgaagttgttctccattgctcaagacagatgatttggctgggcgtggtggctcatgccggta

SEQ ID NO: 138649 - DNA, 30 bp, Homo sapiens
  chr1:171501743-171501773
  hypo
ttagggaaagggagcgagaaaaagaacggg

SEQ ID NO: 138650 - DNA, 33 bp, Homo sapiens
  chr1:171519334-171519367
  hypo
ttacaggatgaagaacgccgaaagaaggaagaa

SEQ ID NO: 138651 - DNA, 30 bp, Homo sapiens
  chr1:171535462-171535492
  hypo
ttgttcctgtgctttcggaaaaatctgctg

SEQ ID NO: 138652 - DNA, 91 bp, Homo sapiens; identical to SEQ ID NO: 61184
  chr1:171554193-171554284
  hypo

SEQ ID NO: 138653 - DNA, 277 bp, Homo sapiens; identical to SEQ ID NO: 15113
  chr1:171554920-171555197
  hypo

SEQ ID NO: 138654 - DNA, 31 bp, Homo sapiens; identical to SEQ ID NO: 61186
  chr1:171563323-171563354
  hypo

SEQ ID NO: 138655 - DNA, 200 bp, Homo sapiens; identical to SEQ ID NO: 61187
  chr1:171570072-171570272
  hypo

SEQ ID NO: 138656 - DNA, 41 bp, Homo sapiens; identical to SEQ ID NO: 61188
  chr1:171625524-171625565
  hypo

SEQ ID NO: 138657 - DNA, 30 bp, Homo sapiens; identical to SEQ ID NO: 61189
  chr1:171639841-171639871
  hypo

SEQ ID NO: 138658 - DNA, 42 bp, Homo sapiens; identical to SEQ ID NO: 61190
  chr1:171640196-171640238
  hypo

SEQ ID NO: 138659 - DNA, 209 bp, Homo sapiens
  chr1:171707341-171707550
  hypo
gctcaagctattctgcttcagcgtcccaagtgcggcgattgcaggcatgagcaaccacgcccggatggtttttcttctattattcacaaagggaatgaaaacatattttgaatcttttgtttttaaagcttaagattccgaacttaccctttcacttttcacagaacctgtgacatcatcatcattgaggtggcgcttaaacttgggag

SEQ ID NO: 138660 - DNA, 20 bp, Homo sapiens
  chr1:171730071-171730091
  hypo
cccggcgcagaagaagactt

SEQ ID NO: 138661 - DNA, 30 bp, Homo sapiens; identical to SEQ ID NO: 61193
  chr1:171753402-171753432
  hypo

SEQ ID NO: 138662 - DNA, 202 bp, Homo sapiens; identical to SEQ ID NO: 950
  chr1:171810194-171810396
  hypo

SEQ ID NO: 138663 - DNA, 773 bp, Homo sapiens; identical to SEQ ID NO: 951
  chr1:171810513-171811286
  hypo

SEQ ID NO: 138664 - DNA, 459 bp, Homo sapiens; identical to SEQ ID NO: 104596
  chr1:171811320-171811779
  hypo

SEQ ID NO: 138665 - DNA, 18 bp, Homo sapiens
  chr1:172024989-172025007
  hypo
aaataggaacagcttcgg

SEQ ID NO: 138666 - DNA, 440 bp, Homo sapiens
  chr1:172357766-172358206
  hypo
cgcaaggcccacatccggccgaggaccagctcctgccattccctctcctggcccccactctggggctcctccagtcccattccgtccaggcccattacctcctttccccagcagcagtgactccttcggagcccctccacaagttccatctaggcctacgagggccccgcccagtgtcccaaggtaaggcatggagcagaaattgggggggtagtgcgccttggttctcttctcatagaatgacagacaaaatttatttgaaagagaaaattgcaaagatcttatcgtacgtgtttgcagttttcacaatgaacagagactataggaaaattgccaaccctgttatgccatttaaaaatcacttgtgatcattgaaatttctcatttatcaattggcacagactaaataggactaaagaacactccgtcccaatgaatga

SEQ ID NO: 138667 - DNA, 30 bp, Homo sapiens
  chr1:172422190-172422220
  hypo
cgtctcaaatgtttgcgtcgcctttaaagt

SEQ ID NO: 138668 - DNA, 18 bp, Homo sapiens
  chr1:172448841-172448859
  hypo
cttttttaaaaactgcac

SEQ ID NO: 138669 - DNA, 78 bp, Homo sapiens; identical to SEQ ID NO: 15120
  chr1:172449158-172449236
  hypo

SEQ ID NO: 138670 - DNA, 30 bp, Homo sapiens; identical to SEQ ID NO: 61199
  chr1:172717473-172717503
  hypo

SEQ ID NO: 138671 - DNA, 17 bp, Homo sapiens
  chr1:172902935-172902952
  hypo
ctctatctcaaaaaaaa

SEQ ID NO: 138672 - DNA, 30 bp, Homo sapiens; identical to SEQ ID NO: 61201
  chr1:173389051-173389081
  hypo

SEQ ID NO: 138673 - DNA, 36 bp, Homo sapiens; identical to SEQ ID NO: 15122
  chr1:173714248-173714284
  hypo

SEQ ID NO: 138674 - DNA, 37 bp, Homo sapiens; identical to SEQ ID NO: 15123
  chr1:173795056-173795093
  hypo

SEQ ID NO: 138675 - DNA, 28 bp, Homo sapiens
  chr1:173897635-173897663
  hypo
ccgtctcgaggaaaaaaaaaaaaaagta

SEQ ID NO: 138676 - DNA, 21 bp, Homo sapiens
  chr1:173910795-173910816
  hypo
aggcatggcggctcacgcctg

SEQ ID NO: 138677 - DNA, 30 bp, Homo sapiens
  chr1:173934051-173934081
  hypo
gggtctgtccctcgcggaataagctgtgtt

SEQ ID NO: 138678 - DNA, 31 bp, Homo sapiens; identical to SEQ ID NO: 957
  chr1:173991621-173991652
  hypo

SEQ ID NO: 138679 - DNA, 100 bp, Homo sapiens; identical to SEQ ID NO: 61206
  chr1:173993030-173993130
  hypo

SEQ ID NO: 138680 - DNA, 37 bp, Homo sapiens; identical to SEQ ID NO: 61207
  chr1:174048025-174048062
  hypo

SEQ ID NO: 138681 - DNA, 80 bp, Homo sapiens; identical to SEQ ID NO: 15125
  chr1:174166675-174166755
  hypo

SEQ ID NO: 138682 - DNA, 20 bp, Homo sapiens
  chr1:174166934-174166954
  hypo
tctaaaaaaaaaaaatctgt

SEQ ID NO: 138683 - DNA, 18 bp, Homo sapiens
  chr1:174208407-174208425
  hypo
attcggccatcttggctc

SEQ ID NO: 138684 - DNA, 30 bp, Homo sapiens
  chr1:174459919-174459949
  hypo
agtcacggtttttcccgttcttccctcctc

SEQ ID NO: 138685 - DNA, 51 bp, Homo sapiens
  chr1:174634544-174634595
  hypo
cctttcttgtctgcctcgcctcgccccgccccgccccgccccgcctcgcct

SEQ ID NO: 138686 - DNA, 31 bp, Homo sapiens; identical to SEQ ID NO: 61211
  chr1:174903583-174903614
  hypo

SEQ ID NO: 138687 - DNA, 30 bp, Homo sapiens
  chr1:174984448-174984478
  hypo
atcttacgatttgggcgaatataaatagtg

SEQ ID NO: 138688 - DNA, 30 bp, Homo sapiens; identical to SEQ ID NO: 61212
  chr1:175014360-175014390
  hypo

SEQ ID NO: 138689 - DNA, 149 bp, Homo sapiens
  chr1:175014790-175014939
  hypo
cgaggctccgggctcgggacagcggggtggcgcccgggcggcgcgggtagcccgacatcgccgcgggcccggcggggcaggacctgcctagcccggcagcggcggctccatggcccgggctccgccagtgccgcggccagtgtagccgc

SEQ ID NO: 138690 - DNA, 375 bp, Homo sapiens; identical to SEQ ID NO: 36532
  chr1:175048455-175048830
  hypo

SEQ ID NO: 138691 - DNA, 30 bp, Homo sapiens; identical to SEQ ID NO: 959
  chr1:175091630-175091660
  hypo

SEQ ID NO: 138692 - DNA, 30 bp, Homo sapiens; identical to SEQ ID NO: 61216
  chr1:175331827-175331857
  hypo

SEQ ID NO: 138693 - DNA, 366 bp, Homo sapiens; identical to SEQ ID NO: 61217
  chr1:175355011-175355377
  hypo

SEQ ID NO: 138694 - DNA, 260 bp, Homo sapiens; identical to SEQ ID NO: 15129
  chr1:175365709-175365969
  hypo

SEQ ID NO: 138695 - DNA, 29 bp, Homo sapiens
  chr1:175371143-175371172
  hypo
gcataaaaaagggaatcaggccgggcgcg

SEQ ID NO: 138696 - DNA, 445 bp, Homo sapiens; identical to SEQ ID NO: 15130
  chr1:175372293-175372738
  hypo

SEQ ID NO: 138697 - DNA, 420 bp, Homo sapiens
  chr1:175375033-175375453
  hypo
gttgctgtgctgaaccgatgaaccattacctgactcatccccccaaaatcaggttaatgtatttcaaactggctatgcagtgtagaaaatccctgaactgaatccctcggggaagaactgcatttagatcttagagacatattaaccggcagctacagactaggacacttttttcctttgaccgtgtgaagagatgccggggttttgctgggagtgcgttttcgctggaagtgcattggtccttcttgttcactctccctctctgctcagccctctccttcccctcctgagaccacgctgcgagctcccggactctacctgtggcagcactttcttggcagcagttggcgttgcactggtctcgcagcaccgacacctccctctccagcatctcgatccggctcagcagctcctgcagca

SEQ ID NO: 138698 - DNA, 235 bp, Homo sapiens
  chr1:175384411-175384646
  hypo
tgtcagtggaggcagcgctgggctgctgggagaactcggagccagctcctctccatcagcgctgggcctttattgggcctgtcagatttctgaaaagaacccgagggcagaaaactcccagcagacaggactccatggctggcccagagctgtcaacaaggacatggaatggtgtgggaggatgtgctgggccagcctgggtgctgcctcccactaggcgcggctgcccaacgcc

SEQ ID NO: 138699 - DNA, 37 bp, Homo sapiens; identical to SEQ ID NO: 61222
  chr1:175385844-175385881
  hypo

SEQ ID NO: 138700 - DNA, 147 bp, Homo sapiens; identical to SEQ ID NO: 15132
  chr1:175957579-175957726
  hypo

SEQ ID NO: 138701 - DNA, 38 bp, Homo sapiens; identical to SEQ ID NO: 61224
  chr1:176694917-176694955
  hypo

SEQ ID NO: 138702 - DNA, 38 bp, Homo sapiens; identical to SEQ ID NO: 61225
  chr1:176695194-176695232
  hypo

SEQ ID NO: 138703 - DNA, 39 bp, Homo sapiens; identical to SEQ ID NO: 15133
  chr1:178007138-178007177
  hypo

SEQ ID NO: 138704 - DNA, 1428 bp, Homo sapiens; identical to SEQ ID NO: 104632
  chr1:178062415-178063843
  hypo

SEQ ID NO: 138705 - DNA, 45 bp, Homo sapiens; identical to SEQ ID NO: 61228
  chr1:178099910-178099955
  hypo

SEQ ID NO: 138706 - DNA, 21 bp, Homo sapiens
  chr1:178197698-178197719
  hypo
agactccgtcccggggaaacg

SEQ ID NO: 138707 - DNA, 31 bp, Homo sapiens; identical to SEQ ID NO: 15135
  chr1:178228197-178228228
  hypo

SEQ ID NO: 138708 - DNA, 31 bp, Homo sapiens; identical to SEQ ID NO: 61231
  chr1:178228553-178228584
  hypo

SEQ ID NO: 138709 - DNA, 151 bp, Homo sapiens; identical to SEQ ID NO: 15136
  chr1:178271748-178271899
  hypo

SEQ ID NO: 138710 - DNA, 83 bp, Homo sapiens
  chr1:178362728-178362811
  hypo
agaccagtactggtccatggccctggggttgaggacccctgatctataggagagtttcttccttctttcgctctcattccata

SEQ ID NO: 138711 - DNA, 40 bp, Homo sapiens; identical to SEQ ID NO: 61233
  chr1:178465303-178465343
  hypo

SEQ ID NO: 138712 - DNA, 132 bp, Homo sapiens
  chr1:178469644-178469776
  hypo
gcattcccaatgtgggagctgcgtttcccacagtgcttttgctaaagttgtgtgccgtggccgcagtacccctgccaaccatcggagcaggcacagtggaaacagccctgcggccagcttgagagattttct

SEQ ID NO: 138713 - DNA, 30 bp, Homo sapiens
  chr1:178481792-178481822
  hypo
caggttaagtgagacggtgcatgcacgttg

SEQ ID NO: 138714 - DNA, 30 bp, Homo sapiens; identical to SEQ ID NO: 61234
  chr1:178482117-178482147
  hypo

SEQ ID NO: 138715 - DNA, 30 bp, Homo sapiens; identical to SEQ ID NO: 61235
  chr1:178507381-178507411
  hypo

SEQ ID NO: 138716 - DNA, 81 bp, Homo sapiens
  chr1:178512278-178512359
  hypo
agcctcctcttctcccgccgggtgcctggtggcttggcctcccctccagagcttcgcatatcctggcgggagccggcgctc

SEQ ID NO: 138717 - DNA, 23 bp, Homo sapiens
  chr1:178513388-178513411
  hypo
gcgcctggcctgttttgttttcc

SEQ ID NO: 138718 - DNA, 126 bp, Homo sapiens
  chr1:178514075-178514201
  hypo
cagaatcatggcaagcgagaaactgtcgttcataagagttcaagaaaatgaatattctctcaactctgtgagggccagtgggttccaggcgagatgagacaacttggtgagcgtcgtaactgagct

SEQ ID NO: 138719 - DNA, 30 bp, Homo sapiens
  chr1:178514810-178514840
  hypo
gcaagcccagctgcacggttccagctcttt

SEQ ID NO: 138720 - DNA, 207 bp, Homo sapiens; identical to SEQ ID NO: 61237
  chr1:178531643-178531850
  hypo

SEQ ID NO: 138721 - DNA, 21 bp, Homo sapiens
  chr1:178665799-178665820
  hypo
gacagagccagactccatctc

SEQ ID NO: 138722 - DNA, 213 bp, Homo sapiens; identical to SEQ ID NO: 104635
  chr1:178693953-178694166
  hypo

SEQ ID NO: 138723 - DNA, 31 bp, Homo sapiens; identical to SEQ ID NO: 966
  chr1:178694819-178694850
  hypo

SEQ ID NO: 138724 - DNA, 42 bp, Homo sapiens; identical to SEQ ID NO: 61240
  chr1:178828801-178828843
  hypo

SEQ ID NO: 138725 - DNA, 42 bp, Homo sapiens; identical to SEQ ID NO: 61241
  chr1:178829082-178829124
  hypo

SEQ ID NO: 138726 - DNA, 230 bp, Homo sapiens
  chr1:178928476-178928706
  hypo
tgagccaaataaggtcacagtcgcaggatcaacagcgcttcccagtctgcctccacccgctgttatgggacgcccacgtcaataccccattatcctcagagtcctcggggttgtgtcaatgcatgtcgggacagtactgtggtgcctgccccacccctgctgtgcctcctcccattccctgcaaagttgtctaccaccgagcccagggagggacacgggggcactgtggg

SEQ ID NO: 138727 - DNA, 30 bp, Homo sapiens
  chr1:178981716-178981746
  hypo
aagtatgaactgggacgaggtgctggaaat

SEQ ID NO: 138728 - DNA, 84 bp, Homo sapiens; identical to SEQ ID NO: 15140
  chr1:178988891-178988975
  hypo

SEQ ID NO: 138729 - DNA, 161 bp, Homo sapiens
  chr1:178994187-178994348
  hypo
aggcacactaagtttgcgctttagtatatggtgaataaatggatggacacagtggcggctctgtataagtcagctgaaagcaaacaaagggaaggcagaatctttcattcacacgatttatccgcgcccactgggtgcactacggtcgggcattggcgacc

SEQ ID NO: 138730 - DNA, 31 bp, Homo sapiens; identical to SEQ ID NO: 967
  chr1:178995254-178995285
  hypo

SEQ ID NO: 138731 - DNA, 35 bp, Homo sapiens; identical to SEQ ID NO: 15143
  chr1:179046570-179046605
  hypo

SEQ ID NO: 138732 - DNA, 30 bp, Homo sapiens; identical to SEQ ID NO: 61247
  chr1:179053282-179053312
  hypo

SEQ ID NO: 138733 - DNA, 30 bp, Homo sapiens; identical to SEQ ID NO: 15144
  chr1:179100485-179100515
  hypo

SEQ ID NO: 138734 - DNA, 30 bp, Homo sapiens
  chr1:179103583-179103613
  hypo
agcctgcttgggaaccgggatggcgtttgc

SEQ ID NO: 138735 - DNA, 25 bp, Homo sapiens
  chr1:179103860-179103885
  hypo
ctccctctccacggtcgccctctcc

SEQ ID NO: 138736 - DNA, 44 bp, Homo sapiens; identical to SEQ ID NO: 15145
  chr1:179229271-179229315
  hypo

SEQ ID NO: 138737 - DNA, 20 bp, Homo sapiens
  chr1:179245327-179245347
  hypo
ctttttttttttttgagatg

SEQ ID NO: 138738 - DNA, 36 bp, Homo sapiens
  chr1:179262288-179262324
  hypo
gggattacaggcgtgagccaccgcacctggcctcaa

SEQ ID NO: 138739 - DNA, 98 bp, Homo sapiens; identical to SEQ ID NO: 61250
  chr1:179333922-179334020
  hypo

SEQ ID NO: 138740 - DNA, 696 bp, Homo sapiens; identical to SEQ ID NO: 104645
  chr1:179544699-179545395
  hypo

SEQ ID NO: 138741 - DNA, 269 bp, Homo sapiens; identical to SEQ ID NO: 61252
  chr1:179557860-179558129
  hypo

SEQ ID NO: 138742 - DNA, 26 bp, Homo sapiens
  chr1:179704905-179704931
  hypo
gggataacaggcgtgagccaccgccc

SEQ ID NO: 138743 - DNA, 30 bp, Homo sapiens
  chr1:179774658-179774688
  hypo
aaactcccaaaactccgtctcaaaaaaaaa

SEQ ID NO: 138744 - DNA, 49 bp, Homo sapiens; identical to SEQ ID NO: 15147
  chr1:179782917-179782966
  hypo

SEQ ID NO: 138745 - DNA, 77 bp, Homo sapiens; identical to SEQ ID NO: 61254
  chr1:179835815-179835892
  hypo

SEQ ID NO: 138746 - DNA, 19 bp, Homo sapiens
  chr1:179868796-179868815
  hypo
tgagacagagtcttgctct

SEQ ID NO: 138747 - DNA, 19 bp, Homo sapiens
  chr1:179869054-179869073
  hypo
taggcgtgagccactgcac

SEQ ID NO: 138748 - DNA, 74 bp, Homo sapiens
  chr1:180039479-180039553
  hypo
ctgttagaatgcaggcgacaattatatcagctcggtgggcaacaaaaggtctcatttaacgtcacatggtctag

SEQ ID NO: 138749 - DNA, 22 bp, Homo sapiens
  chr1:180050297-180050319
  hypo
cggcccactgtactgctttttg

SEQ ID NO: 138750 - DNA, 30 bp, Homo sapiens
  chr1:180083852-180083882
  hypo
agtgcaattttgcaccgaacacttaagggt

SEQ ID NO: 138751 - DNA, 300 bp, Homo sapiens; identical to SEQ ID NO: 61258
  chr1:180097382-180097682
  hypo

SEQ ID NO: 138752 - DNA, 19 bp, Homo sapiens
  chr1:180099109-180099128
  hypo
tgatgaggccgggcacggt

SEQ ID NO: 138753 - DNA, 214 bp, Homo sapiens; identical to SEQ ID NO: 36560
  chr1:180123472-180123686
  hypo

SEQ ID NO: 138754 - DNA, 890 bp, Homo sapiens; identical to SEQ ID NO: 975
  chr1:180123700-180124590
  hypo

SEQ ID NO: 138755 - DNA, 292 bp, Homo sapiens
  chr1:180134708-180135000
  hypo
cttggtctgcagggccgacctctccaaacttgagagttctgtgccacatgatttggcccctgccactgccctctcacggcttgtgtgtcttcctctgtgcgcaccttggcttccagctggagcagcctccatgtgggtggaactttggtggatgctcacggggcacctgacctggaacctgagctcaggagagctgcctggtatatgagcttgtttcttctcagttcctgggctgtggcccagaatggtgccattattctctctgccaatgtttcagcggccagcagccttg

SEQ ID NO: 138756 - DNA, 217 bp, Homo sapiens; identical to SEQ ID NO: 61261
  chr1:180137305-180137522
  hypo

SEQ ID NO: 138757 - DNA, 209 bp, Homo sapiens
  chr1:180138777-180138986
  hypo
ccatctcactcctgggccacccgtggggctgctggtagctggtgtgtggctgctgctggactgtgtggcagtccatccatctgtcagcagccactgcgggcctacttgctgggtgcccagcaccgcactcaccactgcaggcgtggccaggagcgtgagatccccagagcccatggccagtgagaggcggccagggataggtacccagg

SEQ ID NO: 138758 - DNA, 501 bp, Homo sapiens; identical to SEQ ID NO: 104663
  chr1:180202648-180203149
  hypo

SEQ ID NO: 138759 - DNA, 97 bp, Homo sapiens; identical to SEQ ID NO: 61264
  chr1:180223402-180223499
  hypo

SEQ ID NO: 138760 - DNA, 297 bp, Homo sapiens
  chr1:180235626-180235923
  hypo
tgcatcatctgcaaccggcagctggccacgggggacgaattctacctcatggaggacgggcggctggtgtgcaaggaagactacgagacagccaagcagaacggtaagcagcatggccccgcatggtcccctctccaggcctttgtttgggccacgccctctgcctgaggtgcccttctcatggcgtcccacctgcccatccctcagagccctactcatgcaccgccacctctgagaagcgtcccagatctccacactgagagtaaatgctgaacacctccccggccgttagcactc

SEQ ID NO: 138761 - DNA, 18 bp, Homo sapiens
  chr1:180265586-180265604
  hypo
cagagtttcactctgtcg

SEQ ID NO: 138762 - DNA, 35 bp, Homo sapiens; identical to SEQ ID NO: 61266
  chr1:180302702-180302737
  hypo

SEQ ID NO: 138763 - DNA, 30 bp, Homo sapiens
  chr1:180320692-180320722
  hypo
tcactgtgcctggcccgatattacgttttt

SEQ ID NO: 138764 - DNA, 137 bp, Homo sapiens
  chr1:180404661-180404798
  hypo
aggcatgagcgaccatgcccagcctggatgaattttgagactgcaaagtcccgagtaacccagagcaactttgcagttggctacaagacttatgaattccagcttcacactaatatgaatgacgggacagagtttgg

SEQ ID NO: 138765 - DNA, 97 bp, Homo sapiens; identical to SEQ ID NO: 15154
  chr1:180477769-180477866
  hypo

SEQ ID NO: 138766 - DNA, 96 bp, Homo sapiens
  chr1:180478105-180478201
  hypo
aagggctgaggagcccgcaggcacgcagcgctggactggttgaacagctccgcccgctgccctggcacgggatccaccaggcgaagctggctgacc

SEQ ID NO: 138767 - DNA, 121 bp, Homo sapiens; identical to SEQ ID NO: 61269
  chr1:180497353-180497474
  hypo

SEQ ID NO: 138768 - DNA, 102 bp, Homo sapiens; identical to SEQ ID NO: 61270
  chr1:180497653-180497755
  hypo

SEQ ID NO: 138769 - DNA, 31 bp, Homo sapiens; identical to SEQ ID NO: 979
  chr1:180606644-180606675
  hypo

SEQ ID NO: 138770 - DNA, 30 bp, Homo sapiens
  chr1:180615228-180615258
  hypo
ctggattccataccacggttcccattaatg

SEQ ID NO: 138771 - DNA, 30 bp, Homo sapiens; identical to SEQ ID NO: 15157
  chr1:180805729-180805759
  hypo

SEQ ID NO: 138772 - DNA, 539 bp, Homo sapiens; identical to SEQ ID NO: 104674
  chr1:180881295-180881834
  hypo

SEQ ID NO: 138773 - DNA, 678 bp, Homo sapiens; identical to SEQ ID NO: 104675
  chr1:180881864-180882542
  hypo

SEQ ID NO: 138774 - DNA, 95 bp, Homo sapiens; identical to SEQ ID NO: 15159
  chr1:180885146-180885241
  hypo

SEQ ID NO: 138775 - DNA, 179 bp, Homo sapiens; identical to SEQ ID NO: 61275
  chr1:180888524-180888703
  hypo

SEQ ID NO: 138776 - DNA, 42 bp, Homo sapiens; identical to SEQ ID NO: 15160
  chr1:180891950-180891992
  hypo

SEQ ID NO: 138777 - DNA, 102 bp, Homo sapiens; identical to SEQ ID NO: 15161
  chr1:180892051-180892153
  hypo

SEQ ID NO: 138778 - DNA, 127 bp, Homo sapiens; identical to SEQ ID NO: 61278
  chr1:180896511-180896638
  hypo

SEQ ID NO: 138779 - DNA, 30 bp, Homo sapiens
  chr1:180901408-180901438
  hypo
tagcctacatctctcggctacaaatccctc

SEQ ID NO: 138780 - DNA, 347 bp, Homo sapiens
  chr1:180917325-180917672
  hypo
gagtgctggggcctccgtgtcccaggccatcctccaacagcagagggtcgcttcttccaggctccaaggggctgtgaggagggctggcttgcgccccgcactgaaccggcaggatgctggtattaacttgctggctttcacatccgactctatatgagcctgtgagaacagcaggctttgccttctgcttctaattggatacaacatagagatcacacatcctcaacaaaggccatttccagcagacaataaatgcctatgacagcaggctgtcatatttgtgtcacgaatttcagttgcgaaacctacccgagtctccccaaaatggcaggcgtgacgtcagtgtc

SEQ ID NO: 138781 - DNA, 297 bp, Homo sapiens; identical to SEQ ID NO: 61279
  chr1:180918318-180918615
  hypo

SEQ ID NO: 138782 - DNA, 231 bp, Homo sapiens
  chr1:180919548-180919779
  hypo
gatcctcgaggtgaacggggccaaggtggcagggctgggcttggctcacattaaggagctcctggcccactcagagagcttgtcaatccgtgtcctgaggcagagacctgtcccacggtgacccagaagtgccgctgccctcactgtcacggcctcggaagccctgaagcactcagggtggttggcaggaacgtgctgcacagagctgctctgtggcggaaacagatcctg

SEQ ID NO: 138783 - DNA, 30 bp, Homo sapiens; identical to SEQ ID NO: 61281
  chr1:180920422-180920452
  hypo

SEQ ID NO: 138784 - DNA, 30 bp, Homo sapiens
  chr1:180921857-180921887
  hypo
ggggcacgaggcacgcgggacactggaggc

SEQ ID NO: 138785 - DNA, 203 bp, Homo sapiens; identical to SEQ ID NO: 61282
  chr1:180925238-180925441
  hypo

SEQ ID NO: 138786 - DNA, 221 bp, Homo sapiens
  chr1:180945760-180945981
  hypo
atggcacaccattggcgccgatctggaaggcaggacatggggattagctctcacagggactccacattccccaagatacagttatatggaatttatggcaccctttgaagcagaaaaggggcagaacgtgcaaatgacggggccatgatcttacacctgcctaggtgcctgatgctctaatgctgctctgttcttggcctgcacttcgcatgcagtcacaa

SEQ ID NO: 138787 - DNA, 30 bp, Homo sapiens; identical to SEQ ID NO: 61284
  chr1:180957389-180957419
  hypo

SEQ ID NO: 138788 - DNA, 28 bp, Homo sapiens
  chr1:181013387-181013415
  hypo
tgcgcccggcctgatcttttttcttaac

SEQ ID NO: 138789 - DNA, 30 bp, Homo sapiens
  chr1:181020900-181020930
  hypo
gtacacaaggcaattcggagccaaaactga

SEQ ID NO: 138790 - DNA, 30 bp, Homo sapiens
  chr1:181057519-181057549
  hypo
ttcgaatattttgttcgctttggttccggc

SEQ ID NO: 138791 - DNA, 152 bp, Homo sapiens; identical to SEQ ID NO: 15164
  chr1:181066371-181066523
  hypo

SEQ ID NO: 138792 - DNA, 66 bp, Homo sapiens; identical to SEQ ID NO: 61287
  chr1:181111088-181111154
  hypo

SEQ ID NO: 138793 - DNA, 30 bp, Homo sapiens; identical to SEQ ID NO: 61288
  chr1:181382276-181382306
  hypo

SEQ ID NO: 138794 - DNA, 230 bp, Homo sapiens; identical to SEQ ID NO: 61289
  chr1:181382624-181382854
  hypo

SEQ ID NO: 138795 - DNA, 30 bp, Homo sapiens; identical to SEQ ID NO: 61290
  chr1:181518952-181518982
  hypo

SEQ ID NO: 138796 - DNA, 30 bp, Homo sapiens
  chr1:181565547-181565577
  hypo
cccctccacctgcgtcggacttgtgcagcc

SEQ ID NO: 138797 - DNA, 30 bp, Homo sapiens
  chr1:181616063-181616093
  hypo
gtgggctgccgcccccgaactgctttctct

SEQ ID NO: 138798 - DNA, 30 bp, Homo sapiens
  chr1:181697630-181697660
  hypo
cgggtgtgtgtgccccgctcagctgtgtac

SEQ ID NO: 138799 - DNA, 163 bp, Homo sapiens; identical to SEQ ID NO: 15165
  chr1:181765802-181765965
  hypo

SEQ ID NO: 138800 - DNA, 365 bp, Homo sapiens
  chr1:181767548-181767913
  hypo
ccctgattcgacacgcgggcagcatctctccacctgctgatggaagcgaggagggctccccgctgacctcccaagctctggagagcaacaatgcttgcctgaccgagtcttccaactctccgcacccccagcagagccaacatgcctccccacagcgctacatctccgagccctacttggccctgcacgaagactcccacgcctcagactgtggtgaggaggagacgctcactttcgaagcagccgtggctactagcctgggccgttccaacaccatcggctcagccccacccctgcggcatagctggcagatgcccaacgggcactatcggcggcggaggcgcggggggcctgggccaggcatg

SEQ ID NO: 138801 - DNA, 105 bp, Homo sapiens; identical to SEQ ID NO: 61293
  chr1:181979313-181979418
  hypo

SEQ ID NO: 138802 - DNA, 41 bp, Homo sapiens; identical to SEQ ID NO: 61294
  chr1:182148662-182148703
  hypo

SEQ ID NO: 138803 - DNA, 31 bp, Homo sapiens; identical to SEQ ID NO: 15167
  chr1:182183508-182183539
  hypo

SEQ ID NO: 138804 - DNA, 34 bp, Homo sapiens; identical to SEQ ID NO: 61296
  chr1:182230563-182230597
  hypo

SEQ ID NO: 138805 - DNA, 30 bp, Homo sapiens; identical to SEQ ID NO: 61297
  chr1:182270926-182270956
  hypo

SEQ ID NO: 138806 - DNA, 31 bp, Homo sapiens; identical to SEQ ID NO: 15168
  chr1:182292205-182292236
  hypo

SEQ ID NO: 138807 - DNA, 30 bp, Homo sapiens; identical to SEQ ID NO: 61299
  chr1:182354897-182354927
  hypo

SEQ ID NO: 138808 - DNA, 235 bp, Homo sapiens; identical to SEQ ID NO: 104689
  chr1:182359461-182359696
  hypo

SEQ ID NO: 138809 - DNA, 151 bp, Homo sapiens; identical to SEQ ID NO: 104690
  chr1:182359742-182359893
  hypo

SEQ ID NO: 138810 - DNA, 207 bp, Homo sapiens; identical to SEQ ID NO: 104693
  chr1:182361364-182361571
  hypo

SEQ ID NO: 138811 - DNA, 30 bp, Homo sapiens; identical to SEQ ID NO: 61300
  chr1:182575627-182575657
  hypo

SEQ ID NO: 138812 - DNA, 557 bp, Homo sapiens; identical to SEQ ID NO: 988
  chr1:182583782-182584339
  hypo

SEQ ID NO: 138813 - DNA, 271 bp, Homo sapiens; identical to SEQ ID NO: 104697
  chr1:182584403-182584674
  hypo

SEQ ID NO: 138814 - DNA, 70 bp, Homo sapiens; identical to SEQ ID NO: 61303
  chr1:182637877-182637947
  hypo

SEQ ID NO: 138815 - DNA, 30 bp, Homo sapiens; identical to SEQ ID NO: 61304
  chr1:182643143-182643173
  hypo

SEQ ID NO: 138816 - DNA, 40 bp, Homo sapiens; identical to SEQ ID NO: 15171
  chr1:182767635-182767675
  hypo

SEQ ID NO: 138817 - DNA, 32 bp, Homo sapiens
  chr1:182807578-182807610
  hypo
gccaggcagaatgcccgccttcactgagctta

SEQ ID NO: 138818 - DNA, 191 bp, Homo sapiens; identical to SEQ ID NO: 15172
  chr1:182827757-182827948
  hypo

SEQ ID NO: 138819 - DNA, 30 bp, Homo sapiens; identical to SEQ ID NO: 61307
  chr1:182835287-182835317
  hypo

SEQ ID NO: 138820 - DNA, 30 bp, Homo sapiens
  chr1:182835596-182835626
  hypo
gtttctgtggcagagcgagttgcatttgaa

SEQ ID NO: 138821 - DNA, 41 bp, Homo sapiens; identical to SEQ ID NO: 61308
  chr1:182856865-182856906
  hypo

SEQ ID NO: 138822 - DNA, 438 bp, Homo sapiens; identical to SEQ ID NO: 36589
  chr1:182992749-182993187
  hypo

SEQ ID NO: 138823 - DNA, 318 bp, Homo sapiens
  chr1:183129204-183129522
  hypo
tggctccgtcactgggcgtgtgcatgactgtacttccctctgccgcagacacctcagccaccgtctagccaggcaaacctgtttggtgtgctcactgcatgatgaaggcgggtgtggctcccagtgggagtgtcccgcctccagaacatggccagaggctacagaatcagacttttgccaaaggaagaaagagcgcctgaagcatgtgttcaccgggcaactatgaatggcttgactgggtggagccttcagtatctttttagttaagccttttagtctcaaaaatggaagaggcaaagctcaattcttaaagatcac

SEQ ID NO: 138824 - DNA, 43 bp, Homo sapiens
  chr1:183132280-183132323
  hypo
aaggtggcaggttcaatggatcgtaggctccagagggttgaga

SEQ ID NO: 138825 - DNA, 292 bp, Homo sapiens; identical to SEQ ID NO: 104705
  chr1:183155178-183155470
  hypo

SEQ ID NO: 138826 - DNA, 30 bp, Homo sapiens; identical to SEQ ID NO: 61311
  chr1:183196746-183196776
  hypo

SEQ ID NO: 138827 - DNA, 137 bp, Homo sapiens; identical to SEQ ID NO: 61312
  chr1:183338765-183338902
  hypo

SEQ ID NO: 138828 - DNA, 34 bp, Homo sapiens; identical to SEQ ID NO: 61313
  chr1:183443724-183443758
  hypo

SEQ ID NO: 138829 - DNA, 30 bp, Homo sapiens
  chr1:183462119-183462149
  hypo
ttagagacacgatctcgctctgttgcctag

SEQ ID NO: 138830 - DNA, 37 bp, Homo sapiens; identical to SEQ ID NO: 15177
  chr1:183462994-183463031
  hypo

SEQ ID NO: 138831 - DNA, 30 bp, Homo sapiens; identical to SEQ ID NO: 15178
  chr1:183486872-183486902
  hypo

SEQ ID NO: 138832 - DNA, 30 bp, Homo sapiens
  chr1:183497790-183497820
  hypo
agcccttgctgaagccgctctctaccctaa

SEQ ID NO: 138833 - DNA, 30 bp, Homo sapiens; identical to SEQ ID NO: 61316
  chr1:183503077-183503107
  hypo

SEQ ID NO: 138834 - DNA, 30 bp, Homo sapiens
  chr1:183547836-183547866
  hypo
gtgctgctggattggcgtggagctgactgg

SEQ ID NO: 138835 - DNA, 17 bp, Homo sapiens
  chr1:183550812-183550829
  hypo
tttttttttgagacaga

SEQ ID NO: 138836 - DNA, 137 bp, Homo sapiens; identical to SEQ ID NO: 61318
  chr1:183551068-183551205
  hypo

SEQ ID NO: 138837 - DNA, 175 bp, Homo sapiens; identical to SEQ ID NO: 61319
  chr1:183944150-183944325
  hypo

SEQ ID NO: 138838 - DNA, 1312 bp, Homo sapiens; identical to SEQ ID NO: 104718
  chr1:184005519-184006831
  hypo

SEQ ID NO: 138839 - DNA, 30 bp, Homo sapiens; identical to SEQ ID NO: 61321
  chr1:184195196-184195226
  hypo

SEQ ID NO: 138840 - DNA, 166 bp, Homo sapiens; identical to SEQ ID NO: 61322
  chr1:184333000-184333166
  hypo

SEQ ID NO: 138841 - DNA, 508 bp, Homo sapiens; identical to SEQ ID NO: 997
  chr1:184355380-184355888
  hypo

SEQ ID NO: 138842 - DNA, 279 bp, Homo sapiens; identical to SEQ ID NO: 998
  chr1:184355935-184356214
  hypo

SEQ ID NO: 138843 - DNA, 147 bp, Homo sapiens; identical to SEQ ID NO: 104723
  chr1:184356540-184356687
  hypo

SEQ ID NO: 138844 - DNA, 166 bp, Homo sapiens
  chr1:184442500-184442666
  hypo
cttacctctctctaagcgctgtggtttcaggaaggtaaacaatagagcatgtgaggttgggagagaaaagctgagcaaagcgaatgaaaaaatggaagctaaaaaaaaaaatgctggagtttacgtgaaggatagcataaactgaagggaacgtcttttgagcaga

SEQ ID NO: 138845 - DNA, 260 bp, Homo sapiens; identical to SEQ ID NO: 61327
  chr1:184448489-184448749
  hypo

SEQ ID NO: 138846 - DNA, 30 bp, Homo sapiens; identical to SEQ ID NO: 1000
  chr1:184464148-184464178
  hypo

SEQ ID NO: 138847 - DNA, 30 bp, Homo sapiens; identical to SEQ ID NO: 61329
  chr1:184467178-184467208
  hypo

SEQ ID NO: 138848 - DNA, 30 bp, Homo sapiens; identical to SEQ ID NO: 15185
  chr1:184591066-184591096
  hypo

SEQ ID NO: 138849 - DNA, 24 bp, Homo sapiens
  chr1:184608981-184609005
  hypo
aggggcttggccgggcgcagtggc

SEQ ID NO: 138850 - DNA, 40 bp, Homo sapiens; identical to SEQ ID NO: 61331
  chr1:184720864-184720904
  hypo

SEQ ID NO: 138851 - DNA, 40 bp, Homo sapiens; identical to SEQ ID NO: 15186
  chr1:184721203-184721243
  hypo

SEQ ID NO: 138852 - DNA, 245 bp, Homo sapiens; identical to SEQ ID NO: 1001
  chr1:184722804-184723049
  hypo

SEQ ID NO: 138853 - DNA, 30 bp, Homo sapiens
  chr1:184723263-184723293
  hypo
taaccatgcttcggtcgacaggcagccaac

SEQ ID NO: 138854 - DNA, 30 bp, Homo sapiens
  chr1:184723537-184723567
  hypo
actacgcgaccgggtcgcaatgacaggcac

SEQ ID NO: 138855 - DNA, 30 bp, Homo sapiens; identical to SEQ ID NO: 61334
  chr1:184725471-184725501
  hypo

SEQ ID NO: 138856 - DNA, 53 bp, Homo sapiens; identical to SEQ ID NO: 61335
  chr1:184764468-184764521
  hypo

SEQ ID NO: 138857 - DNA, 31 bp, Homo sapiens; identical to SEQ ID NO: 15188
  chr1:184774919-184774950
  hypo

SEQ ID NO: 138858 - DNA, 36 bp, Homo sapiens; identical to SEQ ID NO: 61337
  chr1:184934143-184934179
  hypo

SEQ ID NO: 138859 - DNA, 21 bp, Homo sapiens
  chr1:184970682-184970703
  hypo
aaataggaacagctccggtct

SEQ ID NO: 138860 - DNA, 30 bp, Homo sapiens; identical to SEQ ID NO: 15189
  chr1:185013774-185013804
  hypo

SEQ ID NO: 138861 - DNA, 30 bp, Homo sapiens; identical to SEQ ID NO: 61340
  chr1:185023726-185023756
  hypo

SEQ ID NO: 138862 - DNA, 40 bp, Homo sapiens; identical to SEQ ID NO: 15190
  chr1:185024835-185024875
  hypo

SEQ ID NO: 138863 - DNA, 30 bp, Homo sapiens
  chr1:185073875-185073905
  hypo
gacatgaattatccccgtgtccagcatatc

SEQ ID NO: 138864 - DNA, 25 bp, Homo sapiens
  chr1:185076315-185076340
  hypo
agcgagactccgtctcaaaaaaaaa

SEQ ID NO: 138865 - DNA, 30 bp, Homo sapiens; identical to SEQ ID NO: 61343
  chr1:185190053-185190083
  hypo

SEQ ID NO: 138866 - DNA, 25 bp, Homo sapiens
  chr1:185335933-185335958
  hypo
gttttttttttttttttgagacgaa

SEQ ID NO: 138867 - DNA, 84 bp, Homo sapiens; identical to SEQ ID NO: 15193
  chr1:185336197-185336281
  hypo

SEQ ID NO: 138868 - DNA, 31 bp, Homo sapiens; identical to SEQ ID NO: 61346
  chr1:185413916-185413947
  hypo

SEQ ID NO: 138869 - DNA, 30 bp, Homo sapiens; identical to SEQ ID NO: 1005
  chr1:185510393-185510423
  hypo

SEQ ID NO: 138870 - DNA, 168 bp, Homo sapiens
  chr1:185554767-185554935
  hypo
cttggaaatcccaagcgggcaccaatgacttactgactcactgactgtgccgtccttttcacccctatttttgagggttccattatgatcctttgtagttttcctcacatggggcaccacctgccagggtctgacccgcagacgtaggctgcacgatggaagaataac

SEQ ID NO: 138871 - DNA, 31 bp, Homo sapiens; identical to SEQ ID NO: 61349
  chr1:185630509-185630540
  hypo

SEQ ID NO: 138872 - DNA, 30 bp, Homo sapiens; identical to SEQ ID NO: 61350
  chr1:186340980-186341010
  hypo

SEQ ID NO: 138873 - DNA, 30 bp, Homo sapiens; identical to SEQ ID NO: 104741
  chr1:186344702-186344732
  hypo

SEQ ID NO: 138874 - DNA, 49 bp, Homo sapiens; identical to SEQ ID NO: 15195
  chr1:186344812-186344861
  hypo

SEQ ID NO: 138875 - DNA, 66 bp, Homo sapiens; identical to SEQ ID NO: 104742
  chr1:186344947-186345013
  hypo

SEQ ID NO: 138876 - DNA, 27 bp, Homo sapiens
  chr1:186428408-186428435
  hypo
tttaacaagctctaagcctgccgagtg

SEQ ID NO: 138877 - DNA, 27 bp, Homo sapiens
  chr1:186428554-186428581
  hypo
ggtgccgggattgcagacatacagata

SEQ ID NO: 138878 - DNA, 23 bp, Homo sapiens
  chr1:186571177-186571200
  hypo
agcctgggcgacaaagtgagact

SEQ ID NO: 138879 - DNA, 30 bp, Homo sapiens
  chr1:186621192-186621222
  hypo
aaattagggtggggccgctagcttccccgt

SEQ ID NO: 138880 - DNA, 30 bp, Homo sapiens; identical to SEQ ID NO: 61355
  chr1:186889143-186889173
  hypo

SEQ ID NO: 138881 - DNA, 30 bp, Homo sapiens
  chr1:186946004-186946034
  hypo
cagtcataaatcacccgtggaggctctgtt

SEQ ID NO: 138882 - DNA, 25 bp, Homo sapiens
  chr1:187265711-187265736
  hypo
tgagccatcgcgcccggcctctatt

SEQ ID NO: 138883 - DNA, 177 bp, Homo sapiens; identical to SEQ ID NO: 15196
  chr1:188612097-188612274
  hypo

SEQ ID NO: 138884 - DNA, 25 bp, Homo sapiens
  chr1:188943808-188943833
  hypo
gactattgggccgggcgcagtggct

SEQ ID NO: 138885 - DNA, 30 bp, Homo sapiens; identical to SEQ ID NO: 1009
  chr1:189649417-189649447
  hypo

SEQ ID NO: 138886 - DNA, 16 bp, Homo sapiens
  chr1:191673020-191673036
  hypo
gcgcccggccgatttc

SEQ ID NO: 138887 - DNA, 88 bp, Homo sapiens
  chr1:191980831-191980919
  hypo
tgttggccgggatggtctcgatctcctaactcgtgatcctcccgcccccgccggccttgcctgggtttacaggcgtgagccatcttgc

SEQ ID NO: 138888 - DNA, 30 bp, Homo sapiens; identical to SEQ ID NO: 15199
  chr1:192175260-192175290
  hypo

SEQ ID NO: 138889 - DNA, 30 bp, Homo sapiens; identical to SEQ ID NO: 15200
  chr1:192175529-192175559
  hypo

SEQ ID NO: 138890 - DNA, 35 bp, Homo sapiens; identical to SEQ ID NO: 15201
  chr1:192197324-192197359
  hypo

SEQ ID NO: 138891 - DNA, 26 bp, Homo sapiens
  chr1:192262608-192262634
  hypo
gcttgagccaccgcgcccggcctgct

SEQ ID NO: 138892 - DNA, 35 bp, Homo sapiens
  chr1:192469716-192469751
  hypo
aggagccaagatggccgaataggaacagctccggt

SEQ ID NO: 138893 - DNA, 30 bp, Homo sapiens; identical to SEQ ID NO: 15202
  chr1:193075625-193075655
  hypo

SEQ ID NO: 138894 - DNA, 418 bp, Homo sapiens
  chr1:193149420-193149838
  hypo
tttctaatgtagtttacggtggcgatacctgcctgccttttcttttgctgcgttggcacaggcattgtgcttattttgttgtaaatggttccagtattttatcagttcactaggctggaactgatgagaggtaattaggtggctgtatttacagctcgaataagagactcgccagtgattgaacacaaactcattgggagggggtacaggatcaattctcaacttggcaagacagatccctacatatacatcttccaagtgcaaacggcggatacctaaagaaactttaaaaatcttttctgccagatctccagaaaaaacataaccagttccagaacagaagacaggataacgctcacttgggtagaggtctggtggcatgtaccacttgctatctttgtttcgattgggtgcatat

SEQ ID NO: 138895 - DNA, 165 bp, Homo sapiens
  chr1:193377399-193377564
  hypo
caattctttgaacacctgaaaagaacaaaaaggcagaggaagattggatttgtgctctcctctgcctgtctgcttgaattggacgtcagtcttctgtcctcggtgctccttgttcttaagccttcaggctgggtccggagtctacatcatcggtcctctggctct

SEQ ID NO: 138896 - DNA, 30 bp, Homo sapiens; identical to SEQ ID NO: 61367
  chr1:194547596-194547626
  hypo

SEQ ID NO: 138897 - DNA, 34 bp, Homo sapiens; identical to SEQ ID NO: 61368
  chr1:195578616-195578650
  hypo

SEQ ID NO: 138898 - DNA, 335 bp, Homo sapiens
  chr1:195732353-195732688
  hypo
gagagagctggagcacgccccctacctctttggcctctgtggttgctggcgtctcactcaggtttttgggtgccactgtgttcccctcatccagaccctggtacttgcagcggaagccgcctgtggtacacctggtccagctgcagcctcgcaaggagctggtgccggtgccggttcctggagctgcatgccctgccgcagcagctggcgtgcctggctgtgtgcagtggccagaccccacgatcacttgctcacaaaccccttgccactctgtacctggctctgtgcctggcttgcctttggcagccgtgggatccagggtggtagcgtgagcc

SEQ ID NO: 138899 - DNA, 21 bp, Homo sapiens
  chr1:196117348-196117369
  hypo
ccaccgcgcccggccggcaat

SEQ ID NO: 138900 - DNA, 106 bp, Homo sapiens
  chr1:196902781-196902887
  hypo
ggctgaggccggagccggctccctcagcttgtggggaggtatggagtgagagccccggaaggagagacgtgggcgggaacccgggctgcgccgcggagcttgtggg

SEQ ID NO: 138901 - DNA, 30 bp, Homo sapiens
  chr1:197070320-197070350
  hypo
ttttgaatatcctttcgtactttaaagcct

SEQ ID NO: 138902 - DNA, 96 bp, Homo sapiens; identical to SEQ ID NO: 15204
  chr1:197091609-197091705
  hypo

SEQ ID NO: 138903 - DNA, 25 bp, Homo sapiens
  chr1:197100691-197100716
  hypo
tttttttttgagaaggagtctcgct

SEQ ID NO: 138904 - DNA, 30 bp, Homo sapiens
  chr1:197102583-197102613
  hypo
aaacggcatgctgcacgacgtagtctgttt

SEQ ID NO: 138905 - DNA, 31 bp, Homo sapiens; identical to SEQ ID NO: 61372
  chr1:197108436-197108467
  hypo

SEQ ID NO: 138906 - DNA, 33 bp, Homo sapiens; identical to SEQ ID NO: 15205
  chr1:197116741-197116774
  hypo

SEQ ID NO: 138907 - DNA, 170 bp, Homo sapiens
  chr1:197191296-197191466
  hypo
tgtgtcctgccggcccgctccttgttgccctgcactgcgcggccgcagcggcaccatgattgtgtttgccgtgctcctgtcgttggtggcgggtgtttgagggaacgagtttagttcttggtctgttattttcagaaatggaaattggcctataccgggagagtgaatcc

SEQ ID NO: 138908 - DNA, 39 bp, Homo sapiens; identical to SEQ ID NO: 15206
  chr1:197324918-197324957
  hypo

SEQ ID NO: 138909 - DNA, 40 bp, Homo sapiens; identical to SEQ ID NO: 15207
  chr1:197418768-197418808
  hypo

SEQ ID NO: 138910 - DNA, 93 bp, Homo sapiens; identical to SEQ ID NO: 61376
  chr1:197704759-197704852
  hypo

SEQ ID NO: 138911 - DNA, 165 bp, Homo sapiens; identical to SEQ ID NO: 1017
  chr1:197886901-197887066
  hypo

SEQ ID NO: 138912 - DNA, 310 bp, Homo sapiens; identical to SEQ ID NO: 36638
  chr1:197887146-197887456
  hypo

SEQ ID NO: 138913 - DNA, 81 bp, Homo sapiens; identical to SEQ ID NO: 15211
  chr1:198124718-198124799
  hypo

SEQ ID NO: 138914 - DNA, 54 bp, Homo sapiens
  chr1:198181323-198181377
  hypo
atgaacctcattggctgtaaccgatgagcaaacgaaaggtgtgctgtagccaca

SEQ ID NO: 138915 - DNA, 30 bp, Homo sapiens
  chr1:198259654-198259684
  hypo
tcagtgtcagtcagcgtgagtccttgtcca

SEQ ID NO: 138916 - DNA, 43 bp, Homo sapiens
  chr1:198326486-198326529
  hypo
tttactatagcagttggcacacggtaagaaggaaataagtttt

SEQ ID NO: 138917 - DNA, 182 bp, Homo sapiens
  chr1:198828045-198828227
  hypo
acagttcaacccaccgacagcaatgaatgttgattgtgaccttttaaaaaataatctctgcacagggaagagaaagtcctggtgtgtccacctttggtttcctgtcttcagcgaattctgagcaccatggagtagatgatggttagccatagggtacaatcaacggtcgatggttttgattt

SEQ ID NO: 138918 - DNA, 30 bp, Homo sapiens
  chr1:198918250-198918280
  hypo
gcctgggcggaggccgcggagttcgaccaa

SEQ ID NO: 138919 - DNA, 30 bp, Homo sapiens; identical to SEQ ID NO: 61381
  chr1:199206418-199206448
  hypo

SEQ ID NO: 138920 - DNA, 157 bp, Homo sapiens; identical to SEQ ID NO: 61382
  chr1:199636235-199636392
  hypo

SEQ ID NO: 138921 - DNA, 30 bp, Homo sapiens; identical to SEQ ID NO: 36643
  chr1:200007416-200007446
  hypo

SEQ ID NO: 138922 - DNA, 42 bp, Homo sapiens; identical to SEQ ID NO: 61384
  chr1:200027877-200027919
  hypo

SEQ ID NO: 138923 - DNA, 30 bp, Homo sapiens
  chr1:200054069-200054099
  hypo
tgccgcattgtgagccgtttgtaccggatc

SEQ ID NO: 138924 - DNA, 30 bp, Homo sapiens; identical to SEQ ID NO: 61385
  chr1:200117040-200117070
  hypo

SEQ ID NO: 138925 - DNA, 30 bp, Homo sapiens
  chr1:200150442-200150472
  hypo
cagaagaaagagctgcgaaggggattagaa

SEQ ID NO: 138926 - DNA, 185 bp, Homo sapiens
  chr1:200182773-200182958
  hypo
ccagggtgcacttccgcgtggcgaggttcatcatggaggcaggtgtcaagctagggatgcagtccattcccattgccactgcttgcaccatttaccctaagttcttctgcgagaccatcctggacgcctttgacccttacctgattgccatgtcttccatttacttggccggcaaagtggaagag

SEQ ID NO: 138927 - DNA, 30 bp, Homo sapiens; identical to SEQ ID NO: 1026
  chr1:200379460-200379490
  hypo

SEQ ID NO: 138928 - DNA, 284 bp, Homo sapiens; identical to SEQ ID NO: 1027
  chr1:200379702-200379986
  hypo

SEQ ID NO: 138929 - DNA, 33 bp, Homo sapiens; identical to SEQ ID NO: 61389
  chr1:200386098-200386131
  hypo

SEQ ID NO: 138930 - DNA, 30 bp, Homo sapiens
  chr1:200434404-200434434
  hypo
tgctcagtaatgtgcgtgtgatgacacagg

SEQ ID NO: 138931 - DNA, 19 bp, Homo sapiens
  chr1:200457137-200457156
  hypo
aaatggggtagtagggcca

SEQ ID NO: 138932 - DNA, 82 bp, Homo sapiens
  chr1:200486649-200486731
  hypo
ctgtgcttcccactccgggctctcagacgttcgtgtgttgtgaatcattttaggtttgttttctttgcgttacaacttgacc

SEQ ID NO: 138933 - DNA, 31 bp, Homo sapiens; identical to SEQ ID NO: 61390
  chr1:200513746-200513777
  hypo

SEQ ID NO: 138934 - DNA, 35 bp, Homo sapiens; identical to SEQ ID NO: 61391
  chr1:200556911-200556946
  hypo

SEQ ID NO: 138935 - DNA, 93 bp, Homo sapiens; identical to SEQ ID NO: 15216
  chr1:200588799-200588892
  hypo

SEQ ID NO: 138936 - DNA, 31 bp, Homo sapiens; identical to SEQ ID NO: 15217
  chr1:200589466-200589497
  hypo

SEQ ID NO: 138937 - DNA, 40 bp, Homo sapiens
  chr1:200612480-200612520
  hypo
aaacaagtaggccaggcgtggtggctcatgcctgtaatcc

SEQ ID NO: 138938 - DNA, 236 bp, Homo sapiens; identical to SEQ ID NO: 36654
  chr1:200708631-200708867
  hypo

SEQ ID NO: 138939 - DNA, 77 bp, Homo sapiens
  chr1:200882272-200882349
  hypo
gcagcaccctggccccggtccgaggccgcgccctccagctgacgtgcttttccctttctgcgcgcttgggcctgtcc

SEQ ID NO: 138940 - DNA, 23 bp, Homo sapiens
  chr1:200904930-200904953
  hypo
ccagactccgtctgaaacaaaac

SEQ ID NO: 138941 - DNA, 19 bp, Homo sapiens
  chr1:200905322-200905341
  hypo
tagataaagtaagtccggg

SEQ ID NO: 138942 - DNA, 31 bp, Homo sapiens; identical to SEQ ID NO: 61396
  chr1:200937987-200938018
  hypo

SEQ ID NO: 138943 - DNA, 49 bp, Homo sapiens
  chr1:200941619-200941668
  hypo
cccgccttcccgggggcgctgggcacaagacctcgcgagtgagaagaca

SEQ ID NO: 138944 - DNA, 112 bp, Homo sapiens; identical to SEQ ID NO: 15220
  chr1:200942599-200942711
  hypo

SEQ ID NO: 138945 - DNA, 31 bp, Homo sapiens; identical to SEQ ID NO: 61399
  chr1:200951960-200951991
  hypo

SEQ ID NO: 138946 - DNA, 51 bp, Homo sapiens; identical to SEQ ID NO: 61400
  chr1:200956135-200956186
  hypo

SEQ ID NO: 138947 - DNA, 31 bp, Homo sapiens; identical to SEQ ID NO: 15222
  chr1:200964905-200964936
  hypo

SEQ ID NO: 138948 - DNA, 30 bp, Homo sapiens; identical to SEQ ID NO: 61402
  chr1:200969658-200969688
  hypo

SEQ ID NO: 138949 - DNA, 20 bp, Homo sapiens
  chr1:200970224-200970244
  hypo
aactccgtctcagaaaaaaa

SEQ ID NO: 138950 - DNA, 177 bp, Homo sapiens; identical to SEQ ID NO: 61404
  chr1:200971315-200971492
  hypo

SEQ ID NO: 138951 - DNA, 30 bp, Homo sapiens; identical to SEQ ID NO: 61405
  chr1:200975147-200975177
  hypo

SEQ ID NO: 138952 - DNA, 30 bp, Homo sapiens
  chr1:201031082-201031112
  hypo
ctcgaaggtggagaccgtgaagagggacat

SEQ ID NO: 138953 - DNA, 30 bp, Homo sapiens
  chr1:201031477-201031507
  hypo
ccacactccctgccccgtgaccgtaaccct

SEQ ID NO: 138954 - DNA, 31 bp, Homo sapiens; identical to SEQ ID NO: 15223
  chr1:201036179-201036210
  hypo

SEQ ID NO: 138955 - DNA, 31 bp, Homo sapiens; identical to SEQ ID NO: 1029
  chr1:201050380-201050411
  hypo

SEQ ID NO: 138956 - DNA, 79 bp, Homo sapiens; identical to SEQ ID NO: 61408
  chr1:201055717-201055796
  hypo

SEQ ID NO: 138957 - DNA, 260 bp, Homo sapiens; identical to SEQ ID NO: 61409
  chr1:201058347-201058607
  hypo

SEQ ID NO: 138958 - DNA, 31 bp, Homo sapiens; identical to SEQ ID NO: 15226
  chr1:201069412-201069443
  hypo

SEQ ID NO: 138959 - DNA, 817 bp, Homo sapiens; identical to SEQ ID NO: 104798
  chr1:201083265-201084082
  hypo

SEQ ID NO: 138960 - DNA, 37 bp, Homo sapiens
  chr1:201103242-201103279
  hypo
aggcgtgagccaccgcgcccagcccacaaaggttctt

SEQ ID NO: 138961 - DNA, 203 bp, Homo sapiens; identical to SEQ ID NO: 61412
  chr1:201168309-201168512
  hypo

SEQ ID NO: 138962 - DNA, 30 bp, Homo sapiens; identical to SEQ ID NO: 15229
  chr1:201181868-201181898
  hypo

SEQ ID NO: 138963 - DNA, 31 bp, Homo sapiens; identical to SEQ ID NO: 61414
  chr1:201187509-201187540
  hypo

SEQ ID NO: 138964 - DNA, 364 bp, Homo sapiens
  chr1:201194900-201195264
  hypo
agccctgctgggtcccctccacgtgacctccctctgccgtctctcctgaagcatgcccgcaggcccctgggcccatccacctgcaggagaacgtgcctgggacggtgacggccgagtgggaaccctctcctgacgaggcccaggatgtcccgctgcactacgcggtgttcacacgctcctcagcgcacggtccctggcacgaggcagccgaccgcatccacaccaaccgcttcaccctcctgggcatcctccccggccacgaataccacttcagggtggtggccaagaatgagctgggggccagcaaaccctcggacaccagccagccctggtgcatcccccggcagcgcggtaagcagcccct

SEQ ID NO: 138965 - DNA, 30 bp, Homo sapiens; identical to SEQ ID NO: 61416
  chr1:201196132-201196162
  hypo

SEQ ID NO: 138966 - DNA, 32 bp, Homo sapiens
  chr1:201238521-201238553
  hypo
ctgaataccagggcacgcgctttctgaaaagg

SEQ ID NO: 138967 - DNA, 206 bp, Homo sapiens
  chr1:201244194-201244400
  hypo
tctggcagagagagccgcaagtgacccgtggctcctgactcaagcctggtcagagggagactccgaccctttgggagcagcctgaagcccagggccttactgaacacagatggggcaggtgcccggtcctttgcttgttattggcgatcctaataagaaggcacctggcagaggctttccgcaggaggccccggccatagaaatgg

SEQ ID NO: 138968 - DNA, 190 bp, Homo sapiens; identical to SEQ ID NO: 61417
  chr1:201244906-201245096
  hypo

SEQ ID NO: 138969 - DNA, 209 bp, Homo sapiens; identical to SEQ ID NO: 15231
  chr1:201261830-201262039
  hypo

SEQ ID NO: 138970 - DNA, 42 bp, Homo sapiens; identical to SEQ ID NO: 15232
  chr1:201276066-201276108
  hypo

SEQ ID NO: 138971 - DNA, 30 bp, Homo sapiens
  chr1:201276654-201276684
  hypo
ctcggcagccttgctcggggagcacctgtg

SEQ ID NO: 138972 - DNA, 43 bp, Homo sapiens
  chr1:201325775-201325818
  hypo
cctactacaggcacgcgccaccatgcccagctaattttttttt

SEQ ID NO: 138973 - DNA, 118 bp, Homo sapiens; identical to SEQ ID NO: 61420
  chr1:201328244-201328362
  hypo

SEQ ID NO: 138974 - DNA, 97 bp, Homo sapiens
  chr1:201351264-201351361
  hypo
tctgggtggactgcgcgattgcaggccaattagtgtgtgcacacggggacgatggggtctcccacagtacaccgtggccctccgccgtagggccagg

SEQ ID NO: 138975 - DNA, 170 bp, Homo sapiens; identical to SEQ ID NO: 61421
  chr1:201355457-201355627
  hypo

SEQ ID NO: 138976 - DNA, 31 bp, Homo sapiens; identical to SEQ ID NO: 15234
  chr1:201358467-201358498
  hypo

SEQ ID NO: 138977 - DNA, 317 bp, Homo sapiens
  chr1:201380508-201380825
  hypo
agacttgaggttggcccgcagatccatggacaccttgtgcttggagcccagcagggcccggagcatggcgtcagccgagacacggactcgacgcaggggcgggcgcttgaacttcccacggaggtccatcaccttcagcttcaggtccttaatctgtaggtgagaagcgcccggggctcactggagaggcagctagccacaggacacccttcctgaggacctcagactgctagggttccagccagagatacaccttaaattgtccacccttgaagccagacctatcagcagtcaccaacctttttgtcaccagggac

SEQ ID NO: 138978 - DNA, 226 bp, Homo sapiens
  chr1:201400930-201401156
  hypo
gacccctctccgccccgtcacagactatcctgggtttgcgatgtggtaatgcttctcgaagagtggtccaccaactcctgggggtaccatatttatctttgcattggattggcatgtgggctgatagtgcgaaggcaatggtgggtaaaactggtgacttattctttcccatgttgcagtcattggggccaaaaagccagttttatttaagcgtccttgatgaaac

SEQ ID NO: 138979 - DNA, 121 bp, Homo sapiens; identical to SEQ ID NO: 61424
  chr1:201432875-201432996
  hypo

SEQ ID NO: 138980 - DNA, 23 bp, Homo sapiens
  chr1:201433235-201433258
  hypo
agccaccgcgccccgcccaaaga

SEQ ID NO: 138981 - DNA, 30 bp, Homo sapiens; identical to SEQ ID NO: 1034
  chr1:201449031-201449061
  hypo

SEQ ID NO: 138982 - DNA, 30 bp, Homo sapiens; identical to SEQ ID NO: 36665
  chr1:201507559-201507589
  hypo

SEQ ID NO: 138983 - DNA, 31 bp, Homo sapiens; identical to SEQ ID NO: 1036
  chr1:201507612-201507643
  hypo

SEQ ID NO: 138984 - DNA, 30 bp, Homo sapiens; identical to SEQ ID NO: 61429
  chr1:201687844-201687874
  hypo

SEQ ID NO: 138985 - DNA, 140 bp, Homo sapiens; identical to SEQ ID NO: 15238
  chr1:201797435-201797575
  hypo

SEQ ID NO: 138986 - DNA, 145 bp, Homo sapiens
  chr1:201851150-201851295
  hypo
tttagttagcagtcacgggaaaattccccattctcacggggatttagactaggtcttaaccatactttaccaagattccagtagcaaagcacccaaaagtaatcgcaataaaattccaatttttgtaggccgggcatagtggctc

SEQ ID NO: 138987 - DNA, 30 bp, Homo sapiens; identical to SEQ ID NO: 15239
  chr1:201864486-201864516
  hypo

SEQ ID NO: 138988 - DNA, 24 bp, Homo sapiens
  chr1:201907546-201907570
  hypo
gcgcccggccgtaatttccatttt

SEQ ID NO: 138989 - DNA, 30 bp, Homo sapiens
  chr1:201912783-201912813
  hypo
ttcggcccacttcaccggtttctgggttcc

SEQ ID NO: 138990 - DNA, 30 bp, Homo sapiens; identical to SEQ ID NO: 61433
  chr1:201923648-201923678
  hypo

SEQ ID NO: 138991 - DNA, 30 bp, Homo sapiens; identical to SEQ ID NO: 61434
  chr1:201938904-201938934
  hypo

SEQ ID NO: 138992 - DNA, 30 bp, Homo sapiens
  chr1:201977584-201977614
  hypo
gcgggggcgggggggcggggggatcctgga

SEQ ID NO: 138993 - DNA, 106 bp, Homo sapiens; identical to SEQ ID NO: 36671
  chr1:201977861-201977967
  hypo

SEQ ID NO: 138994 - DNA, 151 bp, Homo sapiens
  chr1:201981160-201981311
  hypo
ggagaagaacaagtacgacgcaagcgccattgacttctcacgatgtgacatggatggcgccaccctctgcaattgtgcccttgaggagctgcgtctggtctttgggcctctgggggaccaactccatgcccagctgcgagacctcagtgag

SEQ ID NO: 138995 - DNA, 60 bp, Homo sapiens; identical to SEQ ID NO: 61437
  chr1:201981828-201981888
  hypo

SEQ ID NO: 138996 - DNA, 190 bp, Homo sapiens; identical to SEQ ID NO: 61438
  chr1:201982338-201982528
  hypo

SEQ ID NO: 138997 - DNA, 303 bp, Homo sapiens; identical to SEQ ID NO: 15241
  chr1:201982935-201983238
  hypo

SEQ ID NO: 138998 - DNA, 38 bp, Homo sapiens; identical to SEQ ID NO: 15242
  chr1:201984008-201984046
  hypo

SEQ ID NO: 138999 - DNA, 118 bp, Homo sapiens
  chr1:201984364-201984482
  hypo
cgggtggatggccggcgactcgtctacaagtttggcaaaaactcaagcggctggaaggaggaagaggttctccagagtcggaactgagggttggaactatacccgggaccaaactcac

SEQ ID NO: 139000 - DNA, 90 bp, Homo sapiens
  chr1:201997729-201997819
  hypo
aaacatggcggacgacgcagaccagaaacgcactaccgacactgtagaggagcccctggatcttatcaggctaggcctagatgagctaat

SEQ ID NO: 139001 - DNA, 29 bp, Homo sapiens
  chr1:201998118-201998147
  hypo
cgcctgtcgtaactcacaacttcttaagc

SEQ ID NO: 139002 - DNA, 121 bp, Homo sapiens; identical to SEQ ID NO: 61443
  chr1:202009832-202009953
  hypo

SEQ ID NO: 139003 - DNA, 30 bp, Homo sapiens
  chr1:202020432-202020462
  hypo
agccaccgcgcctggcgagactcactcttg

SEQ ID NO: 139004 - DNA, 43 bp, Homo sapiens; identical to SEQ ID NO: 61444
  chr1:202022786-202022829
  hypo

SEQ ID NO: 139005 - DNA, 80 bp, Homo sapiens; identical to SEQ ID NO: 61445
  chr1:202032891-202032971
  hypo

SEQ ID NO: 139006 - DNA, 20 bp, Homo sapiens
  chr1:202033901-202033921
  hypo
agacaaaacaaaacatatgt

SEQ ID NO: 139007 - DNA, 141 bp, Homo sapiens; identical to SEQ ID NO: 61447
  chr1:202041209-202041350
  hypo

SEQ ID NO: 139008 - DNA, 259 bp, Homo sapiens
  chr1:202042307-202042566
  hypo
aaaaaaaaaaagagggccatagatgtactaaggtttctcagaagtgattagagaagcttcagatgggttttacgcagtcattcaacaagcatttattgagtacctactgtgtgccaggcagtgaggacacaaagatgaaagagtcccagccctcaaagagctcgccgtctgagtggacatgtcaagtaaacaggctattgccgagcaacgtaagtgcgatattagaggtgtgtactccgcatggaggtagagggagtga

SEQ ID NO: 139009 - DNA, 30 bp, Homo sapiens; identical to SEQ ID NO: 15245
  chr1:202044090-202044120
  hypo

SEQ ID NO: 139010 - DNA, 31 bp, Homo sapiens; identical to SEQ ID NO: 61450
  chr1:202049891-202049922
  hypo

SEQ ID NO: 139011 - DNA, 25 bp, Homo sapiens
  chr1:202051925-202051950
  hypo
agccaccgcccggcctgggaagact

SEQ ID NO: 139012 - DNA, 39 bp, Homo sapiens; identical to SEQ ID NO: 61452
  chr1:202052583-202052622
  hypo

SEQ ID NO: 139013 - DNA, 43 bp, Homo sapiens; identical to SEQ ID NO: 61453
  chr1:202058379-202058422
  hypo

SEQ ID NO: 139014 - DNA, 30 bp, Homo sapiens
  chr1:202084878-202084908
  hypo
agtgactgcctcgttcgcttgaatgtgaat

SEQ ID NO: 139015 - DNA, 29 bp, Homo sapiens
  chr1:202085507-202085536
  hypo
actgcgcccggcctcgaatgtgaatttca

SEQ ID NO: 139016 - DNA, 62 bp, Homo sapiens; identical to SEQ ID NO: 61455
  chr1:202097361-202097423
  hypo

SEQ ID NO: 139017 - DNA, 92 bp, Homo sapiens; identical to SEQ ID NO: 61456
  chr1:202115846-202115938
  hypo

SEQ ID NO: 139018 - DNA, 30 bp, Homo sapiens; identical to SEQ ID NO: 61457
  chr1:202116522-202116552
  hypo

SEQ ID NO: 139019 - DNA, 31 bp, Homo sapiens; identical to SEQ ID NO: 15249
  chr1:202127154-202127185
  hypo

SEQ ID NO: 139020 - DNA, 320 bp, Homo sapiens
  chr1:202134667-202134987
  hypo
gattccgaattagggcgcctccaccccgcctctccccttcttggttgctgatcaaggctaccagaaagaacagagtgagatgtccccaggtgaggtgggatgagggtgggatgagaaggtacgatgtttccgccacctcttggccagactgggacctcttccctttcacatcagtttccctggttgcaaccttcccccgcccgccgcccccgcctttcaaaagagcacatatgcgcaggcgcacacacggcctggaaaatctcctgagtctgcagtgctgagtttccaggcccccatccaggggccgggtgggcggctct

SEQ ID NO: 139021 - DNA, 550 bp, Homo sapiens; identical to SEQ ID NO: 104823
  chr1:202162903-202163453
  hypo

SEQ ID NO: 139022 - DNA, 30 bp, Homo sapiens; identical to SEQ ID NO: 36674
  chr1:202187160-202187190
  hypo

SEQ ID NO: 139023 - DNA, 190 bp, Homo sapiens; identical to SEQ ID NO: 61460
  chr1:202218131-202218321
  hypo

SEQ ID NO: 139024 - DNA, 99 bp, Homo sapiens
  chr1:202237359-202237458
  hypo
ggcacctggcactggcggctggtgctggtgtgggaggctgggccctgccgcctatggaaggcccaagggcatctcctcactgctcggcaggtgccagcc

SEQ ID NO: 139025 - DNA, 30 bp, Homo sapiens
  chr1:202287170-202287200
  hypo
actggtgctgctgaccgtgttcgctggcgg

SEQ ID NO: 139026 - DNA, 462 bp, Homo sapiens
  chr1:202287404-202287866
  hypo
gctgctcactctggccgcagtgcagtgcagcgtctccgtctcctgtgtccgggcctatgggaagtccccctccctgggcagcgttcgagcaggggtcctaggctgcctggcactggcagggctggccgccgcgctgcccctggcctcagtgggagaatacggggcctccccactctgcctgccctacgcgccacctgagggtcagccagcagccctgggcttcaccgtggccctggtgatgatgaactccttctgtttcctggtcgtggccggtgcctacatcaaactgtactgtgacctgccgcggggcgactttgaggccgtgtgggactgcgccatggtgaggcacgtggcctggctcatcttcgcagacgggctcctctactgtcccgtggccttcctcagctttgcctccatgctgggcctcttccctgtcacgcccgaggccgtcaagtctgtcct

SEQ ID NO: 139027 - DNA, 38 bp, Homo sapiens
  chr1:202306335-202306373
  hypo
taggattacaggcgtgagccaccgcgcccagccaacac

SEQ ID NO: 139028 - DNA, 31 bp, Homo sapiens; identical to SEQ ID NO: 15253
  chr1:202455900-202455931
  hypo

SEQ ID NO: 139029 - DNA, 242 bp, Homo sapiens; identical to SEQ ID NO: 61464
  chr1:202531787-202532029
  hypo

SEQ ID NO: 139030 - DNA, 1345 bp, Homo sapiens; identical to SEQ ID NO: 104828
  chr1:202611677-202613022
  hypo

SEQ ID NO: 139031 - DNA, 734 bp, Homo sapiens; identical to SEQ ID NO: 104838
  chr1:202830480-202831214
  hypo

SEQ ID NO: 139032 - DNA, 32 bp, Homo sapiens
  chr1:202859947-202859979
  hypo
accctgaaattcaagcgcgtgctaagtgaatt

SEQ ID NO: 139033 - DNA, 30 bp, Homo sapiens; identical to SEQ ID NO: 61468
  chr1:202897516-202897546
  hypo

SEQ ID NO: 139034 - DNA, 102 bp, Homo sapiens; identical to SEQ ID NO: 61469
  chr1:202898227-202898329
  hypo

SEQ ID NO: 139035 - DNA, 168 bp, Homo sapiens; identical to SEQ ID NO: 15254
  chr1:202933724-202933892
  hypo

SEQ ID NO: 139036 - DNA, 151 bp, Homo sapiens; identical to SEQ ID NO: 61471
  chr1:202934386-202934537
  hypo

SEQ ID NO: 139037 - DNA, 31 bp, Homo sapiens; identical to SEQ ID NO: 1046
  chr1:202935961-202935992
  hypo

SEQ ID NO: 139038 - DNA, 38 bp, Homo sapiens; identical to SEQ ID NO: 61473
  chr1:202940665-202940703
  hypo

SEQ ID NO: 139039 - DNA, 181 bp, Homo sapiens; identical to SEQ ID NO: 61474
  chr1:202995150-202995331
  hypo

SEQ ID NO: 139040 - DNA, 164 bp, Homo sapiens
  chr1:203014549-203014713
  hypo
gagttgagccaggcccgggagcgactggtcaccctaacaacaaccgtgactgaactcgaggaggacctgggcacggcccgccgggacctcatcaagtcggaggagctgagcagcaagcatcagcgggacctccgggaggtgcgtgagggcgcaggcctgctctg

SEQ ID NO: 139041 - DNA, 199 bp, Homo sapiens
  chr1:203017684-203017883
  hypo
ctggtgcgaggcagacggctgtgcaggtgcgccagcgggaaaagatgaatgaggaccacaacaagcggctgtcggacacagtggaccggctgctcagcgagtccaacgagcgtctgcagctccacctgaaggagcgcatggctgccctggaggagaaggtgcccagaggggcggggttgggatgcgagaggttagtgct

SEQ ID NO: 139042 - DNA, 31 bp, Homo sapiens; identical to SEQ ID NO: 15258
  chr1:203054705-203054736
  hypo

SEQ ID NO: 139043 - DNA, 268 bp, Homo sapiens
  chr1:203098028-203098296
  hypo
cctggtctctgtgcccgggaacgtgctggtgatctgggcggtgaaggtgaaccaggcgctgcgggatgccaccttctgcttcatcgtgtcgctggcggtggctgatgtggccgtgggtgccctggtcatccccctcgccatcctcatcaacattgggccacagacctacttccacacctgcctcatggttgcctgtccggtcctcatcctcacccagagctccatcctggccctgctggcaattgctgtggaccgctacctccgggtc

SEQ ID NO: 139044 - DNA, 331 bp, Homo sapiens
  chr1:203134395-203134726
  hypo
atggtggtgaccccccggagggcggcggtggccatagccggctgctggatcctctccttcgtggtgggactgacccctatgtttggctggaacaatctgagtgcggtggagcgggcctgggcagccaacggcagcatgggggagcccgtgatcaagtgcgagttcgagaaggtcatcagcatggagtacatggtctacttcaacttctttgtgtgggtgctgcccccgcttctcctcatggtcctcatctacctggaggtcttctacctaatccgcaagcagctcaacaagaaggtgtcggcctcctccggcgacccgcagaagtactatg

SEQ ID NO: 139045 - DNA, 30 bp, Homo sapiens
  chr1:203134953-203134983
  hypo
tggaatgaccatttccgctgccagcctgca

SEQ ID NO: 139046 - DNA, 30 bp, Homo sapiens
  chr1:203136998-203137028
  hypo
gcactccaatctctgcgccttccagcaccc

SEQ ID NO: 139047 - DNA, 30 bp, Homo sapiens
  chr1:203137523-203137553
  hypo
ttgtgtggcggtccacggaatcacccccct

SEQ ID NO: 139048 - DNA, 188 bp, Homo sapiens; identical to SEQ ID NO: 61476
  chr1:203139341-203139529
  hypo

SEQ ID NO: 139049 - DNA, 36 bp, Homo sapiens; identical to SEQ ID NO: 61477
  chr1:203140949-203140985
  hypo

SEQ ID NO: 139050 - DNA, 31 bp, Homo sapiens; identical to SEQ ID NO: 36693
  chr1:203143408-203143439
  hypo

SEQ ID NO: 139051 - DNA, 24 bp, Homo sapiens
  chr1:203162828-203162852
  hypo
atttaaggccgggcgcggtggctc

SEQ ID NO: 139052 - DNA, 232 bp, Homo sapiens; identical to SEQ ID NO: 61479
  chr1:203192502-203192734
  hypo

SEQ ID NO: 139053 - DNA, 31 bp, Homo sapiens; identical to SEQ ID NO: 15259
  chr1:203242259-203242290
  hypo

SEQ ID NO: 139054 - DNA, 104 bp, Homo sapiens; identical to SEQ ID NO: 61481
  chr1:203298361-203298465
  hypo

SEQ ID NO: 139055 - DNA, 88 bp, Homo sapiens; identical to SEQ ID NO: 15261
  chr1:203429558-203429646
  hypo

SEQ ID NO: 139056 - DNA, 154 bp, Homo sapiens; identical to SEQ ID NO: 61483
  chr1:203455858-203456012
  hypo

SEQ ID NO: 139057 - DNA, 30 bp, Homo sapiens
  chr1:203524185-203524215
  hypo
gactgctccagctcccgccatcacatccac

SEQ ID NO: 139058 - DNA, 215 bp, Homo sapiens; identical to SEQ ID NO: 61484
  chr1:203524539-203524754
  hypo

SEQ ID NO: 139059 - DNA, 66 bp, Homo sapiens; identical to SEQ ID NO: 61485
  chr1:203525916-203525982
  hypo

SEQ ID NO: 139060 - DNA, 31 bp, Homo sapiens; identical to SEQ ID NO: 1050
  chr1:203561334-203561365
  hypo

SEQ ID NO: 139061 - DNA, 42 bp, Homo sapiens; identical to SEQ ID NO: 104859
  chr1:203598468-203598510
  hypo

SEQ ID NO: 139062 - DNA, 30 bp, Homo sapiens; identical to SEQ ID NO: 61487
  chr1:203652370-203652400
  hypo

SEQ ID NO: 139063 - DNA, 202 bp, Homo sapiens
  chr1:203690590-203690792
  hypo
cagagaaagaaggtagcgtgagagcaagtgcacaggtcaggaataagcgcagcttcacctcccagtgcttgctgtgctcccgctacacggtgcattatgctactatatgtactcatacagtactcttgagtacagtgtgtactgtgtgtactcaagaatttcacaagggaggctttattatttctttctttctttttttttt

SEQ ID NO: 139064 - DNA, 30 bp, Homo sapiens; identical to SEQ ID NO: 61489
  chr1:203697688-203697718
  hypo

SEQ ID NO: 139065 - DNA, 148 bp, Homo sapiens
  chr1:203708779-203708927
  hypo
aggaggagttgccacgaacaccactcctggatgaggaagaggaggaaaatcctgacaaggcttctaagtttgggactagggtgctcctgttggatggtgaggtcactccatatgccaatacaaacaacaatgcggtggattgcaacca

SEQ ID NO: 139066 - DNA, 30 bp, Homo sapiens
  chr1:203729124-203729154
  hypo
tgtgcagctgcaagacggcagcacgcctga

SEQ ID NO: 139067 - DNA, 26 bp, Homo sapiens
  chr1:203759743-203759769
  hypo
gtctgtggaaaattcttcacacgtct

SEQ ID NO: 139068 - DNA, 28 bp, Homo sapiens
  chr1:203778793-203778821
  hypo
caggttaaccgggtgcggtggctcacgg

SEQ ID NO: 139069 - DNA, 28 bp, Homo sapiens
  chr1:203829352-203829380
  hypo
cctggccgctttgtgtagtttaaaaatc

SEQ ID NO: 139070 - DNA, 162 bp, Homo sapiens; identical to SEQ ID NO: 61493
  chr1:204003760-204003922
  hypo

SEQ ID NO: 139071 - DNA, 31 bp, Homo sapiens; identical to SEQ ID NO: 15265
  chr1:204031964-204031995
  hypo

SEQ ID NO: 139072 - DNA, 1004 bp, Homo sapiens; identical to SEQ ID NO: 1055
  chr1:204043133-204044137
  hypo

SEQ ID NO: 139073 - DNA, 20 bp, Homo sapiens
  chr1:204066524-204066544
  hypo
aacttgcttatgaggccggg

SEQ ID NO: 139074 - DNA, 29 bp, Homo sapiens
  chr1:204079234-204079263
  hypo
caggcatgagccgccgcgtctggccagtt

SEQ ID NO: 139075 - DNA, 31 bp, Homo sapiens; identical to SEQ ID NO: 61498
  chr1:204091447-204091478
  hypo

SEQ ID NO: 139076 - DNA, 31 bp, Homo sapiens; identical to SEQ ID NO: 15267
  chr1:204092697-204092728
  hypo

SEQ ID NO: 139077 - DNA, 284 bp, Homo sapiens; identical to SEQ ID NO: 61500
  chr1:204093884-204094168
  hypo

SEQ ID NO: 139078 - DNA, 31 bp, Homo sapiens; identical to SEQ ID NO: 15269
  chr1:204106497-204106528
  hypo

SEQ ID NO: 139079 - DNA, 21 bp, Homo sapiens
  chr1:204122434-204122455
  hypo
atttgagacagaatttcgctc

SEQ ID NO: 139080 - DNA, 77 bp, Homo sapiens
  chr1:204123781-204123858
  hypo
gctccacctgagtcccgttgatggcagatggatggcatcatccctgcacgcaagaacctgtgcgctaggcgaatgtg

SEQ ID NO: 139081 - DNA, 39 bp, Homo sapiens
  chr1:204124153-204124192
  hypo
aaggcgaagccaatgcggttgttacgccgatcaaactct

SEQ ID NO: 139082 - DNA, 224 bp, Homo sapiens; identical to SEQ ID NO: 61503
  chr1:204124902-204125126
  hypo

SEQ ID NO: 139083 - DNA, 36 bp, Homo sapiens
  chr1:204137843-204137879
  hypo
gattacaggcgtgagccactgcgcctggcccgcctt

SEQ ID NO: 139084 - DNA, 35 bp, Homo sapiens
  chr1:204166950-204166985
  hypo
taatgggctgaagacgctaacttttttttttttga

SEQ ID NO: 139085 - DNA, 31 bp, Homo sapiens; identical to SEQ ID NO: 15272
  chr1:204187311-204187342
  hypo

SEQ ID NO: 139086 - DNA, 173 bp, Homo sapiens
  chr1:204197175-204197348
  hypo
cctggcagggtggagcgaggcccagcccctctcaccagacagcatgcggcccctgcgggaggcctcggtcgccagggcgcaggagatttcaatccgcttctcctgctcctgcagctggctctctgagtcctggggcacgtccacagagtccccctcgccgatgggcaccacgt

SEQ ID NO: 139087 - DNA, 30 bp, Homo sapiens
  chr1:204197691-204197721
  hypo
catccttgcctctgccggtagctgggccct

SEQ ID NO: 139088 - DNA, 400 bp, Homo sapiens
  chr1:204197938-204198338
  hypo
ctccaggtcaatgtaccgttcagggatgaggactttgtctggagtggagagctatggaggggctggggtcaccacctctgtcccttcccagagtctcccactacagcccttcctggctccactcacctccttattgatgtccacgtcataatgctggggctctagctccattttgcgaagccgggcaatttcctcccggggtgtctcgtaggcatgcccgccaggctcctctgcccgcagggctgcctccaggttggagatgtctacctcatggatgctgcggtggcggcgcacctaggggacagcagcatcgtgattgcaccatggctacccatgcctccaggcagctctagctatgccctgtcctcgctttcccttcccagctcgcctgatctagctg

SEQ ID NO: 139089 - DNA, 196 bp, Homo sapiens; identical to SEQ ID NO: 15273
  chr1:204199535-204199731
  hypo

SEQ ID NO: 139090 - DNA, 59 bp, Homo sapiens; identical to SEQ ID NO: 15274
  chr1:204212335-204212394
  hypo

SEQ ID NO: 139091 - DNA, 31 bp, Homo sapiens; identical to SEQ ID NO: 61510
  chr1:204216413-204216444
  hypo

SEQ ID NO: 139092 - DNA, 104 bp, Homo sapiens; identical to SEQ ID NO: 61511
  chr1:204217169-204217273
  hypo

SEQ ID NO: 139093 - DNA, 53 bp, Homo sapiens
  chr1:204217933-204217986
  hypo
cgctccctgggttaccgtggtcgcctgagacagctccacgcggatgttgatga

SEQ ID NO: 139094 - DNA, 31 bp, Homo sapiens; identical to SEQ ID NO: 61512
  chr1:204220390-204220421
  hypo

SEQ ID NO: 139095 - DNA, 425 bp, Homo sapiens; identical to SEQ ID NO: 15276
  chr1:204226523-204226948
  hypo

SEQ ID NO: 139096 - DNA, 306 bp, Homo sapiens
  chr1:204228354-204228660
  hypo
cagccccaccccagccgccggcatgcctcacctccgaaggtcttcaggcgggggtaccccccggcgcagattcacccactgctgaagctggttcatggagctcttgcgctgggcaattttgtcagggttggtgcgtggtgggaaactccgccggtgtcccccagtctctccatcctgagacgggaaagctgtgctccctggccggcttggggagtggtactgccagccattgggctgggcaggctgttccccaccccctggcactcttgggccctcggggtaagggctgcccggctctgaggctgg

SEQ ID NO: 139097 - DNA, 29 bp, Homo sapiens
  chr1:204278104-204278133
  hypo
ccacgcccggcctcaagaaggtaattcta

SEQ ID NO: 139098 - DNA, 31 bp, Homo sapiens; identical to SEQ ID NO: 15278
  chr1:204286091-204286122
  hypo

SEQ ID NO: 139099 - DNA, 101 bp, Homo sapiens
  chr1:204299941-204300042
  hypo
tagatcaccctggctcagagccgaaaacaaacagcatctccagcctcatactgagtttggcctttcagtaccctgggttctggaaagaacaagcatctcgg

SEQ ID NO: 139100 - DNA, 26 bp, Homo sapiens
  chr1:204301508-204301534
  hypo
tttttttttaagacagagtctcgctg

SEQ ID NO: 139101 - DNA, 30 bp, Homo sapiens; identical to SEQ ID NO: 61519
  chr1:204306931-204306961
  hypo

SEQ ID NO: 139102 - DNA, 30 bp, Homo sapiens
  chr1:204309504-204309534
  hypo
aaataaatgttcacccgcattagagtcaat

SEQ ID NO: 139103 - DNA, 166 bp, Homo sapiens; identical to SEQ ID NO: 61520
  chr1:204346112-204346278
  hypo

SEQ ID NO: 139104 - DNA, 503 bp, Homo sapiens; identical to SEQ ID NO: 104870
  chr1:204347105-204347608
  hypo

SEQ ID NO: 139105 - DNA, 31 bp, Homo sapiens; identical to SEQ ID NO: 61522
  chr1:204358693-204358724
  hypo

SEQ ID NO: 139106 - DNA, 31 bp, Homo sapiens; identical to SEQ ID NO: 61523
  chr1:204394217-204394248
  hypo

SEQ ID NO: 139107 - DNA, 30 bp, Homo sapiens
  chr1:204395440-204395470
  hypo
tcgactttgctccatcggcttcagccgctg

SEQ ID NO: 139108 - DNA, 194 bp, Homo sapiens; identical to SEQ ID NO: 61524
  chr1:204407990-204408184
  hypo

SEQ ID NO: 139109 - DNA, 251 bp, Homo sapiens; identical to SEQ ID NO: 61525
  chr1:204424235-204424486
  hypo

SEQ ID NO: 139110 - DNA, 30 bp, Homo sapiens
  chr1:204477699-204477729
  hypo
cattttaatcagaaacgagaaaaatagcta

SEQ ID NO: 139111 - DNA, 44 bp, Homo sapiens; identical to SEQ ID NO: 15281
  chr1:204486799-204486843
  hypo

SEQ ID NO: 139112 - DNA, 44 bp, Homo sapiens; identical to SEQ ID NO: 15282
  chr1:204487137-204487181
  hypo

SEQ ID NO: 139113 - DNA, 106 bp, Homo sapiens; identical to SEQ ID NO: 36713
  chr1:204487762-204487868
  hypo

SEQ ID NO: 139114 - DNA, 121 bp, Homo sapiens
  chr1:204493507-204493628
  hypo
gccatttaccctttccctgatgtggcttgttagtcatcagttttaataattgttgccttttgttagaaaaaggcataaatgaaggttaacttaagtttatttaaaaatctattttccggct

SEQ ID NO: 139115 - DNA, 31 bp, Homo sapiens; identical to SEQ ID NO: 61529
  chr1:204497982-204498013
  hypo

SEQ ID NO: 139116 - DNA, 201 bp, Homo sapiens; identical to SEQ ID NO: 36714
  chr1:204518655-204518856
  hypo

SEQ ID NO: 139117 - DNA, 30 bp, Homo sapiens
  chr1:204527526-204527556
  hypo
gaattggggctagtacgagaggtactgagg

SEQ ID NO: 139118 - DNA, 625 bp, Homo sapiens
  chr1:204530909-204531534
  hypo
ggcactgggggataccgtgatgaagatgaacatggttcctgttctcctgtctagggaaactggttaagcatgtaaatattagcatagtgaatgttttgttgtgagactacatgctgctatgagaaatacagaagggggacgtaatgtagccaagagcttctgaacaacctccgggaagagatgagctgagattaaaggaaggttaggagttaggagaggaagggaaaagtgccgtagttaggaggaaacatgccaaggtcttgaggtgagaaaacagtggcatctgggaagaactagaaagtttagtgtcgctgaaagcatggacagagagagatgagtgaattgaattgcctgggcatcctgggaacgggaagacaccctgatggcagggaacccgcgcctgcgctttcggggtcaggtccaggtctgccccgccagggctgaagccagctcctggtggggctgcagtgaggcggaagaggtgggatgctgctgcctggcggtgctgcggcggcagacctccacgaggaggtcctgggctaccgcggggtacacaggcgggcggaaaagggggagcagagtcagggggcagttgggaagctcggagacaaaaggagggagggag

SEQ ID NO: 139119 - DNA, 264 bp, Homo sapiens; identical to SEQ ID NO: 61532
  chr1:204531593-204531857
  hypo

SEQ ID NO: 139120 - DNA, 30 bp, Homo sapiens; identical to SEQ ID NO: 15286
  chr1:204536216-204536246
  hypo

SEQ ID NO: 139121 - DNA, 179 bp, Homo sapiens
  chr1:204537856-204538035
  hypo
agtaagcattccctggggcaccgggctccgcacaggccaggagctgtcacaggagctaaagcagggattcctgtgccatctccggtcccttctggatctgagattcaggaattctggggctgtgattccttgaaggcagagccgggaacatgaaaaccgtagacactaatcaatgcctg

SEQ ID NO: 139122 - DNA, 122 bp, Homo sapiens; identical to SEQ ID NO: 61535
  chr1:204540720-204540842
  hypo

SEQ ID NO: 139123 - DNA, 30 bp, Homo sapiens; identical to SEQ ID NO: 61536
  chr1:204586532-204586562
  hypo

SEQ ID NO: 139124 - DNA, 30 bp, Homo sapiens
  chr1:204607177-204607207
  hypo
aaagcattcactgagcgtagggggacccca

SEQ ID NO: 139125 - DNA, 101 bp, Homo sapiens
  chr1:204607423-204607524
  hypo
ttcattgaatccccccgcaccgttggagtcagaactactggcacccttattttacaggcaaggaaactgaggcttacagatgtgaagtaacttgcccaagg

SEQ ID NO: 139126 - DNA, 30 bp, Homo sapiens
  chr1:204609629-204609659
  hypo
aggggctgtagcaaacggagcctgtagaac

SEQ ID NO: 139127 - DNA, 162 bp, Homo sapiens
  chr1:204665809-204665971
  hypo
gactataaaaggagagcgtgagggatctttgtgaatggaacagttccgtgtcttgattatggcgtgattacatgaatcttcacacgtggtaaaattgcatggaactaaacacacacgcgcgcacgcgcgcgcgcgcacacacacatacgcaattgagttctt

SEQ ID NO: 139128 - DNA, 47 bp, Homo sapiens; identical to SEQ ID NO: 61537
  chr1:204721216-204721263
  hypo

SEQ ID NO: 139129 - DNA, 30 bp, Homo sapiens
  chr1:204884117-204884147
  hypo
aaggcacgctgggcgcggtggctcttttgt

SEQ ID NO: 139130 - DNA, 103 bp, Homo sapiens
  chr1:204913445-204913548
  hypo
ggccaggcagccaccgccgccctgggtccatgcagccttcctcctctgcctcctcagtcttggcggagccatcgaaattcctatggatcgtgagtcctgcccc

SEQ ID NO: 139131 - DNA, 30 bp, Homo sapiens
  chr1:204915561-204915591
  hypo
atgctctggctgtgtcggggcaggagaccc

SEQ ID NO: 139132 - DNA, 196 bp, Homo sapiens
  chr1:204915798-204915994
  hypo
ggtggtcatgtacggcgagggcattggcatttctggcaatttctatagaaacaagttaaagtacctggccttcctctgcaagtggatgaacaccaacccttcccgaggcccccaccatccctgggctgccagccttctttttcggcagaccccacggggcatgctaccccacaagaccaagcgaggccagccgccc

SEQ ID NO: 139133 - DNA, 30 bp, Homo sapiens; identical to SEQ ID NO: 15290
  chr1:204948123-204948153
  hypo

SEQ ID NO: 139134 - DNA, 213 bp, Homo sapiens; identical to SEQ ID NO: 15291
  chr1:204948535-204948748
  hypo

SEQ ID NO: 139135 - DNA, 213 bp, Homo sapiens
  chr1:204950967-204951180
  hypo
attgtcaagtggaggcggagagagactcgagaggcctggaacaacgtcacagtgtggggctctcgctacgtggtggggcagaccccagtctacgtgccctatgagatccgagtccaggctgaaaatgacttcgggaagggccctgagccagagtccgtcatcggttactccggagaagattgtgagtagtctcctccccgtccccccatcagg

SEQ ID NO: 139136 - DNA, 200 bp, Homo sapiens; identical to SEQ ID NO: 61541
  chr1:204954944-204955144
  hypo

SEQ ID NO: 139137 - DNA, 314 bp, Homo sapiens; identical to SEQ ID NO: 15293
  chr1:204955352-204955666
  hypo

SEQ ID NO: 139138 - DNA, 30 bp, Homo sapiens
  chr1:204957834-204957864
  hypo
acggaccccgtgtcacgctaccgctttacc

SEQ ID NO: 139139 - DNA, 31 bp, Homo sapiens; identical to SEQ ID NO: 61543
  chr1:204962416-204962447
  hypo

SEQ ID NO: 139140 - DNA, 30 bp, Homo sapiens; identical to SEQ ID NO: 61544
  chr1:204962775-204962805
  hypo

SEQ ID NO: 139141 - DNA, 30 bp, Homo sapiens
  chr1:204985543-204985573
  hypo
tcagttcaatgaagacggctccttcatcgg

SEQ ID NO: 139142 - DNA, 30 bp, Homo sapiens
  chr1:204985954-204985984
  hypo
ttccaccacactgtccgcccttggcctcgg

SEQ ID NO: 139143 - DNA, 30 bp, Homo sapiens
  chr1:205027622-205027652
  hypo
ccgtgaaggatgagtcggggaggggctcgc

SEQ ID NO: 139144 - DNA, 30 bp, Homo sapiens
  chr1:205028244-205028274
  hypo
ccaacttcatcccgacggacgggcgtcact

SEQ ID NO: 139145 - DNA, 383 bp, Homo sapiens; identical to SEQ ID NO: 61545
  chr1:205038771-205039154
  hypo

SEQ ID NO: 139146 - DNA, 31 bp, Homo sapiens; identical to SEQ ID NO: 15295
  chr1:205042897-205042928
  hypo

SEQ ID NO: 139147 - DNA, 21 bp, Homo sapiens
  chr1:205051221-205051242
  hypo
gccaccgcgcctggccagaaa

SEQ ID NO: 139148 - DNA, 24 bp, Homo sapiens
  chr1:205094556-205094580
  hypo
ttttttttttttgagacggagtct

SEQ ID NO: 139149 - DNA, 24 bp, Homo sapiens
  chr1:205094819-205094843
  hypo
gattacaggcgtgagccaccgcac

SEQ ID NO: 139150 - DNA, 30 bp, Homo sapiens; identical to SEQ ID NO: 15297
  chr1:205114619-205114649
  hypo

SEQ ID NO: 139151 - DNA, 30 bp, Homo sapiens
  chr1:205135491-205135521
  hypo
gctcaacgctgggcacgatggctcatacct

SEQ ID NO: 139152 - DNA, 46 bp, Homo sapiens; identical to SEQ ID NO: 61550
  chr1:205144483-205144529
  hypo

SEQ ID NO: 139153 - DNA, 30 bp, Homo sapiens; identical to SEQ ID NO: 15298
  chr1:205156818-205156848
  hypo

SEQ ID NO: 139154 - DNA, 30 bp, Homo sapiens; identical to SEQ ID NO: 15299
  chr1:205159808-205159838
  hypo

SEQ ID NO: 139155 - DNA, 22 bp, Homo sapiens
  chr1:205167027-205167049
  hypo
agaaaccacgaaggccgggcgt

SEQ ID NO: 139156 - DNA, 20 bp, Homo sapiens
  chr1:205174866-205174886
  hypo
ccagccgaaaatgcctattt

SEQ ID NO: 139157 - DNA, 42 bp, Homo sapiens
  chr1:205186850-205186892
  hypo
ttcatcagtaagacagtagatcggcattgcttttctttttct

SEQ ID NO: 139158 - DNA, 30 bp, Homo sapiens
  chr1:205195440-205195470
  hypo
actttccttcggcttcgagtcaggtcatga

SEQ ID NO: 139159 - DNA, 102 bp, Homo sapiens
  chr1:205210755-205210857
  hypo
cagcagggtatgtccgaccatgactccccagatgagaaggagcgctctccggagatgcatcgcgtctcctacgccatgtccctgcacgacctgcccgcccgg

SEQ ID NO: 139160 - DNA, 30 bp, Homo sapiens; identical to SEQ ID NO: 61555
  chr1:205220964-205220994
  hypo

SEQ ID NO: 139161 - DNA, 71 bp, Homo sapiens
  chr1:205238243-205238314
  hypo
ttgagcaggaggctcgcgacgacaatgtggcagagtatctgaaactggccaacaacgcggacaagcagcag

SEQ ID NO: 139162 - DNA, 257 bp, Homo sapiens
  chr1:205245772-205246029
  hypo
tcactcagccagaagagcagtcggggtggtgacagcagcgatgcccgccagacacagggcctcccaggagagcactcccgccttggtccccccataccccaaggctcgactgtccggatgaagcatcctgggcccagcggtgccacctcagccatgcgcctgcctccaggcagccatccactaagctggctctgattccaaaagccccagaggtgatcctgagaggtctgggtgcccagtctcggcgccctgccagc

SEQ ID NO: 139163 - DNA, 31 bp, Homo sapiens; identical to SEQ ID NO: 15300
  chr1:205250964-205250995
  hypo

SEQ ID NO: 139164 - DNA, 33 bp, Homo sapiens; identical to SEQ ID NO: 15301
  chr1:205269966-205269999
  hypo

SEQ ID NO: 139165 - DNA, 30 bp, Homo sapiens
  chr1:205272885-205272915
  hypo
gttcatccagggagccgaaggtggtggggg

SEQ ID NO: 139166 - DNA, 307 bp, Homo sapiens
  chr1:205273330-205273637
  hypo
gcgggacttcttgagcgaatgctggcgctccaggccaggggtggtgcttcccccaccaggtgcatgctgcttgaagaagctgcacaccttggccccattctccaggagggggcgggaggaacgccggagccagtcagccatggaggcgcgggcagagtcactgccagggtgcccaccctcatgcggagcctcctgctctcccactcgggtggcgtagccccagttgacccaccagtgactggccacatcctccagggtggcccggcgggtggggttcaccatcaacagccaccggatcaggccacag

SEQ ID NO: 139167 - DNA, 87 bp, Homo sapiens; identical to SEQ ID NO: 61560
  chr1:205310684-205310771
  hypo

SEQ ID NO: 139168 - DNA, 321 bp, Homo sapiens; identical to SEQ ID NO: 104889
  chr1:205312590-205312911
  hypo

SEQ ID NO: 139169 - DNA, 532 bp, Homo sapiens; identical to SEQ ID NO: 104890
  chr1:205312961-205313493
  hypo

SEQ ID NO: 139170 - DNA, 533 bp, Homo sapiens; identical to SEQ ID NO: 104891
  chr1:205399678-205400211
  hypo

SEQ ID NO: 139171 - DNA, 1750 bp, Homo sapiens; identical to SEQ ID NO: 104892
  chr1:205424701-205426451
  hypo

SEQ ID NO: 139172 - DNA, 30 bp, Homo sapiens
  chr1:205475302-205475332
  hypo
cggtggagtacagggcgacactggctccag

SEQ ID NO: 139173 - DNA, 30 bp, Homo sapiens
  chr1:205475647-205475677
  hypo
tgaatatctactgtgcgccaagcagtgcgt

SEQ ID NO: 139174 - DNA, 49 bp, Homo sapiens
  chr1:205476128-205476177
  hypo
tctgcctacttgggccgtcccgcactcgggaatgcgtcctacactgtag

SEQ ID NO: 139175 - DNA, 22 bp, Homo sapiens
  chr1:205476471-205476493
  hypo
gatttaggctgggtgcggtggc

SEQ ID NO: 139176 - DNA, 189 bp, Homo sapiens; identical to SEQ ID NO: 61564
  chr1:205548917-205549106
  hypo

SEQ ID NO: 139177 - DNA, 30 bp, Homo sapiens; identical to SEQ ID NO: 15306
  chr1:205550654-205550684
  hypo

SEQ ID NO: 139178 - DNA, 26 bp, Homo sapiens
  chr1:205574803-205574829
  hypo
tttttttttttgagacggagtttcac

SEQ ID NO: 139179 - DNA, 108 bp, Homo sapiens
  chr1:205631154-205631262
  hypo
gctcgagtgccgaatcgctgcaccagccggtccatgaccagagagaagaccagggagatggcgcactgcaggaacagccccaggctgcccatccgaacgcctgcagag

SEQ ID NO: 139180 - DNA, 1037 bp, Homo sapiens
  chr1:205631577-205632614
  hypo
gcctgagctggaaggcgctggtgagattatttggaaagtcgttgggggagcagagggcacactgcggctggaaccaggcagatctgaaatccagccttaactcctccactccctctagactttgaataagctccgcctttccttctgtcaaactggggcaacgactctgatcagactcctagagcagccagaggccttcctgaaaccgcaagcagagatgttccacacccatgagaagccgtgtatgcagatggggtccatccccactttcctgacagagaagtcggggccaggatggagaggcaccagcccagacacagccccgagtgtcgtctctggtgggcggctcccacaccagcctctgctggctgccaaggccttaccttcatcatagtgtctccgggcctcggtgcccggctcagctctgggcacgccctggtacagcccctcgcccacgaaatccgtgtaaaacagcgtgaaggtcatgagtgccatccagctgcacagctcagccacgaagagccggcgcagggtgcggggcatgcggcagcacagctggtgcagccggggaagcagggcgcccaggttccggaaagccaagcgggcccggcatggacagcagtggggcgacaaggagggggccgacagcccttctgctggctcggtggggcccagcgctgcctcctcagccaccagcagtgtggctgctacgcaggtgaggaagatgagggtgagcaggccaaagaggcactcctcctgggtgcccaggtagggggccagggcactggtgtcccagtcaatggcaggcaggaggtagcccaggcagcccccaagactgatcatgaaggcatagacagagtaggcctggcgacagtggtccgggtcccggaagaggtcagagagcagggcctccagtggagtgaagcacacctggccacagaagtccagcagccccacgcccaggatgagcagtgccagctccaggggcctgggatccgggcacagcagccctgctagccagccggcccttgggatga

SEQ ID NO: 139181 - DNA, 140 bp, Homo sapiens; identical to SEQ ID NO: 1065
  chr1:205721777-205721917
  hypo

SEQ ID NO: 139182 - DNA, 21 bp, Homo sapiens
  chr1:205724445-205724466
  hypo
aactgctcagcagggcgcggt

SEQ ID NO: 139183 - DNA, 19 bp, Homo sapiens
  chr1:205728008-205728027
  hypo
agagcgagactccgtctca

SEQ ID NO: 139184 - DNA, 30 bp, Homo sapiens; identical to SEQ ID NO: 61568
  chr1:205779663-205779693
  hypo

SEQ ID NO: 139185 - DNA, 30 bp, Homo sapiens; identical to SEQ ID NO: 61569
  chr1:205818469-205818499
  hypo

SEQ ID NO: 139186 - DNA, 30 bp, Homo sapiens
  chr1:205895056-205895086
  hypo
tttgcagaatgtttgcgctcatgcggtgtt

SEQ ID NO: 139187 - DNA, 30 bp, Homo sapiens; identical to SEQ ID NO: 1066
  chr1:206955685-206955715
  hypo

SEQ ID NO: 139188 - DNA, 31 bp, Homo sapiens; identical to SEQ ID NO: 15310
  chr1:207063116-207063147
  hypo

SEQ ID NO: 139189 - DNA, 30 bp, Homo sapiens; identical to SEQ ID NO: 61572
  chr1:207075385-207075415
  hypo

SEQ ID NO: 139190 - DNA, 30 bp, Homo sapiens; identical to SEQ ID NO: 61573
  chr1:207081169-207081199
  hypo

SEQ ID NO: 139191 - DNA, 124 bp, Homo sapiens; identical to SEQ ID NO: 61574
  chr1:207087069-207087193
  hypo

SEQ ID NO: 139192 - DNA, 190 bp, Homo sapiens; identical to SEQ ID NO: 15312
  chr1:207088567-207088757
  hypo

SEQ ID NO: 139193 - DNA, 30 bp, Homo sapiens; identical to SEQ ID NO: 61576
  chr1:207089084-207089114
  hypo

SEQ ID NO: 139194 - DNA, 99 bp, Homo sapiens; identical to SEQ ID NO: 61577
  chr1:207105075-207105174
  hypo

SEQ ID NO: 139195 - DNA, 30 bp, Homo sapiens
  chr1:207105876-207105906
  hypo
cagggtggagaccagcgctctggagcttcc

SEQ ID NO: 139196 - DNA, 30 bp, Homo sapiens
  chr1:207106319-207106349
  hypo
tccttccttacctgccggaatccacagatg

SEQ ID NO: 139197 - DNA, 184 bp, Homo sapiens; identical to SEQ ID NO: 61578
  chr1:207130058-207130242
  hypo

SEQ ID NO: 139198 - DNA, 141 bp, Homo sapiens; identical to SEQ ID NO: 15313
  chr1:207182656-207182797
  hypo

SEQ ID NO: 139199 - DNA, 298 bp, Homo sapiens; identical to SEQ ID NO: 61580
  chr1:207195375-207195673
  hypo

SEQ ID NO: 139200 - DNA, 593 bp, Homo sapiens; identical to SEQ ID NO: 61581
  chr1:207200593-207201186
  hypo

SEQ ID NO: 139201 - DNA, 154 bp, Homo sapiens
  chr1:207227083-207227237
  hypo
actagggagagggtgcggagcagggcttgagaatgcactagaggagaaatgacgacgtgctagggctgtcttggggtccagttactgtttttccttcagggaatatgttcgagattttcccacgtccctcacttttttcttttctttctttctt

SEQ ID NO: 139202 - DNA, 93 bp, Homo sapiens; identical to SEQ ID NO: 15316
  chr1:207227536-207227629
  hypo

SEQ ID NO: 139203 - DNA, 128 bp, Homo sapiens
  chr1:207240933-207241061
  hypo
cctcatgaatatccacgtccagcctcgcaccatttacctttgccggcatggagaaagcgagttcaatctcttggggaagattgggggtgactctggcctctcggtgcggggaaagcaggtgagtaatt

SEQ ID NO: 139204 - DNA, 105 bp, Homo sapiens
  chr1:207405709-207405814
  hypo
agaacagactaatccacgggctttagctatctcatagtatcacatctctccccttcattgtcctgtttcctcacagagacttggctataacgggcatggggtctt

SEQ ID NO: 139205 - DNA, 154 bp, Homo sapiens; identical to SEQ ID NO: 15317
  chr1:207478914-207479068
  hypo

SEQ ID NO: 139206 - DNA, 30 bp, Homo sapiens
  chr1:207554140-207554170
  hypo
acaggcatgagccaccgcacccggcgacct

SEQ ID NO: 139207 - DNA, 19 bp, Homo sapiens
  chr1:207575673-207575692
  hypo
tggagtgcgatgttgcgat

SEQ ID NO: 139208 - DNA, 224 bp, Homo sapiens
  chr1:207596169-207596393
  hypo
gggctatgggtgccacgcactatttgcacctcttctaacttctgaatagtctcagttatatcggtatgcctccctggcaaaaggtattgacgagtggaggtaacccatcggggttgtggcagaacttggggctaatgatgtgtatgtccccgcagtaccagctttgctacatgaactgggagtctgaattctccggccatggtgtataagtccagaccatgcaa

SEQ ID NO: 139209 - DNA, 103 bp, Homo sapiens
  chr1:207596452-207596555
  hypo
gggccaagcagccaatgccaagatgcaggaacgcaggtttcaccttcaccgactggccaccataaccgtgagtgaaagcagctttgcccggaaacttatccgg

SEQ ID NO: 139210 - DNA, 30 bp, Homo sapiens; identical to SEQ ID NO: 15319
  chr1:207643127-207643157
  hypo

SEQ ID NO: 139211 - DNA, 466 bp, Homo sapiens; identical to SEQ ID NO: 36740
  chr1:207669321-207669787
  hypo

SEQ ID NO: 139212 - DNA, 295 bp, Homo sapiens; identical to SEQ ID NO: 36741
  chr1:207669828-207670123
  hypo

SEQ ID NO: 139213 - DNA, 109 bp, Homo sapiens
  chr1:207819221-207819330
  hypo
tgggagcgtgctgtgcgcaagtggcctgtgtgcggagttcactgtgggcaagacagctcactgtttgctttgagtggagcgagcgcggactctgcggctagggagggca

SEQ ID NO: 139214 - DNA, 31 bp, Homo sapiens; identical to SEQ ID NO: 61590
  chr1:207832515-207832546
  hypo

SEQ ID NO: 139215 - DNA, 37 bp, Homo sapiens
  chr1:207880636-207880673
  hypo
ctcatcatgggacatcgtgaaatcatgaaaaaggtag

SEQ ID NO: 139216 - DNA, 27 bp, Homo sapiens
  chr1:207921528-207921555
  hypo
gggtagaacatcatggtgccctgcatt

SEQ ID NO: 139217 - DNA, 42 bp, Homo sapiens; identical to SEQ ID NO: 61592
  chr1:207921794-207921836
  hypo

SEQ ID NO: 139218 - DNA, 125 bp, Homo sapiens; identical to SEQ ID NO: 61593
  chr1:207936509-207936634
  hypo

SEQ ID NO: 139219 - DNA, 38 bp, Homo sapiens; identical to SEQ ID NO: 61594
  chr1:207963084-207963122
  hypo

SEQ ID NO: 139220 - DNA, 42 bp, Homo sapiens; identical to SEQ ID NO: 61595
  chr1:207974073-207974115
  hypo

SEQ ID NO: 139221 - DNA, 30 bp, Homo sapiens
  chr1:207984779-207984809
  hypo
agggccagacaggacggagcatctttccta

SEQ ID NO: 139222 - DNA, 410 bp, Homo sapiens
  chr1:207991542-207991952
  hypo
ggaggacggtttgtccgcattcagtggcagtggaggtgcatcttctctctcggtcgcaagaaggtggggtggggtggggcggggcggggcggggcggggcggggcggggcggggcggggcggggcgggacgggacgggacggggcgggacggggcggggcagggcggggggatcacgcgcctatagcgcaaagctgcggtatggagaaaagcctagaacccacagccgccatgatgacgcaaacaaaattaaaagggtcaagaactcaaggcccactgtttcacctaagaagaaaaggaagaagatgaaggggagaagagaagctctgatttgggtcaatatggaaaggggaggctgacgcaggctgcccaagagccagcctttagcttagtgacggtgatgcggatccg

SEQ ID NO: 139223 - DNA, 61 bp, Homo sapiens; identical to SEQ ID NO: 61597
  chr1:207992292-207992353
  hypo

SEQ ID NO: 139224 - DNA, 30 bp, Homo sapiens
  chr1:207992578-207992608
  hypo
ctgctccgcggcccccgaattggtaacgag

SEQ ID NO: 139225 - DNA, 30 bp, Homo sapiens
  chr1:207994125-207994155
  hypo
tggagagagggggaacgggcagcggggagc

SEQ ID NO: 139226 - DNA, 283 bp, Homo sapiens
  chr1:207994388-207994671
  hypo
gacactcagcttttccgaactactccaagcaccaggctgatgaggacatgggaaacccacgctctggcaaagccgggcccaggtgttgaacccctacccagacgccttccacctgaatccccacccaggactgtgtccaagggtgggactaggcggctctgcccctagagccaccttcattgcggcagccaccactgtgcctgcctctgctgtgcttttgcccccccttcccctcctccgtcatagcccccgccccccgcccactctgcggaactggcacagc

SEQ ID NO: 139227 - DNA, 209 bp, Homo sapiens; identical to SEQ ID NO: 104920
  chr1:207995188-207995397
  hypo

SEQ ID NO: 139228 - DNA, 633 bp, Homo sapiens; identical to SEQ ID NO: 104923
  chr1:208084077-208084710
  hypo

SEQ ID NO: 139229 - DNA, 283 bp, Homo sapiens; identical to SEQ ID NO: 15326
  chr1:208136458-208136741
  hypo

SEQ ID NO: 139230 - DNA, 30 bp, Homo sapiens; identical to SEQ ID NO: 61601
  chr1:208164340-208164370
  hypo

SEQ ID NO: 139231 - DNA, 30 bp, Homo sapiens; identical to SEQ ID NO: 61602
  chr1:208164602-208164632
  hypo

SEQ ID NO: 139232 - DNA, 31 bp, Homo sapiens; identical to SEQ ID NO: 61603
  chr1:208201565-208201596
  hypo

SEQ ID NO: 139233 - DNA, 213 bp, Homo sapiens; identical to SEQ ID NO: 61604
  chr1:208212990-208213203
  hypo

SEQ ID NO: 139234 - DNA, 31 bp, Homo sapiens; identical to SEQ ID NO: 61605
  chr1:208215054-208215085
  hypo

SEQ ID NO: 139235 - DNA, 30 bp, Homo sapiens
  chr1:208224669-208224699
  hypo
ctatccacatgggctcggtcgacactcaca

SEQ ID NO: 139236 - DNA, 79 bp, Homo sapiens
  chr1:208229180-208229259
  hypo
aataactactttcactcctagcgaatatttacttaacatgcaataactgtcttattacgttttagcatattagattcaa

SEQ ID NO: 139237 - DNA, 110 bp, Homo sapiens
  chr1:208231747-208231857
  hypo
atggtgaatcattaccgtgctggcgaatcctgcccgcgcccaggactctgcaccgggtccttttagccaaattcatctctcacagacatctgtaacgattgtgcctgctg

SEQ ID NO: 139238 - DNA, 31 bp, Homo sapiens; identical to SEQ ID NO: 61606
  chr1:208317146-208317177
  hypo

SEQ ID NO: 139239 - DNA, 166 bp, Homo sapiens; identical to SEQ ID NO: 61607
  chr1:208328463-208328629
  hypo

SEQ ID NO: 139240 - DNA, 31 bp, Homo sapiens; identical to SEQ ID NO: 15328
  chr1:208397335-208397366
  hypo

SEQ ID NO: 139241 - DNA, 752 bp, Homo sapiens
  chr1:208404327-208405079
  hypo
gtgccaagatgtagagacactcggcctgaaggacccttaagcacctggagtggcatcagtcccttggtgaaggagcacagttagtagacatttgagacccttgaggcgctatcagcccagccccggacctcttggatccctcagcccactgtgagggagagtgacgggcgcagttttctgagaggttgagacagggggaagaatgtgctgatggggagcagggtgggaatggcaggccggggagggaggacctagggcaggagatgaaaagtgctccctgagtgagaatctggccctggatgatgaatggggtgtgagagagaagccgggaaaagggtaaacagccaggagggacccaggagggaagcgggagggaggggtgaggagaaagaatgtggaggtcaaggagcaaagaaaatgctcctggagtgattgactcaagatccaacatgttccgcaccggatgaaggcacatgtgcacacagatgtgcctggtcacccgccctcccctccacacgcctgcgaaggtgtgagcacgtctgtctgctctcctcccagatgcattccatgcccttcggaaaaacctttcttctgatgtttggttctgagtgtgcaagggaccccactgtaatacgaacaagtatttgtgcaatgattttatagtttcctaaaaatttcacatgcatcatcccgctaacgtaccccttactcaagctggtgaggttgagagcagcatacgcatcaccagttta

SEQ ID NO: 139242 - DNA, 531 bp, Homo sapiens; identical to SEQ ID NO: 36746
  chr1:208416771-208417302
  hypo

SEQ ID NO: 139243 - DNA, 151 bp, Homo sapiens; identical to SEQ ID NO: 104926
  chr1:208418635-208418786
  hypo

SEQ ID NO: 139244 - DNA, 31 bp, Homo sapiens; identical to SEQ ID NO: 1076
  chr1:208418805-208418836
  hypo

SEQ ID NO: 139245 - DNA, 35 bp, Homo sapiens
  chr1:208441466-208441501
  hypo
tcacttcaccggcgtcgggccgtaacccactttgc

SEQ ID NO: 139246 - DNA, 39 bp, Homo sapiens; identical to SEQ ID NO: 61612
  chr1:208837627-208837666
  hypo

SEQ ID NO: 139247 - DNA, 148 bp, Homo sapiens
  chr1:209014976-209015124
  hypo
ctgcaaagcaccttccgctggcagtgtcgagcgctgtggggaaggaaagccacgtctggcattatttaattgacctccccattagcagcgctggctactatggccatggagccagatcatgcagactaaatgccggtccctgagcaca

SEQ ID NO: 139248 - DNA, 224 bp, Homo sapiens
  chr1:209187688-209187912
  hypo
cggccttgacacttctatgagtgcattttcttttttgtttctgcccttgggagtgttctggctctccggggacccatggcagtatatctagcttagaatcggtgattagtaagtgtttttgaaaagattatcccgacaacaaggtgaagagtgtatcagagaggtgccagagtcggaagcctaatacaaggtgtatgggcaagaaataacggtagcgtggacca

SEQ ID NO: 139249 - DNA, 30 bp, Homo sapiens
  chr1:209233357-209233387
  hypo
agatatgcagcaatgcgctacatacactgt

SEQ ID NO: 139250 - DNA, 30 bp, Homo sapiens
  chr1:209274740-209274770
  hypo
gtctaaaatgcgtgtcgactggtgaactcc

SEQ ID NO: 139251 - DNA, 30 bp, Homo sapiens; identical to SEQ ID NO: 15334
  chr1:209346596-209346626
  hypo

SEQ ID NO: 139252 - DNA, 41 bp, Homo sapiens
  chr1:209556780-209556821
  hypo
tctggatagggactcctttccagtagcgcatttaacagaag

SEQ ID NO: 139253 - DNA, 30 bp, Homo sapiens; identical to SEQ ID NO: 61614
  chr1:209602627-209602657
  hypo

SEQ ID NO: 139254 - DNA, 31 bp, Homo sapiens; identical to SEQ ID NO: 61615
  chr1:209790962-209790993
  hypo

SEQ ID NO: 139255 - DNA, 30 bp, Homo sapiens; identical to SEQ ID NO: 61616
  chr1:209799176-209799206
  hypo

SEQ ID NO: 139256 - DNA, 198 bp, Homo sapiens; identical to SEQ ID NO: 61617
  chr1:209803088-209803286
  hypo

SEQ ID NO: 139257 - DNA, 31 bp, Homo sapiens; identical to SEQ ID NO: 61618
  chr1:209808685-209808716
  hypo

SEQ ID NO: 139258 - DNA, 28 bp, Homo sapiens
  chr1:209814136-209814164
  hypo
ctagcacaggccaggcgcggtggctcac

SEQ ID NO: 139259 - DNA, 52 bp, Homo sapiens; identical to SEQ ID NO: 61620
  chr1:209823345-209823397
  hypo

SEQ ID NO: 139260 - DNA, 102 bp, Homo sapiens; identical to SEQ ID NO: 15335
  chr1:209825650-209825752
  hypo

SEQ ID NO: 139261 - DNA, 97 bp, Homo sapiens
  chr1:209989430-209989527
  hypo
gctcagagcaggcatcgcaacctcccagttactattctgtgctgtggcaagtgccagcttgtcctctcttccccacccagcccgggaaaccggcagc

SEQ ID NO: 139262 - DNA, 214 bp, Homo sapiens
  chr1:209999727-209999941
  hypo
ccaccccagcctctccgaatctaattaggaatagtagatggtcactagaactgacaagaatcgcattctaatggttttattacaacttctatggtgtgacacagtatcagggaaaacccaaatttcccacagtagcactccaatagcagagctattattttgcttctcatttctctcattttggacgctcctgttttaccgtaaatattcaagt

SEQ ID NO: 139263 - DNA, 41 bp, Homo sapiens
  chr1:210002383-210002424
  hypo
gctggaattacaggcgtgaaccaccgcgcttggcctgtttt

SEQ ID NO: 139264 - DNA, 121 bp, Homo sapiens; identical to SEQ ID NO: 15336
  chr1:210032047-210032168
  hypo

SEQ ID NO: 139265 - DNA, 227 bp, Homo sapiens; identical to SEQ ID NO: 1079
  chr1:210110983-210111210
  hypo

SEQ ID NO: 139266 - DNA, 138 bp, Homo sapiens; identical to SEQ ID NO: 1080
  chr1:210111283-210111421
  hypo

SEQ ID NO: 139267 - DNA, 126 bp, Homo sapiens; identical to SEQ ID NO: 1081
  chr1:210111796-210111922
  hypo

SEQ ID NO: 139268 - DNA, 38 bp, Homo sapiens; identical to SEQ ID NO: 1082
  chr1:210112036-210112074
  hypo

SEQ ID NO: 139269 - DNA, 28 bp, Homo sapiens
  chr1:210439527-210439555
  hypo
gggcgcggtggctcacgcctgtaatccc

SEQ ID NO: 139270 - DNA, 457 bp, Homo sapiens; identical to SEQ ID NO: 104946
  chr1:210465688-210466145
  hypo

SEQ ID NO: 139271 - DNA, 114 bp, Homo sapiens
  chr1:210495069-210495183
  hypo
cagggctggctgctccggctccaagtcgggaagatccagaggccttacttctccaagacaagcagagatcctcaacgttcagacacttctgccggtgtgtgaagcattaaaggt

SEQ ID NO: 139272 - DNA, 47 bp, Homo sapiens; identical to SEQ ID NO: 15343
  chr1:210560010-210560057
  hypo

SEQ ID NO: 139273 - DNA, 149 bp, Homo sapiens; identical to SEQ ID NO: 61631
  chr1:210637836-210637985
  hypo

SEQ ID NO: 139274 - DNA, 43 bp, Homo sapiens; identical to SEQ ID NO: 61632
  chr1:210699156-210699199
  hypo

SEQ ID NO: 139275 - DNA, 32 bp, Homo sapiens; identical to SEQ ID NO: 61633
  chr1:210714465-210714497
  hypo

SEQ ID NO: 139276 - DNA, 692 bp, Homo sapiens; identical to SEQ ID NO: 61634
  chr1:210856747-210857439
  hypo

SEQ ID NO: 139277 - DNA, 30 bp, Homo sapiens
  chr1:211275983-211276013
  hypo
cccagataaaaacaacgcatgccctttact

SEQ ID NO: 139278 - DNA, 106 bp, Homo sapiens; identical to SEQ ID NO: 61635
  chr1:211430455-211430561
  hypo

SEQ ID NO: 139279 - DNA, 24 bp, Homo sapiens
  chr1:211510372-211510396
  hypo
cacgtgcactgttttatgtgttgg

SEQ ID NO: 139280 - DNA, 31 bp, Homo sapiens; identical to SEQ ID NO: 61637
  chr1:211518071-211518102
  hypo

SEQ ID NO: 139281 - DNA, 30 bp, Homo sapiens; identical to SEQ ID NO: 61638
  chr1:211518761-211518791
  hypo

SEQ ID NO: 139282 - DNA, 77 bp, Homo sapiens; identical to SEQ ID NO: 61639
  chr1:211606710-211606787
  hypo

SEQ ID NO: 139283 - DNA, 243 bp, Homo sapiens; identical to SEQ ID NO: 61640
  chr1:211712703-211712946
  hypo

SEQ ID NO: 139284 - DNA, 78 bp, Homo sapiens; identical to SEQ ID NO: 61641
  chr1:211801002-211801080
  hypo

SEQ ID NO: 139285 - DNA, 30 bp, Homo sapiens
  chr1:211812016-211812046
  hypo
catgccctccctgggcgctacactccagga

SEQ ID NO: 139286 - DNA, 71 bp, Homo sapiens; identical to SEQ ID NO: 61642
  chr1:211824878-211824949
  hypo

SEQ ID NO: 139287 - DNA, 27 bp, Homo sapiens
  chr1:211839838-211839865
  hypo
ctaatttttaaaaataagtatcggctg

SEQ ID NO: 139288 - DNA, 30 bp, Homo sapiens; identical to SEQ ID NO: 61644
  chr1:211851652-211851682
  hypo

SEQ ID NO: 139289 - DNA, 27 bp, Homo sapiens
  chr1:211962929-211962956
  hypo
ataagggtaccaggctgggcacgatgg

SEQ ID NO: 139290 - DNA, 31 bp, Homo sapiens; identical to SEQ ID NO: 15345
  chr1:211969081-211969112
  hypo

SEQ ID NO: 139291 - DNA, 31 bp, Homo sapiens; identical to SEQ ID NO: 61646
  chr1:211990520-211990551
  hypo

SEQ ID NO: 139292 - DNA, 768 bp, Homo sapiens; identical to SEQ ID NO: 36772
  chr1:212003415-212004183
  hypo

SEQ ID NO: 139293 - DNA, 31 bp, Homo sapiens; identical to SEQ ID NO: 61648
  chr1:212086234-212086265
  hypo

SEQ ID NO: 139294 - DNA, 53 bp, Homo sapiens
  chr1:212120898-212120951
  hypo
cgggggcactagctgcgggaggtctgttcttgcagacccgattcagcaacgga

SEQ ID NO: 139295 - DNA, 167 bp, Homo sapiens
  chr1:212178247-212178414
  hypo
gatgtgattaatggacgccctcatacacagcaggaatgtaaactggttcattgactttggaaaacagtttgacatcatctgttaaaactgaagatacgcattttctgtaagtcagaaatttcattcccaggtatacactctaaagaaatttgcgtgtgtgaactggg

SEQ ID NO: 139296 - DNA, 21 bp, Homo sapiens
  chr1:212215147-212215168
  hypo
ggcctattgcattcttttagt

SEQ ID NO: 139297 - DNA, 34 bp, Homo sapiens; identical to SEQ ID NO: 15348
  chr1:212321600-212321634
  hypo

SEQ ID NO: 139298 - DNA, 241 bp, Homo sapiens
  chr1:212330209-212330450
  hypo
tttctccgggtattccggtttcctcccacatcccaaagctgtacccgtgatgctcattggtgtgcctcaatggtcccagtctgagtgagagtgggtgtgtgtgtgagtgtgtcctgcgataggatggtgtcctggccaggatgggttcctgccttgtaccccaagctgccgggatgggctctggcaaccagagatcctgaactggaataagcgggtaaatagtgatcgtacttgattttat

SEQ ID NO: 139299 - DNA, 30 bp, Homo sapiens
  chr1:212357743-212357773
  hypo
gcaaggacatcgggccgggcgcggtggctc

SEQ ID NO: 139300 - DNA, 30 bp, Homo sapiens; identical to SEQ ID NO: 1088
  chr1:212395928-212395958
  hypo

SEQ ID NO: 139301 - DNA, 30 bp, Homo sapiens
  chr1:212407464-212407494
  hypo
agtgagctgagatcacggagccagactccg

SEQ ID NO: 139302 - DNA, 45 bp, Homo sapiens; identical to SEQ ID NO: 15350
  chr1:212456676-212456721
  hypo

SEQ ID NO: 139303 - DNA, 40 bp, Homo sapiens; identical to SEQ ID NO: 15351
  chr1:212555381-212555421
  hypo

SEQ ID NO: 139304 - DNA, 40 bp, Homo sapiens; identical to SEQ ID NO: 61653
  chr1:212555660-212555700
  hypo

SEQ ID NO: 139305 - DNA, 31 bp, Homo sapiens; identical to SEQ ID NO: 61654
  chr1:212557992-212558023
  hypo

SEQ ID NO: 139306 - DNA, 205 bp, Homo sapiens
  chr1:212605108-212605313
  hypo
gcatcctcattcctccgcatttatgcacctgatcctttgaccaaagtgctcttccctctagaccgcctccttcgcctcctgtagatttttatgcaaataccctgttctcagtgaggccttccctaacctgcctatttaaaatgaccatccccataaccgggcaccgttcctcacacctgtaatcccagcactttgggtggatgag

SEQ ID NO: 139307 - DNA, 210 bp, Homo sapiens
  chr1:212647419-212647629
  hypo
aagaaaaagagagagagagagagagagagagagaacaggtggcttaagataggcaggtgaggagcggggccctcagtgtgagccagttattgtccatgcagccctttggccagccctagctctgctgcagtgtctggatccaagggcttccctcatgtgctggctcagcctggctcctctgctccttcacaggtccgcggatcaaaactc

SEQ ID NO: 139308 - DNA, 30 bp, Homo sapiens; identical to SEQ ID NO: 61655
  chr1:212788585-212788615
  hypo

SEQ ID NO: 139309 - DNA, 268 bp, Homo sapiens; identical to SEQ ID NO: 36779
  chr1:212873455-212873723
  hypo

SEQ ID NO: 139310 - DNA, 793 bp, Homo sapiens; identical to SEQ ID NO: 36780
  chr1:212873750-212874543
  hypo

SEQ ID NO: 139311 - DNA, 33 bp, Homo sapiens
  chr1:212963970-212964003
  hypo
taaaggttaataggccgggcgaggtggctcacg

SEQ ID NO: 139312 - DNA, 31 bp, Homo sapiens; identical to SEQ ID NO: 15354
  chr1:212964371-212964402
  hypo

SEQ ID NO: 139313 - DNA, 21 bp, Homo sapiens
  chr1:213007809-213007830
  hypo
tgagaaggagtctcactctgt

SEQ ID NO: 139314 - DNA, 474 bp, Homo sapiens; identical to SEQ ID NO: 61661
  chr1:213029990-213030464
  hypo

SEQ ID NO: 139315 - DNA, 30 bp, Homo sapiens
  chr1:213053584-213053614
  hypo
tctcatcctttaatcgccagtttaaacagg

SEQ ID NO: 139316 - DNA, 43 bp, Homo sapiens; identical to SEQ ID NO: 61662
  chr1:213117544-213117587
  hypo

SEQ ID NO: 139317 - DNA, 205 bp, Homo sapiens; identical to SEQ ID NO: 61663
  chr1:213134378-213134583
  hypo

SEQ ID NO: 139318 - DNA, 30 bp, Homo sapiens
  chr1:213187696-213187726
  hypo
ttatttaactttatacgctgttattctcgt

SEQ ID NO: 139319 - DNA, 181 bp, Homo sapiens; identical to SEQ ID NO: 61664
  chr1:213189653-213189834
  hypo

SEQ ID NO: 139320 - DNA, 30 bp, Homo sapiens
  chr1:213218695-213218725
  hypo
aatttatagtaatagcggtttaaatgaatc

SEQ ID NO: 139321 - DNA, 31 bp, Homo sapiens; identical to SEQ ID NO: 36785
  chr1:213266553-213266584
  hypo

SEQ ID NO: 139322 - DNA, 28 bp, Homo sapiens
  chr1:213282493-213282521
  hypo
tttgagacggggtctcgctctgttgccc

SEQ ID NO: 139323 - DNA, 28 bp, Homo sapiens
  chr1:213282760-213282788
  hypo
gagcaaccgtgcccggcccgatattctg

SEQ ID NO: 139324 - DNA, 31 bp, Homo sapiens; identical to SEQ ID NO: 15356
  chr1:213346046-213346077
  hypo

SEQ ID NO: 139325 - DNA, 30 bp, Homo sapiens; identical to SEQ ID NO: 1094
  chr1:213529200-213529230
  hypo

SEQ ID NO: 139326 - DNA, 30 bp, Homo sapiens; identical to SEQ ID NO: 15358
  chr1:213562763-213562793
  hypo

SEQ ID NO: 139327 - DNA, 30 bp, Homo sapiens
  chr1:213665583-213665613
  hypo
gtggattcgcagttgcgctatctgcattgg

SEQ ID NO: 139328 - DNA, 296 bp, Homo sapiens; identical to SEQ ID NO: 105007
  chr1:214453829-214454125
  hypo

SEQ ID NO: 139329 - DNA, 36 bp, Homo sapiens
  chr1:214503107-214503143
  hypo
agcatccagtgatgacggcaacgaagcatttgcgcc

SEQ ID NO: 139330 - DNA, 227 bp, Homo sapiens
  chr1:214503349-214503576
  hypo
tcagttcaggaattccgtgccttaaagtaaacagcgcattcctccgctgcagcccgccttatcctctgcatgggccctgcaggtgactgcaaaggcacgggaatgacaaggattgagtttacctgtagcagactgaagctttatctttttggaccccgtaggtttttaccagctatattgatctcctgtacccaacggaagatagaaatgaccggttaagagattct

SEQ ID NO: 139331 - DNA, 31 bp, Homo sapiens; identical to SEQ ID NO: 61671
  chr1:214543809-214543840
  hypo

SEQ ID NO: 139332 - DNA, 763 bp, Homo sapiens; identical to SEQ ID NO: 15359
  chr1:214556791-214557554
  hypo

SEQ ID NO: 139333 - DNA, 39 bp, Homo sapiens; identical to SEQ ID NO: 61673
  chr1:214557875-214557914
  hypo

SEQ ID NO: 139334 - DNA, 125 bp, Homo sapiens
  chr1:214566282-214566407
  hypo
catttataaccctgacgctctttgaaacaaaattaaacacattgggcgcccaaaccgctgaatgtattcagctgaggaacgtcttttgaaggtaaccaagaaaaagacaacgatagagtgagccc

SEQ ID NO: 139335 - DNA, 30 bp, Homo sapiens
  chr1:214566650-214566680
  hypo
tctttcaagctagctcgtcactctgttacc

SEQ ID NO: 139336 - DNA, 190 bp, Homo sapiens; identical to SEQ ID NO: 61674
  chr1:214569255-214569445
  hypo

SEQ ID NO: 139337 - DNA, 22 bp, Homo sapiens
  chr1:214600332-214600354
  hypo
tatgattacaggccagcgtggt

SEQ ID NO: 139338 - DNA, 445 bp, Homo sapiens; identical to SEQ ID NO: 15360
  chr1:214637792-214638237
  hypo

SEQ ID NO: 139339 - DNA, 201 bp, Homo sapiens; identical to SEQ ID NO: 61677
  chr1:214662583-214662784
  hypo

SEQ ID NO: 139340 - DNA, 31 bp, Homo sapiens; identical to SEQ ID NO: 61678
  chr1:214679484-214679515
  hypo

SEQ ID NO: 139341 - DNA, 23 bp, Homo sapiens
  chr1:214736761-214736784
  hypo
aaattttttttttttttgagacg

SEQ ID NO: 139342 - DNA, 20 bp, Homo sapiens
  chr1:214765486-214765506
  hypo
agagtcaaaaaaaaagaaag

SEQ ID NO: 139343 - DNA, 30 bp, Homo sapiens; identical to SEQ ID NO: 15362
  chr1:214788496-214788526
  hypo

SEQ ID NO: 139344 - DNA, 210 bp, Homo sapiens; identical to SEQ ID NO: 15363
  chr1:214788822-214789032
  hypo

SEQ ID NO: 139345 - DNA, 172 bp, Homo sapiens; identical to SEQ ID NO: 15364
  chr1:214809711-214809883
  hypo

SEQ ID NO: 139346 - DNA, 100 bp, Homo sapiens; identical to SEQ ID NO: 61684
  chr1:214819260-214819360
  hypo

SEQ ID NO: 139347 - DNA, 31 bp, Homo sapiens; identical to SEQ ID NO: 15365
  chr1:215567332-215567363
  hypo

SEQ ID NO: 139348 - DNA, 352 bp, Homo sapiens; identical to SEQ ID NO: 105013
  chr1:215740686-215741038
  hypo

SEQ ID NO: 139349 - DNA, 32 bp, Homo sapiens; identical to SEQ ID NO: 36809
  chr1:215744969-215745001
  hypo

SEQ ID NO: 139350 - DNA, 91 bp, Homo sapiens; identical to SEQ ID NO: 61688
  chr1:215745300-215745391
  hypo

SEQ ID NO: 139351 - DNA, 42 bp, Homo sapiens; identical to SEQ ID NO: 15369
  chr1:215764970-215765012
  hypo

SEQ ID NO: 139352 - DNA, 620 bp, Homo sapiens; identical to SEQ ID NO: 36810
  chr1:216774193-216774813
  hypo

SEQ ID NO: 139353 - DNA, 30 bp, Homo sapiens
  chr1:217769121-217769151
  hypo
atgagccaccgcacccggccgatccttctt

SEQ ID NO: 139354 - DNA, 46 bp, Homo sapiens
  chr1:217805221-217805267
  hypo
cctttttaaaatgaacgtatctgccgggtgtggtggctcacgcctg

SEQ ID NO: 139355 - DNA, 26 bp, Homo sapiens
  chr1:218567538-218567564
  hypo
ccgcacccggccggcattggcctctt

SEQ ID NO: 139356 - DNA, 30 bp, Homo sapiens
  chr1:218694983-218695013
  hypo
gatggttatacatgccgaagtcactcctct

SEQ ID NO: 139357 - DNA, 31 bp, Homo sapiens; identical to SEQ ID NO: 15371
  chr1:218897274-218897305
  hypo

SEQ ID NO: 139358 - DNA, 600 bp, Homo sapiens; identical to SEQ ID NO: 1126
  chr1:219346992-219347592
  hypo

SEQ ID NO: 139359 - DNA, 167 bp, Homo sapiens; identical to SEQ ID NO: 1127
  chr1:220101043-220101210
  hypo

SEQ ID NO: 139360 - DNA, 242 bp, Homo sapiens; identical to SEQ ID NO: 1128
  chr1:220101370-220101612
  hypo

SEQ ID NO: 139361 - DNA, 129 bp, Homo sapiens; identical to SEQ ID NO: 1129
  chr1:220101674-220101803
  hypo

SEQ ID NO: 139362 - DNA, 303 bp, Homo sapiens; identical to SEQ ID NO: 36832
  chr1:220101864-220102167
  hypo

SEQ ID NO: 139363 - DNA, 28 bp, Homo sapiens
  chr1:220221010-220221038
  hypo
gctgaggcaggatcgcctgagcccagga

SEQ ID NO: 139364 - DNA, 30 bp, Homo sapiens
  chr1:220221318-220221348
  hypo
taaagtacggggacccgggatggattccaa

SEQ ID NO: 139365 - DNA, 39 bp, Homo sapiens; identical to SEQ ID NO: 15377
  chr1:220376259-220376298
  hypo

SEQ ID NO: 139366 - DNA, 38 bp, Homo sapiens; identical to SEQ ID NO: 15378
  chr1:220426846-220426884
  hypo

SEQ ID NO: 139367 - DNA, 31 bp, Homo sapiens
  chr1:220648405-220648436
  hypo
acagctcgtaaggcggcgtgtctgtagttgt

SEQ ID NO: 139368 - DNA, 966 bp, Homo sapiens; identical to SEQ ID NO: 105044
  chr1:220701526-220702492
  hypo

SEQ ID NO: 139369 - DNA, 31 bp, Homo sapiens; identical to SEQ ID NO: 15380
  chr1:220881047-220881078
  hypo

SEQ ID NO: 139370 - DNA, 897 bp, Homo sapiens; identical to SEQ ID NO: 105046
  chr1:220921290-220922187
  hypo

SEQ ID NO: 139371 - DNA, 30 bp, Homo sapiens; identical to SEQ ID NO: 61704
  chr1:220978323-220978353
  hypo

SEQ ID NO: 139372 - DNA, 1325 bp, Homo sapiens; identical to SEQ ID NO: 105049
  chr1:221051884-221053209
  hypo

SEQ ID NO: 139373 - DNA, 503 bp, Homo sapiens; identical to SEQ ID NO: 105050
  chr1:221053255-221053758
  hypo

SEQ ID NO: 139374 - DNA, 379 bp, Homo sapiens
  chr1:221060167-221060546
  hypo
aggagaataacgcgtcggcacgcacacttagctgaggagcggagtctagggaagaaaggtggggaggatgctttatacaaaccgcactttcccctgctcctcacctggccctggaggtttccgctaccgccaaacccagaccgtaggtccacgccctggccccggggctttgaacgtgaagaaaatcatcatcggggaatgtcatgatgtgatttcaggtagaattctgccttatttaggccacctttcgccaggccagggggcacggcagagctggggggctcagggatgaagtgagccgggggggtgagcgcctgagggcgggagtcagaaggacgaataccaccctagtgctcgcaggaggcgcccctgcttccgc

SEQ ID NO: 139375 - DNA, 30 bp, Homo sapiens; identical to SEQ ID NO: 1139
  chr1:221118798-221118828
  hypo

SEQ ID NO: 139376 - DNA, 30 bp, Homo sapiens
  chr1:221447976-221448006
  hypo
ttgcaccccgccagacggacctcctcccac

SEQ ID NO: 139377 - DNA, 46 bp, Homo sapiens; identical to SEQ ID NO: 61708
  chr1:221660545-221660591
  hypo

SEQ ID NO: 139378 - DNA, 24 bp, Homo sapiens
  chr1:221724006-221724030
  hypo
tttgtgccactgttaccgggggtc

SEQ ID NO: 139379 - DNA, 29 bp, Homo sapiens
  chr1:221753160-221753189
  hypo
caggcatgagccaccgcgcccggccggaa

SEQ ID NO: 139380 - DNA, 30 bp, Homo sapiens
  chr1:221827936-221827966
  hypo
tagcgctgagccagtcgacttatcatttgt

SEQ ID NO: 139381 - DNA, 117 bp, Homo sapiens
  chr1:221910202-221910319
  hypo
ttccaagtcgactgccgcggtgtctcaccaactcgaaaatgacgaggcctcgcagtggctgcccagggcgcccagtggtgaggtcagcagtgtgtcctgccccgccccattgaggca

SEQ ID NO: 139382 - DNA, 30 bp, Homo sapiens; identical to SEQ ID NO: 36845
  chr1:222045430-222045460
  hypo

SEQ ID NO: 139383 - DNA, 30 bp, Homo sapiens; identical to SEQ ID NO: 36846
  chr1:222164932-222164962
  hypo

SEQ ID NO: 139384 - DNA, 30 bp, Homo sapiens
  chr1:222215162-222215192
  hypo
caaagagtgcgcacacgggcatgagtggct

SEQ ID NO: 139385 - DNA, 43 bp, Homo sapiens; identical to SEQ ID NO: 15384
  chr1:222222864-222222907
  hypo

SEQ ID NO: 139386 - DNA, 196 bp, Homo sapiens
  chr1:222260738-222260934
  hypo
ggtatgggtgaactctgtgtgcgtttttcataatggagcctgaagcagtacagttagccctcggacagggagcaaatgacctcatttgagtcctttctttcacactttctaagcctggaccttattttttccaagcctcagtttcctgctttggcgtgtacactgaattggctccagggcgcggtgtggggattta

SEQ ID NO: 139387 - DNA, 30 bp, Homo sapiens
  chr1:222721136-222721166
  hypo
cccagtaccgggcagcgatgcggcggtcct

SEQ ID NO: 139388 - DNA, 30 bp, Homo sapiens; identical to SEQ ID NO: 61715
  chr1:222794499-222794529
  hypo

SEQ ID NO: 139389 - DNA, 255 bp, Homo sapiens; identical to SEQ ID NO: 61716
  chr1:222910922-222911177
  hypo

SEQ ID NO: 139390 - DNA, 45 bp, Homo sapiens; identical to SEQ ID NO: 15386
  chr1:223003689-223003734
  hypo

SEQ ID NO: 139391 - DNA, 31 bp, Homo sapiens; identical to SEQ ID NO: 15387
  chr1:223195635-223195666
  hypo

SEQ ID NO: 139392 - DNA, 30 bp, Homo sapiens
  chr1:223210312-223210342
  hypo
agttgcgtgcaacggcgacaggaatgggcc

SEQ ID NO: 139393 - DNA, 406 bp, Homo sapiens
  chr1:223210751-223211157
  hypo
gtacagaggctggggcgagtgcttttgggatcctgccccacgcagcatctaggggcggatgtccgtgcctcccgaagcccaagtgagcagtgtgttacaggctctttcaggtttgccatctgcagatggcttgtgtgttaatcagctcaatggacaaagtgtgacagctttctctatcatctggagctcttgcctagtgtgcgggaaaaataggatcacacgtggtctcgaaggatgagtgcaagattttattgagtagtggaggtgcctctcagcaagatggatggagagtcgggaggaggcatggagtgggaaggtggtcttcccctgaagtccagctgttctcggccccttaggtccttctctgccgtgctgccctactgctttttgtcgctctgttcctctg

SEQ ID NO: 139394 - DNA, 386 bp, Homo sapiens; identical to SEQ ID NO: 61719
  chr1:223211665-223212051
  hypo

SEQ ID NO: 139395 - DNA, 20 bp, Homo sapiens
  chr1:223233055-223233075
  hypo
atttgagtcctccttgcggc

SEQ ID NO: 139396 - DNA, 188 bp, Homo sapiens
  chr1:223257414-223257602
  hypo
gctaattaactgtggcgcgtatgtttgtcttctccagttgatgctggtgcacgtgtatagtctgaggtttgtttttccccagcctcacccccatggtgcctaatacaccacatcgtgcacagcaggcgcttggagcacgcctgtaaactgaaggctgcttgggatgcccatcacgttcccttatgcca

SEQ ID NO: 139397 - DNA, 30 bp, Homo sapiens; identical to SEQ ID NO: 105069
  chr1:223306712-223306742
  hypo

SEQ ID NO: 139398 - DNA, 199 bp, Homo sapiens; identical to SEQ ID NO: 105070
  chr1:223307127-223307326
  hypo

SEQ ID NO: 139399 - DNA, 143 bp, Homo sapiens
  chr1:223315689-223315832
  hypo
actctgcttgtttgcagttcacggtgctggacggatgtgttcccaacactaggtaacaacaccgctctccctcctccgggagaaagccgcagccgtcgattcccacccaacagggcctcagcgccttcccagggcagcaccct

SEQ ID NO: 139400 - DNA, 31 bp, Homo sapiens; identical to SEQ ID NO: 61723
  chr1:223396862-223396893
  hypo

SEQ ID NO: 139401 - DNA, 1380 bp, Homo sapiens; identical to SEQ ID NO: 36853
  chr1:223537347-223538727
  hypo

SEQ ID NO: 139402 - DNA, 165 bp, Homo sapiens; identical to SEQ ID NO: 15393
  chr1:223813495-223813660
  hypo

SEQ ID NO: 139403 - DNA, 30 bp, Homo sapiens
  chr1:223842042-223842072
  hypo
tgacaaatgtctgtgcgcgtggctccacca

SEQ ID NO: 139404 - DNA, 57 bp, Homo sapiens
  chr1:223853103-223853160
  hypo
ttccttaccgtgggccgcttccagatgatgccttgagtttgcggagagcctggtcca

SEQ ID NO: 139405 - DNA, 199 bp, Homo sapiens
  chr1:223888416-223888615
  hypo
gttttccctgggaacgctttgtgcctatgacccttcgttcaacaaacctttaccaagcacccaccaggtgccaggcactatgccaggatcacaaaggtgaacaagaaagacatggtgtctcattcagaaatggatgggctagcggggaaatggacactaaatatttgtatcaccaggtgatacgcgctctcacagaagt

SEQ ID NO: 139406 - DNA, 101 bp, Homo sapiens; identical to SEQ ID NO: 61728
  chr1:223894432-223894533
  hypo

SEQ ID NO: 139407 - DNA, 21 bp, Homo sapiens
  chr1:223899321-223899342
  hypo
tttatttttgatatggagttt

SEQ ID NO: 139408 - DNA, 21 bp, Homo sapiens
  chr1:223899581-223899602
  hypo
aactaccgcacccagccttat

SEQ ID NO: 139409 - DNA, 776 bp, Homo sapiens; identical to SEQ ID NO: 36855
  chr1:223899910-223900686
  hypo

SEQ ID NO: 139410 - DNA, 195 bp, Homo sapiens; identical to SEQ ID NO: 61732
  chr1:223907485-223907680
  hypo

SEQ ID NO: 139411 - DNA, 43 bp, Homo sapiens; identical to SEQ ID NO: 61733
  chr1:223908288-223908331
  hypo

SEQ ID NO: 139412 - DNA, 204 bp, Homo sapiens; identical to SEQ ID NO: 61734
  chr1:223922151-223922355
  hypo

SEQ ID NO: 139413 - DNA, 87 bp, Homo sapiens
  chr1:223927890-223927977
  hypo
ggagtgagagaacaccgtgccacctggacgctgaaacaccattgagtcacctctgtttgaaatgcttgttccctggtgccgtaaaga

SEQ ID NO: 139414 - DNA, 224 bp, Homo sapiens; identical to SEQ ID NO: 105075
  chr1:223936528-223936752
  hypo

SEQ ID NO: 139415 - DNA, 203 bp, Homo sapiens; identical to SEQ ID NO: 105076
  chr1:223936995-223937198
  hypo

SEQ ID NO: 139416 - DNA, 62 bp, Homo sapiens
  chr1:223953250-223953312
  hypo
tgcctggattcagcccgctccttgctgggggagcagcattcgctccgcgcgtgcctctgagc

SEQ ID NO: 139417 - DNA, 18 bp, Homo sapiens
  chr1:223954365-223954383
  hypo
gaatgcaggcccatggcg

SEQ ID NO: 139418 - DNA, 30 bp, Homo sapiens; identical to SEQ ID NO: 61739
  chr1:223968136-223968166
  hypo

SEQ ID NO: 139419 - DNA, 30 bp, Homo sapiens; identical to SEQ ID NO: 61740
  chr1:224044367-224044397
  hypo

SEQ ID NO: 139420 - DNA, 105 bp, Homo sapiens; identical to SEQ ID NO: 61741
  chr1:224051403-224051508
  hypo

SEQ ID NO: 139421 - DNA, 30 bp, Homo sapiens
  chr1:224059997-224060027
  hypo
aatcgactatatatacgcaggtttgttcct

SEQ ID NO: 139422 - DNA, 27 bp, Homo sapiens
  chr1:224242939-224242966
  hypo
agtggatgagccaggcgcggtggctca

SEQ ID NO: 139423 - DNA, 20 bp, Homo sapiens
  chr1:224251307-224251327
  hypo
cccagcccaataaagcattt

SEQ ID NO: 139424 - DNA, 30 bp, Homo sapiens; identical to SEQ ID NO: 15407
  chr1:224252071-224252101
  hypo

SEQ ID NO: 139425 - DNA, 271 bp, Homo sapiens; identical to SEQ ID NO: 61745
  chr1:224300431-224300702
  hypo

SEQ ID NO: 139426 - DNA, 17 bp, Homo sapiens
  chr1:224321489-224321506
  hypo
ggcgtgagcctccaagc

SEQ ID NO: 139427 - DNA, 30 bp, Homo sapiens; identical to SEQ ID NO: 15409
  chr1:224327150-224327180
  hypo

SEQ ID NO: 139428 - DNA, 264 bp, Homo sapiens; identical to SEQ ID NO: 61748
  chr1:224345146-224345410
  hypo

SEQ ID NO: 139429 - DNA, 91 bp, Homo sapiens; identical to SEQ ID NO: 15411
  chr1:224368627-224368718
  hypo

SEQ ID NO: 139430 - DNA, 120 bp, Homo sapiens; identical to SEQ ID NO: 15412
  chr1:224386053-224386173
  hypo

SEQ ID NO: 139431 - DNA, 90 bp, Homo sapiens
  chr1:224400596-224400686
  hypo
gtgatcataaccctccgcatgtctatcttctgagtcacggcggcagtctggaccagctgctcgctattgctaggccggagcacagctgtc

SEQ ID NO: 139432 - DNA, 29 bp, Homo sapiens
  chr1:224407011-224407040
  hypo
acagaggctggagtgcaatggcgcaatct

SEQ ID NO: 139433 - DNA, 29 bp, Homo sapiens
  chr1:224407159-224407188
  hypo
gggatttcgccatgttggctaggctggat

SEQ ID NO: 139434 - DNA, 28 bp, Homo sapiens
  chr1:224447647-224447675
  hypo
aggcatgagccatcgcatccagccgtaa

SEQ ID NO: 139435 - DNA, 35 bp, Homo sapiens
  chr1:224447974-224448009
  hypo
ctattattttttgagacggagtcttgctctgtcac

SEQ ID NO: 139436 - DNA, 106 bp, Homo sapiens; identical to SEQ ID NO: 105083
  chr1:224481040-224481146
  hypo

SEQ ID NO: 139437 - DNA, 30 bp, Homo sapiens
  chr1:224486835-224486865
  hypo
agatatttagcttatcgctagctggatctc

SEQ ID NO: 139438 - DNA, 165 bp, Homo sapiens
  chr1:224487330-224487495
  hypo
ttgtctctggctatgcgtgccaatttaacaatggaatccaccgcgttttggaaaacaggtagcacctgagaaagttcagctttgctctgcactctgccctttccaccttttttctctttatcctcctagtgttgcccacagctttttcaacgtcagcccgcacca

SEQ ID NO: 139439 - DNA, 44 bp, Homo sapiens
  chr1:224490848-224490892
  hypo
tattatggccgggtgcgatgactcacacctgtaatcctagcact

SEQ ID NO: 139440 - DNA, 27 bp, Homo sapiens
  chr1:224493511-224493538
  hypo
tgggattacaggcgtgagccgccctgc

SEQ ID NO: 139441 - DNA, 29 bp, Homo sapiens
  chr1:224493969-224493998
  hypo
aaaaattttttttttttgagacggagtct

SEQ ID NO: 139442 - DNA, 22 bp, Homo sapiens
  chr1:224529878-224529900
  hypo
ttacaggcgtgagccacccctg

SEQ ID NO: 139443 - DNA, 30 bp, Homo sapiens; identical to SEQ ID NO: 61757
  chr1:224543850-224543880
  hypo

SEQ ID NO: 139444 - DNA, 35 bp, Homo sapiens; identical to SEQ ID NO: 1151
  chr1:224622765-224622800
  hypo

SEQ ID NO: 139445 - DNA, 30 bp, Homo sapiens; identical to SEQ ID NO: 36863
  chr1:224622840-224622870
  hypo

SEQ ID NO: 139446 - DNA, 30 bp, Homo sapiens
  chr1:224636352-224636382
  hypo
tgcagtgcaatcccacgtgtatcgttatga

SEQ ID NO: 139447 - DNA, 30 bp, Homo sapiens
  chr1:224636628-224636658
  hypo
tttctcccactgacacgaatcagaagctgg

SEQ ID NO: 139448 - DNA, 251 bp, Homo sapiens; identical to SEQ ID NO: 1152
  chr1:224691179-224691430
  hypo

SEQ ID NO: 139449 - DNA, 842 bp, Homo sapiens; identical to SEQ ID NO: 105092
  chr1:224803453-224804295
  hypo

SEQ ID NO: 139450 - DNA, 291 bp, Homo sapiens; identical to SEQ ID NO: 1154
  chr1:224804395-224804686
  hypo

SEQ ID NO: 139451 - DNA, 30 bp, Homo sapiens
  chr1:224908756-224908786
  hypo
tctcctttcctcctgcgtcgagtgctcccg

SEQ ID NO: 139452 - DNA, 92 bp, Homo sapiens; identical to SEQ ID NO: 15420
  chr1:225113073-225113165
  hypo

SEQ ID NO: 139453 - DNA, 639 bp, Homo sapiens; identical to SEQ ID NO: 36870
  chr1:225117199-225117838
  hypo

SEQ ID NO: 139454 - DNA, 21 bp, Homo sapiens
  chr1:225118300-225118321
  hypo
accatacttttttttttgaga

SEQ ID NO: 139455 - DNA, 35 bp, Homo sapiens; identical to SEQ ID NO: 61766
  chr1:225581811-225581846
  hypo

SEQ ID NO: 139456 - DNA, 30 bp, Homo sapiens; identical to SEQ ID NO: 61767
  chr1:225590847-225590877
  hypo

SEQ ID NO: 139457 - DNA, 409 bp, Homo sapiens; identical to SEQ ID NO: 15424
  chr1:225597843-225598252
  hypo

SEQ ID NO: 139458 - DNA, 30 bp, Homo sapiens; identical to SEQ ID NO: 15425
  chr1:225598546-225598576
  hypo

SEQ ID NO: 139459 - DNA, 34 bp, Homo sapiens; identical to SEQ ID NO: 15426
  chr1:225608022-225608056
  hypo

SEQ ID NO: 139460 - DNA, 957 bp, Homo sapiens; identical to SEQ ID NO: 105098
  chr1:225614335-225615292
  hypo

SEQ ID NO: 139461 - DNA, 30 bp, Homo sapiens
  chr1:225622963-225622993
  hypo
tgttttttctctaaccgcctaaatcctttg

SEQ ID NO: 139462 - DNA, 30 bp, Homo sapiens; identical to SEQ ID NO: 61772
  chr1:225635110-225635140
  hypo

SEQ ID NO: 139463 - DNA, 30 bp, Homo sapiens; identical to SEQ ID NO: 61773
  chr1:225635825-225635855
  hypo

SEQ ID NO: 139464 - DNA, 244 bp, Homo sapiens
  chr1:225637173-225637417
  hypo
aggaaaggcaggcgccgactgccaactatacgggtgcatatctcagcgcggtcacacccttcttgcccagacctgcctctgctctgtcctcctggcccctgaggagcacctggggcagaggaggagcccctaggaaccttccatgatagagcacaggagtctgcaagcggttgatttggtctcctctacccggcccctccctctctctggaccctgcaatgtcgaggtagagagtgttattccc

SEQ ID NO: 139465 - DNA, 31 bp, Homo sapiens; identical to SEQ ID NO: 15429
  chr1:225645397-225645428
  hypo

SEQ ID NO: 139466 - DNA, 26 bp, Homo sapiens
  chr1:225646855-225646881
  hypo
agaaaaataatcggttgtggaggtgg

SEQ ID NO: 139467 - DNA, 30 bp, Homo sapiens; identical to SEQ ID NO: 15430
  chr1:225651944-225651974
  hypo

SEQ ID NO: 139468 - DNA, 30 bp, Homo sapiens; identical to SEQ ID NO: 61778
  chr1:225663386-225663416
  hypo

SEQ ID NO: 139469 - DNA, 46 bp, Homo sapiens; identical to SEQ ID NO: 61779
  chr1:225696994-225697040
  hypo

SEQ ID NO: 139470 - DNA, 30 bp, Homo sapiens; identical to SEQ ID NO: 15431
  chr1:225842738-225842768
  hypo

SEQ ID NO: 139471 - DNA, 30 bp, Homo sapiens; identical to SEQ ID NO: 61781
  chr1:225883146-225883176
  hypo

SEQ ID NO: 139472 - DNA, 93 bp, Homo sapiens; identical to SEQ ID NO: 61782
  chr1:225907935-225908028
  hypo

SEQ ID NO: 139473 - DNA, 93 bp, Homo sapiens; identical to SEQ ID NO: 61783
  chr1:225908327-225908420
  hypo

SEQ ID NO: 139474 - DNA, 83 bp, Homo sapiens; identical to SEQ ID NO: 61784
  chr1:225920483-225920566
  hypo

SEQ ID NO: 139475 - DNA, 21 bp, Homo sapiens
  chr1:225936215-225936236
  hypo
ccgcgccgggctggttcttcc

SEQ ID NO: 139476 - DNA, 30 bp, Homo sapiens
  chr1:225936440-225936470
  hypo
tccccctggcacatccgtcttcatgcactg

SEQ ID NO: 139477 - DNA, 44 bp, Homo sapiens; identical to SEQ ID NO: 61785
  chr1:225945259-225945303
  hypo

SEQ ID NO: 139478 - DNA, 37 bp, Homo sapiens
  chr1:225956131-225956168
  hypo
tattgtgtgatgaggcgcagagcgggtatagaatacc

SEQ ID NO: 139479 - DNA, 29 bp, Homo sapiens
  chr1:225980372-225980401
  hypo
ccgtgcccggctccagtatgaccttttaa

SEQ ID NO: 139480 - DNA, 79 bp, Homo sapiens; identical to SEQ ID NO: 61787
  chr1:225988362-225988441
  hypo

SEQ ID NO: 139481 - DNA, 30 bp, Homo sapiens; identical to SEQ ID NO: 61788
  chr1:225996967-225996997
  hypo

SEQ ID NO: 139482 - DNA, 51 bp, Homo sapiens; identical to SEQ ID NO: 36876
  chr1:225998106-225998157
  hypo

SEQ ID NO: 139483 - DNA, 28 bp, Homo sapiens
  chr1:226003695-226003723
  hypo
agagaatgccaaggactggcccggcatg

SEQ ID NO: 139484 - DNA, 56 bp, Homo sapiens; identical to SEQ ID NO: 61791
  chr1:226026644-226026700
  hypo

SEQ ID NO: 139485 - DNA, 180 bp, Homo sapiens
  chr1:226053431-226053611
  hypo
ggagccactccatacacgtgtggcagggccaggtccttctcagatctcacctggatacccaagcgagagacagaaggcgctcacctaaggtgctcgccctgcgggtggggctgtgttggtcctacgtggagggggctcagctcccctcccaccccacctgcttaccggaagtggctctcc

SEQ ID NO: 139486 - DNA, 131 bp, Homo sapiens
  chr1:226059445-226059576
  hypo
ctggggaagcccaagggattccgtaccccttcctgcctgcaaattcatccagtctcaaggtcccgggtcatccagctgccatccctcctgtggtatttcccaagttcaggtgccttcgtcgatgcagaaaa

SEQ ID NO: 139487 - DNA, 30 bp, Homo sapiens; identical to SEQ ID NO: 61794
  chr1:226062326-226062356
  hypo

SEQ ID NO: 139488 - DNA, 226 bp, Homo sapiens; identical to SEQ ID NO: 61795
  chr1:226062773-226062999
  hypo

SEQ ID NO: 139489 - DNA, 30 bp, Homo sapiens
  chr1:226076065-226076095
  hypo
aggaggattcaggcccgctgcacccctgac

SEQ ID NO: 139490 - DNA, 391 bp, Homo sapiens
  chr1:226076320-226076711
  hypo
cctgactgcatgcaccgctgcatgctgaggccccgccatcctcacaggcccggccccacctcactgccccttagaccgtggccctcactcagcctcccacagacctctgcaaggccaggagccctttgacaccaccggagtgggcacatctgacctgccccatgggaccaggggcagcagggagggagggcctcacctcggaagctctggctgaacctctttccgcgggagcggtccccgtggctgcgctgcagcagggccacgtactgggccctcacgtgggtggggatgaccagctcctccatgtcggccctgtccagggtgggcacctctttgagctgcagctgccgcagcaggctgcccaggagctgctccccggtcagggcggccc

SEQ ID NO: 139491 - DNA, 263 bp, Homo sapiens; identical to SEQ ID NO: 15435
  chr1:226077114-226077377
  hypo

SEQ ID NO: 139492 - DNA, 31 bp, Homo sapiens; identical to SEQ ID NO: 61797
  chr1:226094607-226094638
  hypo

SEQ ID NO: 139493 - DNA, 30 bp, Homo sapiens
  chr1:226096345-226096375
  hypo
ctgctcatctcatctcggccctgggcaacc

SEQ ID NO: 139494 - DNA, 148 bp, Homo sapiens; identical to SEQ ID NO: 15436
  chr1:226102815-226102963
  hypo

SEQ ID NO: 139495 - DNA, 375 bp, Homo sapiens
  chr1:226109457-226109832
  hypo
gtgcccaagaggtgggcgccacccccagtccaagcctgcctgccagcccatcttgctgcctgggttcctagaaggctgagcgagcaaatgagggcctcacataggcaggcccgctgccactgagccccgtgacggcatcgatgaggtcctcttccacctcagtgcagaagcccacgctgctcatgagctgctccaggagctgcccatcctccaccagggcatgggtgcccgtggcgtacactgtagcgccttcctgcactaccacaggtgtgttggtcatgcagcgaatcactttgggggctggctggaatgccatcagcttctagggtgagggagagagccgaatgagtggccagggcacggctcccaccagca

SEQ ID NO: 139496 - DNA, 241 bp, Homo sapiens
  chr1:226163117-226163358
  hypo
ataacacaaaaataaagacatggttgtatacacagacactgaaattcctctagcggaaaacaacagcaaatgattaaagataacgttgtttgttgaggacagaagtaataatgttatgggatattcagcaagactaaatgatttattcaccacctgtacagtgaaaactgaagctaaatctgagaattaaggaatcagaaagaacagggcgccgggcgcggtggctcacgtccgtaatccc

SEQ ID NO: 139497 - DNA, 31 bp, Homo sapiens; identical to SEQ ID NO: 61801
  chr1:226196858-226196889
  hypo

SEQ ID NO: 139498 - DNA, 30 bp, Homo sapiens
  chr1:226200638-226200668
  hypo
agttacgttcctttgcgtgattcttgcaat

SEQ ID NO: 139499 - DNA, 25 bp, Homo sapiens
  chr1:226227367-226227392
  hypo
tctggtgatccgcctgcctaggcct

SEQ ID NO: 139500 - DNA, 31 bp, Homo sapiens; identical to SEQ ID NO: 15439
  chr1:226250006-226250037
  hypo

SEQ ID NO: 139501 - DNA, 28 bp, Homo sapiens
  chr1:226264130-226264158
  hypo
gcccgagccacggcgcctggcctggaaa

SEQ ID NO: 139502 - DNA, 172 bp, Homo sapiens; identical to SEQ ID NO: 36883
  chr1:226297379-226297551
  hypo

SEQ ID NO: 139503 - DNA, 36 bp, Homo sapiens
  chr1:226304035-226304071
  hypo
agggtcagggtgagccgtgttcgggcccttagtgcc

SEQ ID NO: 139504 - DNA, 36 bp, Homo sapiens; identical to SEQ ID NO: 61805
  chr1:226310958-226310994
  hypo

SEQ ID NO: 139505 - DNA, 96 bp, Homo sapiens
  chr1:226311809-226311905
  hypo
gggattgccccttactaggagcggtgtgcggatgctgatcagcccaccgaatgctcaccactgaggggctgcagcggccaggtgtgaggggaagag

SEQ ID NO: 139506 - DNA, 161 bp, Homo sapiens
  chr1:226314867-226315028
  hypo
aatagccgctcatgtcggctgacggagcggtgtggggccgcatgcgaagctgcctccgcgccttccccgagcggctggccgcctgcggggccgagtaaggacttctgcgcgcgggagttcgaggccctgcggagctgcttcgccgccgcggccaagaagac

SEQ ID NO: 139507 - DNA, 30 bp, Homo sapiens
  chr1:226354037-226354067
  hypo
tgcccaggctggtctcgaacttttgggctc

SEQ ID NO: 139508 - DNA, 31 bp, Homo sapiens; identical to SEQ ID NO: 61806
  chr1:226378903-226378934
  hypo

SEQ ID NO: 139509 - DNA, 30 bp, Homo sapiens; identical to SEQ ID NO: 61807
  chr1:226410182-226410212
  hypo

SEQ ID NO: 139510 - DNA, 120 bp, Homo sapiens; identical to SEQ ID NO: 1166
  chr1:226411103-226411223
  hypo

SEQ ID NO: 139511 - DNA, 765 bp, Homo sapiens; identical to SEQ ID NO: 36887
  chr1:226411246-226412011
  hypo

SEQ ID NO: 139512 - DNA, 18 bp, Homo sapiens
  chr1:226437619-226437637
  hypo
ctcacacctgtaatcccg

SEQ ID NO: 139513 - DNA, 30 bp, Homo sapiens
  chr1:226457263-226457293
  hypo
cactactaccaccaacgtggtcgatgagaa

SEQ ID NO: 139514 - DNA, 30 bp, Homo sapiens
  chr1:226496986-226497016
  hypo
gcccggctccgcccgcgcctgcccggggag

SEQ ID NO: 139515 - DNA, 149 bp, Homo sapiens; identical to SEQ ID NO: 105122
  chr1:226497225-226497374
  hypo

SEQ ID NO: 139516 - DNA, 257 bp, Homo sapiens; identical to SEQ ID NO: 105123
  chr1:226497393-226497650
  hypo

SEQ ID NO: 139517 - DNA, 30 bp, Homo sapiens
  chr1:226588638-226588668
  hypo
tggccagcttgacagcgtatggcactgtgc

SEQ ID NO: 139518 - DNA, 30 bp, Homo sapiens
  chr1:226588933-226588963
  hypo
gcgggtccttggcttcgctctggaaagcat

SEQ ID NO: 139519 - DNA, 205 bp, Homo sapiens
  chr1:226596302-226596507
  hypo
gggatcaggggcatgagctaccacgccggccccaaactcttaagtgtgtcctctctcccctgagggcagctgggtccgggaagcgcaggcccccgcctcgggaatatagttgattggcccgaggtggaccctgcagtgctaggtccaccctcctggcttggacgggcgttctaacctgccgtccacagaccgtcgggacaaaata

SEQ ID NO: 139520 - DNA, 21 bp, Homo sapiens
  chr1:226643671-226643692
  hypo
cagctgcggtgtcttcatgga

SEQ ID NO: 139521 - DNA, 1040 bp, Homo sapiens; identical to SEQ ID NO: 105125
  chr1:226736490-226737530
  hypo

SEQ ID NO: 139522 - DNA, 29 bp, Homo sapiens
  chr1:226737804-226737833
  hypo
cgtgcccctgtcggcgagcctgttgccaa

SEQ ID NO: 139523 - DNA, 30 bp, Homo sapiens; identical to SEQ ID NO: 61816
  chr1:226748116-226748146
  hypo

SEQ ID NO: 139524 - DNA, 30 bp, Homo sapiens
  chr1:226755701-226755731
  hypo
gggagaggtcatgtgcgtgcccgggagcct

SEQ ID NO: 139525 - DNA, 30 bp, Homo sapiens
  chr1:226756000-226756030
  hypo
ctgtgagtcccactgcgggttcagggctgc

SEQ ID NO: 139526 - DNA, 31 bp, Homo sapiens; identical to SEQ ID NO: 61817
  chr1:226774439-226774470
  hypo

SEQ ID NO: 139527 - DNA, 343 bp, Homo sapiens
  chr1:226789938-226790281
  hypo
tgctctggaaagcactgtgggcgcaggcaccagagcatcagagagtggggtggagatgagaacgcccacagagaggctgggatgctccggcaggctccaactggccttgctgtacccactgcccaccgcaaaggcacgccacgtctgctgggccgggccacaccgggccctgtctgggtgagcaggggctcaccaaggggacaggactgtggtagacccgtcctgtgggaccccacctgcctcaaaatctggtgccccgagtgtttactgtgtggtctcctgggggcagcaccagggtgtgggtgaggatggccaggctccaccctagcgtggaaaggcccac

SEQ ID NO: 139528 - DNA, 30 bp, Homo sapiens
  chr1:226812491-226812521
  hypo
aagggctcggggacacggaaggggagccca

SEQ ID NO: 139529 - DNA, 31 bp, Homo sapiens; identical to SEQ ID NO: 15446
  chr1:226822615-226822646
  hypo

SEQ ID NO: 139530 - DNA, 377 bp, Homo sapiens; identical to SEQ ID NO: 61820
  chr1:226826316-226826693
  hypo

SEQ ID NO: 139531 - DNA, 340 bp, Homo sapiens
  chr1:226827390-226827730
  hypo
gtcagcagggaccctcgggcagaaactgttctcacccacccaacaccacagagcaggcgagccccatctgaacctggggcagggccagtggaggcacccaggtgtccacgtatggcgcatggaggtggcgtgcacagcagaggggagcctgccctgtgcccagacacaggagaacgcagagggtggcgctgacatccccaggcgagtgaacagtggtaggaaaggcccggaggtgtgaagggcatccaggctgaggatggaggagcatgacccggggctggcctgtcctgggtgcaacagcagggccaagagagagggtcggcctcgacttcccactctg

SEQ ID NO: 139532 - DNA, 428 bp, Homo sapiens
  chr1:226829325-226829753
  hypo
ctctcgcctggctttcggtgccaggcaccgtctgggctaaatggagagtcctcggcagagggctgacagctgggcagggctagaagccactctgctctgaggcctgagccccctacacagccatcccgcctgaggaataggctgatgtctccaaatgtctggccttggggcgggccacccacattctgagcctgtgcctggagaagcttacagcttccaaagggcgctgagagaagccaagccccctgaggtgggcacgggtggggcccgaggctgccctcactcgccggcctcaccttgattccctcgatcctgaaccccagggtggccgtggagctgatggtctcccgccactgcatgtaccgtggcttggtcacagcccgctgtgctttttcctcctcggtgggggcctcggggtccacctcgat

SEQ ID NO: 139533 - DNA, 153 bp, Homo sapiens; identical to SEQ ID NO: 61822
  chr1:226833940-226834093
  hypo

SEQ ID NO: 139534 - DNA, 30 bp, Homo sapiens; identical to SEQ ID NO: 61823
  chr1:226834588-226834618
  hypo

SEQ ID NO: 139535 - DNA, 70 bp, Homo sapiens; identical to SEQ ID NO: 61824
  chr1:226834884-226834954
  hypo

SEQ ID NO: 139536 - DNA, 268 bp, Homo sapiens
  chr1:226846345-226846613
  hypo
cccgtctccacccgccgtgtgatgttcccgcaggctggatggcaccgaacatcctccacagcgctgctcaccaggcacgaggttcttctcccccgccctttatggaacccatgagcgtagggtagggattactgagcgctgtcgggttggtgaagtccctccttcagaagcaactgctgggcctggggcaggagaacgaggatgatgggtccttaccagcccctgcagaccgggaccccctgcaggggctacacgaaccagctcagtg

SEQ ID NO: 139537 - DNA, 209 bp, Homo sapiens; identical to SEQ ID NO: 15447
  chr1:226908274-226908483
  hypo

SEQ ID NO: 139538 - DNA, 99 bp, Homo sapiens
  chr1:226910143-226910242
  hypo
aggcgggagacggctcggctctcaggagagagcagctgatttttaatgtacagtgtaataccgcaaggtaaacagcatcccagacgctgctccatatgg

SEQ ID NO: 139539 - DNA, 31 bp, Homo sapiens; identical to SEQ ID NO: 15448
  chr1:226911753-226911784
  hypo

SEQ ID NO: 139540 - DNA, 2121 bp, Homo sapiens; identical to SEQ ID NO: 36895
  chr1:226924900-226927021
  hypo

SEQ ID NO: 139541 - DNA, 145 bp, Homo sapiens
  chr1:226941994-226942139
  hypo
tctctcgctctgtctcgttctctctctctctctctcatacacacacatgcatgcgtgcatgcatatacaagaatacctacttttattctacttcacagatattgtttttgacaaattgaaggtttgtgacaacgctgcttcaagc

SEQ ID NO: 139542 - DNA, 30 bp, Homo sapiens
  chr1:226962517-226962547
  hypo
cctcatgcccggcctcgattttatgattat

SEQ ID NO: 139543 - DNA, 18 bp, Homo sapiens
  chr1:226962799-226962817
  hypo
aaatatagccggacgcgg

SEQ ID NO: 139544 - DNA, 22 bp, Homo sapiens
  chr1:226983985-226984007
  hypo
taaaaggtggctcttgctgggc

SEQ ID NO: 139545 - DNA, 108 bp, Homo sapiens; identical to SEQ ID NO: 105133
  chr1:227058779-227058887
  hypo

SEQ ID NO: 139546 - DNA, 30 bp, Homo sapiens; identical to SEQ ID NO: 36898
  chr1:227058890-227058920
  hypo

SEQ ID NO: 139547 - DNA, 30 bp, Homo sapiens
  chr1:227128391-227128421
  hypo
cgctgcttgcccgaccgccttcccgctgcc

SEQ ID NO: 139548 - DNA, 30 bp, Homo sapiens
  chr1:227162822-227162852
  hypo
ttcgctaagtcagatcgtgtgctcgagtgc

SEQ ID NO: 139549 - DNA, 30 bp, Homo sapiens
  chr1:227163065-227163095
  hypo
gagccgccagccgcacggggccttggaaat

SEQ ID NO: 139550 - DNA, 30 bp, Homo sapiens
  chr1:227163434-227163464
  hypo
ctactcacgcccgcacgacagcctgtgagg

SEQ ID NO: 139551 - DNA, 30 bp, Homo sapiens; identical to SEQ ID NO: 61830
  chr1:227163685-227163715
  hypo

SEQ ID NO: 139552 - DNA, 30 bp, Homo sapiens; identical to SEQ ID NO: 15450
  chr1:227163981-227164011
  hypo

SEQ ID NO: 139553 - DNA, 30 bp, Homo sapiens; identical to SEQ ID NO: 61832
  chr1:227165249-227165279
  hypo

SEQ ID NO: 139554 - DNA, 30 bp, Homo sapiens; identical to SEQ ID NO: 61833
  chr1:227167005-227167035
  hypo

SEQ ID NO: 139555 - DNA, 30 bp, Homo sapiens; identical to SEQ ID NO: 61834
  chr1:227170613-227170643
  hypo

SEQ ID NO: 139556 - DNA, 30 bp, Homo sapiens; identical to SEQ ID NO: 61835
  chr1:227172589-227172619
  hypo

SEQ ID NO: 139557 - DNA, 30 bp, Homo sapiens
  chr1:227173199-227173229
  hypo
tgctgccctgctgagcgtgagattttccga

SEQ ID NO: 139558 - DNA, 30 bp, Homo sapiens; identical to SEQ ID NO: 61836
  chr1:227174061-227174091
  hypo

SEQ ID NO: 139559 - DNA, 30 bp, Homo sapiens
  chr1:227175367-227175397
  hypo
ttgggactggttcagcgtgaggcccttggc

SEQ ID NO: 139560 - DNA, 122 bp, Homo sapiens; identical to SEQ ID NO: 15451
  chr1:227175822-227175944
  hypo

SEQ ID NO: 139561 - DNA, 30 bp, Homo sapiens; identical to SEQ ID NO: 61838
  chr1:227182600-227182630
  hypo

SEQ ID NO: 139562 - DNA, 196 bp, Homo sapiens; identical to SEQ ID NO: 61839
  chr1:227191026-227191222
  hypo

SEQ ID NO: 139563 - DNA, 83 bp, Homo sapiens; identical to SEQ ID NO: 61840
  chr1:227248037-227248120
  hypo

SEQ ID NO: 139564 - DNA, 31 bp, Homo sapiens; identical to SEQ ID NO: 61841
  chr1:227254155-227254186
  hypo

SEQ ID NO: 139565 - DNA, 24 bp, Homo sapiens
  chr1:227270127-227270151
  hypo
tgtcctggctgggcacggtggctc

SEQ ID NO: 139566 - DNA, 31 bp, Homo sapiens; identical to SEQ ID NO: 61842
  chr1:227311005-227311036
  hypo

SEQ ID NO: 139567 - DNA, 25 bp, Homo sapiens
  chr1:227318266-227318291
  hypo
aggggaggtgtaggtgcggtggctc

SEQ ID NO: 139568 - DNA, 172 bp, Homo sapiens; identical to SEQ ID NO: 61844
  chr1:227370568-227370740
  hypo

SEQ ID NO: 139569 - DNA, 45 bp, Homo sapiens; identical to SEQ ID NO: 15454
  chr1:227376421-227376466
  hypo

SEQ ID NO: 139570 - DNA, 36 bp, Homo sapiens
  chr1:227383162-227383198
  hypo
caccacgtcggggtaccctaacgttgaactgaccct

SEQ ID NO: 139571 - DNA, 120 bp, Homo sapiens; identical to SEQ ID NO: 15455
  chr1:227422354-227422474
  hypo

SEQ ID NO: 139572 - DNA, 28 bp, Homo sapiens
  chr1:227453319-227453347
  hypo
agactccgtcttaaaaaaaaaaaaaaaa

SEQ ID NO: 139573 - DNA, 35 bp, Homo sapiens; identical to SEQ ID NO: 15456
  chr1:227463300-227463335
  hypo

SEQ ID NO: 139574 - DNA, 23 bp, Homo sapiens
  chr1:227469606-227469629
  hypo
gaagccaggcatgttggctcacg

SEQ ID NO: 139575 - DNA, 29 bp, Homo sapiens
  chr1:227478959-227478988
  hypo
gaagtctaggctgggcgcggtggctcatg

SEQ ID NO: 139576 - DNA, 153 bp, Homo sapiens
  chr1:227488574-227488727
  hypo
tgaacatcagaagagcgggtaagcgctgctaaaccaaagctacctttgcagttgtatagttgacacgtattctgatgcctcctcatagcacctggcagctccttagttttaagaaataataatcatatccatcctttgcgtcatttacatcat

SEQ ID NO: 139577 - DNA, 31 bp, Homo sapiens; identical to SEQ ID NO: 15457
  chr1:227545941-227545972
  hypo

SEQ ID NO: 139578 - DNA, 21 bp, Homo sapiens
  chr1:227551690-227551711
  hypo
aaactccgtgtcaaaaaaaag

SEQ ID NO: 139579 - DNA, 211 bp, Homo sapiens; identical to SEQ ID NO: 15458
  chr1:227618269-227618480
  hypo

SEQ ID NO: 139580 - DNA, 206 bp, Homo sapiens; identical to SEQ ID NO: 1175
  chr1:227652538-227652744
  hypo

SEQ ID NO: 139581 - DNA, 667 bp, Homo sapiens; identical to SEQ ID NO: 105140
  chr1:227729829-227730496
  hypo

SEQ ID NO: 139582 - DNA, 34 bp, Homo sapiens; identical to SEQ ID NO: 15460
  chr1:227730784-227730818
  hypo

SEQ ID NO: 139583 - DNA, 65 bp, Homo sapiens; identical to SEQ ID NO: 61858
  chr1:227750842-227750907
  hypo

SEQ ID NO: 139584 - DNA, 19 bp, Homo sapiens
  chr1:227768582-227768601
  hypo
atcccgcctttgcactcca

SEQ ID NO: 139585 - DNA, 31 bp, Homo sapiens; identical to SEQ ID NO: 61860
  chr1:227825261-227825292
  hypo

SEQ ID NO: 139586 - DNA, 182 bp, Homo sapiens; identical to SEQ ID NO: 61861
  chr1:227947115-227947297
  hypo

SEQ ID NO: 139587 - DNA, 205 bp, Homo sapiens; identical to SEQ ID NO: 15462
  chr1:227948692-227948897
  hypo

SEQ ID NO: 139588 - DNA, 151 bp, Homo sapiens
  chr1:227955886-227956037
  hypo
ccacagggtatgtggcgcacatgcagtctccaggtgcagcttccgtctcgtcttcccctacagttgattcctggaaaaagcaaagctgtctgttgggctgagactgtgcactttggatcttgcagttctgtgtccacgcagggcatgggct

SEQ ID NO: 139589 - DNA, 30 bp, Homo sapiens
  chr1:227956516-227956546
  hypo
gagagtgcctcggcacgtggctgagactgg

SEQ ID NO: 139590 - DNA, 205 bp, Homo sapiens
  chr1:227961298-227961503
  hypo
tgccagccctgctcacgggaagcgctctacactgcgtgccatttcgtatctttatgctgcacatttacggcaccttctccacgtttagatgtgcaggtagttagcgtggtgctccagctacttgtgctgcttggtgctgtggtgtgccatgcaggcctgcagcttgggggggtgtgccccgctacacagccggccaccacaggcc

SEQ ID NO: 139591 - DNA, 748 bp, Homo sapiens
  chr1:227962630-227963378
  hypo
ccagctccttgctctgcatggcgtttcctgtgcacgcctggagtgagctcagctggcccggctgaatcaaagtcccctctgagcagcgaggccgccgtgctcattgcctcgacccaccgccgcgggggcgtcctgaggaggggggccctgcatctgcccccccggctagtgcacagaccaccttggcctccaggaatgcagcggaggggacttgggcgggccgcagggtggtctgcgagtgccgagtgtgacagatcgcagcagagagtgttctttacggcctccagagcttggctgcggtgagagccaattttccccctttacattctctgcagcatattaatggccccaactggtagaactattttgagttgtagacagcttgatttatcccagctctgttcttaaatggttgctaatttctcactgcaagaaaattcacagttcctcagtgagtcagcttaatgacacggccagggcagcccagctaacagcagactgctctcggtgcttggcttggtacggtgatgtgccgcactccggcgtcgcgaggcgagccagagcagacatgtcccatgggacacaagagccgatgtcccgcagagtttggaggccaaggccgtgcgtgcctctggagcactgtcttcccgggctgctggtggcagcgaacgcacaaggctgggacgtcttcaggcccccagcactcagccttgccctaatggtgcgcgcatggacacacagctgcttt

SEQ ID NO: 139592 - DNA, 79 bp, Homo sapiens; identical to SEQ ID NO: 61865
  chr1:228003874-228003953
  hypo

SEQ ID NO: 139593 - DNA, 31 bp, Homo sapiens; identical to SEQ ID NO: 61866
  chr1:228030205-228030236
  hypo

SEQ ID NO: 139594 - DNA, 30 bp, Homo sapiens
  chr1:228076410-228076440
  hypo
cggcctcccctgcagcgcctcagggacctg

SEQ ID NO: 139595 - DNA, 31 bp, Homo sapiens; identical to SEQ ID NO: 61867
  chr1:228078002-228078033
  hypo

SEQ ID NO: 139596 - DNA, 85 bp, Homo sapiens; identical to SEQ ID NO: 61868
  chr1:228079083-228079168
  hypo

SEQ ID NO: 139597 - DNA, 450 bp, Homo sapiens; identical to SEQ ID NO: 61869
  chr1:228081839-228082289
  hypo

SEQ ID NO: 139598 - DNA, 279 bp, Homo sapiens
  chr1:228083393-228083672
  hypo
atgagccatcagacacaactacggaagtgcaaaggtcagtcctggaggcggcgagttggcagtagcctgagggtaggacttgcgtctccctgtgtacctgccgcctccaagttcagatgcactggccgttctcgctggggccatgagccaggcagcacccggggcccggcaccccaggcctggactcctgggcctctgctcgctccagtttccggcacctttcccaggaggggctctgggtgagtgctggccctgtaggtccctcggcctgtcgggaga

SEQ ID NO: 139599 - DNA, 30 bp, Homo sapiens
  chr1:228087732-228087762
  hypo
tccggggtacaactccgccagacggcccag

SEQ ID NO: 139600 - DNA, 46 bp, Homo sapiens; identical to SEQ ID NO: 61871
  chr1:228092975-228093021
  hypo

SEQ ID NO: 139601 - DNA, 30 bp, Homo sapiens
  chr1:228103735-228103765
  hypo
tgctttcctcacccccgcaagccaagatgg

SEQ ID NO: 139602 - DNA, 612 bp, Homo sapiens
  chr1:228109225-228109837
  hypo
ttgcaggtgtagacctcctcacgctgcgtgcactgcctgcactccacatagcagcaccaacgcacctggcactggcagggccttgtcaccacccggctctgtgtgttatggccgcggccacagcagatgctctcgcagttcttctcacggtggcacctacggccagcggtgcccggggagaagcggccagccaggcagaagctaggcgagtcatccaggtgcaccagctctggagtgcggggcagcgggtcgctgccacctgcccccgaggcacggccccgtggtggggagatggcacctgcctcgccggcagcttcattggtggtgctgcccaccttgagtgccgtctcatacttgtgcttcagatgcttgcccacctcatggaaaggcgccaactgccgccagcaggtccgcaccgtgcatgagcctgacacgccgtggcacttgcaggtggtctccaccccagccttgatcacctggcagaagggtgcgggagggagggcagtgtgagggctgtgcaggtgggcccagtgagcagaccctgccctggacccccagagggaccccacacccccacccaggcccaggccctgccggcgggcgtcaccactg

SEQ ID NO: 139603 - DNA, 238 bp, Homo sapiens
  chr1:228111801-228112039
  hypo
ccctcccttcccaccccgccagccccaccccacttgccttcacacccacgaggttgttgtggaagtccacacgggctcgcagatccttgcttgaccgtctgcccaggaattccttgacgaacttgctgctgtacttaaggttgtctccgcagcccccccactgccaggcctcacggttctccaggtcgggtgcctcatcgcaggtacagcgctccatgcggcccgcgctgcacgcctt

SEQ ID NO: 139604 - DNA, 306 bp, Homo sapiens; identical to SEQ ID NO: 15469
  chr1:228112929-228113235
  hypo

SEQ ID NO: 139605 - DNA, 30 bp, Homo sapiens; identical to SEQ ID NO: 15470
  chr1:228114206-228114236
  hypo

SEQ ID NO: 139606 - DNA, 30 bp, Homo sapiens
  chr1:228126253-228126283
  hypo
accgatagagatgcacgcatacgcacgtgc

SEQ ID NO: 139607 - DNA, 355 bp, Homo sapiens
  chr1:228126651-228127006
  hypo
cccctgccaggctcacggcagcaccagttcatgactgctctccccggtgaagggcccggatgacgacggctccacgggacacccatacctctcaagccccagccacttcccacctctgactgtcattccaggtgcagccatgcaggaggacacaggccagctggagagaaggaagacgtctcaacacccatacgtggctgcggctgccatgccacagggcacacagaacagttccacgctgcagatggggccgcagacagtgctggtctcaggaaccacgggggaggtggctccagggagcggtgacccggtcgcctccttgagccctggaagctggccgcggtggtcagcactg

SEQ ID NO: 139608 - DNA, 895 bp, Homo sapiens; identical to SEQ ID NO: 105147
  chr1:228134408-228135303
  hypo

SEQ ID NO: 139609 - DNA, 388 bp, Homo sapiens; identical to SEQ ID NO: 1177
  chr1:228135362-228135750
  hypo

SEQ ID NO: 139610 - DNA, 372 bp, Homo sapiens; identical to SEQ ID NO: 36909
  chr1:228135899-228136271
  hypo

SEQ ID NO: 139611 - DNA, 434 bp, Homo sapiens; identical to SEQ ID NO: 105151
  chr1:228193976-228194410
  hypo

SEQ ID NO: 139612 - DNA, 2006 bp, Homo sapiens; identical to SEQ ID NO: 105152
  chr1:228194570-228196576
  hypo

SEQ ID NO: 139613 - DNA, 145 bp, Homo sapiens
  chr1:228201125-228201270
  hypo
aaaacgtgccgctgccgcccagggaaactggcaagtgcgtggccgcgggcacaggagccgctgtgcctgctgggactcgttcaaagtatgtgtcagtaatcccagctgggccggcgggcaggaggaggtgcgggttgggagagct

SEQ ID NO: 139614 - DNA, 36 bp, Homo sapiens; identical to SEQ ID NO: 105154
  chr1:228238538-228238574
  hypo

SEQ ID NO: 139615 - DNA, 71 bp, Homo sapiens
  chr1:228266732-228266803
  hypo
ttaaaaggaccagaaatcagacgactgtgagcaaactccctggagttcacggaactcaactgtaatttcct

SEQ ID NO: 139616 - DNA, 30 bp, Homo sapiens; identical to SEQ ID NO: 61881
  chr1:228267797-228267827
  hypo

SEQ ID NO: 139617 - DNA, 90 bp, Homo sapiens
  chr1:228280524-228280614
  hypo
ttcatggacacaaaacggatgtgaactcacagagctacattttctccctgcccctgttcaggcacagtgaggtgtcggggaatgtagctg

SEQ ID NO: 139618 - DNA, 345 bp, Homo sapiens
  chr1:228280966-228281311
  hypo
acacaagttaggacccgtaccaagaggccctggaattgagggtgggggttgctgtggactctttctccctcttaggaaactctattgggtctccatctgtcacagaagcagtaaatgatgtaggggctgccaggtatagggtcctgtggggatgctggaacatgccgaggcaggacgtgccagccaccctctgcccatatgtgcagcagggccacagatgtgcttgtcggtaggagagaccaagctgtctgtgtgccgatgtcttgacacctgagacttcaggttcacccatcctggttctgccattccattgcagggtggcttccctcctttggggactcttaa

SEQ ID NO: 139619 - DNA, 143 bp, Homo sapiens; identical to SEQ ID NO: 61883
  chr1:228282124-228282267
  hypo

SEQ ID NO: 139620 - DNA, 66 bp, Homo sapiens
  chr1:228285353-228285419
  hypo
atgaggatgctggccgaggacgagctccgggatgctgtcctcctggtgttcgccaacaagcaggta

SEQ ID NO: 139621 - DNA, 30 bp, Homo sapiens; identical to SEQ ID NO: 61885
  chr1:228286291-228286321
  hypo

SEQ ID NO: 139622 - DNA, 22 bp, Homo sapiens
  chr1:228288035-228288057
  hypo
cattaagaatcagatgggcacc

SEQ ID NO: 139623 - DNA, 30 bp, Homo sapiens; identical to SEQ ID NO: 61886
  chr1:228294386-228294416
  hypo

SEQ ID NO: 139624 - DNA, 357 bp, Homo sapiens; identical to SEQ ID NO: 61887
  chr1:228295265-228295622
  hypo

SEQ ID NO: 139625 - DNA, 24 bp, Homo sapiens
  chr1:228299832-228299856
  hypo
acacttgataaaaacttcagccga

SEQ ID NO: 139626 - DNA, 30 bp, Homo sapiens; identical to SEQ ID NO: 61889
  chr1:228307988-228308018
  hypo

SEQ ID NO: 139627 - DNA, 267 bp, Homo sapiens; identical to SEQ ID NO: 15477
  chr1:228322364-228322631
  hypo

SEQ ID NO: 139628 - DNA, 30 bp, Homo sapiens; identical to SEQ ID NO: 61891
  chr1:228332043-228332073
  hypo

SEQ ID NO: 139629 - DNA, 272 bp, Homo sapiens
  chr1:228342783-228343055
  hypo
gtctccagctgtgatcgtcatcacatggaatagtcactagcagcatggaaggcggtgacacagcgacagcctcagggaagggctgaacctgtgtgtgtgcgcctgtgcatgtgtgtgtggcgaggccaggtagcaaaggctcctggtgggagtgggctccagccagtgtgggagccgtgggcagagcacacgaggggatatctggagccaggcgtggaatgggggcaggggacctggcactaaggcaggtgaggccgcggcattcgctctgg

SEQ ID NO: 139630 - DNA, 30 bp, Homo sapiens; identical to SEQ ID NO: 61892
  chr1:228347166-228347196
  hypo

SEQ ID NO: 139631 - DNA, 30 bp, Homo sapiens; identical to SEQ ID NO: 61893
  chr1:228360516-228360546
  hypo

SEQ ID NO: 139632 - DNA, 233 bp, Homo sapiens
  chr1:228361363-228361596
  hypo
ggacccttgggctcctcgatggcttccctgggctggaacaggcaggtctggttctcagtggctgtgcacaccgttcccctgcggggccctgcccatccctgctcccacatccagcggactgttgtcatttctgccctaggctctgggactactccggatgatgccctcgggcaggctattgcagttctgccagtccctgggcaaacagggtctgtctgcgctggcccctgtga

SEQ ID NO: 139633 - DNA, 30 bp, Homo sapiens; identical to SEQ ID NO: 61895
  chr1:228395224-228395254
  hypo

SEQ ID NO: 139634 - DNA, 30 bp, Homo sapiens; identical to SEQ ID NO: 15478
  chr1:228397962-228397992
  hypo

SEQ ID NO: 139635 - DNA, 30 bp, Homo sapiens; identical to SEQ ID NO: 15479
  chr1:228403112-228403142
  hypo

SEQ ID NO: 139636 - DNA, 30 bp, Homo sapiens; identical to SEQ ID NO: 61898
  chr1:228403407-228403437
  hypo

SEQ ID NO: 139637 - DNA, 30 bp, Homo sapiens
  chr1:228404881-228404911
  hypo
tggggacgcggcaccggctggtggcagcca

SEQ ID NO: 139638 - DNA, 43 bp, Homo sapiens; identical to SEQ ID NO: 61899
  chr1:228406667-228406710
  hypo

SEQ ID NO: 139639 - DNA, 310 bp, Homo sapiens; identical to SEQ ID NO: 105161
  chr1:228444460-228444770
  hypo

SEQ ID NO: 139640 - DNA, 246 bp, Homo sapiens
  chr1:228459733-228459979
  hypo
tggcccaagcccagacggaggttatgtggtacaaggacgggaagaagctgagctccagctcgaaaatgcgtgtggaggccgtgggctgcacacggaggctggtggtgcaggaggcaggccaggcggacgccggggagtacagctgcgaggctgggggccagcggctctccttccatctgcatgtggctggtgggtgccagggttaggcaaaatggaggtgatgctgagtgtcgggtgtgaaactac

SEQ ID NO: 139641 - DNA, 30 bp, Homo sapiens; identical to SEQ ID NO: 61901
  chr1:228460615-228460645
  hypo

SEQ ID NO: 139642 - DNA, 116 bp, Homo sapiens
  chr1:228461081-228461197
  hypo
gacatggtacaaggacgggaagaagctgagctccagctcaaaagtgcacatggaggccagcggctacacacggaggctggtagtgcagcaggcgggccaggcggatgctggggagt

SEQ ID NO: 139643 - DNA, 865 bp, Homo sapiens
  chr1:228461595-228462460
  hypo
gatggtgtggagattcgccgcagcaagcggcatgagacagccagccagggggacacccacaccctgaccgtgcatggcgcccaggttctggacagcgccatctacagctgccgtgtgggcgcagaggggcaggacttcccagtgcaggtggaaggtgagccgggcatggggcgtggggcggggactcctccagacacctctgtcccagagctggacaggggcgaagctggggctcaagtctggtctgttaagagcccggctgatgtcccctttgtgcccacagaggtggccgccaagttctgccggctgctggagcctgtgtgcggcgagctgggtggcacggtgacactggcctgcgagctaagcccagcgtgtgcagaggtggtgtggcgctgcggcaacacgcagcttcgggtgggcaagcgcttccagatggtggccgaggggcccgtgcgctcactcactgtgttggggctgcgcgcagaggacgcaggggagtacgtgtgtgagagccgtgatgaccacaccagtgcgcagctcaccgtcagtggtatgtaaggggtcgagtgtccctatccagggcagcctcctggaggaggcggcctttggtactcctgcagcgtaagggctctgccagtcctgtgcgcccgcctcttaagcagtgctcctgtctgcagtgccccgagtggtgaagtttatgtctgggctgagcaccgtggtcgcagaggagggcggcgaggccaccttccagtgcgtggtgtcccccagtgatgtggcagtcgtgtggttccgggacggtgccctgcttcagcccagcgagaagtttgccatatcacagagtggcgccagccacagcctgaccatc

SEQ ID NO: 139644 - DNA, 95 bp, Homo sapiens
  chr1:228464860-228464955
  hypo
gacggtgtggagctgcgggcaggcaagacgatggccatcgcagcccagggcgcctgcaggagcctcaccatttaccggtgcgagttcgcggatca

SEQ ID NO: 139645 - DNA, 331 bp, Homo sapiens
  chr1:228465318-228465649
  hypo
gagggcagtaaactgcggcccactgacaacgtgcgcatccgccaggaaggttcgaggacaggcggctgtagcaggcacggcccggcccccaggtcttcctctgcccccgcccatactgagccgcctttgtccccaggaaggacatacactctcatctaccggagagtcctggcggaagatgcaggagagatccaatttgtagccgaaaatgcagaatcgcgagcccagctccgagtgaagggtgaggtgggggctgaggggagggcggggctggacggtgtgcatgtgtggccagctggctcagcacaggcccggacgccccaggcctgct

SEQ ID NO: 139646 - DNA, 338 bp, Homo sapiens
  chr1:228466466-228466804
  hypo
gtgtcccgggccagcgcccaggtgcggtggttcaagggcagtcaggagctgcagcccgggcccaagtacgagctggtcagtgatggcctctaccgcaagctgatcatcagtgatgtccacgcagaggacgaggacacctacacctgtgacgccggtgatgtcaagaccagtgcacagttcttcgtggaaggtgcaggcagggagggcagctctgcaggttgcttttgttggggggagtctcccaggtccatggtttgccctacactcctggagacgctgggtctgggcagctcaggaggatgctagcatgcatctagcagggcgggggcttgttccca

SEQ ID NO: 139647 - DNA, 30 bp, Homo sapiens; identical to SEQ ID NO: 61905
  chr1:228467973-228468003
  hypo

SEQ ID NO: 139648 - DNA, 255 bp, Homo sapiens
  chr1:228468384-228468639
  hypo
gcacacggcgggcacgcgggggctcgtggtgcatgacgtgagccctgaagacgccggcctgtacacctgccacgtgggctccgaggagacccgggcccgggtccgcgtgcacggtgtgtggctgcaggcacggcagagctcagggaagggaggcgtgctgggtgggcatggatgtggggccagccactacctgggtggcccacatcattctctgagattgaagggctgctctgctgagccggggaggtcagggga

SEQ ID NO: 139649 - DNA, 356 bp, Homo sapiens
  chr1:228473689-228474045
  hypo
tctgtcctggggagcgtctgtcctggggagcactgctggccaagcctgcccaggacggtggggcccctgagcagtctgtgcctttgcaggccggagagtgcacatcatcgaggacctggaggatgtggatgtgcaggagggctcctcggccaccttccgttgccggatctccccggccaactacgagcctgtgcactggttcctggacaagacacccctgcatgccaacgagctcaatgagatcgatgcccagcccgggggctaccacgtgctgaccctgcggcagctggcgctcaaggactcgggcaccatctactttgaggcgggtgaccagcgggcctcggccgccctgcggg

SEQ ID NO: 139650 - DNA, 30 bp, Homo sapiens
  chr1:228474275-228474305
  hypo
cactggggcaggagccgcacggagcctgcc

SEQ ID NO: 139651 - DNA, 30 bp, Homo sapiens
  chr1:228474531-228474561
  hypo
cttgaccctggtgtgcgagaccagcacctg

SEQ ID NO: 139652 - DNA, 113 bp, Homo sapiens
  chr1:228475448-228475561
  hypo
gtgctgccacactgcgctgtgtgctgtcatctgtggctgcgcccgtgaagtggtgctatggaaacaacgtcctgaggccaggtgacaaatacagcctacgccaggagggtgcc

SEQ ID NO: 139653 - DNA, 30 bp, Homo sapiens
  chr1:228475953-228475983
  hypo
ccatggtggatgccgcggagtactcgtgtg

SEQ ID NO: 139654 - DNA, 560 bp, Homo sapiens
  chr1:228477492-228478052
  hypo
cgtggtgtggcgtggcgtgttcaggtgctcggggccttgaagggcctggctcacttccgtcagggaaagcacatgggataaagccggcccaggtggagggctcgggcaccttacagggaatgcagggaaggactctcccaagctcaagggccttctcgcccaggactggtgggctcccctcacaccacaaggagtgaaccctcagccagtgaaggggcaggttctgggggccaggcacagccatctggatgccagtgcctgaagcaggtagctccggtcacaggcacaagtgttgtagacctttgcggagaggccgggcctccatgcacctccagcggtgtcgacagagcacagacagcttccaaggcatggaggcaccacactaccaggcttgccaggacaccccagaggggcacagacttcgggctctgtcacatggctgtgtagcatgttggagagacacagagaccacaggcgcccgggggctaatctgtgtcctcctcagaccggtggctgaagagcagatgaccagagtggacccctgccggctgcctgaggca

SEQ ID NO: 139655 - DNA, 30 bp, Homo sapiens
  chr1:228479410-228479440
  hypo
caaaaggggccataccgtggtgctggtggg

SEQ ID NO: 139656 - DNA, 58 bp, Homo sapiens
  chr1:228479781-228479839
  hypo
gtggcctggccatggcggacgccggggagtacttgtgtgtgtgcgggcaggagaggac

SEQ ID NO: 139657 - DNA, 99 bp, Homo sapiens
  chr1:228481994-228482093
  hypo
cagcctgaggcaggacgggtccaggtgtgagctgcagatccgtggcctggctgtggtggatgccggggagtactcgtgtgtgtgcgggcaggagaggac

SEQ ID NO: 139658 - DNA, 44 bp, Homo sapiens
  chr1:228494679-228494723
  hypo
tgagccgggcgggtgcgagcgtggagtggcgcaagggctcccta

SEQ ID NO: 139659 - DNA, 377 bp, Homo sapiens
  chr1:228504399-228504776
  hypo
acatctgcaggctggcgcctggagatcctggagcctctgaaaaacgcggcggtccgggccggcgcacaggcatgcttcacctgcacgctcagcgaggcggtgcccgtgggagaggcgtcctggtacatcaatggcgcggcagtgcagccggatgacagcgactggactgtcaccgccgacggcagtcaccacgccctactgctgcgcagcgcccagccccaccacgccggggaggtcaccttcgcttgccgcgacgccgtggcctctgcgcggctcaccgtgctgggtgggtggtgggcgagcttttccctcccctgcaggtcgggtctggggcgcgccccgcctccagagcttgcgagtgcgtgggtgaccatcct

SEQ ID NO: 139660 - DNA, 398 bp, Homo sapiens
  chr1:228509314-228509712
  hypo
gcagatgtgcgagcccgctggctgaaggatggtgtggagctgaccgatgggcggcaccatcacatcgaccagcttggggatggcacctgctctctgctgatcactggcctggaccgtgctgatgctggctgctacacctgtcaggtgagcaacaagtttggccaggtgacccacagtgcctgtgtggtggtcagtgggtcagagagtgaagccgagagctcctctgggggtgagctggacgatgccttccgccgggctgcccgtcggctgcaccggctcttccgcaccaaaagtccggctgaagtttcagatgaggagctcttcctgagtgcagacgagggccctgcagagccagaggagcccgcggactggcagacataccgcgaagatgagcattt

SEQ ID NO: 139661 - DNA, 30 bp, Homo sapiens; identical to SEQ ID NO: 15487
  chr1:228510971-228511001
  hypo

SEQ ID NO: 139662 - DNA, 31 bp, Homo sapiens; identical to SEQ ID NO: 15488
  chr1:228525868-228525899
  hypo

SEQ ID NO: 139663 - DNA, 235 bp, Homo sapiens
  chr1:228526489-228526724
  hypo
cccacagtccctgcacgggaagcaggagctccgtggtcccttacggcagccccctcctgcccagctctgtgatccaggagctgctgagttctgagcaggccttcgtggaggagctgcagttcctgcagagccaccacctgcagcacctggagcgctgcccccacgtgcccatagctgtggccggccagaaggcagtcatcttccgcaatgtgcgggacatcggccgcttccacag

SEQ ID NO: 139664 - DNA, 1003 bp, Homo sapiens
  chr1:228528428-228529431
  hypo
tgatccgcaacaaggcgcggaacagacagaactgcgcgctgctggagcaggcctatgccgtggtgtctgccctgccacagcgcgctgagaacaagctgcacgtgtccctcatggagaactacccaggcaccctgcaggccctgggcgagcccatccgccaggttggggagggccaggggccggggccgggagatgcatgtgatgtgggtgggtattggggtgctgggggcttgtatctggggctgccaggaggtggcggtgtgtgcatgagttgggcagagcactgggtacctgggtggctgtggggcctgcaccgctgggcaatctggcccaccacaggctgaccgcagcccacaccctcccccagggccacttcatcgtgtgggagggtgcaccgggggcccgcatgccctggaagggccacaaccgtcacgtgttcctcttccgcaaccacctggtaatctgcaagccccggcgagactcccgcaccgataccgtcagctacgtgttccggaacatgatgaaggtctgcaggctctgggctgctgggcggggctccctgtccctcagcgccggggtggatgccagtggccacacctgcagccgctggtccagggtggcctgaatgtttcctcgtcgggtcccacatctgttgaggatggtcagcccgtgtccccctccctgtgctgacaccctcccccacccacagctgagcagcatcgacctgaacgaccaggtggagggggatgaccgcgccttcgaggtgtggcaggagcgggaggactcggtgcgcaagtacctgctgcaggcacggacagccattatcaagagctcgtgggtgaaggagatctgtggcatccagcagcgtctggccctgcctgtgtggcgtgagtgtccaccttcccgggggcccaggtggctgagccaggatggggcacccggctgcagccgcacaggtccctgcctgggtgggtgtgaggggtgggctcgttcctgggacaga

SEQ ID NO: 139665 - DNA, 61 bp, Homo sapiens
  chr1:228529844-228529905
  hypo
ggccgactgcacagccgagctgggtgagacagtcaagctggcctgccgcgtgacgggcaca

SEQ ID NO: 139666 - DNA, 119 bp, Homo sapiens
  chr1:228542267-228542386
  hypo
cctggcaggcctctgcggggtgggcgctgccccctcacttgtgaatcatgctgcgcacggctgcatccctcctgtagtcgcaaatactcactctggcccacagccgatcaggtgacagt

SEQ ID NO: 139667 - DNA, 31 bp, Homo sapiens; identical to SEQ ID NO: 61917
  chr1:228551865-228551896
  hypo

SEQ ID NO: 139668 - DNA, 204 bp, Homo sapiens; identical to SEQ ID NO: 15491
  chr1:228552501-228552705
  hypo

SEQ ID NO: 139669 - DNA, 191 bp, Homo sapiens
  chr1:228553841-228554032
  hypo
ggctatcattgagggcgacccacagccctcggtgacctggtacaaggtaggcgcgcaggtccaagtgggtgagattctgggatggccccaggagctggggggcccacgggaggtgggtgcagtccacaccgtgcacttcccccacatcccccctagactggacacacagcaggtgtcggaagcactgctca

SEQ ID NO: 139670 - DNA, 619 bp, Homo sapiens
  chr1:228558791-228559410
  hypo
cgacagcccctccctcggcgtagcccggcacctctgcagggacactggtggctcctccagttcctcctcctcctctgacaacgagctcgccccatttgcccgggctaagtcactgccaccctccccggtgacacactcaccactgctgcacccccggggcttcctgcggccctcggccagcctgcctgaggaagccgaggccagtgagcgctccaccgaggccccagctccgcctgcatctcccgagggtgccgggccaccggccgcccagggctgcgtgccccggcacagcgtcatccgcagcctgttctaccaccaggcgggtgagagccctgagcacggggccctggccccggggagcaggcggcacccggcccggcggcggcacctgctgaagggcgggtacattgcgggggcgctgccaggcctgcgcgagccactgatggagcaccgcgtgctggaggaggaggccgccagggaggagcaggccaccctcctggccaaagccccctcattcgagactgccctccggctgcctgcctctggcacccacttggcccctggccacagccactccctggaacatgactctccgagcaccccccgcccctcctcggag

SEQ ID NO: 139671 - DNA, 77 bp, Homo sapiens
  chr1:228559962-228560039
  hypo
acacccaccttgcagcggcctcaggaacaggcgaccatgcgcaagttctccctgggtggtcgcgggggctacgcagg

SEQ ID NO: 139672 - DNA, 509 bp, Homo sapiens; identical to SEQ ID NO: 105164
  chr1:228566547-228567056
  hypo

SEQ ID NO: 139673 - DNA, 30 bp, Homo sapiens
  chr1:228582854-228582884
  hypo
ccggcagggcctgccgtaggtccccccgct

SEQ ID NO: 139674 - DNA, 30 bp, Homo sapiens; identical to SEQ ID NO: 61921
  chr1:228584759-228584789
  hypo

SEQ ID NO: 139675 - DNA, 30 bp, Homo sapiens; identical to SEQ ID NO: 61922
  chr1:228586628-228586658
  hypo

SEQ ID NO: 139676 - DNA, 30 bp, Homo sapiens
  chr1:228596951-228596981
  hypo
gcactgcacactcacgttgttcttcctccg

SEQ ID NO: 139677 - DNA, 31 bp, Homo sapiens; identical to SEQ ID NO: 61923
  chr1:228601706-228601737
  hypo

SEQ ID NO: 139678 - DNA, 30 bp, Homo sapiens; identical to SEQ ID NO: 15493
  chr1:228612803-228612833
  hypo

SEQ ID NO: 139679 - DNA, 39 bp, Homo sapiens
  chr1:228613058-228613097
  hypo
tgcccagacctcagcggattgctcgcttttatagagctt

SEQ ID NO: 139680 - DNA, 38 bp, Homo sapiens; identical to SEQ ID NO: 61926
  chr1:228614002-228614040
  hypo

SEQ ID NO: 139681 - DNA, 387 bp, Homo sapiens; identical to SEQ ID NO: 1186
  chr1:228644856-228645243
  hypo

SEQ ID NO: 139682 - DNA, 601 bp, Homo sapiens; identical to SEQ ID NO: 1187
  chr1:228645305-228645906
  hypo

SEQ ID NO: 139683 - DNA, 121 bp, Homo sapiens; identical to SEQ ID NO: 1188
  chr1:228646025-228646146
  hypo

SEQ ID NO: 139684 - DNA, 569 bp, Homo sapiens; identical to SEQ ID NO: 105176
  chr1:228646865-228647434
  hypo

SEQ ID NO: 139685 - DNA, 36 bp, Homo sapiens; identical to SEQ ID NO: 61931
  chr1:228857020-228857056
  hypo

SEQ ID NO: 139686 - DNA, 1566 bp, Homo sapiens; identical to SEQ ID NO: 105184
  chr1:228870692-228872258
  hypo

SEQ ID NO: 139687 - DNA, 30 bp, Homo sapiens
  chr1:228904749-228904779
  hypo
aggcaaacaccacgtcggcccagtgaccaa

SEQ ID NO: 139688 - DNA, 224 bp, Homo sapiens; identical to SEQ ID NO: 15498
  chr1:228919236-228919460
  hypo

SEQ ID NO: 139689 - DNA, 151 bp, Homo sapiens
  chr1:229038503-229038654
  hypo
tgtatgtatctatctatctatcgatcggtcgatcgatcatttattttttatcttgattacaccagataagctgaggattttgcaggtaagcacgtggaagctaaaggccagcaagacttggttaggaatatcaatgcgtcctctctcacgg

SEQ ID NO: 139690 - DNA, 55 bp, Homo sapiens; identical to SEQ ID NO: 61935
  chr1:229073282-229073337
  hypo

SEQ ID NO: 139691 - DNA, 28 bp, Homo sapiens
  chr1:229104135-229104163
  hypo
tttttttttttttttttgagacggagtc

SEQ ID NO: 139692 - DNA, 268 bp, Homo sapiens; identical to SEQ ID NO: 61937
  chr1:229104402-229104670
  hypo

SEQ ID NO: 139693 - DNA, 31 bp, Homo sapiens; identical to SEQ ID NO: 15503
  chr1:229116092-229116123
  hypo

SEQ ID NO: 139694 - DNA, 30 bp, Homo sapiens; identical to SEQ ID NO: 61939
  chr1:229125520-229125550
  hypo

SEQ ID NO: 139695 - DNA, 31 bp, Homo sapiens; identical to SEQ ID NO: 61940
  chr1:229134663-229134694
  hypo

SEQ ID NO: 139696 - DNA, 91 bp, Homo sapiens
  chr1:229136328-229136419
  hypo
atatgaccttcttctaggaacgctggactggtaagggacagacgcctcaagtgggcatgtgcatgactccagtaaacgcactgcacacaag

SEQ ID NO: 139697 - DNA, 31 bp, Homo sapiens; identical to SEQ ID NO: 61941
  chr1:229141514-229141545
  hypo

SEQ ID NO: 139698 - DNA, 131 bp, Homo sapiens; identical to SEQ ID NO: 61942
  chr1:229155567-229155698
  hypo

SEQ ID NO: 139699 - DNA, 164 bp, Homo sapiens; identical to SEQ ID NO: 61943
  chr1:229160201-229160365
  hypo

SEQ ID NO: 139700 - DNA, 159 bp, Homo sapiens; identical to SEQ ID NO: 15506
  chr1:229202156-229202315
  hypo

SEQ ID NO: 139701 - DNA, 31 bp, Homo sapiens; identical to SEQ ID NO: 15507
  chr1:229210259-229210290
  hypo

SEQ ID NO: 139702 - DNA, 146 bp, Homo sapiens; identical to SEQ ID NO: 61946
  chr1:229223743-229223889
  hypo

SEQ ID NO: 139703 - DNA, 114 bp, Homo sapiens
  chr1:229230353-229230467
  hypo
gctgctcagaccagccgtcacctgaacacagacccacaggcctgcccaccctgccgggccttgctgcagctcttccccaggaccgcatggacgcccttgcgtctttgcaacact

SEQ ID NO: 139704 - DNA, 30 bp, Homo sapiens
  chr1:229237444-229237474
  hypo
cgtgactgggcaagacgcagcaagctggac

SEQ ID NO: 139705 - DNA, 149 bp, Homo sapiens
  chr1:229252026-229252175
  hypo
ctaactcagtgtgtgcggccaggatccgtaatgatgtgttatggagacgagtaacgttgttggatactgagcagtgcgttcaggccgcattcctgtgggcacgcgctcaagtccatcatccctcagcagaggccgcgtatcacactgga

SEQ ID NO: 139706 - DNA, 87 bp, Homo sapiens; identical to SEQ ID NO: 61948
  chr1:229256677-229256764
  hypo

SEQ ID NO: 139707 - DNA, 30 bp, Homo sapiens; identical to SEQ ID NO: 61949
  chr1:229299476-229299506
  hypo

SEQ ID NO: 139708 - DNA, 30 bp, Homo sapiens
  chr1:229360875-229360905
  hypo
tgcagagcagtggagcgagcatctgatggg

SEQ ID NO: 139709 - DNA, 30 bp, Homo sapiens
  chr1:229404055-229404085
  hypo
gagcaagtctctgctcgtgggagtggacag

SEQ ID NO: 139710 - DNA, 52 bp, Homo sapiens
  chr1:229438666-229438718
  hypo
acagctgaggtcaccgcggcgcgcacaggccccgaacgctcaggagtgtggt

SEQ ID NO: 139711 - DNA, 144 bp, Homo sapiens
  chr1:229462408-229462552
  hypo
gatgcccgatgacaggcgcatggcccagctggccactctcaaagggaacacagaaccacaagggcccagagcgcacctcgtgcacaggagcggacgcacagacgttgtgagtcttctggcttcctgtatcggtctgtttttctc

SEQ ID NO: 139712 - DNA, 30 bp, Homo sapiens; identical to SEQ ID NO: 61952
  chr1:229583881-229583911
  hypo

SEQ ID NO: 139713 - DNA, 151 bp, Homo sapiens; identical to SEQ ID NO: 61953
  chr1:229606405-229606556
  hypo

SEQ ID NO: 139714 - DNA, 391 bp, Homo sapiens; identical to SEQ ID NO: 61954
  chr1:229644847-229645238
  hypo

SEQ ID NO: 139715 - DNA, 161 bp, Homo sapiens
  chr1:229677939-229678100
  hypo
accccattctgctggaaaccacgcggacaggaaggggcctttacctgagtggcttgtgccagggaatcctgagtgactttggtcagtttccgtagatatcgcccataaattacagcaatgattgacactggaggcaccacgctcaaaacaaaggtggccag

SEQ ID NO: 139716 - DNA, 36 bp, Homo sapiens; identical to SEQ ID NO: 15512
  chr1:229678577-229678613
  hypo

SEQ ID NO: 139717 - DNA, 30 bp, Homo sapiens; identical to SEQ ID NO: 61957
  chr1:229706214-229706244
  hypo

SEQ ID NO: 139718 - DNA, 22 bp, Homo sapiens
  chr1:229713274-229713296
  hypo
tcctcttgccgggtgcggcggc

SEQ ID NO: 139719 - DNA, 30 bp, Homo sapiens; identical to SEQ ID NO: 61959
  chr1:229727159-229727189
  hypo

SEQ ID NO: 139720 - DNA, 30 bp, Homo sapiens
  chr1:229730396-229730426
  hypo
aaagcacggggccacggtggcctgtgaaaa

SEQ ID NO: 139721 - DNA, 30 bp, Homo sapiens
  chr1:229760657-229760687
  hypo
atataagacacgctccgcacttaatgttcc

SEQ ID NO: 139722 - DNA, 30 bp, Homo sapiens
  chr1:229761149-229761179
  hypo
ctccacacccacccacgcacgatcaccatg

SEQ ID NO: 139723 - DNA, 30 bp, Homo sapiens; identical to SEQ ID NO: 15513
  chr1:229764636-229764666
  hypo

SEQ ID NO: 139724 - DNA, 30 bp, Homo sapiens; identical to SEQ ID NO: 61961
  chr1:229795127-229795157
  hypo

SEQ ID NO: 139725 - DNA, 30 bp, Homo sapiens
  chr1:229801666-229801696
  hypo
aaactgcgctccacccgcctgtctccataa

SEQ ID NO: 139726 - DNA, 121 bp, Homo sapiens
  chr1:229853310-229853431
  hypo
cggcctcccaaagtgctgggattacaggtggggtgtttcttaaagaaggtttcgagtacatttaacacaaagaggaagcatgtgtcaccggtagagggtcgtgactgcaagttgtccaggt

SEQ ID NO: 139727 - DNA, 63 bp, Homo sapiens; identical to SEQ ID NO: 61962
  chr1:230080282-230080345
  hypo

SEQ ID NO: 139728 - DNA, 62 bp, Homo sapiens
  chr1:230213775-230213837
  hypo
cagcccatagcattgccgacgtcattgattgtgagctgcattccagtcgggggtggtggagg

SEQ ID NO: 139729 - DNA, 201 bp, Homo sapiens; identical to SEQ ID NO: 15514
  chr1:230219679-230219880
  hypo

SEQ ID NO: 139730 - DNA, 220 bp, Homo sapiens; identical to SEQ ID NO: 1200
  chr1:230223229-230223449
  hypo

SEQ ID NO: 139731 - DNA, 100 bp, Homo sapiens
  chr1:230250128-230250228
  hypo
gtcacttgggaatttcactggcgaaattcagtgaggcacttgaggtttgtaaatgggcagacgtttcccacacgattacgtctgtatgttggaaagatat

SEQ ID NO: 139732 - DNA, 308 bp, Homo sapiens; identical to SEQ ID NO: 15516
  chr1:230256220-230256528
  hypo

SEQ ID NO: 139733 - DNA, 297 bp, Homo sapiens; identical to SEQ ID NO: 61966
  chr1:230266282-230266579
  hypo

SEQ ID NO: 139734 - DNA, 30 bp, Homo sapiens; identical to SEQ ID NO: 61967
  chr1:230272361-230272391
  hypo

SEQ ID NO: 139735 - DNA, 106 bp, Homo sapiens; identical to SEQ ID NO: 61968
  chr1:230272603-230272709
  hypo

SEQ ID NO: 139736 - DNA, 28 bp, Homo sapiens
  chr1:230284900-230284928
  hypo
tacaggcgtgagccactgagcctagcct

SEQ ID NO: 139737 - DNA, 254 bp, Homo sapiens; identical to SEQ ID NO: 61970
  chr1:230308281-230308535
  hypo

SEQ ID NO: 139738 - DNA, 30 bp, Homo sapiens
  chr1:230333837-230333867
  hypo
gttcctcccagtcacgcgcaggattggatt

SEQ ID NO: 139739 - DNA, 290 bp, Homo sapiens
  chr1:230346847-230347137
  hypo
ttgtccttatgttgtacttctcggcagctcgcggcgtctcataaacatgcgccgctggcctcctgagattcttgtgacggaaccgctgctccatggtagagctggcccgagcacccactcctcccgcatcaatttgctgcccaactccaactctgtatgccgcaccacagggtcctggtggaggagatgggaggccacacggggtgtcacaggtggggacaggcgcttctctaggcttagctgttctggctttgttggcatttgtggccgtggggcaggtggagtttggg

SEQ ID NO: 139740 - DNA, 220 bp, Homo sapiens
  chr1:230378963-230379183
  hypo
cgggcagggaggcgtcgccggttggcatggggttgtgctggccctgtggcttctctctcctgacgtgctttccaactcgcctctgcaggcctcatgcgctcacgggttcggggggccgatgctgcccaagccaaggtcctgaccttcctggacagtcactgcgagtgtaatgagcactggctggagcccctcctggaaagggtggcggaggtgagatgac

SEQ ID NO: 139741 - DNA, 265 bp, Homo sapiens; identical to SEQ ID NO: 61972
  chr1:230379467-230379732
  hypo

SEQ ID NO: 139742 - DNA, 42 bp, Homo sapiens; identical to SEQ ID NO: 61973
  chr1:230393112-230393154
  hypo

SEQ ID NO: 139743 - DNA, 77 bp, Homo sapiens; identical to SEQ ID NO: 15521
  chr1:230393523-230393600
  hypo

SEQ ID NO: 139744 - DNA, 313 bp, Homo sapiens; identical to SEQ ID NO: 61975
  chr1:230398098-230398411
  hypo

SEQ ID NO: 139745 - DNA, 207 bp, Homo sapiens
  chr1:230399605-230399812
  hypo
tcagagcccttgtcacggagatttgttggacagttaggtaatgcggcctctctctgttgctcctgttcgctcacttggctctttggaaccgtttcctctgcttttcaagtaacatgccaggcgccaggtggcccatgccccctaggaggagaacaggagagaacacagcgtccttctccctcggatccctgccgtgcaggacagctt

SEQ ID NO: 139746 - DNA, 30 bp, Homo sapiens; identical to SEQ ID NO: 61976
  chr1:230403673-230403703
  hypo

SEQ ID NO: 139747 - DNA, 572 bp, Homo sapiens
  chr1:230404003-230404575
  hypo
aatgcagacatgtggataattcgtgtagggttgggtgaagcttacctctggtctgtggatgacaaaacggacgaggtgcccacccaggttccgtactgtctgggtgttgggcctcttgtgatccctggccagcctcacctccgtgtttaatctctggagttcccactgtcactctgcagtgttctgatgatttatggaaggttggagaggtcactcctttctgtgtcagcgcctctgctggaaagcgacacaccttacgctacagcacattaaacagaagcgtgtgctcaggccccggccgagagagttcgtcatcagagtctcgggccccagcttcatcccctgtgcgtcaggctctgtgactggctcaccccccgccagcattgcaccttaattaccgcacagctagtaacacgagacagagtctgggccctgtggaggtggcaggtctacgggaaccaaagactttgtctgtgtagctgctgcctgtgaccctcctcacctgccctcaggaggacagcctgtgtcccgccttcagggctgtggccctcaccccccggtcctgcccagta

SEQ ID NO: 139748 - DNA, 30 bp, Homo sapiens; identical to SEQ ID NO: 61978
  chr1:230414278-230414308
  hypo

SEQ ID NO: 139749 - DNA, 276 bp, Homo sapiens; identical to SEQ ID NO: 61979
  chr1:230414970-230415246
  hypo

SEQ ID NO: 139750 - DNA, 30 bp, Homo sapiens; identical to SEQ ID NO: 15525
  chr1:230417081-230417111
  hypo

SEQ ID NO: 139751 - DNA, 31 bp, Homo sapiens; identical to SEQ ID NO: 15526
  chr1:230446596-230446627
  hypo

SEQ ID NO: 139752 - DNA, 163 bp, Homo sapiens; identical to SEQ ID NO: 61982
  chr1:230453224-230453387
  hypo

SEQ ID NO: 139753 - DNA, 199 bp, Homo sapiens; identical to SEQ ID NO: 61983
  chr1:230453609-230453808
  hypo

SEQ ID NO: 139754 - DNA, 30 bp, Homo sapiens; identical to SEQ ID NO: 61984
  chr1:230459099-230459129
  hypo

SEQ ID NO: 139755 - DNA, 31 bp, Homo sapiens; identical to SEQ ID NO: 61985
  chr1:230469989-230470020
  hypo

SEQ ID NO: 139756 - DNA, 31 bp, Homo sapiens; identical to SEQ ID NO: 61986
  chr1:230485876-230485907
  hypo

SEQ ID NO: 139757 - DNA, 211 bp, Homo sapiens; identical to SEQ ID NO: 61987
  chr1:230529556-230529767
  hypo

SEQ ID NO: 139758 - DNA, 30 bp, Homo sapiens; identical to SEQ ID NO: 61988
  chr1:230781769-230781799
  hypo

SEQ ID NO: 139759 - DNA, 30 bp, Homo sapiens
  chr1:230809028-230809058
  hypo
gagatcatcatctgccgctagcctgtcact

SEQ ID NO: 139760 - DNA, 119 bp, Homo sapiens; identical to SEQ ID NO: 15527
  chr1:230821540-230821659
  hypo

SEQ ID NO: 139761 - DNA, 110 bp, Homo sapiens; identical to SEQ ID NO: 61990
  chr1:230827244-230827354
  hypo

SEQ ID NO: 139762 - DNA, 30 bp, Homo sapiens; identical to SEQ ID NO: 61991
  chr1:230829261-230829291
  hypo

SEQ ID NO: 139763 - DNA, 31 bp, Homo sapiens; identical to SEQ ID NO: 61992
  chr1:230840798-230840829
  hypo

SEQ ID NO: 139764 - DNA, 43 bp, Homo sapiens; identical to SEQ ID NO: 61993
  chr1:230841594-230841637
  hypo

SEQ ID NO: 139765 - DNA, 36 bp, Homo sapiens; identical to SEQ ID NO: 61994
  chr1:230870970-230871006
  hypo

SEQ ID NO: 139766 - DNA, 31 bp, Homo sapiens; identical to SEQ ID NO: 15528
  chr1:230872266-230872297
  hypo

SEQ ID NO: 139767 - DNA, 510 bp, Homo sapiens; identical to SEQ ID NO: 61996
  chr1:230882794-230883304
  hypo

SEQ ID NO: 139768 - DNA, 132 bp, Homo sapiens; identical to SEQ ID NO: 61997
  chr1:230887781-230887913
  hypo

SEQ ID NO: 139769 - DNA, 197 bp, Homo sapiens
  chr1:230888880-230889077
  hypo
tcactccctttccagccaccacggagatcagagtcatttaatgaaatggcgccaaagctacctggagctgggggtgggaatgcaaagacgtgtgagacctggcagaggacaggccagcatttgggaggtccttacttctgccgggcctggggttttggcgcatctaaaaacaccccgtgttcttcagaaattctcct

SEQ ID NO: 139770 - DNA, 148 bp, Homo sapiens; identical to SEQ ID NO: 61999
  chr1:230894273-230894421
  hypo

SEQ ID NO: 139771 - DNA, 360 bp, Homo sapiens; identical to SEQ ID NO: 62000
  chr1:230898510-230898870
  hypo

SEQ ID NO: 139772 - DNA, 101 bp, Homo sapiens
  chr1:230928473-230928574
  hypo
caactgtggcctctgcggcccctagagggtagctcccccgggctggctgtcacccatttactgccatcagcgatgcctttcaggcacgctccttctcaagg

SEQ ID NO: 139773 - DNA, 31 bp, Homo sapiens; identical to SEQ ID NO: 62001
  chr1:230953934-230953965
  hypo

SEQ ID NO: 139774 - DNA, 31 bp, Homo sapiens; identical to SEQ ID NO: 62002
  chr1:230976920-230976951
  hypo

SEQ ID NO: 139775 - DNA, 30 bp, Homo sapiens
  chr1:230978820-230978850
  hypo
tctgatagcagcccgcgcactggggaaagc

SEQ ID NO: 139776 - DNA, 800 bp, Homo sapiens
  chr1:230979102-230979902
  hypo
tgcaaacttgggttccgagaacagggtgtcttccccatcgtcctgcctgacatcaggagatggcagcttcccctcgagctgggagggggcagcctcgtgcagtgcactgctgaaggcctggacaggctggggtctctcacgttcggtgctcacgttgggaagaggacgctgctcctgacggagggtgctgggcctttccaccttggcctccctgtccttcggggcaggttcctgccggtagcagggaggcaagaccttttcccccttctccatggacttgatctggctaggggtcagcgactggaactcggcctcaggcccctcccctcgggaccgctcagcattgatcttccagaatgacgcttcctcctccttcctggtggggcccagggcgtccaggctggaggacctgctgccttgggaggacttgagggcctgggagccctgggaagctttggacagtggtctgggctcgctggcggcggtgccgttgctcggctcctggatggatagggcggagatactgaactccatctgactctagggtgggacatgagaaaggacagaaaaaagaaagagatcctgagaatcgaccgtcacaagtgtgccagctcacgcacccctcctcagcataaggacgcacaccagccacacacgagttgttgcccatgtgctggaactgtctgtcctgagtggtgggtatggtcaggactcccatcgcacacctgaaatgcatcagaagcttaaatgccaaggccgggtgacagagtgtgggtggtggtcccctcccaaatctcatg

SEQ ID NO: 139777 - DNA, 121 bp, Homo sapiens; identical to SEQ ID NO: 15532
  chr1:230980021-230980142
  hypo

SEQ ID NO: 139778 - DNA, 125 bp, Homo sapiens; identical to SEQ ID NO: 62005
  chr1:230986634-230986759
  hypo

SEQ ID NO: 139779 - DNA, 69 bp, Homo sapiens; identical to SEQ ID NO: 62006
  chr1:230988835-230988904
  hypo

SEQ ID NO: 139780 - DNA, 30 bp, Homo sapiens; identical to SEQ ID NO: 62007
  chr1:230991693-230991723
  hypo

SEQ ID NO: 139781 - DNA, 169 bp, Homo sapiens; identical to SEQ ID NO: 62008
  chr1:230992695-230992864
  hypo

SEQ ID NO: 139782 - DNA, 31 bp, Homo sapiens; identical to SEQ ID NO: 15533
  chr1:231012508-231012539
  hypo

SEQ ID NO: 139783 - DNA, 200 bp, Homo sapiens
  chr1:231037665-231037865
  hypo
actgaggacttactacgcatggcaaacacactaggcaacattcaagagctatgacaggcaagtcacttctcccacctgagcccgtttgtcacctaagtggggataatactagcacttatctcacaggcctcttcaaaggattaaatgagtgaaacaatgtacaacacttagaaaaaattggccaggcgccgtggctcacg

SEQ ID NO: 139784 - DNA, 500 bp, Homo sapiens; identical to SEQ ID NO: 15535
  chr1:231038104-231038604
  hypo

SEQ ID NO: 139785 - DNA, 147 bp, Homo sapiens
  chr1:231046051-231046198
  hypo
gaagcaaaagagccacggaagagagcggtgctgcagccaaggcaaaccagggcagggcagggctagcactgcgcactgtgtatgctgccaagctcggcttaaacccatggttttcagaaggtgctggagagccgcagggcacagaga

SEQ ID NO: 139786 - DNA, 30 bp, Homo sapiens
  chr1:231102494-231102524
  hypo
ctaacacatagttaccgtgtacaggcaacc

SEQ ID NO: 139787 - DNA, 25 bp, Homo sapiens
  chr1:231104726-231104751
  hypo
gaaagcttagggggctgggtgcggt

SEQ ID NO: 139788 - DNA, 25 bp, Homo sapiens
  chr1:231104990-231105015
  hypo
aagcgacactccatctcaaaaaaag

SEQ ID NO: 139789 - DNA, 30 bp, Homo sapiens; identical to SEQ ID NO: 62014
  chr1:231120262-231120292
  hypo

SEQ ID NO: 139790 - DNA, 202 bp, Homo sapiens; identical to SEQ ID NO: 15538
  chr1:231122191-231122393
  hypo

SEQ ID NO: 139791 - DNA, 41 bp, Homo sapiens; identical to SEQ ID NO: 15539
  chr1:231127689-231127730
  hypo

SEQ ID NO: 139792 - DNA, 331 bp, Homo sapiens; identical to SEQ ID NO: 62017
  chr1:231162837-231163168
  hypo

SEQ ID NO: 139793 - DNA, 51 bp, Homo sapiens; identical to SEQ ID NO: 62018
  chr1:231163530-231163581
  hypo

SEQ ID NO: 139794 - DNA, 584 bp, Homo sapiens; identical to SEQ ID NO: 36953
  chr1:231175064-231175648
  hypo

SEQ ID NO: 139795 - DNA, 707 bp, Homo sapiens; identical to SEQ ID NO: 36954
  chr1:231175692-231176399
  hypo

SEQ ID NO: 139796 - DNA, 1890 bp, Homo sapiens; identical to SEQ ID NO: 105214
  chr1:231296817-231298707
  hypo

SEQ ID NO: 139797 - DNA, 31 bp, Homo sapiens; identical to SEQ ID NO: 62022
  chr1:231345006-231345037
  hypo

SEQ ID NO: 139798 - DNA, 31 bp, Homo sapiens; identical to SEQ ID NO: 15541
  chr1:231367187-231367218
  hypo

SEQ ID NO: 139799 - DNA, 133 bp, Homo sapiens; identical to SEQ ID NO: 62024
  chr1:231401052-231401185
  hypo

SEQ ID NO: 139800 - DNA, 32 bp, Homo sapiens; identical to SEQ ID NO: 15542
  chr1:231409277-231409309
  hypo

SEQ ID NO: 139801 - DNA, 272 bp, Homo sapiens; identical to SEQ ID NO: 62026
  chr1:231475547-231475819
  hypo

SEQ ID NO: 139802 - DNA, 91 bp, Homo sapiens
  chr1:231476371-231476462
  hypo
aaccagtgtgagggcacgcttcacatttagagctggtacttacttctgctagcagaatggagcagtgggagctgaggcaggaggatctctt

SEQ ID NO: 139803 - DNA, 31 bp, Homo sapiens; identical to SEQ ID NO: 15545
  chr1:231476521-231476552
  hypo

SEQ ID NO: 139804 - DNA, 30 bp, Homo sapiens; identical to SEQ ID NO: 15546
  chr1:231663377-231663407
  hypo

SEQ ID NO: 139805 - DNA, 111 bp, Homo sapiens
  chr1:231713010-231713121
  hypo
gaaagtagctttcctgtattacgtaagtaatacgtaccatacgtatgtattaggcttattgtttgtcttctttaattaatatgtaacctcgccaaggagaggaatgtttgt

SEQ ID NO: 139806 - DNA, 121 bp, Homo sapiens
  chr1:231738862-231738983
  hypo
gcccggcccatttatttttcttatttaaacattttcttcctttgacttgtttgcttgtgtttgttctcagtttttagaatcattaaacattttggccatatagaaaaatatacagaagcct

SEQ ID NO: 139807 - DNA, 80 bp, Homo sapiens; identical to SEQ ID NO: 62031
  chr1:231820897-231820977
  hypo

SEQ ID NO: 139808 - DNA, 132 bp, Homo sapiens
  chr1:231893610-231893742
  hypo
tgtgtcccaatccctcggcctccctccgattccctccacaactgggaaccgtgctcacagtcggctttccactcaggcacccaacaggtttatcaggcctgtctgcacaggtgttctcggaacctgtgtgag

SEQ ID NO: 139809 - DNA, 30 bp, Homo sapiens
  chr1:231925947-231925977
  hypo
tctttttacctggatcgtgaagcaccagtg

SEQ ID NO: 139810 - DNA, 30 bp, Homo sapiens
  chr1:231983905-231983935
  hypo
gagaacttggagacgcgtatcaatgccgcc

SEQ ID NO: 139811 - DNA, 139 bp, Homo sapiens
  chr1:232104129-232104268
  hypo
caactcttcccttctcggtaccctgagcagacgtaccagtcacagtaattaatataaaaggtgtccttcctcttgaggcatcacttttaaagcaaaaacaagggaggctgaggcaggagaatggcgtgaacccgggagg

SEQ ID NO: 139812 - DNA, 205 bp, Homo sapiens; identical to SEQ ID NO: 15547
  chr1:232192428-232192633
  hypo

SEQ ID NO: 139813 - DNA, 18 bp, Homo sapiens
  chr1:232297088-232297106
  hypo
aggcgtgagctaccgcgc

SEQ ID NO: 139814 - DNA, 30 bp, Homo sapiens
  chr1:232396845-232396875
  hypo
cggggactgagttctcggagaagggaccca

SEQ ID NO: 139815 - DNA, 30 bp, Homo sapiens; identical to SEQ ID NO: 62033
  chr1:232455135-232455165
  hypo

SEQ ID NO: 139816 - DNA, 88 bp, Homo sapiens; identical to SEQ ID NO: 62034
  chr1:232466922-232467010
  hypo

SEQ ID NO: 139817 - DNA, 30 bp, Homo sapiens
  chr1:232521309-232521339
  hypo
gggcagagccacgcacggccaagtgtcctg

SEQ ID NO: 139818 - DNA, 31 bp, Homo sapiens; identical to SEQ ID NO: 62035
  chr1:232550812-232550843
  hypo

SEQ ID NO: 139819 - DNA, 218 bp, Homo sapiens
  chr1:232551393-232551611
  hypo
agtcagtcatcagtcacagcacgggcaccagcccagagtgagtcagaacatgggcaccactgcccctcccagagtcagtcagtcagaacacgggcaccactgccccctcccagagtcagtcagaacacgggcaccactgtccctcccagagtcagtcagtcagaacacgggcaccactgtccctcccagagtcagtcagaacacgggcaccactgtcc

SEQ ID NO: 139820 - DNA, 199 bp, Homo sapiens; identical to SEQ ID NO: 15548
  chr1:232566619-232566818
  hypo

SEQ ID NO: 139821 - DNA, 193 bp, Homo sapiens; identical to SEQ ID NO: 62037
  chr1:232568781-232568974
  hypo

SEQ ID NO: 139822 - DNA, 61 bp, Homo sapiens; identical to SEQ ID NO: 15549
  chr1:232649853-232649914
  hypo

SEQ ID NO: 139823 - DNA, 16 bp, Homo sapiens
  chr1:232680297-232680313
  hypo
tcctgtctcaaaaaaa

SEQ ID NO: 139824 - DNA, 889 bp, Homo sapiens; identical to SEQ ID NO: 105229
  chr1:232765595-232766484
  hypo

SEQ ID NO: 139825 - DNA, 19 bp, Homo sapiens
  chr1:232801855-232801874
  hypo
cagagctaataacacacat

SEQ ID NO: 139826 - DNA, 30 bp, Homo sapiens
  chr1:232839056-232839086
  hypo
ttcacaatgtaccttcgcattgcttcatat

SEQ ID NO: 139827 - DNA, 90 bp, Homo sapiens; identical to SEQ ID NO: 62042
  chr1:232889010-232889100
  hypo

SEQ ID NO: 139828 - DNA, 62 bp, Homo sapiens; identical to SEQ ID NO: 62043
  chr1:232909164-232909226
  hypo

SEQ ID NO: 139829 - DNA, 25 bp, Homo sapiens
  chr1:232913264-232913289
  hypo
agccagactccgtctcaaaaatcaa

SEQ ID NO: 139830 - DNA, 31 bp, Homo sapiens; identical to SEQ ID NO: 62044
  chr1:233015538-233015569
  hypo

SEQ ID NO: 139831 - DNA, 204 bp, Homo sapiens; identical to SEQ ID NO: 15552
  chr1:233085193-233085397
  hypo

SEQ ID NO: 139832 - DNA, 30 bp, Homo sapiens; identical to SEQ ID NO: 62046
  chr1:233112512-233112542
  hypo

SEQ ID NO: 139833 - DNA, 154 bp, Homo sapiens; identical to SEQ ID NO: 62047
  chr1:233116463-233116617
  hypo

SEQ ID NO: 139834 - DNA, 30 bp, Homo sapiens
  chr1:233118113-233118143
  hypo
ctcggtatgcacactcgagatgcccgctct

SEQ ID NO: 139835 - DNA, 31 bp, Homo sapiens; identical to SEQ ID NO: 62048
  chr1:233135996-233136027
  hypo

SEQ ID NO: 139836 - DNA, 30 bp, Homo sapiens; identical to SEQ ID NO: 1213
  chr1:233143151-233143181
  hypo

SEQ ID NO: 139837 - DNA, 33 bp, Homo sapiens; identical to SEQ ID NO: 15554
  chr1:233264702-233264735
  hypo

SEQ ID NO: 139838 - DNA, 18 bp, Homo sapiens
  chr1:233465109-233465127
  hypo
tctctatgggccaggcgc

SEQ ID NO: 139839 - DNA, 17 bp, Homo sapiens
  chr1:233465426-233465443
  hypo
aatatgattttattatt

SEQ ID NO: 139840 - DNA, 121 bp, Homo sapiens
  chr1:233601758-233601879
  hypo
cttgcccggaggtatggagggagaggcccgggcgggaaccagggctgtacgtgaagcttgtggcgagcccgggttccggctgggtgcaggctcagtggcccgcagtcggagcggccggtcg

SEQ ID NO: 139841 - DNA, 40 bp, Homo sapiens
  chr1:233601998-233602038
  hypo
agcctcttccttgcgggacagggctcgggacctgcagccc

SEQ ID NO: 139842 - DNA, 30 bp, Homo sapiens
  chr1:233689591-233689621
  hypo
caggcagcattcttacgcccgtgacccctc

SEQ ID NO: 139843 - DNA, 923 bp, Homo sapiens; identical to SEQ ID NO: 105238
  chr1:233749768-233750691
  hypo

SEQ ID NO: 139844 - DNA, 83 bp, Homo sapiens; identical to SEQ ID NO: 15558
  chr1:233799534-233799617
  hypo

SEQ ID NO: 139845 - DNA, 23 bp, Homo sapiens
  chr1:233799856-233799879
  hypo
tgagccaccgtgcccggccttca

SEQ ID NO: 139846 - DNA, 223 bp, Homo sapiens; identical to SEQ ID NO: 36975
  chr1:234040257-234040480
  hypo

SEQ ID NO: 139847 - DNA, 212 bp, Homo sapiens; identical to SEQ ID NO: 1219
  chr1:234041148-234041360
  hypo

SEQ ID NO: 139848 - DNA, 28 bp, Homo sapiens
  chr1:234089753-234089781
  hypo
cttttttttttttttttgagacggagtc

SEQ ID NO: 139849 - DNA, 246 bp, Homo sapiens
  chr1:234342549-234342795
  hypo
actgggtctgcccaacgttgagcctccgaggacctcattgaacaagaccttgcctgcaggtcccggccagcctgtgctcaggaataactaaggagtggagccgcatcaacctccttcccaaatccggacgtcttcctccgactcaagcccagcctgagggccattctccttgattcacccttggaaacagacaccagccaagggagctgtctcctggcgttgacgaggatccgatttaggtcagta

SEQ ID NO: 139850 - DNA, 30 bp, Homo sapiens
  chr1:234409028-234409058
  hypo
tcttcagaagcttggcgatggctttctttg

SEQ ID NO: 139851 - DNA, 128 bp, Homo sapiens
  chr1:234452340-234452468
  hypo
tgtccagattgtggccgccatcctcgccatcgctggcattgtgatgatgacctacgctgatggcttccacagccactccgtcatcggcatcgcactggtggtggcctcagcatcgatgtctgccctct

SEQ ID NO: 139852 - DNA, 30 bp, Homo sapiens
  chr1:234459825-234459855
  hypo
tacagagcgtggcccgcggtgtacaatacc

SEQ ID NO: 139853 - DNA, 212 bp, Homo sapiens; identical to SEQ ID NO: 15562
  chr1:234541032-234541244
  hypo

SEQ ID NO: 139854 - DNA, 162 bp, Homo sapiens; identical to SEQ ID NO: 15563
  chr1:234541508-234541670
  hypo

SEQ ID NO: 139855 - DNA, 30 bp, Homo sapiens; identical to SEQ ID NO: 62061
  chr1:234544633-234544663
  hypo

SEQ ID NO: 139856 - DNA, 31 bp, Homo sapiens; identical to SEQ ID NO: 62062
  chr1:234548569-234548600
  hypo

SEQ ID NO: 139857 - DNA, 278 bp, Homo sapiens; identical to SEQ ID NO: 62063
  chr1:234587510-234587788
  hypo

SEQ ID NO: 139858 - DNA, 92 bp, Homo sapiens
  chr1:234604774-234604866
  hypo
aggttggtgcgaaagtcgttgcggtttttgcctttttttttttttttttaaaaaaaaaaaaaaggcaaaaaccgcaacgactttcgcaccaa

SEQ ID NO: 139859 - DNA, 30 bp, Homo sapiens; identical to SEQ ID NO: 15564
  chr1:234617727-234617757
  hypo

SEQ ID NO: 139860 - DNA, 30 bp, Homo sapiens; identical to SEQ ID NO: 62065
  chr1:234620925-234620955
  hypo

SEQ ID NO: 139861 - DNA, 215 bp, Homo sapiens
  chr1:234621220-234621435
  hypo
gaaccgctacccctccgtgacctgttaggaaccaggctgcacaggagaaggtgagctgcaggcgagtgggcattatcacctgagctccgcctcctatcaaatcagcagcggccttagattgtcttaccacctgagctccgcctcctatcaaatcagcagccacccccaccttcccggctccatggaaaaattgtcttccacgaaacctggtccct

SEQ ID NO: 139862 - DNA, 31 bp, Homo sapiens; identical to SEQ ID NO: 15565
  chr1:234621891-234621922
  hypo

SEQ ID NO: 139863 - DNA, 31 bp, Homo sapiens; identical to SEQ ID NO: 62067
  chr1:234641873-234641904
  hypo

SEQ ID NO: 139864 - DNA, 31 bp, Homo sapiens; identical to SEQ ID NO: 15566
  chr1:234643572-234643603
  hypo

SEQ ID NO: 139865 - DNA, 83 bp, Homo sapiens; identical to SEQ ID NO: 62069
  chr1:234690618-234690701
  hypo

SEQ ID NO: 139866 - DNA, 182 bp, Homo sapiens; identical to SEQ ID NO: 15567
  chr1:234691149-234691331
  hypo

SEQ ID NO: 139867 - DNA, 31 bp, Homo sapiens; identical to SEQ ID NO: 62071
  chr1:234721944-234721975
  hypo

SEQ ID NO: 139868 - DNA, 496 bp, Homo sapiens; identical to SEQ ID NO: 62072
  chr1:234724570-234725066
  hypo

SEQ ID NO: 139869 - DNA, 200 bp, Homo sapiens; identical to SEQ ID NO: 105248
  chr1:234736238-234736438
  hypo

SEQ ID NO: 139870 - DNA, 226 bp, Homo sapiens
  chr1:234795441-234795667
  hypo
tggggcagggctggagccctgcggatgctctgatgagtgagaatgagtcacccgctcaggcctctttctgcttaagcagaggtaaaggtccagctttgtaatagccggagtgtgaggatccctcgcactgatctgcccacaatgggccgccggcaggcccagagaccctcaagtctcatcctcagtggtctaccgagctgtgcacggccagcttccctgaattcac

SEQ ID NO: 139871 - DNA, 208 bp, Homo sapiens
  chr1:234797011-234797219
  hypo
gggcccttcgtccaccggggtctgtcctggttcctgggcgagctgtggcagggtctttctggcagtccacccagtgccctgtggcaggcgatcaggaagcagaggcagagcagctgggggaggactgggatgactgaacctctcctgcttaggttcaggggccctcccttcaaggtgcggcctgtgtgagacacgcatccacagcccg

SEQ ID NO: 139872 - DNA, 111 bp, Homo sapiens; identical to SEQ ID NO: 62075
  chr1:234808100-234808211
  hypo

SEQ ID NO: 139873 - DNA, 142 bp, Homo sapiens; identical to SEQ ID NO: 1223
  chr1:234828213-234828355
  hypo

SEQ ID NO: 139874 - DNA, 562 bp, Homo sapiens; identical to SEQ ID NO: 15571
  chr1:234844949-234845511
  hypo

SEQ ID NO: 139875 - DNA, 36 bp, Homo sapiens; identical to SEQ ID NO: 62078
  chr1:234863730-234863766
  hypo

SEQ ID NO: 139876 - DNA, 211 bp, Homo sapiens; identical to SEQ ID NO: 62079
  chr1:234868419-234868630
  hypo

SEQ ID NO: 139877 - DNA, 134 bp, Homo sapiens; identical to SEQ ID NO: 62080
  chr1:234868846-234868980
  hypo

SEQ ID NO: 139878 - DNA, 384 bp, Homo sapiens; identical to SEQ ID NO: 62081
  chr1:234869962-234870346
  hypo

SEQ ID NO: 139879 - DNA, 30 bp, Homo sapiens
  chr1:234871294-234871324
  hypo
agatcacacagctagcggcactcagagaga

SEQ ID NO: 139880 - DNA, 285 bp, Homo sapiens; identical to SEQ ID NO: 15574
  chr1:234871740-234872025
  hypo

SEQ ID NO: 139881 - DNA, 163 bp, Homo sapiens
  chr1:234881086-234881249
  hypo
aggttttctctcccgcgtattgtattcctgttgtatattgtacatgtaatgcatgctagctgccatttagaatggaaaagcatgccctcaccacagtcaggcccacattttgctttccgtgttaaagagagaaatggcgtaacgtgctcgtgaagaggcggca

SEQ ID NO: 139882 - DNA, 30 bp, Homo sapiens
  chr1:234886414-234886444
  hypo
agttcattttcatctcgacccctttctact

SEQ ID NO: 139883 - DNA, 100 bp, Homo sapiens; identical to SEQ ID NO: 15575
  chr1:234893899-234893999
  hypo

SEQ ID NO: 139884 - DNA, 160 bp, Homo sapiens; identical to SEQ ID NO: 62084
  chr1:234895629-234895789
  hypo

SEQ ID NO: 139885 - DNA, 192 bp, Homo sapiens; identical to SEQ ID NO: 62085
  chr1:234957453-234957645
  hypo

SEQ ID NO: 139886 - DNA, 30 bp, Homo sapiens
  chr1:234959494-234959524
  hypo
cagggagcgggccagcgggagagcaccccc

SEQ ID NO: 139887 - DNA, 37 bp, Homo sapiens; identical to SEQ ID NO: 62086
  chr1:234960408-234960445
  hypo

SEQ ID NO: 139888 - DNA, 31 bp, Homo sapiens; identical to SEQ ID NO: 15578
  chr1:234962495-234962526
  hypo

SEQ ID NO: 139889 - DNA, 125 bp, Homo sapiens
  chr1:234964788-234964913
  hypo
tacccggtcagtgtgcggcggagcatacgtgcatgcctgggcataccctcttctgcttccgtgttgttggtgctgctgcaccatcagcagctgtacctagttactaaacacgcgagtgctgtaca

SEQ ID NO: 139890 - DNA, 30 bp, Homo sapiens
  chr1:234967375-234967405
  hypo
ctccagcctggggaacggagcaaaacactg

SEQ ID NO: 139891 - DNA, 76 bp, Homo sapiens; identical to SEQ ID NO: 62088
  chr1:235003814-235003890
  hypo

SEQ ID NO: 139892 - DNA, 31 bp, Homo sapiens; identical to SEQ ID NO: 62089
  chr1:235009660-235009691
  hypo

SEQ ID NO: 139893 - DNA, 31 bp, Homo sapiens; identical to SEQ ID NO: 15579
  chr1:235019853-235019884
  hypo

SEQ ID NO: 139894 - DNA, 30 bp, Homo sapiens; identical to SEQ ID NO: 62091
  chr1:235035672-235035702
  hypo

SEQ ID NO: 139895 - DNA, 86 bp, Homo sapiens; identical to SEQ ID NO: 62092
  chr1:235036867-235036953
  hypo

SEQ ID NO: 139896 - DNA, 206 bp, Homo sapiens; identical to SEQ ID NO: 62093
  chr1:235037072-235037278
  hypo

SEQ ID NO: 139897 - DNA, 80 bp, Homo sapiens; identical to SEQ ID NO: 15581
  chr1:235042106-235042186
  hypo

SEQ ID NO: 139898 - DNA, 281 bp, Homo sapiens; identical to SEQ ID NO: 62095
  chr1:235044522-235044803
  hypo

SEQ ID NO: 139899 - DNA, 77 bp, Homo sapiens; identical to SEQ ID NO: 15583
  chr1:235067967-235068044
  hypo

SEQ ID NO: 139900 - DNA, 178 bp, Homo sapiens; identical to SEQ ID NO: 15584
  chr1:235129829-235130007
  hypo

SEQ ID NO: 139901 - DNA, 30 bp, Homo sapiens
  chr1:235146636-235146666
  hypo
aaccatttttaagcacgttgttcagtggtg

SEQ ID NO: 139902 - DNA, 30 bp, Homo sapiens
  chr1:235162994-235163024
  hypo
acaaacatccaagcacggcatctgtctacc

SEQ ID NO: 139903 - DNA, 21 bp, Homo sapiens
  chr1:235255587-235255608
  hypo
ttttgtttttttgagacggag

SEQ ID NO: 139904 - DNA, 186 bp, Homo sapiens
  chr1:235260409-235260595
  hypo
aggcatgagccaccgcgcctggtttgttttttttctttcagattttatggctttatttaaacacaaataatatgtacacatggctgcccattcattttcttggcggggcagcccagcattgggattgctgactctgacggcagctgggctgctcttcccgaaacagcgttgcggttcttggttctt

SEQ ID NO: 139905 - DNA, 162 bp, Homo sapiens; identical to SEQ ID NO: 62099
  chr1:235267080-235267242
  hypo

SEQ ID NO: 139906 - DNA, 30 bp, Homo sapiens; identical to SEQ ID NO: 62100
  chr1:235270913-235270943
  hypo

SEQ ID NO: 139907 - DNA, 31 bp, Homo sapiens
  chr1:235292637-235292668
  hypo
aagaaaaaatagaaaacgtgaattgttttat

SEQ ID NO: 139908 - DNA, 30 bp, Homo sapiens; identical to SEQ ID NO: 15587
  chr1:235293017-235293047
  hypo

SEQ ID NO: 139909 - DNA, 22 bp, Homo sapiens
  chr1:235313404-235313426
  hypo
tttgagacagaatctcgctttg

SEQ ID NO: 139910 - DNA, 207 bp, Homo sapiens; identical to SEQ ID NO: 15588
  chr1:235317094-235317301
  hypo

SEQ ID NO: 139911 - DNA, 28 bp, Homo sapiens
  chr1:235325292-235325320
  hypo
tctttgcagccaggtgcggtggctcgcc

SEQ ID NO: 139912 - DNA, 121 bp, Homo sapiens
  chr1:235325379-235325500
  hypo
aaccagcctggtcgatctagcgagacttattctctacagaaaagaaattagacgggcaccttcgcgctcggcgcctgtagtcccagcactttgagaggctcgggcaagaggatcccttgag

SEQ ID NO: 139913 - DNA, 31 bp, Homo sapiens; identical to SEQ ID NO: 62105
  chr1:235356124-235356155
  hypo

SEQ ID NO: 139914 - DNA, 30 bp, Homo sapiens; identical to SEQ ID NO: 15589
  chr1:235410285-235410315
  hypo

SEQ ID NO: 139915 - DNA, 21 bp, Homo sapiens
  chr1:235433310-235433331
  hypo
aacgccagccgggcgcggtgc

SEQ ID NO: 139916 - DNA, 20 bp, Homo sapiens
  chr1:235447655-235447675
  hypo
cagagcgagactccgtctct

SEQ ID NO: 139917 - DNA, 24 bp, Homo sapiens
  chr1:235459109-235459133
  hypo
gcgagactacgtcccaaaaaaaaa

SEQ ID NO: 139918 - DNA, 30 bp, Homo sapiens; identical to SEQ ID NO: 15592
  chr1:235486727-235486757
  hypo

SEQ ID NO: 139919 - DNA, 30 bp, Homo sapiens
  chr1:235507211-235507241
  hypo
tgcgcttttccttcccgcccacatcaccac

SEQ ID NO: 139920 - DNA, 41 bp, Homo sapiens; identical to SEQ ID NO: 62110
  chr1:235508755-235508796
  hypo

SEQ ID NO: 139921 - DNA, 30 bp, Homo sapiens; identical to SEQ ID NO: 105267
  chr1:235533175-235533205
  hypo

SEQ ID NO: 139922 - DNA, 100 bp, Homo sapiens
  chr1:235542865-235542965
  hypo
aaaacacatttctagcgcaaatgtatcgtttgagctagagacccacatccgtcatcaccctctataggcactttaagtatactgacttctctcccaaact

SEQ ID NO: 139923 - DNA, 30 bp, Homo sapiens
  chr1:235543418-235543448
  hypo
gaacatgcaacagtacgttttgctggtgtt

SEQ ID NO: 139924 - DNA, 24 bp, Homo sapiens
  chr1:235567576-235567600
  hypo
gcaagactccggctcaagaaaaaa

SEQ ID NO: 139925 - DNA, 243 bp, Homo sapiens; identical to SEQ ID NO: 62111
  chr1:235613455-235613698
  hypo

SEQ ID NO: 139926 - DNA, 148 bp, Homo sapiens; identical to SEQ ID NO: 15594
  chr1:235665689-235665837
  hypo

SEQ ID NO: 139927 - DNA, 26 bp, Homo sapiens
  chr1:235714544-235714570
  hypo
taagaaaaccattccacggccgggtg

SEQ ID NO: 139928 - DNA, 31 bp, Homo sapiens; identical to SEQ ID NO: 62114
  chr1:235751252-235751283
  hypo

SEQ ID NO: 139929 - DNA, 31 bp, Homo sapiens; identical to SEQ ID NO: 62115
  chr1:235754113-235754144
  hypo

SEQ ID NO: 139930 - DNA, 1426 bp, Homo sapiens; identical to SEQ ID NO: 105272
  chr1:235811919-235813345
  hypo

SEQ ID NO: 139931 - DNA, 129 bp, Homo sapiens; identical to SEQ ID NO: 105273
  chr1:235813667-235813796
  hypo

SEQ ID NO: 139932 - DNA, 21 bp, Homo sapiens
  chr1:235844182-235844203
  hypo
gccaccgcgcctggcctacaa

SEQ ID NO: 139933 - DNA, 32 bp, Homo sapiens; identical to SEQ ID NO: 62118
  chr1:235855353-235855385
  hypo

SEQ ID NO: 139934 - DNA, 30 bp, Homo sapiens
  chr1:235871890-235871920
  hypo
ggcagagggtgcctacgttgccaatctcaa

SEQ ID NO: 139935 - DNA, 124 bp, Homo sapiens
  chr1:235872465-235872589
  hypo
ctgacagatgttctgcgacacgtagtcagactctagagcctgccgatggatgaggataaaaagacgaggatcattacgcgcccaagggggaaggttgacgtgattaacccgttcaccattctga

SEQ ID NO: 139936 - DNA, 176 bp, Homo sapiens; identical to SEQ ID NO: 62119
  chr1:235955183-235955359
  hypo

SEQ ID NO: 139937 - DNA, 30 bp, Homo sapiens; identical to SEQ ID NO: 15597
  chr1:235971843-235971873
  hypo

SEQ ID NO: 139938 - DNA, 30 bp, Homo sapiens
  chr1:235972378-235972408
  hypo
atgttatgaacacccgataggatctggaca

SEQ ID NO: 139939 - DNA, 69 bp, Homo sapiens
  chr1:235973153-235973222
  hypo
aagccaccggttcttcggtccaacctgcagaaactactcgactctccaagttgtcgctcagactgcagc

SEQ ID NO: 139940 - DNA, 30 bp, Homo sapiens
  chr1:235973662-235973692
  hypo
cgatgggtaattttacgctgtcgtctgctt

SEQ ID NO: 139941 - DNA, 31 bp, Homo sapiens; identical to SEQ ID NO: 62121
  chr1:236055034-236055065
  hypo

SEQ ID NO: 139942 - DNA, 95 bp, Homo sapiens; identical to SEQ ID NO: 62122
  chr1:236062547-236062642
  hypo

SEQ ID NO: 139943 - DNA, 40 bp, Homo sapiens; identical to SEQ ID NO: 62123
  chr1:236069952-236069992
  hypo

SEQ ID NO: 139944 - DNA, 396 bp, Homo sapiens
  chr1:236081423-236081819
  hypo
tcagggaccaccacccgcccccatgcccaacgctgaggaggacactccagcagggatccaccaggtggctgtaaagctaagaaggtgacctcctgggtgtccctcctgaaacacagagcaccgtttgaactgcccgagcgagcggaccagctggcgcacagatcacagagccctgcagtgatcagctgccatctggatctgcccgggtgcaagcaaacggcacagctctggaagcttcctcagggctccaagagagcatctgcgtgttgggaagcctcggatgtgctgcaagacctttgttctgactgtggcaaagcctatgtatgctaggtgtcacattgaattcttttctattaataataacttatctgagattctgcgcgactgtcgctctag

SEQ ID NO: 139945 - DNA, 21 bp, Homo sapiens
  chr1:236093296-236093317
  hypo
ttttttttttttgagacggag

SEQ ID NO: 139946 - DNA, 121 bp, Homo sapiens
  chr1:236121530-236121651
  hypo
gcatgcgcggtggcctgccagcgctcaggaggggcctcaagtgcagtgcgtttaccaaaattgtgcacaagctcacttgaggcgctctttccttaccagtcgagtgttactagaggaaggt

SEQ ID NO: 139947 - DNA, 31 bp, Homo sapiens; identical to SEQ ID NO: 15599
  chr1:236125189-236125220
  hypo

SEQ ID NO: 139948 - DNA, 186 bp, Homo sapiens; identical to SEQ ID NO: 62126
  chr1:236143071-236143257
  hypo

SEQ ID NO: 139949 - DNA, 30 bp, Homo sapiens; identical to SEQ ID NO: 15600
  chr1:236154186-236154216
  hypo

SEQ ID NO: 139950 - DNA, 248 bp, Homo sapiens
  chr1:236155721-236155969
  hypo
ctaaaccctgcttcacatgggcgcctgctccaaacccatcccaggctcctcgttgccctcatgaccaatactcaggcttagaaacgtggctcacacggtgctgcttctggaaagcctcacccatgagcccaccgccccacgcaagccaggattccgcctcggctccctggtcgctgtctgcttctcctaaagctcatctccctacactgttcctgtctattcaccgtcctttccgcttcttgggggcc

SEQ ID NO: 139951 - DNA, 536 bp, Homo sapiens; identical to SEQ ID NO: 15601
  chr1:236156642-236157178
  hypo

SEQ ID NO: 139952 - DNA, 203 bp, Homo sapiens; identical to SEQ ID NO: 62130
  chr1:236161320-236161523
  hypo

SEQ ID NO: 139953 - DNA, 98 bp, Homo sapiens
  chr1:236187365-236187463
  hypo
gtaccatagcaggttcgcccgtctcctcggaagccgatggagcactcgcaggtgaactgtgtcctgggaccagggcgacaggccgcgttggtgtcaca

SEQ ID NO: 139954 - DNA, 182 bp, Homo sapiens
  chr1:236189252-236189434
  hypo
tgtacaggacgaacacgctgtccaccgagagctgctgggtgctgggcagggctggccgggagtcatcgtggacgcattcctggaaggtgatggtctggcgccactggtaagtgtagatgcgtgaaggagatgccccatctcgctcgggctcagtcaccgtgtactcccgggtggaggaggaa

SEQ ID NO: 139955 - DNA, 312 bp, Homo sapiens; identical to SEQ ID NO: 15603
  chr1:236192796-236193108
  hypo

SEQ ID NO: 139956 - DNA, 30 bp, Homo sapiens; identical to SEQ ID NO: 15604
  chr1:236193502-236193532
  hypo

SEQ ID NO: 139957 - DNA, 85 bp, Homo sapiens; identical to SEQ ID NO: 15605
  chr1:236194736-236194821
  hypo

SEQ ID NO: 139958 - DNA, 269 bp, Homo sapiens; identical to SEQ ID NO: 15606
  chr1:236212015-236212284
  hypo

SEQ ID NO: 139959 - DNA, 180 bp, Homo sapiens; identical to SEQ ID NO: 62136
  chr1:236274570-236274750
  hypo

SEQ ID NO: 139960 - DNA, 30 bp, Homo sapiens; identical to SEQ ID NO: 62137
  chr1:236275319-236275349
  hypo

SEQ ID NO: 139961 - DNA, 21 bp, Homo sapiens
  chr1:236280818-236280839
  hypo
ccattgcgcctggccaacaat

SEQ ID NO: 139962 - DNA, 181 bp, Homo sapiens
  chr1:236281070-236281251
  hypo
ctgcttctgagaagtcgctgcctccccttctccctttagcctccctggcaaaataagacacttcgattgcggggccacagtcagttctgactctgatatcttacgacacctatcagggatcagcctggacctgttacctgagcggggtgtggcctcctttcctctgcgctttccccacacc

SEQ ID NO: 139963 - DNA, 44 bp, Homo sapiens
  chr1:236315000-236315044
  hypo
cgtgagccactgcgcccggcctccctcctcgatttttaaatggc

SEQ ID NO: 139964 - DNA, 30 bp, Homo sapiens
  chr1:236317606-236317636
  hypo
gctgtgaacagcacgcgtcatccgtccccc

SEQ ID NO: 139965 - DNA, 34 bp, Homo sapiens
  chr1:236318109-236318143
  hypo
gacactgcacactgccgcacgtggcccgggaccc

SEQ ID NO: 139966 - DNA, 30 bp, Homo sapiens
  chr1:236318477-236318507
  hypo
tgtggctgaagcggccgggccgcagctatt

SEQ ID NO: 139967 - DNA, 30 bp, Homo sapiens
  chr1:236329007-236329037
  hypo
aaaaccgctgtataccgtatgtttctcttg

SEQ ID NO: 139968 - DNA, 30 bp, Homo sapiens
  chr1:236329268-236329298
  hypo
gcaatacagccacttcgtgtgttgggtaag

SEQ ID NO: 139969 - DNA, 30 bp, Homo sapiens
  chr1:236329640-236329670
  hypo
tcttgcctaaaatcccgtggtgggttgtca

SEQ ID NO: 139970 - DNA, 104 bp, Homo sapiens
  chr1:236338711-236338815
  hypo
ttcagacagcacccacgaggaatcatctggaaaatgtaagtggccagacagtgcgttccccagaggctgctgcatggagtgtgtgtacacgcgggttctggatg

SEQ ID NO: 139971 - DNA, 211 bp, Homo sapiens; identical to SEQ ID NO: 62139
  chr1:236339560-236339771
  hypo

SEQ ID NO: 139972 - DNA, 710 bp, Homo sapiens; identical to SEQ ID NO: 37003
  chr1:236444197-236444907
  hypo

SEQ ID NO: 139973 - DNA, 451 bp, Homo sapiens; identical to SEQ ID NO: 1233
  chr1:236445120-236445571
  hypo

SEQ ID NO: 139974 - DNA, 30 bp, Homo sapiens
  chr1:236451372-236451402
  hypo
catagacaatcaagccggaagcttgcaggg

SEQ ID NO: 139975 - DNA, 200 bp, Homo sapiens; identical to SEQ ID NO: 62142
  chr1:236451639-236451839
  hypo

SEQ ID NO: 139976 - DNA, 30 bp, Homo sapiens; identical to SEQ ID NO: 62143
  chr1:236511371-236511401
  hypo

SEQ ID NO: 139977 - DNA, 45 bp, Homo sapiens; identical to SEQ ID NO: 62144
  chr1:236514729-236514774
  hypo

SEQ ID NO: 139978 - DNA, 121 bp, Homo sapiens; identical to SEQ ID NO: 15611
  chr1:236540754-236540875
  hypo

SEQ ID NO: 139979 - DNA, 8 bp, Homo sapiens
  chr1:236558368-236558376
  hypo
atatcaga

SEQ ID NO: 139980 - DNA, 553 bp, Homo sapiens; identical to SEQ ID NO: 1235
  chr1:236558653-236559206
  hypo

SEQ ID NO: 139981 - DNA, 119 bp, Homo sapiens; identical to SEQ ID NO: 1236
  chr1:236559256-236559375
  hypo

SEQ ID NO: 139982 - DNA, 57 bp, Homo sapiens; identical to SEQ ID NO: 15614
  chr1:236561304-236561361
  hypo

SEQ ID NO: 139983 - DNA, 154 bp, Homo sapiens; identical to SEQ ID NO: 62149
  chr1:236626419-236626573
  hypo

SEQ ID NO: 139984 - DNA, 30 bp, Homo sapiens
  chr1:236627451-236627481
  hypo
accacccggctagaacggctttcaaaatcg

SEQ ID NO: 139985 - DNA, 76 bp, Homo sapiens
  chr1:236645855-236645931
  hypo
ctaccacagggccgacgtggagaaggttctgcgcaggtgggtggacgaggagtggcccaagcgggagcgtggagac

SEQ ID NO: 139986 - DNA, 30 bp, Homo sapiens; identical to SEQ ID NO: 62150
  chr1:236646223-236646253
  hypo

SEQ ID NO: 139987 - DNA, 313 bp, Homo sapiens
  chr1:236657368-236657681
  hypo
cccagaccatcgacacggcctcaaggccctgcatgacgcctcctgccccaacacctcgtgtcatcttgctctcctctcccgcagctcctgaggctttagccaccctggaattccaagtccccatggtcatttttttttcctgctcaagatatcaccatgtgctgtcccctctgcccttgtctacacccacgtgtccttctcccgccccggccacactcatggggcacactgtccttccctggctaatcctcccacactcgataccactttctctgggatattgcacccgatcttcagccgcagttgtcttcct

SEQ ID NO: 139988 - DNA, 31 bp, Homo sapiens; identical to SEQ ID NO: 62152
  chr1:236660745-236660776
  hypo

SEQ ID NO: 139989 - DNA, 18 bp, Homo sapiens
  chr1:236681268-236681286
  hypo
ccatgtatactatttata

SEQ ID NO: 139990 - DNA, 60 bp, Homo sapiens; identical to SEQ ID NO: 62154
  chr1:236723109-236723169
  hypo

SEQ ID NO: 139991 - DNA, 135 bp, Homo sapiens
  chr1:236802443-236802578
  hypo
gagtctcattttagccgtggggatcacgtggcatggcatgtctataatgtcacttgtagagataccgttaccggtttgcccctactgtccagtgaccccactccaaaagcaagcatcacgcgctgtgtgtgcggt

SEQ ID NO: 139992 - DNA, 121 bp, Homo sapiens; identical to SEQ ID NO: 105291
  chr1:236850197-236850318
  hypo

SEQ ID NO: 139993 - DNA, 30 bp, Homo sapiens
  chr1:236900318-236900348
  hypo
gcacgccaccctcctcgtcccctctcatca

SEQ ID NO: 139994 - DNA, 30 bp, Homo sapiens; identical to SEQ ID NO: 62155
  chr1:236902692-236902722
  hypo

SEQ ID NO: 139995 - DNA, 31 bp, Homo sapiens; identical to SEQ ID NO: 15615
  chr1:236903311-236903342
  hypo

SEQ ID NO: 139996 - DNA, 137 bp, Homo sapiens; identical to SEQ ID NO: 62157
  chr1:236907942-236908079
  hypo

SEQ ID NO: 139997 - DNA, 29 bp, Homo sapiens
  chr1:236938014-236938043
  hypo
cgagccactgcgcccggcttaaattctct

SEQ ID NO: 139998 - DNA, 30 bp, Homo sapiens; identical to SEQ ID NO: 62159
  chr1:237000549-237000579
  hypo

SEQ ID NO: 139999 - DNA, 138 bp, Homo sapiens
  chr1:237052579-237052717
  hypo
tccggggcaagtacccgaatcgaggctttcccaagatatttaacgacaaaacagtaggttagtgcagtaagtccttcctttctgcctctgatattcaagctgtgggattgtgactttgaagaccggaatcggtgagga

SEQ ID NO: 140000 - DNA, 162 bp, Homo sapiens; identical to SEQ ID NO: 62160
  chr1:237053950-237054112
  hypo

SEQ ID NO: 140001 - DNA, 30 bp, Homo sapiens; identical to SEQ ID NO: 62161
  chr1:237061501-237061531
  hypo

SEQ ID NO: 140002 - DNA, 30 bp, Homo sapiens; identical to SEQ ID NO: 1237
  chr1:237093369-237093399
  hypo

SEQ ID NO: 140003 - DNA, 272 bp, Homo sapiens; identical to SEQ ID NO: 62163
  chr1:237144672-237144944
  hypo

SEQ ID NO: 140004 - DNA, 82 bp, Homo sapiens; identical to SEQ ID NO: 37010
  chr1:237205141-237205223
  hypo

SEQ ID NO: 140005 - DNA, 164 bp, Homo sapiens; identical to SEQ ID NO: 1239
  chr1:237206101-237206265
  hypo

SEQ ID NO: 140006 - DNA, 153 bp, Homo sapiens; identical to SEQ ID NO: 1240
  chr1:237206511-237206664
  hypo

SEQ ID NO: 140007 - DNA, 17 bp, Homo sapiens
  chr1:237257875-237257892
  hypo
tattattattatttttt

SEQ ID NO: 140008 - DNA, 39 bp, Homo sapiens; identical to SEQ ID NO: 62168
  chr1:237584238-237584277
  hypo

SEQ ID NO: 140009 - DNA, 23 bp, Homo sapiens
  chr1:237699615-237699638
  hypo
aatcccagcactttgggaggccg

SEQ ID NO: 140010 - DNA, 732 bp, Homo sapiens; identical to SEQ ID NO: 62170
  chr1:237947070-237947802
  hypo

SEQ ID NO: 140011 - DNA, 46 bp, Homo sapiens; identical to SEQ ID NO: 15622
  chr1:238017557-238017603
  hypo

SEQ ID NO: 140012 - DNA, 30 bp, Homo sapiens; identical to SEQ ID NO: 62172
  chr1:238080341-238080371
  hypo

SEQ ID NO: 140013 - DNA, 521 bp, Homo sapiens
  chr1:238081766-238082287
  hypo
tgtcaggcggctattcgccccgtcaaaggcaaaattccacttggtggtgatatactcacctcctacgttaaagcctgtgaaggggtgggaggaactctgcatacagcaatgattatggcacaagctatggcctctattctaatgcctggacaattctctggccaatgcttcctatgcggccagaagggacttgcaaaaagaaattgccctcggcgtgcaggtcgcagtcctttacatcaccaacaacaacaacaaaaaacttttcagcaacaagacgccccaccttctactgtatgcccacgatgccaaaagggctttcactgggcatctcaatgccattccagatttgatattgatggcaatcctttacagccttttaaaaatcagggaaacgggatgaggggccggccccaggcccctttaaacaatggggcattcctcaactctcagcccctggcgtccagccagacgggagccttcccagttcaatccattcaacctccaccccaattcccacttca

SEQ ID NO: 140014 - DNA, 30 bp, Homo sapiens
  chr1:238110205-238110235
  hypo
gcgtaggtgcgtgagcgtaggtgcgtgagc

SEQ ID NO: 140015 - DNA, 28 bp, Homo sapiens
  chr1:238296987-238297015
  hypo
acagagcgagactctgtctcaaaaaaaa

SEQ ID NO: 140016 - DNA, 30 bp, Homo sapiens
  chr1:238973517-238973547
  hypo
caccaaggttttttccgttgattgcacatt

SEQ ID NO: 140017 - DNA, 163 bp, Homo sapiens
  chr1:239138491-239138654
  hypo
ttctccattgtccagcgtgttcacgttgtagacccttcacactcatcagtcacttagtagccatctcggttctcagatctactgtcgtggtatggcagtgcttgtgttcaagtcaccgttattttactacatactggctttaaaacacaagcgtagtgggccg

SEQ ID NO: 140018 - DNA, 83 bp, Homo sapiens; identical to SEQ ID NO: 15624
  chr1:239509032-239509115
  hypo

SEQ ID NO: 140019 - DNA, 30 bp, Homo sapiens
  chr1:239542078-239542108
  hypo
ggaggttgcagtgggcggagatcatgccag

SEQ ID NO: 140020 - DNA, 30 bp, Homo sapiens
  chr1:239824985-239825015
  hypo
gcggtatttttaaggcggtgaaactatttt

SEQ ID NO: 140021 - DNA, 17 bp, Homo sapiens
  chr1:239935451-239935468
  hypo
tttctttttttttcttt

SEQ ID NO: 140022 - DNA, 19 bp, Homo sapiens
  chr1:239977198-239977217
  hypo
agagcgagactccgtctca

SEQ ID NO: 140023 - DNA, 122 bp, Homo sapiens
  chr1:240048928-240049050
  hypo
agtgtacttcagcgacgcattcattgtgttgtgatcacaggcacacctgctcagtgcttcccatatacagcgaccaagccattaatcctccctaaattcaacacctgcgctgaccttcccct

SEQ ID NO: 140024 - DNA, 201 bp, Homo sapiens; identical to SEQ ID NO: 62178
  chr1:240064134-240064335
  hypo

SEQ ID NO: 140025 - DNA, 30 bp, Homo sapiens
  chr1:240112586-240112616
  hypo
aacagtcacagctcccgttcccgtctccat

SEQ ID NO: 140026 - DNA, 172 bp, Homo sapiens
  chr1:240118848-240119020
  hypo
aggtttccaattacccgctgtgccccacctgtggcagagtaaacctacttcctccagactcgcatggcagggactgaccaagaaggaaagcggccctcactccagggttccgtggtgatacctgcatcagcacaccagcccgggggtctgcactcagcggggtctcaggcca

SEQ ID NO: 140027 - DNA, 27 bp, Homo sapiens
  chr1:240187923-240187950
  hypo
gggcacagtggctcacgcctgtaatcc

SEQ ID NO: 140028 - DNA, 31 bp, Homo sapiens; identical to SEQ ID NO: 15626
  chr1:240216145-240216176
  hypo

SEQ ID NO: 140029 - DNA, 23 bp, Homo sapiens
  chr1:240233155-240233178
  hypo
cttttttttttttttttttgacg

SEQ ID NO: 140030 - DNA, 1220 bp, Homo sapiens; identical to SEQ ID NO: 1242
  chr1:240254938-240256158
  hypo

SEQ ID NO: 140031 - DNA, 30 bp, Homo sapiens
  chr1:240308605-240308635
  hypo
gccgctgagggccgccgctgggggctgctg

SEQ ID NO: 140032 - DNA, 42 bp, Homo sapiens; identical to SEQ ID NO: 15628
  chr1:240372832-240372874
  hypo

SEQ ID NO: 140033 - DNA, 30 bp, Homo sapiens
  chr1:240483169-240483199
  hypo
ctgtttcccctcccccgcaaatgaaacatc

SEQ ID NO: 140034 - DNA, 84 bp, Homo sapiens; identical to SEQ ID NO: 62184
  chr1:240641238-240641322
  hypo

SEQ ID NO: 140035 - DNA, 26 bp, Homo sapiens
  chr1:240713294-240713320
  hypo
ccatgtcaggggcaccgattgttttt

SEQ ID NO: 140036 - DNA, 22 bp, Homo sapiens
  chr1:240908226-240908248
  hypo
cgtctccaaaaacaacaacaac

SEQ ID NO: 140037 - DNA, 320 bp, Homo sapiens; identical to SEQ ID NO: 62186
  chr1:241051969-241052289
  hypo

SEQ ID NO: 140038 - DNA, 25 bp, Homo sapiens
  chr1:241253065-241253090
  hypo
gaggaagaggtgggcagatcacgag

SEQ ID NO: 140039 - DNA, 46 bp, Homo sapiens; identical to SEQ ID NO: 15629
  chr1:241271634-241271680
  hypo

SEQ ID NO: 140040 - DNA, 20 bp, Homo sapiens
  chr1:241343386-241343406
  hypo
aaagtgggccgggcgcggtg

SEQ ID NO: 140041 - DNA, 151 bp, Homo sapiens; identical to SEQ ID NO: 15630
  chr1:241434338-241434489
  hypo

SEQ ID NO: 140042 - DNA, 1249 bp, Homo sapiens; identical to SEQ ID NO: 37018
  chr1:241519637-241520886
  hypo

SEQ ID NO: 140043 - DNA, 85 bp, Homo sapiens; identical to SEQ ID NO: 15632
  chr1:241541311-241541396
  hypo

SEQ ID NO: 140044 - DNA, 89 bp, Homo sapiens; identical to SEQ ID NO: 15633
  chr1:241559202-241559291
  hypo

SEQ ID NO: 140045 - DNA, 29 bp, Homo sapiens
  chr1:241559530-241559559
  hypo
gagactccgtctcaaaaaaaaaaaaaaaa

SEQ ID NO: 140046 - DNA, 777 bp, Homo sapiens; identical to SEQ ID NO: 37019
  chr1:241587077-241587854
  hypo

SEQ ID NO: 140047 - DNA, 34 bp, Homo sapiens; identical to SEQ ID NO: 105307
  chr1:241588236-241588270
  hypo

SEQ ID NO: 140048 - DNA, 81 bp, Homo sapiens; identical to SEQ ID NO: 62195
  chr1:241647321-241647402
  hypo

SEQ ID NO: 140049 - DNA, 203 bp, Homo sapiens; identical to SEQ ID NO: 62196
  chr1:241753208-241753411
  hypo

SEQ ID NO: 140050 - DNA, 50 bp, Homo sapiens
  chr1:241755368-241755418
  hypo
tggatagctcacttccggaatacaacatgtttccccgcaaaggccgtgga

SEQ ID NO: 140051 - DNA, 162 bp, Homo sapiens
  chr1:241809725-241809887
  hypo
gcacacatcctcccgcgtgggccgtctagcctgtcctttagacagaaagaggttcatttaaaaccctctaaacaccctcttacattggaacattaaattatcacaatacctatattccaaggaagtcctttgcaaagtataggggagcgaggaatggagaca

SEQ ID NO: 140052 - DNA, 30 bp, Homo sapiens; identical to SEQ ID NO: 37023
  chr1:242034247-242034277
  hypo

SEQ ID NO: 140053 - DNA, 130 bp, Homo sapiens
  chr1:242121114-242121244
  hypo
agctgagcggctcctcggagtctaggagcctccctgcagccccggcgcccacctctgggcaggctgagcccggagacacccgggagcccggcgtcaccaccagggaggtgacagacgctgaggagcaaca

SEQ ID NO: 140054 - DNA, 30 bp, Homo sapiens
  chr1:242121523-242121553
  hypo
ggcgaccagcgaggacgaggcggcggcgct

SEQ ID NO: 140055 - DNA, 88 bp, Homo sapiens; identical to SEQ ID NO: 62199
  chr1:242153593-242153681
  hypo

SEQ ID NO: 140056 - DNA, 30 bp, Homo sapiens; identical to SEQ ID NO: 62200
  chr1:242202218-242202248
  hypo

SEQ ID NO: 140057 - DNA, 905 bp, Homo sapiens; identical to SEQ ID NO: 37024
  chr1:242686694-242687599
  hypo

SEQ ID NO: 140058 - DNA, 423 bp, Homo sapiens; identical to SEQ ID NO: 1250
  chr1:242687610-242688033
  hypo

SEQ ID NO: 140059 - DNA, 163 bp, Homo sapiens; identical to SEQ ID NO: 1251
  chr1:242688080-242688243
  hypo

SEQ ID NO: 140060 - DNA, 447 bp, Homo sapiens; identical to SEQ ID NO: 37027
  chr1:242688277-242688724
  hypo

SEQ ID NO: 140061 - DNA, 145 bp, Homo sapiens
  chr1:242689620-242689765
  hypo
gaggcaacagtgagccgatatcgcactgcaccctgggcgacagggcaagaccctgtcggaggtgaggctgtgaaaactatacattccattgtatagcatctctgataattttgtttgtttgttttgttttgtttttgagatggag
